United States Patent Application Publication US 2020/0157537 A1 - sequence listing, part 9

SEQ ID NO: 17597 - DNA, 1104 bp, Mus musculus
cttagaagttatttgttcaagaaagtacttatagtaggggttgttttctttaattgagttcaacaaatggttttaacttttaaatagaaaaacagaaagtaaccacctatacagttttgctttcatctttttctcagtgaccccgaccatgaagaaatatttagaccctaatctgattaatttaaatgactggctttgttttaattttgtccttggtattcatgagttactggttaatagatttagagaatgacaattaaaaaatagatttaggagtgattttttaaaaaatcttttaaaacaagcagacttagttttaaatgcgttagtttatttattctaagacagtaaatcacatttctagtgagccttgcagatttagatctacataattattcttagttgctaatttttggatagcggtaaacacttaaactttaaataaaccatagaaactgttgtcactagtgctcaaaaggtagaaattgtagccgcctgcggccacgtgaactaggttccccagaaaggcgggctggagctgaaagagatcagacagcaaaaagaacggggccaagacaaaccttgctgttcaaagcctctgaagtttactgagagagtctgtgcttataaagagggtaggtaggcccatcccgccagcccattcttggtgcctggagccagcccattcttggtgcctggagccagcccataggcgatctccagggagtgtctcaggaccgtcccaaggatctttcagcaggaagcagagtcttggagaagagcaaataagagccatcaagatcagaaggctttaccctaggtaatctccttcttagtggcagcaaggtcaaagtctggatcagcctgcttcaaggctgagggaggctacaagaaattatgtgtaatatatcattccttactaaataagataaatcaattaaggctgataattttgctttttacccacatgcagtctgatattcagtgtgtttcattgcttcatttgctctgcacattctccaggaagttggcatctaaaccaccttctgagtctacattggggtgtgtctgctgatgattggttaagtatagatagcttgtgga

SEQ ID NO: 17598 - DNA, 1154 bp, Mus musculus
tacttcacttattttctggttttgtgtttccatgatttgggaagagaagatgatctctttaccccatgaatatgccacccacctcataaatattcatagaaatgtctaaagcgtatatgttagccctacagtgctgctaactcactttttaatgttttttatttttaatcattttattcatttacattttaaatgatatctcctttcccagttaactctccacaactcccccatcccacccccacccccacccccaccacctttgcctctgtgagggagctcctccacccactcacccactcctgcctcactgctctagcatcctcctacactgggacatcaaacatcccaaagaaccaacggcctcccctcccattgattccagataaggccatcctctggtatatatgtgtctggagccatcggtccctccatgtatactctttgggggtttagtctctgggagctcggagtggtctggttagttggtattgttctttctacggggttgcaatccccttcagctccttcagtccctcccctagctcttccattggggtcaccaggcttgtctgatggttgcctgtgagtatctgcatctgtattggtcctgtgctggcagagcctctcagggaacggccataccaggctcctgtcagcaagtgcttcttagcatcagtgatagtgtcatggtttgccgcctcacttttgagtcaccccagtctccccacttctttggagtgcttccttgctttgctgtatcagctttctttaaactgtgtcttgcaactggtatatttgcttccaaaaacattagagagaccacatacatgccccctgcccccaataaatggtcattaggtttggattatggaatagttttcccttgtacaaagaaggaaatcattgtatcctcccttcccacactagtgaagtttagaacaatacccacatttatctaattttaaatctcatatcctttgaactaaattttttggtttctatgatggaactagattccaatttttaccttcctgttgtttatataagtggtttaatttcatctttctattaaaaactttttaaatactatgagataatttgagagagtgttatagatcttatatgaaattaacatgattttatagtgcttt

SEQ ID NO: 17599 - DNA, 1175 bp, Mus musculus
ttgttattgtttgttttgttctgtttttgagacagggtcttgcccagtctggtctcaaatttgcagattctcctttctgcctttcaaatcctgagattatagtcaggccccacccaacctggcttttgcgagggtgggggggtagtcactgggaaagacaccttggagatattaacagttgaataatgaactcttaaaaagcagtggttaaaccaacggggggggggggaatctataaaactagtctgaattaataaaagccttcagatcacacaaaaactggcagttcttgatatatttggaactggaaggggaagtgcattgatgtggatagaggtgcaagactaatatgttagtttaagtctttttaaggagcagtagggtatttccattagtttccccatttcactctcttgagtgattgtgttccccaagtttaaaagactagaaagagcacagaggagaaagaagagaagaaaaaagaaaaaaattagaggcttattttgacaaaggtttttttttttaaatatattcttcgaatcttttgcgctttgaaccatgttactgttacctactgaataaacaaatgtccatgcacatggatgataatggaaattctcgtgccagtgatatgctgaaaaatgaaagctctcacaataaaaggggatctcagaaattatagtagctctcagtgcttccagcccttcaggtcagttgtgacttagactgcgctccaggctttaatttggctttaagttttctcagactatcttcattataggattctggctgaaaatgaaaaaaaaaatcccgggatagattttctctgtggttcagggtgaaaaatcagttcgaaatttctagaaatctgccatagcttaactcaaaagtagaagtttgaaatgttttggtagccaaacccagagtcgataggatcacatgacaaggactattgttatatgaaggagagaaaaatggaatgattgatttaatagcttcagggaaaataattaaaaattgttgagattgtatcaaaaaaggaataacaaaggaacttatttagtagaaattaagttgggctggttaagaatggagattcttataaatatattccaaatatatttttaaaaggtatagcatcttgttttggaatgaactactttaaggtgtctgtg

SEQ ID NO: 17600 - DNA, 1183 bp, Mus musculus
gttaatgaaatctcagttaatggctttgagtactgagtgctgataaaattgtgtctcttacgctaatactttggaaatcatttgacagctattacaatgatgggcaacagatgaggagaaacagttgtgtaactccagcccgactgcagagctgatgcctttgatgtgtgtgatgcaggtgtagaaagacaattttcttagtgtttctattgctgtgatgaaaaccatgaccaaagcaacttagggaggcatttggctggtgtgtcctgaatcccagtccattgagcaaagtcaaagcaggaactcgacagggtaggaacctggaggcaggacctgatgtagagaccatagagaaatgctgcttactggcctgctccacatgggttgctcagactactttttaatggaatccagaaccagtagcccagagatggcactgcccacaatgggctgagtcctcccacatcaattactaattaaggaaatgctctacaggctcccctacagccaaatcttatgaaagtattttctaaatcaatgtttcctcctttcaaatgactgtagcttgtgggagttgacacaaaaatgagccaatataatgataatatttgttatgtggcaggtgtgagtgttattgtgtggcaggtacactcaagtgcatgcatgtgtgtgtgtgtgtacgagtgtgtgtgtgtatgcatgcacaccattgttgaggtttgttgttatttaaggtttgtgtttattcatatgcattaataaactttaagttggatgtagatgttggatgttatttaaggtttatgtttattcatatgcattaataaactttaagttggatgtagatccagacattagaatgtctataatttaacctaatttaaggttcttttgttaattcttttgtagacttagtttatatgtgagcgtttatagacacatgtttcacttgggcatgcttattcagacgctggtagtgagggatgcccacagcagaaaagctaagacggtgattgtgcaattactgggttttacacaatcattgaatatcttagacaacttggtatattcttagaaagttctgataagcaaggacatttgttttactactgagtttatctaaaactaaaagtaaattaattcatgtttttgcccacattggtagcgtctcattcattccctc

SEQ ID NO: 17601 - DNA, 1840 bp, Mus musculus
cccacacagctgttatgtacaggactgcattaggacatcagctggttttattaagtctgtcaataggaacagattttgtggtacaaaacacaccctgtagttctctagtaaaaaagcctacataggattactatggttggcttcaaatatacaggcaggtaagcacagaaccccgcccttctaaagttaaaagtagataagcaatctggacaaagggtttcacaaaatccaatacaatcaaaacggcttcaaagcaaaaacacaaatgcatttaatttgaaaagcatcgaaacttgaactacttaagcatgaagcgacttattgatacttgatccctagcatttattacaacactttaattcctaaggcatcatctgtccttaaaaaatgggggcagtcaaggtctagtttttgctcatggttaaaactaatttaaaattatctttctagtctagttgttctttcagtgctaacagtatccacctcccatcgttgctttcctgaataactctcaggattctccaaaaagcagcagaaactactccagaaactgaccttttctctaggtgcagataggtgacttaggtcattgatcctgatactcttgacttggcacgtggttgtgaaatagctacaagaagaatataggtctggagcgaagtctgatgttctagaacaaaccttgtttcagggatatagttagagagcacttggcatccaaagtttccttatccacggtaacatgtgctgtgagatgtcacatttgacttgtctcttaatggagtcatgtgttaacaacagcactgatgtcatgttggcaatgtccagctcactctgaggaagactttgtattttcaactctgagccgtttccttttgtgaaacctccaagcaattaggtgttggaagtgtgagttacatattctggaagtgtgagttcaatacttgagctcctctttagcggctcttgttttccttttgctgccaaggtgtgactcatagccgtctatgatgctgctctttcacgtcgtaggtttattccaggattcaaatcagtaacttggtgattacaaggtgctgagtatgttggaaccattgcaatacacctcaaagggaggtgtcggattttgactttttaaaaaaaattttcatttttctcttgaatttcatatccatctatccactcatatatgtttagcctacagaattacaaactagtcctgtttctgaagaggttctttagcttgaaatgtaaaggactgaaagatttgtaggtgttgcttttgttacttcacactggaactttgaaaatgttttcatcaaataaagttttgttttctacttttaatcctatgaattttaatgtctatgtttaagttagcgtgtattcttgtaactgtgtgaagcagatgataatttgctaattccatgtaatcagtgttataagaaacatcttacaatttttataatcaccggaacaatgtgaaaagccaataacttccattccatgcttgctacttttcaagtacttgagcactgattctctaatccttcacaacgtgatttaggaattttcttatattaattaaaaaaaaaaggttggaatttttgtggttcaggcatattttcaatataaactgcttttaatagttcaattgagtatttcaaagcaataggtttgaagagctaagaggaaagaatacaaatgcaaaataagatgtaaaccttaagaacaaagtgacagctgggaaaataagatgagtttatttcctgtacactaatcatatgctttattgaaatcactgacagacatctgaccacttaaaacttaagcttacaga

SEQ ID NO: 17602 - DNA, 1171 bp, Mus musculus
gaaaactgacaccaggatttgctttcttgttgtctacaaaaacaaataagaaaaaaaaatcaaaagtggaattgtgttttatgaaataggtaaaaagtattttgccttacttttgcctatatagtgtggcaaaataaaatttccaaatgaaaaataaaacctagggtactttgtggctctaagttctatgaaaaggcctcactgaggtaataagggttgtacttagccactaatagattagctactacagagctaagccctttagaactagtgagcggattttaataaaatgtatcactgtgtttatgatccagggttctcttgttcatcttcccagaaatacacggtcacactgtgaattgcatagtgagaaatattttgctttctctcaggtattcaaggtaagaaagtcatggatgtggattcagaatctcttccttcctccagcaacgtacacagtgtgtcttccaacctgaagtcatcaccccacgagaaagtgaagccggagagagagccagaggccgcgcctccttctccaagaactctactggctattcaggcagccatgctgggaagtagctcagaagatgagccagagagtagagagggaaggcagtctaaggagaggaactcaggggccactgcagatgcaggttccatctcaccccggacctgtgcagctattcagaaagctctggatgatgataacgatgagaaagtgtctggcagcagtgatgatctagcagagaaaatgctgcttggaagtgggctggagcaggaggagcatgctgatgaaacggcagaaagaggtggaggcgtgccatttgacacagcgcctctcacacccagtgtgactgaggtaaaggagtgtgtaaccagtggcagcagtgcaaacggacagacagactcagctcattcatttacaaccgcgagtcaccgatgtgatactccaaaagaaacagtgtctcttgctcgtgccgtgaaagaagcatctcagataagcagtgaatgtgaggtggagggtaggccagctgccctctcaccagcattcataggaactccaagcagtcatgtctctggagtcctcagtgaaagggaacccaccctggcacctccgacgacaagaacacattctgatcaggggatagacatacaccctgaagatcctgag

SEQ ID NO: 17603 - DNA, 1143 bp, Mus musculus
tgagaaaaaatatctaatgcaataagtttgcagccagcctgaggtacatggagattcatcctgagatacatggagatcctgtctaagaaggaaaggagggagggagggacaaaggaaggaaggaggaaagaagcaaaagagaacattaagttgaaaattgcctgttattttgaattaacaaatgcccttttacaataaaacaaaacaaaatatagctaattatttagcactacattcctgaaaatgcattctataaagtaacataattctttctgaaaggaaataaacaccatggtggaattaaagtctcagactcattctcaactgaaacaagaaacctatcttaaagatagcaatggccaaatatccttttgattcctagggacagtctgactccagagttaacaggcatttatctgccacgttaacccactttttttttttacttttttattagatattttatttatttacatttcaaatgctatcccaaaagttccctgtaccctccccctgccctgctcccctacccacccactcccacttcttgccagctctggtggtgcaggccggtaggatttgctgaaggaggcagaggcaggaggatctggagttcgaggccagcctgggttaacccactttctaaaagaagtaatttattttggtcttcctgatgaaagatgaaacattttttatgaaaatattaatagggtcacatgcaaaagaagaagtaaatcacatctatgttcttaccatcaggaatgctcattgtcagcccttcgtctgcactcccaaggctttgctggggtctctgagatactccaataaatattagcagtgaaatgcagtgttctatgatcacttgtctatcctttttggctatgttcataaagaatttcaccaaaagtaattacacacacacacacacacacacacacacacacacacacacaccttttcatctttccatgttgttttgttgttacgtataaagttttatcagttgcccccacaaaatggtgactacgtattcaacaccacatactaaatgaatgatttactcattatctagtgattttagaattcagccccagtcctggtcaaataatattgaggatagaacattaaaatgctcttttccca

SEQ ID NO: 17604 - DNA, 1163 bp, Mus musculus
agccccttagctgacctctggcttttcacccttgctgttactgcaaggtgtccttagctcaataggctgtggaaaaaacagggatgaggaggaacgacttccagctcctattttacccacaaatcgtggtgttattaacgacataattcttgcttaggctttgctaattctgaggttgataattctcctttaggagctgcacagcactcagaactgtgcatactggtttgtgattgtacaaattcagtatgggcaccgcttggtgcagagatacttactgcaagggaaggtccggcttgaccatttctgagtttcctgtgagataaacccggtttgaaagaggttggtaccaaattttggttaaaaataaaaaatattctccggctctacctcgcctccccaaaaggtaccaagagccacatgtgtgggttttacccacgggaggaatcgggtccatgtccacccaagccaaggttaaaagcccactcatctacggatgagaaaatcatttgatcacctcagttaagcgttgccttatttaacttaattaataggggggagagagattggagacttactattgaaagggcaagcccttcactgcctcccacccaaataaaaaggccaattggccttgtactacaagagccggtcactccttctccctgtttcccacctatcttccaaaaatgctaaggaattcaacttagtgttattttcacatcgttcagtcaaacttagccagagttccaaacgccctacttaaaattcaactagaaagttacctaccaagtactaattagcattataaagtcagagtctgcagctccaggcctttcagttagttgtttactagaaaggacagtcttaagccagatacagtttaccataagaaaagttaaagattcccagtgaagcaagttttttctttagccctagattccaggcagaactattgagcatagataattttcccccctcaggccagctttttcttttttttttattttgttaataatagggaggagatgtagtctcccctcccccagcctgaaacctgcttgctcaggggtggagcttcctgctcattcgttctgccacgcccactgctggaacctgaggagccacacacgtgcacctttctactggaccagagattattc

SEQ ID NO: 17605 - DNA, 1491 bp, Mus musculus
caccgggccattttccaaatctgcgtcagaaaagatgcctcccatgttggtatctgataatatcagtctctccttatcagaggagagaccttttatttttaacatgactacagacctatttttagataagttttcagtacaattttgaactacaacttttttaacaaaacatcttccagtattgggaaggttattaaaaaaacaaaaaacaaaaaaacaaaacaaaacaaaacaaaacaaaaaaaacaatgtttgtaggcaagtccactgctgtcattgtcctttgtctcccatagccccttctgagctctcctgtgcccttgaggtttggggctatctgtagtgtagaatgggtgttttgtgaaactggaccagtctgccttgccatgagctgttgaagaaaactcctgtcctcctctcccctccctacccccacccccacacacacatcccactctcctgtactgtggtccacatggagatctcaggagagaggcttccgacacacaggctcatccatccatcctcctgaggggagacagtaaagcaatcaggggtgccctgggagtttctggttgtatcggatgcctatactaagcccccttagtaagatttcaggtccccattggctgggaaagaaagctgtttgtttttcttttgaaccatggaaagaccctcttttgtgaagacgttaggaaaaagaaagaagggacatcttcagaccacggttctggtttctgctacacaatgtgaaatagctcggagtgtaaccctctgtgacggtcgctgtctcaggaataagcttgggggtctccaatgcttggggattcttggagtctccaaggtgataatcacaagagttttatttctctgttaaatgtatctgtactgtttttaattaaactccaaatttcatttaaaaaaaaaaaaaggatgtttgaaagtagctgggtgtggtggtggcacacgcctttaatcccagcactcgggaggtagagcagacagatttctgagtttgaggccagcctggtctacaaagtgagttccaggacagccagggatacacagagaaaccctgtctgaaacagcccccacccccaaaaaaagaacgcttgaaagcagttcactgatgatccctgaagcatcattctcagtcccttccaatcatcagtgactattcaccatttcccccaaagattccaagtcgtgtggtgaaagtgcttggtgcaaaagagaaaaagtcttgaaggaagagtgttatttttatgatgaaatagcattctatgaaacttcacattaggagacgttagtgaggaagagtgccctgagttgaataagcaaggtattgttataggacgtatctctagatggttccccactgaagagaactgaacattgtctccagcttgcaacctctagaagtttgcactatgcactctgataacaacataaacttggagatttgtccacaaaaaaccttaagttgagaaa

SEQ ID NO: 17606 - DNA, 1234 bp, Mus musculus
tgtttggatatattttcctgtttttctttaaggacttctacctgtttggttgtgttttcctatttttctttaaggacttataactctttagcagtgttctgtatttctttaagtgagttattaaagtcctttttaatgtcctctaccatcatcatgagatatgcttttaaaatccaggtctagatttttcagtgtgttgggtgcccaagagtagacgaggtgggagtgctatgttctgatgatggtgagtggtcttggtttctgttactaagattcttaagtttatctttcgccatctggtaatctgtggagttaattgttatagttgtttctggttagagatttttcctcttgtgattctgttagcctctatcagcagatctgggagactagctctctcctctgagtttcagtggtcagagcactctctgcaggcaagctctcctcttacagggaaggtgcacagatatctggtgttcggacctgccccttggcagaagatgaaggcctgaaacaggacctgtcccataagctctggtgcttcagtctgtcatagaagctgttagcttctttagtccacactcttacttgtgtagactagtcttggagggatctgggaaccaagatggtcccccaggtcctccggcaaagccctccagggcagattggacacctctcctctggcagggaaggtgcccggatgtctggagcctgaaatggggtttgtctcagaagctgtcctctaggggaccttgggggtgtccaccgattctgaacccaaggtgacctggtgctggagctgactggaagggacttgtgaccctggtcaggtcgggtttccttttttcctaatgctgtctcaggtccctcgtgattggattagaacagaagttgtgttccacttaccagtggtcctaagatcatgtggagagtcctctaggggaccttgggtgtgtccgccaactccacacccaaggtgacccggtgctggtgacgactggaagggacttgtgaccctaggtaattttactttttgctgatagaaaataatttttaagtaggtaccttacagtcgggaattcgtagggaaaaaaataatctgctggaaaaatatttcccaactaaatgacaagcatgagattcatgtccaattaatatttttcctttttctttttgttctgaaattggcataatatgctttgatttgtggcctgggactgtgagcaagaggtta

SEQ ID NO: 17607 - DNA, 1105 bp, Mus musculus
tgtgacaggggagcctctggagccacacagaaatcacactgggcaaggaacagactcgggatacagaatgtcctcagccattcagcaccatccggacaagctcttcatagttgatgcaaccattgctgtcctcatgccccgccactagcatctctacttcttcctttgtcatcttctcgcccagtgtgactaggacatgacggatttcagcacccatgacggtgccatttccttccttgtcaaacacacgaaggccttcaacataatcctcgtaggttccctggtccttgttcttggccacggtctgcagcatgggcaggaagtgctcaaagtccagcaccttcacattcatctcatcactcttggggttccccaggaccttgagcacctcggcgttggtagggttctggcccagggcccgcatcacatccccacactggctgtacaggatcttgccatcacctgttcggtcaaacagcttgattactgccggaaaaggtccagcagagctcatcagccaagatgtgtgacttcaccgaggaccagaccgcagaattcaaggaggctttccagcattggtattattctaagcaaaatgaaaatgaggttgatcattgaagaataagtattttgttgctcataggttaacacagctatgtcaacagtctatccctacacatggtgtgggaaaatgagtttaagcaacttttatccagatagtcaatgaatctattattttcaaataataagcctgtagctattttactatgtaaaaaccaggatcattaatttttttccaaatatgactattttgacaccccaacatgcaagtcaggacttccatctggacaggagtttgcaaaggacttttaacaagcccagcagaacccagaatttgctttctacagaaatgacaaacacgtgaggaactactgtgagtcttctgcttgtcctgggaattcaggaactcaatgtgttgttcaaacaaacttgtgtaagacttttgactcaagaggggaactcatctctccagcttctcaacagttctctaagcagcaaggttacattgtttacaaatctattcaccaacttactctaggatagg

SEQ ID NO: 17608 - DNA, 1175 bp, Mus musculus
aacttaggatacccaagatataagatacaatttgtaaaacacatgaaactcaagaagaacgaagacaaaagtgtggacactttgccccttagaattgggaacaaaacacccatagacggagttacagagataaagtttggagctgagacaaaaggatggaccatctacagactgccatacccgggaatccatcccataatcagcttccaaacgctgacaccattgtatacactagcaagattttgctgaaaggacccagatatagctgtctcttgtgaggctatgctggtgcctggcaaacacagaagtggatgctcacagtcagctcttggatggaacacagggcctccaacagaggagctagagaaagtacccaaggagctaaagggatctgcaaccctataggtggaaaaacaatatgaactaaccagtaccccccggagctcttgtctctagctgcatatgtatcagaagatggcctagtctgccatcagtggaaagagaggcccattggttttgcaaactttatatgcctaagtacaggggaacacaagggccaagaagtgtgagtcgggggaggagtaggagggcatgggggacttttggtatagcactggaaatgtaaatgaagaaaatacctaaaaacacaacacaaaacaaaacaaaacaaaacaaaaaaacagacccaaagtacactgcccacaagaaacttagttcaaccacaaagacacacagactggcatgaaagagtagaaaatgatatcccaaacaaatgtaatccaaaccccagaatgagtagttacatataacaaagtatactttaagactaagaaaataagagtcaaagatcactacataacaatcaaggaatcaattcatcaagaagatatattgtttgtaaatagttattcatgtgatatcagttatcaattttataaaacaatactactagataaaaatggagaatgggctccaacataatagcaggggatgtcagtacctcatgcccaccaatgaactgtcatccaaatgatgcatctacacagaaagatcaaagttaatccacacggtaggtaaatggattctttacttacagtacattgtacccaaacactctagaaatatgaaaggccatgtgatgtgcatctgcacagtgttactacacagcttttttg

SEQ ID NO: 17609 - DNA, 1187 bp, Mus musculus
tagtaacgagatgtagtgtgaacattttccattaacagtaagtcagtggcttcaatgtgattatggtcctgcaaggtgatacttactaaaatatctaaatattttgttgttgtatctgaatcattttttttaatttattaagctggaagtgatgaagtgctgttgtttccattgtcaacaatggtgtgtcattttatatatgttcctaatgctcacggaactctcccaaaatcaagttattcagaaagtgtgtggtgtgttttcattgtctgtctcataacactgaatcttcattggtactttaaagaggccagaataaagtcataattaagaacattaagtttatttaagccaaagcaaaatttaaacggtaaaatgtgttttattcaatctaacaagaagttgcaagagatgatgccacattcagattatgagtttagttgacacagcagtgccacaccccgtccaatccagtgttccttgggttggtcagagggaagaatcatggcaatcacgaaatttgtggagtggccagtggtggagagtgtacccctcctctcgcttgtcttatacagtggagcaacataacttggtcgtttgggtatgtctgactttttgcatggctttagccacatctggaagaaagcacaaacacctctaagtcagagccattaaccgtcatgtactttagctactgtgatagttccagagtaaggttatgtctaaaacctatgccctacatagattgtattttttgtcaacagtgaaatgattgtttgaatataaagatgcccaacaatctcagaaccagtatacaaagagaaaacagtttgcctctgttagaaacatagtgcccactcctgtatgctttcgatattatttggtttaattggactagccttggaaatgttaccatttttactctttttctacaaagaaagtattcttaatgaacttaattataacacatacttagttgtggtttcttaacaggttgtatgcaaaatgtttttacagtaaacagttactttatacaatactgcattgtgccataataaagactagttgcttaaaaacatattacccaactgttcatcacctcttccatgggggtgatttctggtgcttttagtaacaaaacaaaattctatatatttaccaaagagagatgctactatttatactca

SEQ ID NO: 17610 - DNA, 1250 bp, Mus musculus
gagcattaggaacatatataaaatgacacaccattgttgacaatggaaacaacagcacttcatcacttccagcttaataaattaaaaaaaatgattcagatacaacaacaaaatatttagatattttagtaagtatcaccttgcaggaccataatcacattgaagccactgacttactgttaatggaaaatgttcacactacatctcgttactatagtatttctaagcacaatcacagctgattgaatgcagtgtggtatacaccaaaatccttatggtgacagcattgtacaagtaacattggtgacctccaacaagcatgttaaaatttggctagttaagtggtatgttggagccaaacagaaatgtagtagaattaggattgtctagtgagacctgaaactatatgctagtatgatgtaaaaattacataatggtagaacactatcaaaatactagcagcaactttaaaagccccccaaaatgactaagaaaatctagcaaataaagataatgccatttgtttgagaatataaaactttggtctatggccataccaccctgaatgcacccgatctcatctgatctctgaagctaagcagggtcgggcctggttaggacttggatgggagaccgcctgggaataccaagtgctgtaggcttttccttatttataatagccagaagctggaaagaatccagatacccctcaacagaggaatggatacaaatacaaaaaaaatgtggtacatttacacaatggagtagtactcagctattaaaaagaatgaatttatgaaattactaggcaaatggttggacctggagggcattatcctgaatgaggtaacccaatcacaaaagagctcaaatgatatgtactcactgataagtggatattagcccagaaacttagaatacccaagatataagttacaatttgcaaaacacactctctctctctctctctctctctctctctctctctctctctctctctctctctctctctctctctccctccctccctccctctctctcccacctccccccacacacatgcacacacacacacacacacaaacatggaggggaagtgtggtgaggatggtaagggtacccacacgtagtacccatgtgtttcatagtgcatatgccaccaataagtctactgaggacagatgatagagctatgaaatatagacctctacctggacttagataagtttcagcaatacagctggattttt

SEQ ID NO: 17611 - DNA, 1099 bp, Mus musculus
gtctgtgtatttcctgcttcatattactcaagaggaaaatgacttaaggtatggcccccaaaatacagaatacaatcaccaaatacaatggaacccattcataaaaatctgacaaagaagtcaatttgcttttcatgtgtgtcatttacttcaatcttaacacatgtctgtgcttcttggtgactgcaaaatggtaaaatttaaatagttcattttaaaagtttcatgttaaaagtgaagttcaatctaaaaacaagtttcgctcattgaactcggaagcagcagcagctgtcgtgcattcgtgtggtctcatcatcagcacagccgggcctacacacaagcaaccatgtctaagggacctgcagttggcattgatcttggcaccacctactcctgtgtgggtgtcttccagcatggaaaggtggaaattattgccaatgaccagggtaactgcaccacgctgagctatgttgctttcatggacacagagcgattaactggggacggggccaagaatcaggttgcaatgaacctcaccaacagtttttgatgccaaacgtctgatcgggcgtaggtttgatgatgctattgttcagtctgatatgaagcactggcccttcatggtggtgaatgatgcaggcagacccaatgacccatccagcaggtccagttattcgagggtctcgaggggaccttctcctaagaaccaaatgggggggggggggttgagagacaagaaccttgtgtaatgaatgacacacggaagcagtctgagtaacatcaaggtcccaatgtattgagcaaggcccaaggcttaaatacgaaagcaaagggggaagtgcctttcagaaggaggggtggggcaatagaactgcacaagcaaaaggggaagtacttatcagtgggaggggtggggcaatagaaatttttcttttggcagctacacggggaagcaggaacttagtggtatcagggtgtggtcaggacatctggcgctgacttagggctggaacattctgtggttgttctcggaatggtgtgtcggtggcccacttttgacccccttttcttcttggagggagaggcccaattcagagat

SEQ ID NO: 17612 - DNA, 2656 bp, Mus musculus
ccataccaaacagaggtccttaggaataccagtcaggctgtatcctggagcccatctttgtaaacagtcatagtgctgtgtaccaggagcccctgatcagctctttgctgggttatgaccgttgaggtgacattcaggtaaaacttttaaatggcagagacccagcattgtttcagtcttgctgccaacaggaatccagagggcatgtttgtgaaacatgtatgttgtttatgcttcaatattacggggagtcagaaggaaaagtttttgttacagtaaaaacctagggaaaggaagaaaaagcagtgcaataataataataggcttactaggactggatatctgaagttgccagtctgtaagccttttagattttaagtgtctttgttaaggtgtgtttctcctttcagcttccagaaatgctgcatggagatggtgaccatgaggagcatggcttctgtccagttgggcagttcattcttcagaatttaggactgctgtttggattcgccatcatgctggttattgccctctatgaagacaaaattgtgtttgacatccagttctgaccattcccagcatctctgttgattgcgagaatgctcgtgcagcttgcctctgttccttgtactgtatgcacgtcgctcagagaatccagtggcctgcactatttacaggttctgtagatttgagcctaaccacgaaagactggtgttcagtactgttttctctgcatgaatgggtcttttaaaagtttgcgataaagtcagaacatggaactccgtgtaccaatattgatagaagtttaagagaatcatataaaacactagtctttttattagtagaaacttctgttgctatgcagaaatagaaattaaaccaaaaaaatcatttaaactttaaaaatattttaaatggacattgagcagacatttttgcgtgtgtgctatgaatgattttagtgccctctattcagctaaatacatacatatgggattaatagggatcaacttgacacaactttgaaactgtataaagttgattttaggaactagagggaagcccaggctgcactagagtatggatttagcattggggaaagcccttattcttgaatctagagttactatttttgtatatatttgcatagtgttcaaacttgcagcctaaactactgaaatttgtgattgtatgtttgtgtgaacttcagtttaatgaaagattcataatggttctttgcatactatacttggtgttggatttttctttttaactttgtttttatggggggggtgagtcagaggatgtagtcagatacctttttcttaacattactgctctagaaaaatatcaaacaaatggcattccatttccctagtactaactaggttaattggaaattttaagttctgggtgttcatgttattttaccagtttggcatttggaactcggagcacatgctgtggctggtagtaaaagccaagtttgccatgcctatagtctgtatatagaatgtcagctaaatgcttactgcactggtaccatagctactttggtaccaagtatatgactaagccaaaatcacttctatcattttgtgccaagatacactgctggtgcctgaaatggagcggtcagtgtttgggtgcctgctcttacaccactggggcagtgatgtgtgagaagtctaagtcacgtttcgtctgattgtgactcataacttgtagactagtcatgtgcatacagctgtttacatcccatgccacccactcttcatttatacaggcaaatgtctgaaccgtgtgcagctagctctattttaactgcttggcagccaggatatcccttgggaaaaaccacataagagccaaaccctggcctttccattttaaatatttttattcagtcccttctctggttcttttcctcttactctgattttccttttaagacaaaaacaaaaatttgagggcaacacatgcgaccaggtgtcagaggtcaatctccaatatttctttgatatgttataagcaagggttatttggtcttacagcagttgtctctttctcagccctccttgcagtaagtggttttgcacacaagttttcagcactgggcatgcctatgacagtcattacttcacctcattgcttggccctttgagcaaccttgctaaaaggtgctggtgtgctcagtgctgtcaacttcaagtgactgggatattttgctttcaaaaccaagatacacttatccttcagttttgagtttgattttcaaggagggttgtgcattccagcattacatctccttcatttcaaacaactgcgggaatatactcccactctaaaatgcttcacaaagctgttatgcctacaatatacaaagttttatattctcaaacaaatggtattatctttatttgctagattttcttagtcatttcagggggctttaacagttgctgctagtattttgatagtgttccaccagtatttagtttttacatcattctagtgtatagtttcaggtctcattagacaatcctaattccactacatttctgtttgactccaacattccacttagcttgactagcctaattttaacatgcttgttggaggtcaccaatattacttgtatgatgctgtcaccatg

SEQ ID NO: 17613 - DNA, 1200 bp, Mus musculus
acacaagcaaccatgtctaagggacctgcagttggcattgatcttggcaccacctactcctgtgtgggtgtcttccatcatggaaaggtggaaattattgccaatgaccagggtaaccgcaccacggtgagccacgttgctttcacagggacagagcgattaattggggatgcggccaagaatcaggttgcaatgaatcccaccaacacagtttttgatgccaaacgtctgatcgggcataggtttgatgatgctgttgttcagtctgatatgaagcactggcccttcatggtggtgaatgatgcaggcaggcccaaggtccaagtggaatacaaagggagacaaaaagtttctacccagaggaagtgtcctccatggttctgacaaagatgaaggaaattgcagaagcgtacctctgaaagactgttaccaatgctgtggtcacagtgcccgcttacttcaatgactctcagcgacaggcaacaaaagatgctggaactattgctggcctcaatgtacttcgaaccatcaatgaaccaactgctgctgctattgcttatggcttagataaggtcggagctgaaaggaacgtgctcatttttgacttgggaggtggcacttttgatgtgtcaatcctcactattgaggatggaatttttgaagtcaaatcaacagctggagacacccacttgggtggagaagattttgacaaccaaatggtcaatcatttcattgctgagtttaagcaaaagcacaggaaagacatcagagagaacaagagagctgtccgctgtctccgtaccacctgcgagtgggccatgtgcaccctctcctccagcacccaggccagtattgagattgattctctctatgagggaattgacttctatacctccattacccgggctcaatttgaggaattgaatgctgaccttttccatgacacactggaccctgtagagaaggctctttgagatgccaaactggacaagtcacagatccatgatattgttttggtgggtggttctaccagaatccccaagattcagaaacttctgcaagacttcttcaatggaaatgacctgaacaagagtattaaccacaatgaagctgttgcctatggtgcagttttccaggcagtcattctatctggagacaagtctgagaacattcaggatttgctgctcttggatgtcactc

SEQ ID NO: 17614 - DNA, 1101 bp, Mus musculus
caagtagataaacctggaaatgagtcaagggccagatttagtccagattgggtgcatatacctgaattagtctagacatcagacttcctattatagatggaaaggaattaagaaaacattttaaagagacataattcacaattttaaaacatacatttttctgtagtaatgcaatgtattaaattttaggagattactgttctaatttaggtaaagaaaaaaaattaactagaaagagaaagtcattttgtaaagcatacccctaaggctttcagaatggttcttagatgtagaaacagaaaagaggtagtagaatgatagagttgacaggcttcaaaatataaaatactgaattgttttttaaaagaaagtattccttagagacagaagagacaggagcaggaagcatgaatgagcaggagtctgccagcatatttacaaaacatgcctttttccctttgctatcagctcttaaaatacgttttttctcctgcaataatattggatgtagaagcaatagcctgctcagtaggtgtaagctggctgttgtcatgagtttttactgaaactgtcagggacaagaggaaccagctacttattgaagaaagatacttttaaagtctctttttaaaaaatcttagaaataattctatatttctgaacttcagatcacaagaattccccaagcattttatgcaagaaaaatatctaacttttagatacaaaataccagtttcataggtttttttttttcatatttgtcagatgaataagccagtgtgctttccaattagttgtttttataaccgtgtagtgaataaaatattctaaatgctttccaaagcctgaatttggtgcaatgataaatgcagtcagacacttctcagatgaaaattatgcttttcaatgcactgtctaaatgcatgaaatgaaaagcaccagtcctggtggtgttagggtgagaatccaaccagctctcactagtaggagatggtaagttcctatgtgctgctttacttgctttcacttgtattccctttaaattgtaaataactgcataagtatggtgccactgtatttccttgcctgcctatttgaatt

SEQ ID NO: 17615 - DNA, 1208 bp, Mus musculus
tgactctgtttagagattgttcttctggtgattctgttaccgtctctcagcagacctgggagacagattctctcctctgagtttcagtgctcagagcactctctgctgacaagctctcttacagggaaggttcgcagatatcttgtttttggacctcctcctagtcgaagaagaaggccgaaaacagggcatctctcagaagctgtgttgctttggcagttcccagaagctgtcagcttctgtggtgcagactctcccctgtgcagactaaattcctacgttccagggagtcctggaaccaagatggcgactgctgctcctgaggctgaggccgcctcccgagccaggcagacacctgtcctctggtctggacggtggccggctgtctgcagcctgcaaagggtactgcctcaggggctctgtgcttccgcctgtcccagaagctgtccggttctctggcgcaccctctaacctgttcagactaatttcctaagttctgctgagtcccggaaccaagatggcaaccactgctgctgaggctgaggccgcctcctaagccaggcggacacctgtcctctggtccggatggtggccagctgtctgtggcccgccaagggtgctgcctcagcggctctgtgcttctgcccgtcccagaagctgtctggttctctggcacacactctaacctgttcagactaatttcctaagttctgctgagtcccggaaccaaaatattctttaatggtttttctaaactaatttctgagctttggatatgggaatcttctccttctattcttactattcttaattttggtcttgtcaacatgttcagatttcctggacgttttgtgtcagaaacattttaggtttaatattttctttaatcaatatatcaagttcttgtattgtgtcttttactcctgatagtctctcatccatttcctatattctgttgacaatgtttttgtttgttgttccagttaacttacctatgtcttccttctccaagattccctcagtttgtgttttcttaattgcttctatttccattttttgtgtcttgaacagttttgttgttgttgtttgcctttttgattatatttccctgttttcctttaagggatatattcatttcccttttaaagtcctctatcatcttcataagattaggtgtaagatcatattcttgtgcgtcagctgtgtta

SEQ ID NO: 17616 - DNA, 1220 bp, Mus musculus
aaaccatctggttctgggctaactttggtacctggtgtctgtctagaaaatcatccatttcatctgtattttctagtcttgttgagtataggcttttgtaatagtagctgaaaaaattttttaatttcttcagtttctattatgtctcctttttcatttctgattttgttaatttgaatattgtctccattacgtctggtttgtctggctatgtgtttatctaacttgttgatttttctcaaagcactgtcttctggttttgttgattctctgtacagttatctttttctacttggttaatttcagccctgatttttattattcctgccctgaactcctcttgagtgtatttgtttctttttgttctagagcttttagatgtgctgccactgggtttgaatgggctttgacattccaaaagaccaggctaaacttgttctctctctctctccttctccctctccccatctctccctctctccctccccttttttcccactcttgctctctccccactgtttttccctccttcctctatcctctgtctctgtctgtctctctgtatttccacctctctgtctttctatctgtctttctctgtctctgtctccccccccctctctctctctcactccctccctcccattcctcacctgacttcatcctgttcattgatgtagcctcttagatttgtcttcagcatcatgcctacttgttgtctcatttcccaccatgatgctcattgattaatctgatgtgtgtgatggctattcctgattgtgaacttgactacatctagaatgaactacaatccagaaatggagggcacaaccatgatccagttcttgaagtttaaatatacagacttcttactctgatcttgaggcatagccccatgcaaggtaaaacacgcctttaattggaatcacaacttctgctggagacctagacaaggtcaatggtggaagaaagacatactcttctttacatgcttgcattaacttgtgggtataactgctagtacctaccacttcaggattcctgtctataaaaaagaccaggggaaacagctatccctttggactaagcaactactagacttttgtacttcctatttatagctgcccatgttgtcttagttggattaaagtctgtaagtcattacaataaagtcccttaatatatagaaacattccataagttctgtgactctagagaat

SEQ ID NO: 17617 - DNA, 1690 bp, Mus musculus
ggtatcacttgaaaacctgtccctgtttcgagggtgagttacttaagacaccagcttatatatagcctctgtgagtctggcttctgcataaactttgtaatgtttgtcataatgtttaatggaacttgtcttaaacttgaatattgccacctgaagcaataaccaccccaagccagaaacttggacagcattgtcaacatttttgagtattcctgatctaggaatggcttgactccctagagtgtctgcctgccataaggattttttcacagacagaatcagaatcatcctaaactcttgtttattgaccagataaccaaattcttcatcagaattatggaataaaatatgtaatataacaagtaatttttagaagaaaacggtttaagatgatgctcttaacatttgttgcaaacattgaagtttacattgaagaaaaatttacaactgagtccctgaatgctttatttttgaagttaccatgttaaatattgaagtgtaattggagggattgaagagagctataacacctttattggacagtggtctcattgatactagttgtatttttgaggcagggtctttctctgtgcagccctggttggttggaacttgttatatatatatatatatcaggtgggtctctgaactatagattgacctgcctctctcttcctggagctgggattaaagttgtgtagcaccacacaaggctaatctgattatttttaaaaaaatactcatggtagttactatagcaaatacaaatcaaattaaattcatatagccatgtgactaccagttgcaagtagtcgggtagaagtaggcatttcctttcttccaggaatgtgtgtgtttaaagtttttgaacaagtcacatagccttactagcaaaagttaaatggctcaagaagtgattatacttctgttgaggtgggatttgtgtgatggaacatcacttacagtgggtgattggtaatttttttcattgttagtatttgtctctccttaaatattgtctcttgagtaaaacttgctgtaatgatgacatatctacctacttatttttactttcagtaaacatggagagcccagtccattttactgaagttgtattcatcttcagcttgactgctccctaactctgtacctgtcatttctccttacctcatattgtaaaataagtaagtttctgttcaacttgtatagcatttgaatataatttgtgtcagattttgatctaattcattttaacagattttcagtaagcactgcattaggctctgtgtggagattatcatagcattttgagaagtcacaaggaatttggtttataggtacagggctttgacatttgtcattgttcatatattaataattatagctaatttggccttatgattttttgtttacatttctgaatgtttcaaaaaagttaagggttaagatagcttgtgttttgtgattatagatgttttgaataaaaataaatgacaaactaatcttaaaaatttaagatataggagtaacagaacttttatttgtggtacaatatggtgttaaaaggtgattctaaagaaaggatttgaactttgatagattttaatatggtgaggtatatctcagtgggccctcagttctgacttcgttttcatacctatgatgctgctaggcaagttgtgatgaggga

SEQ ID NO: 17618 - DNA, 1996 bp, Mus musculus
tactgtcagcttatcctaccctactgggacatggcgagcttcttttttttttttttttttttgcagctagctgatgacatgtgggagcaaaatgcagtcagttctcatcaaacatgggacggaaagggttaatgagtacccaccacaatcagtgtctgttatagaaagggagagctagtgtccctcgactgcgccccccccccccccccgactgccacttttgtgtgcgcctgagtgtgtttggttctcttctaggttcctggtacagttcagacaggacaaagtatgtgtgaagtttattcaaggcaaccagaaaaatgggagcgtgccaacctgcaaacgaaagaacaacagactccttgaagtcgctgtcccttaagtgaggcttcctctctgctctcacggacttgtttcctcgtaacagtgcaattttactttgttttatttggggttcactgtatgtttgggaattgccaaaggctaactgttagcgtcctcttggcacaattaaaagtatttgactaatgagttttaattatcagaatagttcattcctaagtccacattctgtcctgggcagaattctagaaattaacagtgtctgtctccatggtttatgtgttttctccttagttacctagacttgtgtaccctaaacccacatattacccataaatcactagtacatgtcagcacaggaggggagcttacagtcagttatcagatatttattgaatgcctactttttgctgggccctgtgctgaacttattcggagatttctatttttaaagctgttgccttctggctgatttgtgctgtggaagcaacagctaagaaagttgaagagattgggtcaaatgagactataaatgacggccactggtaggaacccagtagtgtggcgtaaacagtacactcactgagaagtagaggtcctgggtggattggagataggtaattgggtagaattctcctgagaggtttggagatagatgattgggtggaattcctctgtgtttgtttgtttgtttgtttttcataaatctatttgaaaaagagataaccaacatttaaacatacacatttattggttcagatccgttttcactttagaaaaagtcactgaagcagggctgtagaatgctttgttcctgttccagagaagcatgagataggaccctggatgtgcacagtgtatccacccagggtcattagcttttgaaactgcatgataagaagaggctgagagccgttcagactggcagatcttctctttgatgtgcaataaaacatccaagatcacttttgaaagttttatttataatatgcattttttttgtatgagagagctgattggtacaaggtgtgtattttagtcagatcaaaattaagttagaattcgttttcagggctttttgattttttttcttcaaaattaacaataaggattcattttggaaaccacattttaaactctggaattaaattgtttcttatttgggaggataatgtaaatacattgggattatgttaataataaaattgttctaatttggtgccatttgctggattacaactgtatttttgtatctcaagctattttcatacgttagtgtcaaagtgatgtgtcacagaaaggatttccattcagatattatatggtctctgtgttaacagatttccactgatctttttgtaccactatcagtcaatgaaaaagttctctggggattttcttttgatttttgtacttaaaaagaaaaaaaaaaagttctgataaagaaattctccgaagtcttcgtgtttattggtacaggaaatggatatgatcattttttacagttcctaaagtaggtaaattcataattcctgctataggtagatggaaacttcggactgatcactggtattttgaaagcatatacttatagttagctaaatatacttacaacagtcaaaaaaccctggtcagtaccaaaggctaccaactgtcc

SEQ ID NO: 17619 - DNA, 1137 bp, Mus musculus
cagatacacatgcacacatatatcctgattcattgtgaaaaatatttcaaaacaaaacaaacaaaacaaaagaagccctcttcgtccgttataaataacaagatctgccttcagcaaactcccatagccagagcctagaacttcaagaaagaacagaacttgctgcaccaattagtgctaggccgtagtatgaacaaagcaccgcaaataaactccacaggcctttagacagaaggttgtgtttgtaattaactccaacgcactctcattaccccctccccagagctccacccagcccagcgccctgcagggctcccgttcccagtctggtttccattcgagccccgcccccttccccttgcctctctgggactgtgaatcaatcccatcccgggcaggaaacgggacccggggcagccccctccgctgtggcggaacaaaggagcggagcgcagctgcactcgcagggcgatccatcgggtccggtcgcccctccgggtgcgccgcggccggggcacaccgcacctgaaccccactccccaggacgccccattgttccacctccgcctccacctccgcttctccttcccacaggaagccataagcttgtccttccatagaacctggggccgggaaactccagtgggccagagggatggagggggatgcgagtgggcccgcgggaagcagggttccccagtgcccgtaggtaggaagccaataacacaaagtgagagaacaacttagtttgtaagccccttccctctcctgccgcccccgaagccacacggggccgcgatcaccctcgacgacctcgagcgcgcgtgggttcacggtggagtgcctccgcgccccacaggagcgccccgggagctgatgacccgggattgcaggctgcggctgagcctggggccgcgcgcacaaaggcacgggcgggaagggagccggcacgggggagtgcagcgtacctcgcccggcaaccgctcggccactccgtctccgcgtgctgctcgctggccgccgcctggggaacgcgggtcagatccgatgcggggcttgtgccacagttgctgccggggatcccgcgccgctcagccgaccgtgcgttcagtgcacccacaccgcgtccgccggctg

SEQ ID NO: 17620 - DNA, 1220 bp, Mus musculus
tttttctgttccttcagttgctgtaaaagaaggaaccgaatggcaggttaatcattagagttgatgtgtttattcacagatcagttcccagtcataactagaaagaaaggtgtgacaacctcctaggaacaagagggggaagtgcctcttcctgaagcctggcgaagtgtgagtaatctgagggaggggacgccccagaacctaggtctgctgctcctgcatgcaatgggtgcccagcaccttcagcagcgatttcatggcccaggcacacgaaacagcttctgcagtcttccagcctctgcagtcttccagaccaggctcagcacagcaggctgacctagtctcctcgttcagatttcaatccttgagatttaaagggccaatctggacacgctcagatttccaagctggacggaggccctcgcctcacatgtcactcccgagctctgaaatctgtagctcaccagctggtacccagccccaacactgggtttatggagaccagaggaaagtaccacccttctacccaatggaacgaggcctcctgctcttgcagcattcgtggtcaagctgctacacacttggaaggcaggagaagtgaggactgaagtggggaatggtttccttagaatgctgctggaacctcaggggctgctcgcagaggaggcggcaagtgcttatataatttatgcacatgcaagtttataaagcactctactgaggtccgtacagcccctgtcaaaacacacagccaggagactcaggagatgaagaagggaccagcatcccaccgtcgggaaagtatgggggtcaatcctataagacttccaaaggaccagagatgcatcaagacatcaaactgctctgcctaccaggtgtcggaactcagctgccagacttccgttggtggattcttccatgttcatcacttttgtgtgcgtacccaagatgttgaacttccgaaatctatacaacgcaagacacaaatccttaaagtgcttcaaactactaaacaaacaggataagcaaagtagggtgcagatgctatacctaccctttaactgtgtttttctcgttcacatctctgtaaaaaaatatgtaaatttgaagtaagattcaatagatacaaaacagatgcatatgattacacagtcatataaataaaagagaaaatgaatacattggctgcgccgggggagggggggaaactccctgtggtt

SEQ ID NO: 17621 - DNA, 1099 bp, Mus musculus
tcctaggactttctgttttctttggatagattcagaaaagatagtcttgtgattctactgatcttttccaatgaaacaggaggtctggaatcaggacctaatgcaggcagtgggcactgaggtctgcctgctttcctttttcctggtggttcatttcccctgagggatggggctgagaaactgatcaagggggaaagcactttgcagccaggaaagctcaagcagggcagcaccagctacagggatttaggcagtaggatagttagtggggaagagacgggtgggggtgggggagggggggatggagaacccaagctcggaggagcagtgcacacccagaggtggggatctgggctccaaacaggagcgaactgaagcacagcacattccctggagggctggagggaagaacagcgcgcagcatcttggtttcctttcaagaattgcttgttctaataaaacagtgtttgtctatcttaaaggaaaagcagaaagcgagccgatctttaatgacctgatctgtagcctgagcttagttgtgtgtgtgtgtgtgtgtgtgtgtgtgtgtgtgagagagagagagagagagagagagagagagagagagagagattatctatctgcagacaggccttgctttgcttaagattgaaagcttttagagaagtttgggctagagttagcccctgatgggacatggatatccacaagaatgttgttactaaatagtgaagaccgtgtttggttttcctccttttaaagcaggagtgtgatgcctttaaaaaagtatggcaggctctctgactccccctgggctgtgtctgccttgctttagtggtctctggggcgcctgggactcactggacctcactggtttcctccttgtagaacctgacttccatgccgtggagccctacacgaaaaaagaactttcagctgttactttcccagatattattcgcaactacaaagtcatggctgccgagaacataccagagaatcccctgaagtatctgtaccccaatattgacaaagaccacgcctttgggaagtattattccagaccaaaggaaggtgagtgcctgagcgatctggggtg

SEQ ID NO: 17622 - DNA, 1276 bp, Mus musculus
atggaggaatgtttctgtcccgggagacattggcacttcccctctcctggatggccggaagtcttccactgttttacatatggcacagttcaaagtcaactttagatccaatgctctatcaaactatagtgggcatccttcatgtgagtgggaagaaaacaaccgtgctccttactgcagcttctgccaaggcatggttgctctcctcagggactagctttgttggtggcaatggctacacaaaactaaacaccaacagaagtaagaccattttcatgagtactccatcaagttaaagggtttttgttgtctttttggtcatggattgaataaaattgtctttgcacatccattaagggggccagctttcttaaagcaatttttctttttttttaactaaaattagatataggtgaactcatgttttttagtgggctgaacttatcggttttagctggttgtcttaattagccataaacttggagaaagcagtgacttcttgaatccttagccaaatatgagtatcagataattttattatttttttttcgagacagggtttctctgtgtagccctggctattctggaactcactctgtagatcaggctggcctggaactcagaaatccgcctgtctctgcctcccgagtgctgggattaaaggtgtgcaccaccaatgcctggtgagataactttaaagaactccctataaatgcatgagaaccactgttactgatgaatgtggttttttgacaactacattcacaaatggcctgtcttgtgttttgtcaccgttttgagggatgatgttttgtggcacgtgtgtgatcacagcctgatggttctggtcgtgggttggttcttctgggccagctttcacagactgctgcgcagctgcacctacagtgctgccccataatactgtttcactttggtgaagatcagcccaccttacaccccgagtgcaggtgtgaaccacggtaagtgtgcacagtccttagggaaaacagggacgcagaggcctgcctcctctcttttccatgccaaaatgaaatgaccaagaaacaaaacatttaaaaagttgtttctaaatgctgagacctaaccattgcttatatactgttgtctgttgaaacagtttgttacaatttcattctgttgaactaggtgagactttaagaaatgttgaaattatgttaatttcctattattatttaatataaagatatttaaaatgtctagtgttatgagttggtttaatatatatctcatgtat

SEQ ID NO: 17623 - DNA, 1188 bp, Mus musculus
gctttcagttaccaaagttataacgatatatttaggaaaagctacaaataacacttactttgaatcctgctgtcaaatgtctgcatcaagatagcacccctttgtgggaggccctgagtatcttctcttcctctactgcctaactgttggtgggctgtatcattcaataagatcacttcattttcaacttagacccaccgtttcttttttgttgttttgttttgtttggtttggtttggttgggttgggttgttgtttttggttttttcgagacagggtttctctgtgtagccctggctgtcctggaactcactttgtagaccaggctggccttgaactcagaaatccgcctgcctctgcctcccgagtgctgggattaaaggtgcaaactaccacgcctggcagacccaccatttctttgctttggaaaggtaatttatgattaacttagataataggtaaaagcgaccttacaaaaaacataattatctaggagtcccacatactggacctaccctattatacctccaagagataaagggtatgttagtgaggacttttgcacacaagtgcatgcacacttggcatacacacacacacacacacacacacacacacacacacacacacacggacttcttggaaactgctttatgaagaaactgctttatgaaataagcaaaattctcaagtgcacagatactagcagttatgacagtaatacagcgtcttctgtgaccctcactacctgcactgcttgcatccctgctttatgcctggtggcacattattcacccggtaacctccagctgctttgatcctgtttcagtcaaagtcagcttcagccaccccctccattccctagccagctccacccttgatgaaactgtggctaatgttccttcactaggacaggcaccatgagtgtgtttctaagttccagagtctgtggggaggatggtgggtgggcagccagccctgttgctatgttgcttcttccacaccccctcaagacaggtgcataggtggcactgggaacatcctacgcagggacaacctccaaaattaatgggtgaacatggtttttttggaatcaactgagataatgctatttcaatagcggctggctttttgtgattcagtaacttaaatattgccagtgactgaggatcccctccagtcatggtt

SEQ ID NO: 17624 - DNA, 1134 bp, Mus musculus
gttcgaccttaaagcctttgggctaacttaagtattactatttgtatttaaataattacatggtgggttttagaaaggctggctgtcctgcccctttggtgttcatatgcattccccagcctgatgctttaaaagccttgccactgccctgcttgtggacactaatcatctctttttcttgtatccagagtgactgtgattcaggtaattgagcaccatgattggaaaaaagattttaggtttatttcccctccatttttatgtgtacattttgttgtttcattcagaagttggatttactttacaaaatgacttaattttcatattgtggtcatgtttgtgtaaacttcaaactattttgttaatttttggcacttcctatatataattctagtaatgcttgaatgtacacttaaatatgaagtaggattaagtcagctgctgtgtttaaagaatgctgttaagaacaagcattcaaaactgtataggaaggtattagcttaagagtaggtaagataccgtgactgtatctgcagacaagaagaggaaagaaaagctttgccagtttgtggatttatcttaattcccttcagtatattcaatctcttttcaaataaagctctttgagaagtacccagtattgttgggtttaatttttcctactattattgattcttgatattcaagcatttacatgacagcgtatttttttcttttccttttttctgtttatttttttttgctatcattaacatttcatttgaaatgcatactcttcttgaaatattttgtttttagcataaatgttgtgcattttatcttagtgtttggattaaaacatttgtgttgttgagctttcttcatttgctttgtatatttaataatgtatctttattttccagtatgcctattttttgtattgtacaataaatttattttaagctgattttattgttttttttaatatatatgtaaaaacacctgtgatatttaaagtacaaaaaaacagcaaaacaaaacacttggggttttaacttagaaaaaaattatcttatctgaaaaaacatacctttatgaagattgcctggaaaagaaactagaaaccagaaagtcttcatttgagttttaactttt

SEQ ID NO: 17625 - DNA, 1218 bp, Mus musculus
cgtattggaggtggtcgtagaaaagcttcaaattgtctttataacaaaaacaggttccatttattctttcagaaaattctgtttatgcttaatttatttaaaaatgtccttaatgtgtgaatgttttgcctgcttatatatgtgtgctataactaaaatcctcgcagaccagaagaaactgttgtattcctcacactggagttacagacagttgtgagctgccatgtgggtactaggaatcaaattggggttctctgaaatagcagtcagtgctcttaactgctgagtgttttactttcccagattataatttattttcagtcttcaaaaacttagcaatagaaattacaactaaatttctattcctgtcctgatgtcagtcctcttcctgtctctttggtctgttacactagtctgcaagtagttgctagaggtggtggtgaagctacacaggataaggcgtgatctgttgaaatatgaataaaccagtgaatatctgatttcttacatgtattctgtgtaactctttacaggatcttgtttctctgtgtaacttccataactatgataatttgagacactttgcaaaaaaacttgatcctcggagagaaggaggtgatcaaagggtaagccagtccttccttagatccttctcagtgtcctctaagatgagcaagcagccctcctgcttacgtaaacgtcagcttgttaacagcctcaagtctttgccaattccaaataagttatttttattgtccgtcatagatactaaaatcatttgtaatatttaaacaaaattgttagcttagcagtgctggttttaaagctaaagccttgtttttactccaaatatttgtcagttattgttcgggattaaatttagctcattgtctagtttgtgcatggatatgtaaatagataggttcataagactaaataagaaaaaggccactggagataacagtttttccagaatgtttaatgatatgattttgatggtggtaataagaaagctgtactactatatgctaaatacccgtaaggtcttgtttattatcacagtgtgtggccccatgtgcataaacatttctttttttttttaagagttagtcttaagatcaagacttgagtttgtttttttcattgggccaaaggacttgctgttgaaaattttaactctattcttttacatcataaaattaccttgtacactagaaa

SEQ ID NO: 17626 - DNA, 1181 bp, Mus musculus
aagcttattctgcagtttttaaagtgataaactatcattatctaaagttttatctgacaaaccactttctgtaaataattggtatgttattatccactgattttgacagctggttcaatttttctttaaatattgggtcatcagtattattggactcttgtttaaggctgttagatcaggataaaacctagaaaacatgattgtgccttgtaagaatagtaactaggcagcaagtcagaggactagtggtgcggattccaggttcagcaaatagacgttcatttctgctgttgtgcagccttgggacgactcgtaacctcttcgagcttagtttctttctccatctgtggagacaagatagtgtcagcaagtaaatttctttagtaccagaaattatggcatatttctgtcaccagatcattaaattagaatggattaaattagaatgtttataaaacacttagcacagtagtaattttcagttaattattgtaggtttcttttttaaagttgtctaaggtcaaagatatgtcaggatatgtcattagatttttataaaggttaatttttaaacatactaatgttgataagtgttcttttagggtgggttttttttttttctgtttgtttggtatttttgtttttttaaattggggccagtgaggtgaggtgatggcttaactgataaaagcacctgccaccaaagcccagacacctgagtagagtcattggcacccacatgaagggagagaactgactcctgaaagttgtttcagacccttcatgccccacgcctacttgtatttactaaaaaaaaaattttctaaaaaccttaaaggttggtataacagtgttttgaaaacaaatatagatattaatgcaatattaatatttcttttaggagaaattctatgttttatgtataaatgtacatgcttatgaattagctattttactgccttttataagaggtgtgtatgtgtgcatgtatttggacatctaaaaaggtcttttcaatagtacagaaacaattatcaacagacatgatccatttgttgttttttaaacaagaataatatacataattcacccatgaaagttgctattatgactattccagaattgatggtatttaaaaatgagaattcttcatcttattgcttttctgaaataaacaaaca

SEQ ID NO: 17627 - DNA, 1179 bp, Mus musculus
cttcaatggagatttcaacaaaaccaacagccatacttcctgctcttggggtacaggacaaaaactgaccctgactgaagtatccgcgaggaatccaggtctctgtataggtaccccaccttccactcacaaacacctatgcggacaaattcagtccgtgtccagaacagaagctaattactatcttgtaccttccccggttggatggtgggcttgcaatacaagacttactccctgtgtatcagctaaggtttttaattcatctcatgatttttgtgtcatgatccagctgttaccccgcgtatattatcaccctgcatccagtttaaaagaaagctatgctggccggcggtcaaaaagagaaccaattactttaaccctggctgcattcatgggaataggtatggcagtaggagtggggacgggagtgtcagctttgatagaaggaagacagggaattcagtctttgagggatgctgtcaatgaagacctagcggcaatagagaagtccattgacgctttagaaaaatctttgacctccctgtctgaggtagttttacagaacaggagaggtcttgatttgttgttcctaaaggaaggaggactgtgtgctgcctttaaaaaagagtgctgcttctatgcagatcatacaggaatagttagagactctatgcagaaactgagagaaagattagagcgaaggaaacggaaacgggatgctcaacgggggtagtttgagtcgtggtttgaatcacgaccatcttggataacttctttaatttccgctgtagccggaccaatccttatgatatgcttagctttagttttcggcccttgtataataaatagaggaatggctttcatccagagtaaaattgatacagtaaaactcatggttcttcaaaggcaatatcaacctatagttcaggtagatgaagagttaggggacaccaatctctaaaattctatgattagaattagtctaaacagaagaagaggggaatgaaaggaaataaaactgtaattcatgtaatgtatgttaaatagcccaaagagttgtttctgagctttgaaacctggggctgagaacatagcagaacagaccaggacatgcccgggcaggcccatcgcctccctatctcccacccctctgacctaagttaaatgttacaggctgct

SEQ ID NO: 17628 - DNA, 1651 bp, Mus musculus
tttagaaaagttcactgaactttgtacatctctagcaaatctatttttatatgcatatagtatatagtgagcatagttctttgggacgcaaagctgttgctgactactgcatactgagttgagctttaaaatgtctttgatgcaatgggctgtgagaatgagcagaagtgagaggctatttcaaagactccaagcaactcagtatcctaagacatgacagacaaggccttcctaagcagacccttctatagcagcctctgatgctggattttaattagacttgggttctaattagctaatggaattaaaaaaaaaaaagacaactcaccagattcctaagtgttaagctaaagagtactatttacaaacagcaggataagatttaagtgcctgggggagggacatgatgtttaaaacttacatagtaggtctgttttgtttgtgaaggagtaagtagggaaccaggaatgggaattctgggaataagaatgactttctaaagacttaagacaagaatcttagaatattcttctcccccaaaccatagtcatacactgaaaacttttgggtttgagctacaaactacaccaggtaccaccccagatagagggtgtcttgggtgactgcatgtagagcttgctcctagaaggaaagcagaggctgtaagaagccaagggatgcctgcctatatggaagggggatgctgctgtggttgaatgggggtcagtcatattgtggatggacaccagaatggttcgaaatggaagctcaccctagcctctaacataggagacaggatcagctgtacagtgaaggcctctgtgtgaccgttctgcctgcccctgcctcgggaggaaacattctacacctggatgcctagcttcactacaaaacacagcttggaatgatgggaacaattaagctgatggttacttttgcacttgaatggtactgcactgtcaacccccaaggctcattttaagtgacctttaaaatcagatgtatttattatgctcgtgcaattacagaaatgaagtgggagacaggctgagccccacctatgaatgtacagtatgtggattgtgaaagtgactgtagggaatcagagcgttgtatcttgtgtttacaattctggttgatttctttgaaaagctgctggtttgggaaatgcacagtgggtgtattgaaataaaaggtaaataccatttttaaatatttcgtaaatgaaaaacacgtgaccaaacaagagaacatcctctgctctgtaatgaatgacaccaaattcaatatgccttcgttacaaaatgtttactgtgagcgtcgatccaacagtgcagtaatttctagccttttgagctgacaccttcacgagtttgtggactttgtgactttttcttcctgttcttacagtgccatatgtcacttgaaaaatattaaagtgaattccaattaaacttgatttgagaattttataacctctcttgagatccttagaaatactcagggatgtcaaagctgaggctaggaatcactaccatagtgatttgtcctgctcctctctgcctgcaggaagttatgctaccctagagttctgtgtgaacccaacttggctcgatgctattaactagactattctttttttttaattagg

SEQ ID NO: 17629 - DNA, 1835 bp, Mus musculus
cagagaggttgttaatattagtgacagccatcattcagatacccattcattctgttagtttcacacacagtgctccattacactggtgattggacagctcacagaactgcaagcaaccactcctgctcctatgccttccatttagttcatggagcagtgtagtttccaatgtctatactgatgattcaggcaaaagcccctaggtcatgatgtttctcattcaattggtttctcatatgaagatgcctgttgcaaagtttcttgttatttgacaaatataattaagtatataaaataatatatatgttggtcagaacataaagacaaaatctacacagagatattggcaagtgggtacgggttgagcatttcaacttcaggtttcttctttgtctgagggttgagcctgcccagtccacatctacccagatgtctgctctctgttgcccctatgtttcacaactatagtttaagcaactatgatcaacagtttcatctcatatatatatatattaaaaatgttatcatactctaagagacctactttaaaatgtataagaactgtacacacacagtaagtagtggataaactgtgtgataaaataattgaacaaactttataccacattggacagtatcaggatatagtatagtttggccttgatgagaattaggaacctttcatgaggaatcagccctttttaatggctttatcttcaaacaactgagtctcgtttgcggtctttcattaaggagtagaggagtgaggagggtcccataaaacagatcactgaacaactcgttacctgctggacagagacacgtggaacatgtctaagggcacgagacctcccagtggcaactgcagaagtagaagtagaacatgtcctgttccttacttagactctcaaaatgccagtgtgtttcaccgcccttccctgctgtctctttggtgttgttgccttttgattacaagccttggatgctggtggaatcttagttgccttatcagttctttacaatctacctatggttattatcacttaaagcacaattttgaaggagacaaatatgattatcttaagcccaaaggaatttgtatcaagctgtctcaaacattaaaagtaaatgtacaaaaatcccatgatatgcagatcctagttaatcatcagcattggcatttgggaccgagtacacttctgaattacattattttggaaaccaggggttagatatgataaataatgtaaaaaaaaaaaaagtaatgtaccatagagcgtctatggtacattaaacgacccaggtatttcttccttggagccataaacactagctctaaagaattagctaccactttagtccccaaactcaagttttgttggcaaacttccttcactgtaggagttaacattgaagaggtatttttttcccagatatttttgtgaaaatggttttgttgtttgttttgggttttttgtaactataataaaagtctaattgcaattttctctcagtcctcatttaattgaaacaaataacttttggtgtggtccactgatgtttcacataaagattctattctgtattgctaaaatgtactaaatgaatgagtgtgtatctgtacagataaactcttgggttattttttcatcatttttattagatatttcctttatttatatttcaaatatcctcatttccctccaacccccccaccaccatcccaacccccctacctctgctcactaacctacccactcctgcttccctgtcctggcattcccctacactggagcattgagccttcacaatgccaaggcccctttcctctcact

SEQ ID NO: 17630 - DNA, 1173 bp, Mus musculus
tgctgtgatcggtgccctgatccttgaattcgcagaccgtctggccagtgaaattgtggaggatgccttgcagcagtgggcatgtgaaaacatccagtactacaacatcccatacatcgagagtgagggctcagacaccaccattaattgatgatactcaactgtgctctggatgtagtcggtgctagttaaatacataagttttcaaattcccatgtctatgatattaatgtaaggatgcttatgaggaaatataattttaagcaattctactattttatcaccaatgtatatctgcttgactcaagttttggtcacagaaggtctggaaagaggtcttgtgccacccagccattagctgtctgtcataccatgctcttcctggggcaggaatgacatcgccaaagaaaatattaaataaaaagtgcccaagttccaaatggttattttaaagggttgactttaaaatgactattttgttgatttatgccaaaaaaaaaaaaaaaaaaacaacataaaacaaaacaaaaggcccagaacatgaaagggaatttccttagaatgtaaaaaaattgaggagtagaactccagccatagtgatccatagcatgtctgttgtcaaaacctactgtgtcagggattgcccacttcctgacacctataacctaccattggagaggtaaaccaccagtggagagggctgccttgaatgtcgttctcagtaggaagtctatttttgtagatgtaaagggtagcaaccaccctcagcctcagggtcatgccacagctgtttctggatgatttaaactttgcatgttacagccatctttacagaatctttatagaagtcatgatagtttatcacattgaaataagaatctctttggtaccttttattcagtaaatcttaacaatgacagaaatttagtctgcaaggtgaaactttgagcctggttttcatggctaacaatgtataaggcctcactgcagtgctggtacaggggtagatgtgtacatggtatgaggacttgcaattctcctcccaaagggaccacctgtgtgcgaattagcagtcactcatgcccccagaacactcttagccacatactctactcctgaatggagaacttgtgtgggttttagcagtcatgaatgcccacagaatacttttag

SEQ ID NO: 17631 - DNA, 1177 bp, Mus musculus
gaggctgaatcctgaggggaaatgatgcaaatgaaagagaaatgaaagaatagacagtgggagcccagctaccagagaaagctccagacgcagtccagtcgtttctcttctattgctgttttgacccctcccccatcttttactgaaggtaacaaaacaacataaactagtgggtaaactgtccacctctttttaaagatccgtcactgcccgtatatatgagatggagatttttggcaaaatttcagggggataatatagctaagcacgagtcaagaaaatccgtttttcctttgaaaggggttttatttcctgacacagctatcttgtatgtatggatgggaaatggtattaagtatagcagaaaggttctgggaaaaatagtaacttcatatttactcttttctttctttttttctttttgctgtgtaagaaaaataactgtaggtacattatgagataataagggtactttaaactgtggtctgccctcaggcaatttcagtatgctgtccacacagcactgctgccagaagccaggttctgattggccacttcagtgtgaggaactcagtgtttggagttatatcctgctcctgtcagaaaagccgtgtttacactgagctgacttctgcttgtgtctcctcagtcctgccccagccaacaacctttcaacttccaagattacattcaggatgtctacttctctttgaaaagaaagtctaaaactttaaatttggagctcactccctaaaaaaaagtaaagaaaagaaaaagaaagaaagcagagaagacagtagagaaaggaaagatgtgtggtgatagagtttctgtctgctttagctggctgctgtaaggatgaaactgttaacccacacagtgcatacaggtgctcgggagacagaatgttttacttttctttaatgagtaaccaaactcgagttaaacacatcagcttatcctgaaaccatcaagcaaatactctgagcttgactaaaaactcatacgtccctgttgttgtcaagctgactttcttcctctttaatctgtgcagcttggtggttttgagggggaacgctttctctcttggtttatattactttaaacctctaacttccactttaatgcatccatcccagctttgattctgacattcattgtgtcaattctacacatc

SEQ ID NO: 17632 - DNA, 1209 bp, Mus musculus
tcctggtggaaatgctataggtggagaggcactacccatgtctgtggacacagattcccttagactctcaagtcaatttctttagcctttccttttggtttctgatacattctatctcatatccattaaaaaacaaaacaaaacaaaacctggaggctttttattcctgctaaattttgattgaaatccactatttcaatcaaaatttaaagtaggggttagacaatctcacaactatgctgtgatagatgatgatctgctaagctctgacagatgtaaactgtcacaaggaaagccatcctataccccactttttaaagcatgtttaattttaagctgaatttgtactagaagtcttctggaagccaacctaaacgccatagctattctttaagtagaccagttctttaataataaggaacttgaacgtgcaagtataattttgtgggtaccatttatataaagatgcttaataccaataactggcaatccaattaatcattaaagctagacttacctgatttttaaagtactttctgttagatattttaattgttttctaatttagatcatagagatgaatgacaagttaagaaacaggcaagaaattgtgaatggactgaacatatttttggaagaaaatggtatgtttgcttaagtgaatttacatttctttaaaacttaagaacatgttatttttaaaagaactgttctgtttttaacctgctttcgattcatctacagatagtgaattcccgttgtttaaaaatcaaaaccaccccagggctgtaactgccaaagtgacctcaagtcgccatagcaaatttatgtctctacatagacatcaacacacatttgtaaggtgtttatgacctactttaaagttcttttcaccttttccttgtatttcgacttagctttcttggtcatataaagaaattatagtattataggttatacactttatcacatacctagagatgataaacaagatttttttctctttataaacagctttctgtctgtctctgtctccttctctgcctccctctccctctttctttctcttccctgccccacaaagtctatgtaacccaagctagaccacaatcctgcttcagcatcccaggggctaggtgagattcccaatatgctctccttaacacatgcacataacttttatattatctgagattctattggatcagt

SEQ ID NO: 17633 - DNA, 1187 bp, Mus musculus
gttaaggggtggcctgtcattctgcctggtcatttcaggtaaaaatgacattaattttctattcataaatagtatagtctgtaatttgtcatgtagcagtcacagaatattatgagttttttaattgaaaaatatttcatacagtgtattctgacgatggtttcccctttcccagatcctccctacccacccaacctcacacaacatgccccctttctccatttcagtctcctgctctctctagctcttgccgtgctctcactctttaaaaatacaaagagtcaagaaacacataaatacatcacataaaacacaaaaccaaaaaccaaaatatacacacaaaaatactagtaagatcaaaaaatacccagtctacaaaattacccttgagatcgttttttgtgttagccatctcctgctgggcctggggcctgccggaagtgtagttaatatatacccagtgagacaccattggagaaaactcattttttttttcctttgcaagcagatgtcatttgtggatggcttcctgattaagaataagcagccatgtccataacgccctctcagtgctgggatcgcatctgtcttgaacctgtgcaggccctgtggatgctgaattcatgtgttcttcagtcctgctgtgtctggaagatgctgttagcgtagagtcatccatcacctctggctctgactgtctttgggtctcctctgcatagacatcccatttaggactgagtcctccaaatctcactccctgcacactgtccagttgtgtgtctctcttagttgccatctgcggccttcatcatagagtcggtgccttttatcccattaatcagggcaatatggagagtgtgaaaacacttagcagttgtctgctatacaggacagaaaattgcttccttatataaaaccagaaagtttttaaggaattatcacaaaagaaggaacatggtattgccaaggaagaccctatgacatgggtagaatgtgagagtgtgataaagaaagatggggaaggggtggtggccaggttgaggatagctccgcaggccccaggattagccagaatctttgtccctgctgagaaagtaggggttagtgaagacttaggtcttttctgattttctctcctttactctagagggtcagaatccaggtgtgagccatgaacctccctgcca

SEQ ID NO: 17634 - DNA, 1195 bp, Mus musculus
gtctcccaaccaaaaaaagcccaggaccagatgggtttagtgcagagttctatcagaccttcaaagaagacctaattccaattctcctcaaactattccacaaaatagaaacagaaggcactctaaaaatatgttttataaaggtaaaaaggaaggacttgctaaaaatcaagctaaataaggatgactgctggattcttggtgagatcagggtgggttttgcttgttaccgatagtgttttgttttagttcatttggaggatgatatatataaaagctatgtcagaatttttaatttaattttaaatataaatgatcataaatacctatgctagtgagttaattgaatcctcatataatagactgacctccttgtgttagagttaagtcaagatccagacaaaacaagtactgtattgtacgatacctacataggagttagcagagctaaagaattgacactcctgtgtgcatagtgtcaacttttccttcaagttgtcagataaccagattgtttaccttgtgttaaatgtgactgcagcttaatgttctttttataggagaactatggatttgataaaattgagattcgggacaatggtgagggcatcaaggctgtagatgtccctgtaatggcagtgaagtactacacctcgaagatcagcagtcatgaagaccttggaaatctgacaacttatggttttcgtggtgaagccttggggtcaatatgtaatgttgcggaggtaaggaagtttatattgacttttgtttttattaacttctcaatgactaaatattagaattaggagaaaatcaattcattgtttgtcagagtagcttaaaatatttttttttaccttatggtaaaatacactgaatatgaaatttaccatttttacctataatttggtggtattaggtatatctacgttgtgtgtttatcaatttgtacttgtttctgggttattttcctcttcctaagttacaactcaatacccactataaataaagcgtgctttctttcctcctcttctctgtcaggtcctgttcgactttctagctctacaaattggcattaaaggtacctcataaaagtggaacattcatgtctggcttattttactttatataatgtcttcaaggtttgtgcccattgtgctgtaacactcgaaggacctcctgaaccaggtgtgtt

SEQ ID NO: 17635 - DNA, 1554 bp, Mus musculus
ttggtatatttctgagagaggctttgcaggcaggctgggcaggcccagcttataacttgatggtagtaggataagagtacagtaactaaatccaaggaaatgtgggatttgtaagaaactaggtccagcttatagtgagcgagcattatgttagggaaagagcattccaatcattcgttcatagccggttgaagcagacttctagaaagcagaacctcctgtgtacatgtttttattactgtgcacagtctgctttgtatgacatacacctgatatatgtcctcaggttcctggcttagtatcatgcattgataaatgaggtactgtttgcatttattacattacagggtttgtgagggttttgtcttcatttcttgctctaagagaagaagataggcatcttacagtcaaggctctgagtcaacgtgctcattttggaacaaagtaggttttactgcttttccagaagcaaagctgccaaaccaattaagagaataacttacttcaagcacttcaggtcttgagtagctgaaaattattgtttagttggttaagtcttttctttcttctaaaaaggaaatgcaagatggggccggctggtgtggggagacctaagtaaagagtcctctgtcagcaatgttatctgaagtaacagataatattgtctgctcttagtctcttactctccatccgcacagtttggtttgcccattaatatttcctgtaaatgtgtcagtcttagtgtagatgacccaaaatggtacctatattcacagcaacaactatattgaattcttgtgacttggggaagcttcctatagttgctagcattcattaattgtataaagagaagtaaatacctttctaaaatgatataaagctgaaaaactcagtaacttaagagtgaagacagttgtcaaccaacttacaaatcgattgtggcaatacacagagttaagggtagtgatcattgtttcatatctcaaaagtactgaatttagaaatcacttgtttgataccccctttgtatgtttgccttttcttgtgtatctttaaataactggtaattgatgctttaataaaagttttctttggtgtaagattattttaagttttccaagacagtcatcacaactacactgacacttttcagatttataaaattagctaaaaatgttcctctgtttaagtacatttttttctttattcttttcttttaaagacagggtctctgtgtatagctctggctgtcctagaacttgttccgtagacgaggatggcctcaaactcagtgagatccacctgcctttgtctcctgagtgctagtattaaaggcatgagctttaattaatttaactgcccagtttaacttcatttttgaaaactagttttttgcacatactgtacaaataggaatttctcttcccattttctgtgctttctactttgaatgctttaaaacatatttattcgtagctatatgagggtttgcttggttatgctgttttaggctacagagtttgtaaagaagaaaaatgtgtgccttctgtagag

SEQ ID NO: 17636 - DNA, 1221 bp, Mus musculus
aagaatgtaaagagaaatgctcaagggttgaaggataggaaaaaaaaatctcattatcatcaggtagattgaggaggagagtacgttgtctgatgaagtagttaattccaaaggcatcatatgaaattattataatgttatactcagatgagaatgttaatgaagaatgtttttataagagtgagtacagtataactatattgcattttatgggtacaaggtaaggatgggatgatattacaaacaaaaccaaaaaagagaaaacccttaattttatagaaaagtaaacaaacaaaagggcagatcattactcagagttcagtttctgcagacatactcaaagcagacataaattcatgagcatttcatgaacatactggggacatgcacaaatatactctgaaaaaacttgcgaattattgcaataaagtaatagttaactacttttttaatgtagttacattttagccattaaaatgtttaaatagtcataaacagactatttttaataaaaaaaaatcactattttttaattttgatcaattttagatttcctttcctggatgaaaatgttgtgtctttcctaaattctctgccagtttgggaaaaggtagacctcactctgccccgtggagttggtgagaagcttattttacgccttgcagctatggaacttggtctcccagcctctgcccttctgccaaaacgagccatacaatttggatctagaattgcaaaactggaaaaatctaatgagaaggcatctgataagtgtggaaggctccaaatcctaccttagaaaacctctctcaaaattacatcataataagattattctatcctgtactttgtgacagttacctcaaaataaacagctgctgccttactgtggggtgtagtagtttcacatttcattgtgttaatttttacctttctcatcaaagctccatttgaacagacaggggtttcatagatggtctcagcattgagatcatttgaagaaaggccagaatgtacagggttacatttggcctttttagaagcttcacctgagaagtggggtgaagagggctggagatgcagcattatccagctcttcgaagacttgatgagttccagtttgcaaatcaggaaagggcttttaggaccaaattgcacagagggcatgcaaggtcatttgcccaccctgtgcatttcttctatctggtggttcttgtgtta

SEQ ID NO: 17637 - DNA, 2634 bp, Mus musculus
tcatgtatattttaagagcttaacagaaatatgaaaaatcattatacagtgactttcagggataatactttgaacatctaaggcagcagttctcaatctgtgggtcagtaccctcttaggggtcacatatcagatatcctgcatgtcagatatttatattacaattcataacagtagtaaaattgcagttatgaagtagcaatgaaataattttttggttggggtcaccacaacaagaggaactgtattaaagggtcgtagcattaggaaggttgagaactactgctctaatgtcttgaagtatttaaaaattatatatctaaggtgtttagccaagtgattggacaaagtatgtattcagtggaaagaaaatattaccaaaatatcagcattgtttgtcactaaagcattgtgaattattgctggcatttgcacagtgaatctcatatggtttattcttgagaagtagcctgttttgtccatgaaatagtaggtaaatatttttgaactttcacttcaatattttttctcacttcctcctaacagatacattagacgaactaaaaaaagaataccaagcattagaaacctccgagacaaccaaagtcaagacacagtcaacctgacttcacataaccatgtgtggcatttgctgttctgtaagcttctctattgaacacttcagtaaagagttaaaagaggatttgctgcataatcttagacggcggggccccaacagcagcaggcagttgttaaaatctgctgttaactatcagtgtttattttctggtcatgttcttcatttaagaggtgttttgactatccaacctgtagaagatgaacatggcaatgtgttcttatggaatggagaagtttttaatggagtaaaggttgaagcagaagataatgacacccaggttatgttcaatagcctttctgcctgtaagaatgagtctgaaattttgctgctcttctctaaagtgcaaggtccatggtcgtttatctattatcaggcctctagccatcacttatggtttggtagggacttttttggtcggcgtagcttgctttggcagtttagtaatctgggcaagagtttctgcctttcgtcagttggtacccaggtatatggagttgcagaccagtggcaagaagttccagcatctggaattttccagattgatctcaattctgctgctgtttccagatctgtgatcttaaaattatatccttggagatacatttctaaggaggatattgccgaagaatgtggtaatgacctgactcagactccagcaggattgccagagtttgtatcagtggtaataaatgaagccaacctgtacctctcaaaacctgtcgttcccttaaataagaagctgcctgagagtccattggaaatccaatgtagaaacagttctagcacttcaggtacaagagagacacttgaggtatttcttacagatgaacacacaaaaaaaatagttcagcagttcattgccatcctcaatgtttcagtcaagagacgcatcttatgtttagctagggaagaaaacctggcatcaaaggaagttttaaaaacttgcagttcgaaagcaaacattgcgatcctgttttctggaggtgttgattctatggtgattgcagcccttgctgatcgtcatattcctttagatgagccaattgatcttctgaatgtggcttttgtgcctaaacaaaaaacagggctacctattcctaacatagaaagaaaacagcagaaccaccatgagatcccttctgaagagtcctctcagagtcctgctgcagatgaggggccaggtgaggctgaggtaccagaccgagtcacaggaaaagcaggactaaaggaactacagtctgtcaacccttctcgaacttggaattttgtggaaataaatgtttctcttgaagaactacaaaaactaagaagagctcgaatatgtcacttagttcagccattggacacagttctggatgatagcattggctgtgctgtgtggtttgcttctagaggaatcggttggttggtgacccaagatgctgtgagatcttacaagagcagtgcaaaggtatgatccaggactgttgctcagaattcatgagacctaattttgactgaagctttcatcatttaaggtttatgaatatacagtactatagttacactttctagtacagtgtatttgtttattttactgttttctaactcacagttttcctcctaaaatgttaggactacaactctttagcctgcatgagaaaaacacaacttgttttctttatcctcttgtcgtgtctctggctttctttactcttctgtaggtgattcttactgggattggtgcagatgagcagttggcaggttattcccgtcatcgtgcccgctttcagtctcttggcctagaaggactgaacgaggaaatagcaatggaattgggtcgcatttcttctagaaaccttggtcgtgatgacagagttattggtgatcatggaaaggaagcaaggtaactcattactgaatactttttaagaaaaatacaaaggaggttttacattccttttcccttggagattggtcccatgcaaagcaggagagcaagcacactgtctctt

SEQ ID NO: 17638 - DNA, 1416 bp, Mus musculus
gattcgatgactccttgcccagcccccatgaacttgttccagatttgttctgttagcatttttctctgtgactcatctggactgactcggaaatttgaaatctctggtgtgagattgtgtttgtagcttcatatattatgtttatattataaatgcacttctgcttagaagaacttaaggaacagtttaaatgctaggcttctgttggctagcatatcatttcttgtcctgaaattgttttgcagaggaaaatatttaagtatatgacaaaaaatgtaaattgtgtttaagagaacacatgcaactgaaagaactcaagttcagtcagacttataaaatgggttatattatggttagtaaaagttgaaaaaaaatgaaaacaggaatttagtaggttctaaggtaagccctataccataactctattacagagaatctgtttggggaaatgctgtcaagggtaaaccacaacatatactgctttataaatactccagagagagtttatagttgaaagtatttcccagttaccaataatagcttgaaactgtaagattttctttgtgtgccatgtgctcggtgagaggacacagtcaaccagagcagggttgatccaggctgtttctctgcaaaccgagtcaaaactcgacatcatttccagctcatgtattttgtacgtgcatcatatatcagatctaataagatctggaagatggatatgcaaataagaggcctttgtcttctagaatgattagagtagaggagaattggatagtacagaatatgctctagtttcagtcagacatattcataaagggaaatgttaagttctggcagctgacttagtgttggatgtctcctaagtctcaggatagaagcccatcattagagcataggcacttcaggaattcttgtgtgaaattctagtgagtgaggaggtgtgacatgcagctatctttgggctccttttgtgtgtgttctgctggacacaacacatgggagtgttcagtgttgtccgtggtcaatatctatgttcagtcctgatgggaggggcctagggactgctttggagatttcccactggtgtccattttaaggtctgtaataatgtcatgttaagataacagatctcataaatatgctactctatcagactccgttgccaaaacaaattaaaagcctgtgtattgaagtgggtgttagtctaacaacctgtaaattcttgaaattgttactaaaattccaaattctttagataactttaaactatttaaattgagcattgctgtctttgtttgattaaaggttgagttcctttatatctgttatttttaaaggaaaagttgtttgccttttgtatatgtgtgtgcatatgtgtatgtgtacaggtatatgtatatatgtattgatagataa

SEQ ID NO: 17639 - DNA, 1189 bp, Mus musculus
cacttgagtcttgcttgccagttttaaaggctttttgtcttttgagacagggtctcactttatagacttagctggctttgaactcaagagatctgcctggctctgccttccaagttctgaaattaaaggcccgcactatcagctcaattttgattatttgtctacttatatggcactgttggggactgaacctatgccttgtgcatgcaagttggtactctgccaaaagagctatatatgcaactacacatagtttatattatctataccagactattttgaaaaggatgtgtttttgaactgagttcaagacagagaaatattctttttaattatcttgtgcatgtaaatgaaccccttttttgaatttatatttatacatgatatattttgattgatcactttgctttttccaactagtgcaaaagaggatgtactttaagcattgagaaattttaattgtaaaatggtagttgtttttttaaccctttaagaattagattccagtttacattgtaacagttactgaacaaacattatttcagaggtgttattagtaaagggtacggtaatttattttacaacagaaatccaattttccatctgatgagtgatgagcccgccattatttccggttttcaacatcttctcaccctacttcacaattacaggatctatttctttttctgaaggtgggtggggatggcatcaggccttactgtcttggcccagtgtcaggctgaggttccttgcctgggacgtaaccccgctgtaatctatactctagtggttggactagagtcagttggcttcccattgtaattttcagggaattaaattactggattttgcttgctgttcagtgtttaaaaacaaacataacagtacagtgctgtgagtagagtacatagaacatagaaatcgtctgtcaacactaatgctgtcttccagtccctggccaactaaaacacatccttgaacgaacagaaagttcttatttcttctagatgctagataagtaaaccttcagtttatctgtttcctagacacagctcagtcttgttggtgcccatgtggtatagagaagttgcttggctgccatagtcattcacatttacttcatgaaggtctatggataggacaagtatgtggctttcaggatgttcttagctaacataagcatttacat

SEQ ID NO: 17640 - DNA, 1172 bp, Mus musculus
tttccattaaagtccaaattactcattttatagtataatcatattctttgcccaaagatgctcatttctgggaactcagtctgttgtttatttttacatgttacttttgggcataaactcaaatgtttatgcctcctagttcacctccattacaattacgattttatatttaaataagagtcttaaaaatatgtagaaatgacaatatgtcttttttttttaagcctggtcagattgacaaagaagttgtgcaagcagtgggtgtctagtgagatcagtttctacggttgagcgttgagagcacacactcctcatggctgctgagggagactgtgtacagagatcatttatttgtatgctaatggttatattcttatccataaaatgtagtgtagtaacaatgcgtcatgaagggagcctgtcctgacgtgagcagtgagaacggtctcggtgcagatctccctgtctcaacatgcatgcttgtcccagtgctgtgtgccatgtgcagtgcactaatacacctctgtgtacttttctgtgtatttttggtatggtataattaactggttatgttacatttaactggttgtgattcgggggggaaagtgctacttattctaatttgtagcgtgtcatgaatggttttacctgtgtttcagcattgtgatgtggttttattatgtgaatatttgccttcagtctccgctcaggtattaacgtgtagcgatttttggtgctttgtttttaatttgtcataactggtgttctgaatgttcaaaataaatttggtgaataagcacatttggtacaaagattgtttactggttttcatactctgcaatgctgtctcagaaaagaaagtgttacatgcgtcttctttacctggcccttcagtgaaagcagtgtgtgaacacagagcaccctaggcaccaggaaaagctgacattcacagcttgacatgttgtagtttccccatccatctctgtggacaccacatggttcatagtctgttttcaggactcttgcggagactgactttctcttttttcatgtgctaactggatatcatcctaggtgatcaggttctagcacagaaagaatgaaaagcaatttagggattgtatgcaaatgtataggttactttgcagttaatcagagtagtggcttttggg

SEQ ID NO: 17641 - DNA, 1099 bp, Mus musculus
aatctgaccgtggcttgttttgtggtgtaaaaaaaaaaaaaaaatcagttgttttgcacaatccatttttggtgtagatgtctggttactacagttgaaaccttccctgtggtgtttcttttgctttctttatgtctctgctcagtccccagtgttcatccactagaacctaatatagtataaggcaaaccagttagcatgcatatcttgtgccaaatactctgaaatacagttgttaatgaaaaaccctggcattggtacggtgttagataaacctagaactatagccacagagcagtcacgagaatgctagttcctcctcagaggagcggcatgggaattgcagtgttcctttagtttgcttagcatctactgcttctttgccctacagtactgtgatgttggtacatttttcataagttagcctcacaattaaagagacagcacagaaaaccagatattgaaatattcggtcttgatcgagtaatgattatctaagtaactgttggggactgtggataaattagcaggagggtagtttatgagagctggcttcaggacgctctgtcctctggaaggagtttgtcttctgtgtgcagtgatcttagcttaggcgggagatgcctgtcccttaacataagcaggctctgtgcttatgaaggcagaggtttgtgcagatctccgtcccctgctgtgtggttgggaaagaaatcttcatttttattgtgtataaattaggaagttgtgctgcatactttttttgaatatttttttgaaaataggcactgacgtgtatccttttcaagtgatgctgtggttttttaaacgtaggaggaactataaacgtagcaacatgcccaagataaaccaaaactgagtataccccatcactgtgaccttgaacttatttgggataaaacagactgtgccttaaaatgacaaagcaatgccctgcagtcttgtaactgtattttactgtgggtggtcttctagaggttgtctgaaacccctttctttcaagttgtcgagataaaagttttaagtaccaatggacccacatttactttagtatcccttagctgctgttcctgaggccgcc

SEQ ID NO: 17642 - DNA, 1219 bp, Mus musculus
tggtgaaagattttatgtcaaaaaaatgaggtggaaagtgattgaggaaaacacccagcattgacctctccctgcaccttcatatatacacatgggtgcacatacgtgaacatgtaaacacacacacacacacacaaatactcaagaggtggggatccacaaatatgaagtaaaccagagcagttgattccataactgtggaatgagtctggtgcctcctgtctccccttagacaggtctgaattaccttgcttgatttggtttgatgcaaacttttagaatgctgtatttaagcatataagaagtggttctaaaaaatcatttggaaaaaaatccaaaagtatgttgatgtgttggatagctaggtttttgttgattgtttttcatctgtgtggaagatttgtgagtttgtatatcataggaaacaagagactataaagtttatttagggtcacggtccatttggggagtgtgtcacttgccagaataaagggaaccatgggagtttctgggtttaagacattacttccttccgggaaatcttctttaccagataaagtaaatgtagaactcaccctacaaactgtaaggttgacagctagaattttactgcagactttttgaacaagaaacataattctgtgaatatctactctttcaccataaggcttgctgatatgtgaggaaacgagaaagctctgggctgttcacactcctaacttttcagagtgttatggaaaatgggagtcaggtcagcagtccgaatgtgtgctataaatgcttaaacttctgcaattgtaaaacataccacgaataaataaaaaacagaattttatatgttggtaacttggttttgagaacagagtaagatttggaaatgctgatgctaggcatgttgttactctgttaataccataaatgtagtagtgcagctaaggtgaccatgttcgaagttggcactatctaacctacagcttgattaacgtgtgcgaataataattttaaaatcgagaacagtttttattttcagtgcttgttatgtaatgctgccaaaaaacgtccttatactacgaagccagttaatttctgatgacttgatgtagagttggtatctcgagtcagactcaacctgtaagcattctgtcattgttgacttgaacatcagtgggaaatgctatctattggtgtttagttaccgtaaactctgcatatctgaatt

SEQ ID NO: 17643 - DNA, 1197 bp, Mus musculus
caatggcattttcatgaactttcaaatatgaatcttacagtgtatacttggtgaatattagaagcatggaagagatctatcaaaagatctattaagaaaagaatgttcttgcagattctgcattggcacagtcagcctccgcccctgacttaaatccttgccccagtggttgccagaagtgcctgtagcaatgataggttgttaaagggataactccagaggccagaacaactctgggtttgcatcatttgtttgtctactgaggaggaagggtctcagcataaatacaacattgtacttgatgtacaaagctatatactaatagagaaacaatggacagcctttactgaaaatgtgaacactgcctgaatagattgcacacctgtatcactcattaagagcaaaatcttggtttgtagaggtgtctcctaagactacaattttgccactggggggagcgggggtaacattttatttcatttccaattatagttcatccttagctatagaaaaataggaaggtcaggagcttgaagaatatagttgttctttgccttcagttagaataaattcaagctgagtcagacctgtgtcgtcaaacccttcacttagatgtgtgtcctataaatgcccataagcctttcccgtgaagtcctccagtgttacggaattcacagttgcacttgtgaacttatgtccttctcagtgcccaggaatggtactaagagaatcagctttgttttatcggctgttacacacggtgtcacagcctctcagctgctactgccaaccagagggttctgcccacgtcagccatgttagttcttccctggacctttgcttcttcagagctaatcaaagggtcaggttattaccacagaagttagttggtttgtatgattctgtcactgtctgactggcatcgtgcttgttaaatattcatattttcacttattaagacttttaaaggaaagccatcgtactagacatggcagaccctttagtcccttgtttcagaagagtgtcaaaaggaataaactgtaccatagtgtttgttgagtacccaagagtgagttcattggataattacaattttctcatggcacaacacttacatatctaagtaggaatgtatctgctctaactttgctggagatgtgtggcctctctacacatgctgtctttcattctgtcagt

SEQ ID NO: 17644 - DNA, 1196 bp, Mus musculus
ttgcacttgttgatgagcccatccctttgtggtcttgtaacatgacgttagagtgcctttttatatttgtatatcctggaagtgttctgtgaagcattttgtattttttcatttgagtgttattggagcaatatgatcctagtgagtttccctttctttgaatgtaccaagtgtctcctttcctagtcctctcctcctttgctttgaaatgaaaatgctcacgttttctagaggaactatgtttgactttgcagtactaaaatgctttcttcttacagaactgtaaaccataggtcagtattataggggaacagcgttttaagatagtgacaatctgagcgtgtttgtagaatgtcatcctgtgtgtttcctacatggtgatctgaagactcaatgcaagtatcctttgttcagtagctttgtctacagacgatgcttcagcatgtgcaatatatccttgcaaagcacggtgatacacatcttgtgccagtgttacattttgtaaaacatatgtgtaacagcataaactattatgtgatgatttcagtgggagttttgtctgtacttttaagatgtagacattggaattgaatgactttgataaatgttctgagtgtaaaaatgaggaaaaatggctttcggctcagtgaaggacttggggccggtgtgaatcttctcaagcacagtttaatactttcctaactactgaatgctctaataatgcaatgaagtacttacctgtaatatacagtggacatgcattcagatggttattttttacaaataaaaacggtacaaatattgttgcaatgtgtgttttctttcatttttcaaatgtatgctttttccaaattattttaatttaaacctttgccctacctcaacaccaaaccaaattaattctaaaaataatcaagaaagcaacctctagatttgttgattatactcaaattgtcacattggagtgggaaagattcatttactatgcctccaacgtttttcataaagaagttaagctgagttaaaatggaattcatgtgagaagccagaagccgaaagtccatgcaatcctaaggaccatcaagcttcacacagtagctgtgattgaacttgaagttgctctaaacttccttgtggtgagagggctgtgtaataagtcacatctatcaaacaggagggggtcacatagatcctca

SEQ ID NO: 17645 - DNA, 1212 bp, Mus musculus
gttaaaagcaaagaacttatagcaagcaaaggggaagaaatgattcatgctaccactttgactacagaaaataatgtaggtggtggaggaatgttaatctcaagatgcaaatgagagaaaaagaaactgatattttacaagaatgggctttttaaagaacaagacaaatgagagtagtgagcttgtaatttatctgggtatctgttagggcagattactagttctttagaaaatagaatgcatttttaattccactcatgagcagcctggagagatggctcagcagttgagagcactgactgttcttccagaggacccaggttctatttccagaatgcacatggcagctcacagctgtctgaactccactcccacaggcatctgatactctcttctgctttccgctggtaccaggggcatacatggtgcacagccacacatgcagacaaaatacttaaatacataaaatataaaataaaattaaatacactctatgtgggctaaatcatttagtctctacccaaggaattcagaatgatcactttgccacattcctacattcgttaacgttttctcggcctgattttcccgtgttgacttccccgaaaccttggaatatagattctatagcctctagcccggcttcccgtgcttctggatcttctcctttacagatacattgtaccttcttctcctttacagatacattgtaccttcttctcctttacagatacattgtaccttcttctcctttacagatacattgtaccttcttctcctttacagatacattgtaccttcttctcctttacagatacattgtaccttcttctcctttacagatacattgtaccttcttctcctttacagatacattgtaccttcttctcctttacagatacattgtaccttcttctcctttacagatacattgtaccttcttctcctttacagatacattgtaccttcttctcctttacagatacattgtaccttcttctcctttacagatacattgtaccttcttctcctttacagatacattgtaccttcttctcctttacagatacattgtaccttcttctcctttacagatacattgtaccttcttctcctttacagatacattgtaccttcttctcctttacagatacattgtaccttcttctcctttacagatacattgtaccttcttctcctttacagatacat

SEQ ID NO: 17646 - DNA, 1210 bp, Mus musculus
gatttctcaaaatgctttatgagcagacatgaaggatatattttacttcttgtccaactttggcctgtgcttataaagtggagaagctgtctgtaacttagaatagtgtatttcctgttgggagtgaggctatctaagaaataattatatagtaggacagtctttgggcttttgtgtgatgcctctaatcagtttatttataagcagctattgaacacctgttgaatgctagccactgtctgttgaagaaggggcttcgaaggtgcacatgatccggcctttcatgtaacggaagggtgggcgcagatccttaggtaccagggtgctgtgcaatggaagatgcagagatgcctagatttgcttagcttgtatgtagcagtcagatactgtattggcttaagtgtgagcataagccaaaatgccgttcagtttatgaagaacaagcattaaggggctattttaatgttttgggtcaactaatgaatcagcttttttttgttgttgtttattgttttttaattttatgccccaaatttcttgtttttaaaacttttctagccatcactgttttgtctccctctgtacttgtgtggactctaaaaggaaataaattctgccatcagtgtgactggcatgtgactctaccaccctcagactgtcaggagtgctaggcagcttgtgcttctgactgttaacaaggaagactctggtggaagatcagattagattagagacagcttctgctctgctttctcagaatggatactgagcattaaccgtccccatgcaggacgcacggattcttgttctttgtatgtggtctgactatcattgtgtagtaaaccatttccctgttcttagaaaattcctagccatacctaagcacttttaaatgttttgtatagttgatttcaaataacccttggtaattacaatcttgaattgagtatatttctcaaagttaaaatttgactttaaaccacttgggaacattttattgtattattaattaaaatacttaagtttgtttaacttcttgctttttatttaaaaattaaattttgcagtagaactacagctcacaggagactgcttaccccttaagtgacattttcctgatggaggtaatctgagaatggataaggggaaaaaatgctgaaggctgcaatctcaagattaggaccaaaatagatactcaaagatgtttgga

SEQ ID NO: 17647 - DNA, 1857 bp, Mus musculus
taaaaatactgtgctttagagattgttttcaattctaaagaaatttttagaaagtgtgcaagttgaggtagtaacttgaaaattactaaaaagaatacttcttcagctgtgaaacattgaaactttatcattaaataagttagatagcaaattatagtgttcagatttttttcctaatgcctttgaggggttgttaatattttggcagaaagtatgaacactattttggttgcactcagtatatgaataatagattgatatgtcctggatacaaattcagatgctgctagagataaaaattcttatttgtgcaggtttaaaaacctagtagatttttctcttaaattgaatttttgaatgaaatcataccagtttgagaacaaatttcattttgacttgtgacttaactatcaaatatttaaggttacagaatttaaaatgagattgactcctgagagtaattagttccgcatgtacaagtgaatataaaaatgggactgatttaaagagacttttcccttccattattacagggaccttgttcacagacagacagcgagtgcagtggtgcagcacatgtcacttggtgtttacggatttggctgtgaggattctctgaatcacttactgaactatgtgtggcctaatgtgtttgagacatctccccatgtaatccaggcagttatgggagctctggagggcctgagggttgctattggaccatgcagaatgttgcagtattgcttacaggtaggttaaatgtgggtttttactttttttttattaaatgcggggattgctcaaaaaattacttaaatatgttgaagtcagtcattccctaattaccatgtggaagacagttctgtattgagatacagattagattaaattaggttagattttgtatttacccaccacaattttgttactcagtttccagactttttttccttccctcttcaaagtaagtacttttgttttattttattttttgagccttggctggcctggaacttactatgtagaccaggccagcattgaagtagatagatccacttgcttctgtttctaagtgctaggatttaaatgtgtgtgccaccatgcatcatatttatagctaatagtgtattaaagtttgtttatttatttattttccccttgaagatagaagtaactctaccttttatttattctagggtctgttccacccagctcggaaagtcagagacgtatattggaaaatttacaactccatctacattggctcccaggatgctctcatagcacattacccacgaatctacaatgacgataagaacacctatattcgttacgaacttgactatatcttgtaactttgtgtctaatacagctgtttcacaccttaaacctgcttcaatctgatgatataaacttgtaaaacattgccgatcagtgtagagctggtcatagtggagggatagaaatccagtagcatgatttttaaataacttttgtttttttgatgttaaacagtaaatggcagtagtgaccaaggacagtgcttatacacactatactggagggatatcattttttattcatctttatgaagatttagaattcattccttgtgtttaaagggaatgtttaattgagaaataaacattcgtgtacaaaatgctaatttgtgtgtgttttttgaatatgacttgtaaaatgcaaaactttggtaaagtactggtttgtgtagaataagtggattaatttcatcttttgtcacctagtttattatggaacacagcagcacgcaaactatatagtgatggcctgtttgtcaaaagcccattgttttgttggtaatgaagagtagcttgg

SEQ ID NO: 17648 - DNA, 1163 bp, Mus musculus
attccagtcattgtccccgtagttcctcatcccactcctctttccccttgcctctaagacggtgctctcctcctgccccctaaataggcatcccccttgcctggagcctcaagtctcttgaggattaggcccatcttctcaccgagggcagacctctgctatatacgtgccaagtggggcctccgaccagctagtgtatgctgtctggttggtggctcagtctcttgtagctcccagggattgagactgctggtcttcctatggggtcgccctcccctgaagcttttttttttttaaaccttttttcctctttagccttttttatttttggaagttgtaatgacatcctttagtgataagaaagtagtgtgttttatccattcgcttgcaggttttgtagtctctgagagcaaatttcctaagtatgataacatgctgatgtgtttcttctttctttttagccctcatgatgtattggctacacttttaaacaacctcaaagttcaggaaaggcagaacagggtttgtacgactgtagccatagccattgttgctgaaacatgctcccccttcacagtactgcctgccttaatgaatgaatacagagttcctgaacttaatgtgcaaaatggagtgttaaaatcactctccttcttgtttgagtatatcggcgaaatggggaaagactacatctatgctgtgacgcctttacttgaggatgcgttaatggacaggcaagtgactaaaggaaatgcagaaaaattatggacaattatgcgtcagtgtagagtttactaagattactttaaatgttgtattgttaaagaagaaatattactgtgattatttcacataagtataatttcttaccttatatttgttatagttaggtacccaggttttctctcccaggttccctattcttgttaatcttttcgtatgtgttaagctaagtagattttgaaatacaataatggatttactgttttttaaaacaattagggaaaaaaaggtgaacatgaattagtatggcagagaagccaatagttttgtttttgagacagggtctcaggtcacccagggtggctttgaacttactatgtagctgaacatgaccttagacttcatttctcatccctctacctccagagtttcaggactgt

SEQ ID NO: 17649 - DNA, 1194 bp, Mus musculus
tgaggattaatggtactaacttaagtggctgttgtcacttttctctttaggctgctggtctggctactatgatttctaccatgagacctgatatagataacatggatgaatatgtccgaaacacaacagctagagcttttgctgtcgtagcctctgccctgggcatcccttctttattgcctttcttaaaagctgtgtgcaaaagcaagaagtcttggcaagcgaggcacactggtattaagattgtacaacagatagccattctcatgggctgtgctatcttgccacatctcagaagtttggttgaaatcattgaacatggtaagtggtgtatcttttatagatcagctgtcctgatggggagaggtgtatgtgtaattaaatgaaagacttctcacgcaaattttgaaatggggtttgtaatattttctgttaacaaattaccattgcctaaattttatgtactataaaaaaattattgcagtttggatacatggttagatacattgctaaaatttggattgtattatgaaaattaggtgtgggtacctactcataaccatgtctgattgtataggtctcgtggatgagcagcagaaagttcggaccatcagtgctctggccattgctgctttggctgaggcagcaactccttatggtattgagtcttttgattctgtgctcaagcccctatggaagggtatccgccaacacagaggaaaggtgaatcgctcattagatcagtttttgttgctagtaagataaccgaaacttaatttactaacgtatatatttttaaatagggtctggctgctttcttgaaggctattgggtatcttattcctcttatggatgcagaatatgccaactactatactagagaagtgatgttaatcctcattcgagaatttcagtctcctgatgaagaaatgaagaaaattgttttgaaggtaagtaattagttgctcagtttgtgggtatgtgcatgttttaggaagttcagagagatctttataacattaaaaacaaatcaaacctatttttgtactgtaaaagttattacagcttggatacatggttagatacattgctaaaatttggattgcattacgaaaattaggtattggtacctactcataactgtgttggattgttttgtgttttgccagtgctgcatttgatatatatatttct

SEQ ID NO: 17650 - DNA, 1153 bp, Mus musculus
tatactccttttgaacttaatcgaattgcatgtaggggaagcagcattttaagagtgttaatagtgtggttttactgatcctttgtctttcaagatactcctgggcatggaagtggatgggctgagactcctcgaacagatcgaggtggagactctattggtgaaacaccaactcctggagcaagtaaaagaaagtctcgttgggatgaaacgccggcgagtcaaatgggtggaagcactcctgttctgactccaggaaaaacaccaattggcacaccagccatgaacatggctaccccgactccaggtacaaatttttttcatcattctttctcttacagctattttaattttttttgctgtttttttttttttttttctgggttccactaatgctagcttttctattaagaatgtaaatataaatatataactgccttgatttgcatttgcaatgtaaaaacaactctgatacggactgatgttaactattttgtatctgaagggcctaagtcttacactgttggtcattaacaattttgcttttttggtaggtcacataatgagcatgacacctgaacagcttcaggcgtggcggtgggagagagaaattgatgaacgaaaccgcccactttctgatgaagaattagatgctatgttcccagaaggatataaggtactagcagtgaatatatgatgactatgttgtattgaggatatgagttttaaatatttagttaaaaaagttgcctggtaaattagcattggcctttctgaaatttactaatttcatatttttaggtattagtaagtgcatttcagtttgaaaaagtaatagagatgaaataagtaacatggagcttttattactttggcaatcctaatgattggtgggagtcagaagtaggcggatctcttgagtttgaggtcagtttggtccagataacaagttttaggccatccagggctacaaaaagatactctgcctcaaacccctcccagcagaaacttttattttgggggctggagaaatggctcagtggttaagaacatgtattgcctttaaagagcagcaatgatctcttggaaacctgaggtcttgtgctggccttccaggctctgtcttcaagtgtacaaagttatattcaggcac

SEQ ID NO: 17651 - DNA, 1204 bp, Mus musculus
tgctagtgataaatacatatatttttaaaggagttatgtattttatgtgagtactgaagacacaccagaagagcgcatcagatcccattacagatggttgtgagctactatgtggttcctgggaattggactcaggacccttggaagagcagtcagtgagccatatcttcaagccactcacaaatacatattttaaagtagctttaattttcccgtgggggaagttttagaattttgagattatttttgatagcccacctaatggttagggaaagttgttgagatagtaaatcagctttgtgttcctttcacctgatgaggtcaggagatacatgtgtagatgtactttacagctagctcttttaacctcttactaaaattttctatgtttcaggatattttgaaaagatctagtaaggagataaattatactgagagctctttaaaacatgaaattttttttctttcttacagatatcgaagcacagattcgagaaattcaaggcaagaaggcagctcttgatgaagcccaaggagtgggccttgattccacaggttattatgaccaagaaatttatggtggaagtgatagcagatttgctggatatgtgacatcaattgctgcaactgaacttgaagatgtaagttacagattatctaggaggcaaggatttttgttttggttttttgagagaaaataaataggggaattttctgtttgagttgatggttaaatggagagaaacagttaataacacatagagggaaaacagactctctctctctctctctctctctctctctctgtgtgtgtgtgtgtgtgtgtgtgtaatcctagctagcctggaactggatatatagacccatctacacacatactcatacctgccactatgtgatcctttatgtagtagaccatgctggcctcaagactctacctgtctgtcttccaactgctgggactaaagaggcatgctacaataatcctccctggttagatagagtgtttcacagttagcttgtttttgcctgcttaatactagggtcctcactgggcccttagatacctcctaaagtgcccagttttgaatattttgtggaagacttatctgaatattgttagatgatatataaagcattttcacatcatttgtgatttaaattcttgttacctaatcctgtctgaagtaccctatggaagaca

SEQ ID NO: 17652 - DNA, 1206 bp, Mus musculus
ctgtttattttttgggtgtcttggaggcagtgttcctttggctaaattctattttgtgtaatttaatctctctctctctctactttttatttttgtttttttcgagacagggtttctctgtgtagccttggctgttctggaactcactctgtagaccaggctggcctcgaactcagaatctgcctgccgctgcctcccaagtgctgggattaaaggggtgcgccaccactgccaggctcctttggttttattaaagacaggctttgtctgtacagccctggcttcgggaactctctttgtagaccaggctggcctcgaactgcctcttctcttccgagtgcttgaattaacggcacgttacccaccactggccggacaggctacagccctcttgggaagtagccatcctcttccgcgtttagtcttccccgcggtttcgctggctttttaaggaagccgccgggagcccgccctggccccgcccactcccataatgcccctcgcagtctcatataggtggcagttgaagtacgtgctacagtgcggcgcgcgctcccgggtgcgcacgctcagagagcggcctctgtttctggcggcggcgagcggaagtccttgggagcgccagttccgtctgtgtgttcgagtggacaaaatggcgaagatcgccaagactcacgaaggtaagcggcctttcccttcccacgcgcgacctcggcagccagccagccgcggccctctctcctggctttctgcgtcttcgcgtggcatctctggtctcgaccgaggccgcgcggcgaggcctgctcggctcgtcggcgcaggccgctgcccgcgtaatggcgtcctctcgcactccgggaccggcgctttgttccgcgctggctgttggtgcttccgagttctcttgttctgaccggagagcctcgctcgagcggcttgccccgggggactcccggggagggagcggggaggcggacgtgggaggccgactttctcgccccccgggcgctatcgtcggcagttcgtacctggaaagccctgaatgacggcagccgctttcgggccgctcctaacggaggccgcttcagcgcaggcctgccaatcccagccttcgcgatacaggcatctccaaggcggctggatcgtgttgtggtgcttgcactaaatgattccggcagaaaatctggtagtttactcctttaatca

SEQ ID NO: 17653 - DNA, 1246 bp, Mus musculus
agagactgttttaacttcatgttgctatggccaaacgcctgacatgaaacagtttaagggagaaaggatttgttacggcttccagttcaagtgaaccctttcgtaagggtagagaaaacatggcagctggtgaagtcatagcaacagaattaggctcactggctggactgcctctacagtcaagaatcagggagcccccaaatggtgctggtgcagcgggagggcctggaggaccccggggcccaggattaggaggcttccgggcttccgcggagtattcagcagcggtcttaggggccgagggattggaggtaaagctgaagacaaggagtggatccctgtcaccaagctgagcttcctggttaaggacatgaagatcaagtccttggaggagatctacctgttctccatgcctattaaggagtctgagatcattgactttttcctgggtacgtccctataggatgaggttctgaaaatcatgccaatgtagaagcagactcgggctggccagcagaccaggttcaaggcattcgtcgctattggggactacaatggtcgcattggacttggtgttaagtgctccaaggaggttgccactgccatcttggccaagctttccatcgttcctgtgcggagaggctactgggggaacaagattggcaagccccacacttacatgaaaggtgacaggccgctgtggctctgtgctggtgcgtctcatccctgcccccagaggcactggcattgtctctgctcctatgcccaagaagctactgatgatggccggtatagatgactggtacacttcagccaccctgggcaactttgccaaggtcacctttgatgccaactccaagacctatagctgcctgacccctgacctctggaaagagcccgtcttcaccaagtctccttatcaggaattcactgatcatcttgtgaaaacccacaccagagtctctgggttcagaggacccaggttccagctgtggctaccacataagggtttttatacaagaaaaataaatgaattaagtctgctaaaaaaaaaaaaaaagaataagggagcaacaaatgtcggtactttagctcctcctctttattaagtccagggtcctggttctgggaatcatgctaccctgttaacctaatgtaaatactcttttatagataggccagagatttgtctccagtgtgcttctaatcatagagaccctctctcaaaaagatgcgtagcgattga

SEQ ID NO: 17654 - DNA, 1888 bp, Mus musculus
ttgaagtgaatgagaaaaaagacagagttactgatgctctcaatgctacaagagcagctgttgaagaaggcattgttctaggagggggctgcgctctgcttcggtgcatcccagccttggattcattaaagcctgctaatgaagaccagaaaataggtaaagatcatctttcaaatgagtttgtggcctcattcttattgaaaagtattgttgattagcaatgtaacacattttacagggggaattatttcacctatggtaggattggataagtcttctcatttactaaactcttgttttctttttaattattttgtgtgtgttggggggtgcattttgccttcatgtcttgtgtgctatgcatttacagtattctctgggccagaagggagcattaggtagcctggacctggagttacattggtgctaaggattaaactaagtcctctggctccccagaaagagaagacaaagcaaatttgtaaaaatgtgtttgttttataggtatagaaattattaaaagagcacttaaaattcctgcaatgacgattgctaagaatgcaggtgttgaaggatctttgatagttgagaaaattctgcagagttcctcagaagttggttatgacgccatgcttggagattttgtgaacatggtggaaaaagggatcattgatccaacaaaggtaagtgattcagcatttcatacacactggatgtcttgctctctgcatggtttttattcataaattattttactaaaattttttctaggttgtgagaactgccttactggatgctgctggggtggcctccttgctaactacagccgaagctgtagtgacagaaattcctaaagaagagaaggaccctggaatgggtgcaatgggtggcatgggagggggtatgggaggcggcatgttctaactcctagagtagtgctttgcccttatcaatgaactgtgacaggaagctcaaggcaggttcctcaccaataacttcagagaagtcacctggagaaaatgactgaagagaaggctggctgaccactgtaatcatcagttactggtttcctttgacgatatataatggtttactgctgtcattgtccatgcctacagataatttattttgtatttttgaataaagacatttgtacattcctgatgctgggtgcaagagccatataccagtgtcctgctttcaacttaaatcactgaggcatctctactgttctgtgagcatcaggactgtagcgctgtgtcaccacatgagagttcagaagcagcctttctgtggagggtgggaatgattgtgtacaaagtagagaagtatccaattatgtgacaacctttgtgtaataaaattttgtttaaagtttctggttgtgttaccctttccatggtcttgatgggagaaatgaaagccaatcagaggagcacagttgggtatatagaaacagtccacctatagtctgtagtctcttgcttttccttggagataggattattgcttcgtgaggttttacagaaggcacaacactggttagcttgactgatttggagagtatcataagtgatcataaaggagtttagtctttccttaccattttgaagtttatgccatagtaaaaagacttaatgagcaacttaacattttaaccagtcttcagtacttgaatttttaagtgagtctagaattaccagagatctagccaagcaaataagcactatgaggtttaatcccccaaccctcactttaccctcaaagagtgaagattattcatttcttggtgtaaaagaaacaagagggccagatagcaggatgcagagcaccagaaatagtctgaagtcagttggccattctgtgaaagcaaaagctggttgtaatt

SEQ ID NO: 17655 - DNA, 1097 bp, Mus musculus
tagagtacataaaatacataaaataagcatatcttaaagagaagaacagcaagtgttcttaacccctgagccatctttaggtttaactggcctctaattctttgactttgtaggatggaaaaaccctgaatgatgagctagaaattattgaaggcatgaagtttgatagaggatatatttccccgtattttattaacacatcaaaaggtaagagctggtccagagatgaaatctttacactatactttaagctataaacttactgtcagctgtaggcagtggatgtgggtggtacaataaaaattgtgatatttcaaaacattaatgattcagtaaatgaagaaaagatcatgagttactggtctcattgtggaagtaaattgttaattttctcagtactgttagaatttggttttactgctctctgtatttacaggtcaaaagtgtgaattccaagatgcctatgtcttgttgagtgaaaagaaaatttccagtgttcagtccattgtccctgctcttgaaattgctaatgctcatcggaagccattggtcataatcgccgaagacgttgacggagaagctctaagcacgctggttttgaacaggtaatagattgggttgttatgtttttaggtagaaggtgaatgctgttgctttttaaaattaattccctgttttgcttgtgtgtcttagaggtgtagtgtatgatatagtgctctatgcattatgagtccatcttaaagcggtctcaaatgtgcataatccctgagccgctgcttcccacagcctcccagagagaactatacgtgtcttttaacactggtatggttagtactgactcacaactgtgtctgcaatataagggcagcatttgtttaagaaggggatctgcttggaacaagatttgatgagtagaggtccccatcttgtcttttttcagaccaggagttgtgggaaaagagtaggattgggatagagttatatagtactaatagttgtatatagtactagaacttaccaggaactaaattagatgctttctcccaactcccccttcagtttacatcttacacagttaaatgttctttacaggctaa

SEQ ID NO: 17656 - DNA, 1308 bp, Mus musculus
gtcctttagtccccggtggccgcggcggtccggtgttcactttgaccttgctcggggctcctggtcgggaagacacgtggggccgcgaggctggactgacctactgtcttttcctccggccttgctagctgctgtgttaccgtagcttcgggtggatacctggcgacacactcagagggttttgcaccgtcatgagtacttctgtagttctctaggcaattgcatttagaacctgccttgcttgcaccaacttgatttttttcctttggacacttttcggagtggatctgctcccaaggccgctttggcagtgaaagattaacttgagagggcagagtgggtggccatggggatgtggttttctgtgctttgtgcttatgctgttggtcaggcttggggtcagcctccatgatcagttggctagcagattatgccctgaatctgcagcgcccaggcatggtggttagcagaggacagcccagctccaatctagcctcccatgttttgaagcaccgttggacaagtttgtagtgatttttcttttttccttccccagaaatgcttcgactacccacagtccttcgccagatgagaccagtgtcccgggcactggctcctcatctcactcgggcctatgccaaagatgtaaaatttggtgcggacgctcgagccttaatgcttcaaggtgtagaccttttagcagatgctgtagctgttacaatggggccaaaggtaccagtatacttaaatggtgttaaagaatatagtagctgcaagacagcaatttgttatcaagttttgtgaaaaatctaatttgcatgtggtacaacttagtggtctagaggtgttatttagtcaggaggtctattggtcattctaccaccatggtgtccttactactgctccaggcgatttgggggacttttgtacattgtgatgtaatagagtagtaatatctcaaggaggattttcaaactatagtcatgattttgtgcatgcttgcattaaattttggatctcgtcccagtagttagagggtatagaggggaaagtacaacttaagtctaataatacctcaaagtatatagctgtaatgtgagagttcactcattgtgctgaaatactccaacacataaggcaaaatgcactagcatagaatcattggtttctgtgttttttgttttgtttttttaagtaactaaacctttttttttcaagatttatttattatatgtaagtacactgtagctgttttcaggcacaccagaagagggtgtcagatctcattacgggtggttgtgagccacc

SEQ ID NO: 17657 - DNA, 1179 bp, Mus musculus
taatgtgactggttaatgcctataatacaaacctgaggcaggaggcccctggtgtgcatactgaaacaaaaagttcactgtgtgtctaatgaacaagacaagcagactcttggctaacaagtgactgttttcatcagagtggagagattgagcctgtcagtgtgaaagttggagataaagttcttctcccagaatatggaggcaccaaagtagttctagatgacaaggtaagtcaagctaagaatttttattttatctattttttttttaatttcgggggagggggtggttcaagactgggtttctctgtgtagccttggctgtcctggaactcactctgtaaaccaggctggccccgaactcagaaatccacctgcctctgcctcccaagtgctgggattaaggtgtgtgccaccactgcccggcaaagctaataatttaaaatgagttatatttgctatgactatcttaaccaatagtctctttattcacaggattatttcttatttagagatagtgacattcttggaaagtatgtcgactgaaatcactgttgaaatggtgtcacgtgaagctgccattccactgatgtctgaactatttcatcatgtaaataatttccatgcctcccttttataataaacagatgatgcctaaactgacagccattgtctctgacctttagtttcactgtactgttacaaacatttccaaataaaatgatgtaaatgagtggacagtctttggtaatttaaggtcgttttcttccaaggaagctgcgtagttaagagttctgagaaataaggattttctaggtaaatgaattttcgggatgaatttggcattattacatagatgaataatataagccacgggaacttgtacttagatactgtcttagtttacattctattcctgtaataaactgctgactaaatgctacttggagaagaaagtgcatctcagcttcaagtgtattacaggaaactgggcaagagctgaagcaaagacaatggaggaatgttacagcttcctccccttctcagcctgcttccttacacaacccactgccacctgccgagaggtggcatgacccagagatgcttcccacatccatcattaagattctgtgccatcaactttcctatgggccaattaatgaaggcattttctcagttg

SEQ ID NO: 17658 - DNA, 1159 bp, Mus musculus
gaagccaccccctggcgagaggaggtcttgaagtcctggaagccaatagactcccttcgggattccgatccctcagttactcacccgatagcccttgccccaaccttcactaagggatctacagagcagtgagcgagtttcctggagaggccagtgaggggacagtcactctcctggtcacaagagaaaggagatacctagtccccgttctaatcgtcaccgctcctccaggtctccgtaatctggattccactacacctcatactctggagacatgagtattcctcatttttcccagaagaatcatggaaggagtctttgtatgccttcccttgaatcttggcagcatcttgaggggagagcttcctcccccacccaccctttttttgttgttgttcctgtgaaatgttgatctctgtgagtttttcctggttcttgtgttttgggggttggagtgggagggagggagtttagggagggaggggcacagctcagggcatctaggcctcagattgtgatgatgcagggagttagctccctaaattcttgggtgactgatggtttgacttggtaagttgtgatctttcctgaaagaggaaggagctgaagttggttggccctgctgtaccccctgacaaggttgtgagaccctcttcccccccaactttgtttaaggcattttggttttttaaaatctgtacagtaaaagcaactttttctgtaaaataaaaatgagaaatgcaaaaaaaaaaaaaaatttctttccaggaaaaactgataatctttttttaagtaaactgattgttagacaatgtacacagataatataatgcattttaaatactctctcactatgtcaggtggtatcatataagggcttttgaatatatttcttaataattcatttttttgtattttatgctcttttactacgcttaattcccaaagaatattttgtatgttttgaaacaatttagtattcaacattagacataggatcctcagttatggatagtattaaatattcattaatatttttagggtatgaaaggatatgaatataaaagttgaacaattttgtgtattatttgattctcaaaatacttcatattcttaatatgtttgatgcataaaatgcatttaaataataaaaaaatta

SEQ ID NO: 17659 - DNA, 1675 bp, Mus musculus
agtttgacttttccttttagtaatattaatcttttcacctaaccctaggcagcattaaatagatatgaaaaaagatagtgtattaattttattttccctccttaaaagcttattatttgaattatatgcacatgtaagactatttacaataattcacaggttaagtggtgttgataagtggtcatactttgatttcttatttcatcgtcttaagaatttaagtgcagccgggcggtggtggcgcacgcctttaatcccagcacttgggaggcagaggcaggtggatttctgagttggaggccagcctggtctacaaagtgagttccaggacagccagggctacacagagaaaccctgtctcagaaaaccaaaaaaaaaaaaaaaaaaagaaaagaaaagaaaaaaaaaaaaaagaatttaagtgcagacttacataacatgacatgattagtggagtttctcattaaacgctgaggtctctatgccacactgtaacaaggcactaagacagaatagagacctgtgcagttgggacagctgaagccatctttaccaatttaacaaaagaaacttcatttttatttaagagctatttgcgaatgaaattgaaaaatgcattcatcttgtttgtttttctaattatttgaagaaatgatttgtattgtattataagacaagtatacacagacaaattgggaaatgacagcacactgagagtgtgtgtagagttgacgcctgtcagagcctgtgctgtgccagtggtcacggtcatcactgtacctgagcccacagttatcttctaagaagttatgtttgcagtgaatagaacattgactgaaattaggtgtttatattactgtcaccatgaatcattggggttagtaatttttaaataaacctggtaaatatccgagagactaacctatactaagttcataaattatacctagtgtagcaatgttgctgttctctagttggagtctcacggtgggtttctgtcatctgactgtttctcaggggacagttacggtagtgattgggttgtgggtgtgactgagtaattggaacactttgtgaatatatggcttagtgttaacaggaaaataaagtatggttttctttttatacttactccaccctccctgtagtatgtttgaaattgatcataaatctgcaaaagcatcagtttgtattcttgcttttgtattcatactgactcctcactaactcttgtacataagatctcagtgagacagtgtgtgttttaatactagttacatagttttgaaaatgcatatatacatgagtagtagtttaaaaagtggctggagccagagtggtggggcacactttgaatccagcagagagagggagagacaagtaggtctctgagcacaaggcctgtctgggctacatcaaaggatctcatggggccagcaggatagctcagcaggatagctcagcaggatagctcagcaggatagctcagcaggatagctcagcaggtagaagtgattgctaacaagcctggggacttcagtttcatccccaaagcctacatggagagagccttacatggagagagccttacatggagagagccttacatggagagagccttacatggacagatacaactcttgcgcgttgtcctttgactctgcataccatggct

SEQ ID NO: 17660 - DNA, 1202 bp, Mus musculus
acaacggagtcctaccaagatatgacacttctgaaccacagcaatggccagcatggcataatggcataataaactcaaaggtgtagtagtggcaggcataactttctaattggacataagatatactcaacaagagggaagtcatgcttttcctcctctccagctccaccactgtagccatcatgaatgacacagtaaccatccggaccaggaagttcatgaccgaccgtgtgcttcagaggaaacagatggtcattgatgtccttcatcctgggaaggcaacagtatcaaaagacagaaattcgggaaaagctggccaaaatgtacaaaaccacaccagatgtcatctttgtatttggattcagaacccacttcggtggtggcaagacaactggctttggcatgatctatgattctttagattatgcaaagaagaatgagcctaaacacagactcgcaagacatggccattatgagaagaaaaagacctccagaaaacagggaaaggaacgcaaaaacagaatgaagaaggtcaggggcacggcaaaggccaatgttggtgctggcaaaaagtgagtggagattggatacagccaaaggagtagatctgtggtgacttgatgttttgctgtgatgtgcagatttctgagaggacaaactaaaaagctcctaccaaaaaaaaaaaaaaaaaaaaaaaaaaaaaaaaaaaaagagggaagtcatgcctgatactggaaatttagtaactatttagggcctgtgaagtcatgaatcttggaagagaacattcaactaccattttactaaacagcacaattcatagctaaatactaaatatttctccgaatacccatagatctgtgtagttgtcaccccttatcaagaaaacatcttctttacagtggacagaaaccatcacagaaaaccataagcaatcaaagttcagttgtggagcccagcccccactcatatatctacaagacaactccttgacccaaggttcagggagcactgtagaaaatagagtggaaagattgtaagagccagaaaaatagcaagttttctgtgagacgttgtctcctaaaaatttcagaaacactgatgaagactcaccaacatggttgtttaaacaggatttgaacaaggataataccaaaagacatgttaacatgaatggagcaagcttgtaaagcctgaagttt

SEQ ID NO: 17661 - DNA, 1181 bp, Mus musculus
gaatacctgtcttagctgcatttctttctctcgccgcctagcccctcttctcttccaggtttccagaatgcctttccaggctagaacccaggctgtgatctgctggccagacacaacatttggggaaccaacacgggactgagaaacggcaaaggatttttggaagaggcactgctggtttggagctccatggaagaagaaaataattaaaggataaaggaaattcataccggagaaggttggtatgggctaaactgaaacagcgttaaacccgagcgctggttcacttaggttcagcagtgaagcttaacaggagtaaggtactgtaacaggaggtaggccgtggctctccggagctacatttttaggcatgagaaaagaaagggtttattaaaaggaaattaataatcaggcagattgcatcatgagggaggaaaatgtcccaaaaagcagagagaaatttcaggagtgccatgctttgttctctctgggccttataacagaagtagtactctgtccccttttgtgtcttgtctaatgtctggtgcaccaatctgttctcgtgttcaattcatgtatgttcgtgtccagcctgtatgaatgaatgttctatgttttatgttggataataaagatggtataaaaaactttatctgcaaagccgagagctgccacgtgcttcagccaggaatcagacacatggcaggagggcccctgctggaaaaactgttcattttaggaaaaaagggcgagtgcacagcctcttagtttccgggtaaaaatgattaatggttcatgactaatgtgtttgacaaatggtaaagtgccttttttctatgattgtagctacaaaaattaatattctctgattggtctaaatgtaactgcttcatttggttccttttttattgataatgtgctctgcatgttttcacattcagctcataagttgttggttaagattaataattgttacattgctacagatggttagtgttaaatttgataactcaagtttagactccttccgacacgtggcatgaggcaggccaagaggctgggtctctaaagatatttctagtttagataataattaatgtggttcctatcctaaatagtaaaatttaagataagatttaaagcaatgcctctttattaaagcattaaagcttgctttaata

SEQ ID NO: 17662 - DNA, 2904 bp, Mus musculus
tcggaggagatgtacaaggtggaggccgaggaagagaatgccgacaagagcaaggctgcaccggccgaaaccgaccagagataatgtgaactccgcaggcagagcaatagatgggtccaaggactttctgttttagtttctttcaagttcctctcggctttgttttattttgttttggttttgtctgttttatttttcttacccttaatggcattcctctgttgcacaggatagcctatagactgagtaagctcagagtttctgaatcagacgtcaccttggcaaagacactaagtgttaaacttttacaattgactcgaccatagtaattctagtcacgggcgaccctgccgtcattcctgccaacttatggaagcgataccaggcaaattccaggatgggaagacccacgagataaatgaaggaagctgcaagtgtgtatatgtatatgtacatatctctatatttacatatatatattaaaattgcatgggacagagaactttacaatccgaaggactagactgtgaaatgagttcttaaagaaaagacttgtttatgtataaaaactaataccacttcacagtgagtcactttgactttgagaaactgcagcctgctctcagggcgggataactatttttgaattcctatttattttgtgtgtttgtccctgatttttttttttttaattctatggcttcctatctggcagcttttaatgggtaatttctgaggtatgtatttaacaaaataacactgccaaaaagatgagagacaggaggaaagaagagagtaaagtgggagaaaatcagggcatgtcaaaaaaaccaacataagaccaattcctccagaggacataatgcacaccttaagacaaggactcagcgccgtgaccctccacactccattcccgagcatgccagcactgtatcgagcggatgccttctgtggaatcccgagcccagttcagtgcagaggaaacttgacctttagcgcagtctcaatgagtgacgttttgacgttggacctatggaatccatgctatgagccacattttgttgtgaagtttatttactcgcttgtggcttcaaatcttaaaattattaagcctgctcatttaatattgttagggtgttaccctttccttcctttcctttctttctttctttctttctttctttctttctttctttctttctttctttctttctttttttttttctggatttcttttgttcttgttcttgttttggttttggtttggtttgttttaaatagaacatagtttaatgtaatgttaggttagagaaagaagtttctgcccggttagaggggctcccgctcagataactccaccctgccctctccccgagtgttcctactctgcttccgtttagacttcctcttcttcacaaatccccttcactttagccagacctctgcagaccctgagctcacgcgtctccacccttcccctgccacgacagccctggcaggaacctggtttggaatcatgcacctccaggcaataaagtaagtgaagcgatttcagcagagtcacctactcatcggaaaaggaaataattgtcccagtgccccacatagcgcttaccttacgtaaagcagaactaatgccaacgggctgttttgtggaacaagcgttaaagctgcaatctaccacagtttgccaaatctcctccagtttcctattagaaacagtagcattaccttccagttccagtgacagcgattgcaagaggagacctcccttccttcgggaccggcctccggaacccactccaggcttgagatggccactcagcagtcccgcacggttggattttattttcttttgttttgtttttgagttgtatcctcatgcaaccttgtcaaagacctcatgcaatatcactttgaaatttattttctgtttactacacaaacattgtaatataactgttaatactatttatatatttgaaaggtataagaggtaggagtttaaaaaaaaaacctctatgtgtagatattaactcagagcttacactatacagggagaagacacgttgcaatacaagctaattctagctgcttagtaacctctggagttttcaaagggacatttttcctgtactttttcaaataatgatgtttaaaacagttacccttgacatgagcgtcatgcagctttgcaaaaggatggctgtttgcaactgaggcctgggcccgcccgtcccctttctgtagatgctgcagctttaatccgagagtccacagttgctgcttcctgatctccgagttactctttccaaattgtcttctgacgctgttgctgaagtcactctgtacacatcctagacaccgatttttttgccaagctcttacaggtggttcatcgatcgatggcatccgcatttggtatcttttacacttcaaccaaaaatttattaggtatttttcaatgctaagtcttgccttttattttttaatttcactgccaagtttgcagtggttctaagtgaatctgtgggcattttagcctgtggtcttgccagatctttgcgaattacaatgcatatatgtctatttattcaatatctgtcatataatatctatttggaagaagaaactttctcttgtagtgcctcttgacaaagcacaatttcccgcctttttttttttttttgtgaaatgaagaaaaaaacaaattgtgttttattgcagtatcaataatgtgaataaggattaacatattgtaaatgttcctttttccatgtaaatcaactatctttgttatcactaagtgataatttttaacttatgtgcattgttaggctgttagaattttttggttgttaaataaaacgcattcaataaatctgactttgtttgtcaaatagt

SEQ ID NO: 17663 - DNA, 1162 bp, Mus musculus
aaaaaaaaaatgtataactatagcccagtggttctcaaccttcctaacgctgcgagccttttgatgccattcttcatgctgtgctaatccccaaccataaaactattctcattgttacctcataactccaattttgctatgttatgaatcataatataaacatttttggagatagaggcttgtcaaaggggctacgaccctcagattaagaatggctgtttaaatgtaaataaataaaatatccaaaaaaataaaaataaaaaaagaatgacagcttaaccctttaccataaggataactgactcacttttgttttggggtttttcagacttgtatgaaaaatatttgtatcatcagtgtaccaaaaatataaaaattaagtactctatgtagttgcaataaattataatcaagaaaatatatgattgtaatggtgaatttttttttcctttcaacagtggaaagagtggagcgagagaacctttcagactattgtgttctgggccagcggccaatgcatttaccaaatatgaaccagctggcatccctgggcaaaaccaacgaacagtctcctcatagccaaatccaccacagtactccaatccgaaaccaagtgcccgcactccagcccatcatgagccctggtcttctctcaccgcagctcagtcctcagcttgtcaggcagcaaatagccatggcccatctgataaaccaacagatagccgttagccgactcctggctcaccagcatcctcaagccatcaaccagcagttcttgaaccacccacccattcccagagcagttaagccagagccaacaaactcctctgtggaagtctctcctgatatctaccagcaagttagagatgagttgaagagggctagtgtgtctcaagctgtctttgcaagagtggcattcaaccgcacacaggtaggattcacaatattctctctggggagtaagagtcagagtagggaagaaacacgacctgtatttatttctctataatttcttcaaactgttttatgtgatgaggaaatgcctaggagacacttgctgtcaagcatgagagcctgagtccagatcccaggacccacgtcagaagctgggcactgggctcacagatttaagcctagtgagagaaaggtggcagggagagat

SEQ ID NO: 17664 - DNA, 1214 bp, Mus musculus
gggctctttgaagatgctgagattgaacctgaggcaggtgctaagcaccatccttctccctcttcttgtctgcatgctctcccaagtctcttcagagcaccacgctctctgagctcctcggctttctgactaacccttcttagcccttttgctagtaggccttctctgtccaccttccagcactggattctggttcacctctcagctcactcacccctacgggctttcccaaagtagccccaatcattaccagtgcttccattactgtttatgggctaacagttctctagtttatggtttgaggtgagaactttatatatatatatttcactacttagaggaattatataagaacttactgcattgttgattttgaatcctttccctaaaggttcaactttaatatatccactgaggcactttgctttttcaaatttgggctttgagctttttgtttgttgttttgagattgctcaatctcaactcatgctggccagactagaccctgcctccatctctcaatcaagatatcaaaaagtgactttctttgttcacccttggactcaaccctattttccccaaccctcctcagctactctacactttctccagattctggctgcctgtatctctctctgtgatggatagtttgaaattgatgacctgaagcatcctatggcctgtagcttgcctgtccttcagagtcatccttcccacccccgcgccagccgcacatccctctgatgtgttcagtgtatcccagctctcacggcgtcaggggtttgtctttctctgcctaattcactctttcttctgctctttctttggctagtccctcgcttcctttccggtgtcaggagcacctttttgaagaattactgcttggcttttctgcttaccaggtgaatggtatgcagcccgaggagagaacagagcattggcttttcttatgaagtcagattgcctttctccagttattcatagcttggttccttatggagcttaacataaatgcatgcattgatctagagctaaaacgagacaacatgtgctaatgaggaagcatgaacacgagcgcagggaactctggggaacaggtggacgggaaacagaacggctgtgaaggaagctgggtcagtgattgcgactgagagctgggcttggtaatgttaacagtttagaagtttgtagtgtttgcatggtctgcaagtaga

SEQ ID NO: 17665 - DNA, 1213 bp, Mus musculus
ctacagagtgagttccaggacagccagggttatacagagaaaccctgtctcgaaaaaccaaaaaaaaaaaaaaaaaaaaaaaaaaaaaaaaaaaagattgatttaatatatatgaactgagccagattccattatttttcactaaattgttaacagtgagatttgttaaaccgactttcttgtatgctggcttaaagtgctgtttgtgtttccagagtccagttatttctgctcatatttggcatgtgctttattaaatatttaataacaagatccagatttctttcaggggctattgggtgttgaatatagatcagaccattaaaagtgctggagtgtactttaatatttgtggtattgttcttattaaattaaaagagtaaacattttaattttgactaaccgttaatcattgaattagcttcttattgatactccttccctgttgttgttatccgagaatatttgagttgatggaagatctttatgtctttatgtttttcctagatttcagagggaattcacacaaggagtaaagcctgattggacgattgcgcggattgaacactccaagttactagaataatctttcttggaaaaaaaaatcagggcgtgaactcttaataattgctgtgaaaaactaaggaagacaagtttctggatgatttgattttaacttaattaagtctgtggattacttttgtattatttggaaatactcagtatattgacctaatacaataaaacattttccacagattgctagtgttctttaaaggaggtcaaagtaaaacacaaaactacagcaccacattggtgtcctgtttaatatcattctaaactacacatgtatatatgtaaaacacagaacgacagcaccacattggtgtcctgctgagtgtcattcaaatgttttatatgaacatgtgtcacagactagttttatacatgtgaattattgaaactactgtatatctctaatgatccaagtttctgcaagatttctacaagccactgagcctagtatgtttgattatctggatagtgatccagataaggactgggtagaaccatagcagcttgacctctgtaggacatccatgtttgtttactgttcacagtagtgatgaaatggagccagcctagatgtccatcagcaagcactagaatacatgaagaaaatgtggcacataaacacagtgggcatttattt

SEQ ID NO: 17666 - DNA, 1775 bp, Mus musculus
tgaggaagaagtgtgtgtcttcaactccagacattctgtatgtgacagatttagatcaccaaccaacttcaagtccaggatcaaattggaataatgagatacatggtcatactaatgaaaccagcaataacacgcaaagaaatgccgagtgttttcttgacttaccttctgagtcttccagtgagcctgacgcaaagcgcatggagctagtgcagaagaacaccgatagctttcacttccagaaaactgtatatgatgccgctgatatggagttaactgctactgacataggcaagattgtagcagtttcaaaaagcaagaaaaatcaaaataagaaaaaggcagactgtagaaaggagactttcagaaaagtgaaaggtgcaagctctgataaaaagagagaaagctcaaagagagaatgtaaagatggttcagaagtaggtgctgaggaagaggctgatgcagccagagcagaaagaggcgctggtgtcctggatggcagaggggattcagaagagccaaactgcatttccagtactgagcagccatctcaggtaaacacgcaaaagaaaagaaccctccagaacagctcagatcaggagaacattcaaaatacgaagaggaggcaaacatatacgacagatgagcaagaggaaacaaaccctttctccagacattcagtcaaatttcttcaagatggtaaatttgatctgtgtcagaaaaccctacatcataatttaagtaagccttctcgacagacatttgtgattcgtaagtcagaaaaagataacttatttccaaatcaagaagataaagacaccatttctgaaaacctagaagttacaaatgaatttcatatagatgatctttccatcgaagctaatgaaaatgtatgtgaccatgagactcagacaatgttggacttgaaaaagtctgtcagtgctcaacaaaatcaaacaaaaataaataagactaagcagaaaataaatcgaaggacaaaaataatttctgtcatgagccaagtatatgaggacaatgataaagatattcacgtcctagaaaaagacaactttccctttcatacccaagcaaataaagaaaccaccagtggaaacctagaaagttcaaaagaatttgaatcacctcttcttttcacaagagacaacggaagcttacgtgactgtaagacccagaatgttctggatctgcacaagcaaattcctgatctataccctgatcggaatgagtcccagattagcaaaatccctaggcaaaaagtaaatcgcaagacagaagtaatttctggagtgaaatgttttagtaatgaccaaggtgttcattgctcagaaaaggataagtctttgttactacaaaaggataaagacttcccaggaactttaaaagacttaagtgagtttgatacgcctgctttttgtaacaaagatagtgcaaagtcgtgtgattataagtctgaaatgctcttggggttgaaaaaacatgaccctaatatgcaacctgcttgtcaagatgattcaaaagcaggtaagaaacttagacaaaaggtaaatcgaaaaacagaaataatttctaaaatcacccaaatacatgaaaatgatagaggaagtacacatgactcattaaataagaagctctgtcagaaggttaatatatcaaaaatcatttctcaaatgaaccaaatatatgagactattaatgaagatggaaatggctttaaaagctctatcaaagattgcgaagatattaaaagttgtgac

SEQ ID NO: 17667 - DNA, 1378 bp, Mus musculus
atagctatatcttagataataaacttttttttaaaaacattggtcatcacataacttgttgatttaaatttctatcaaatttatataaccaagcaactattcttattaaccaaataaaatgtatcattgcattggttatcttgtatatcaggctatcttgtcttcctaacattgaggatgccatctttactgctaaaacacaggaacacaccaccctgcctgtgcagtggaggttggaggccttgttaacagaacatttactttgtggggagggttgcctttctgacatctgttcatgctccaggaatactgacctcctggaatccctctgacagtatagtttttgttccttttttttttttctaccttttatgagatttccctttatttctctctcccatgcaaattacttcatattttataccaagtatctttcttttactattggtagagtttgatcacacttaaaaaaaacgttttcaggttataaagtacccatggttttaatttaaaaaatgtttaggttgtgtgcgtgcacacattcatgctacagagcatgtggagagtcggctctgctttcctcatgaggacctgctagagggtggaactcaagtcacctgctttgctttttgcccactgagcggtttttgtgagccctacatttaaatttcagactaatacagagtttgttgtatgatgtgaagtatacctgtaatattttactatttctcaagtgatttattgacttaagagctcgtatctatctactgatttgaagtttttagcgttgtgttgtattcccatgtgtgtcaattgttgattttcctgactcctattcacttatgtatcattttatcattaattctctttatttattttttaaatacaaattaaaaaaagttttaaagatttatttatctatctatttatttatttatctattatatgtgtgtacactgtagctgtcttcagacactccagaagagggcatcagatttttgttaatagatggttgtgagccaccatgtggttgctgggatctgaactcgggacctttggaagagcagtccgtgctcttaactgctgagccatctcaccagcccaattaattctctttagaatgtcagtattttcctcataagttttgaaaatcttttaataaatttaccattaggcattttgttcttctgtggggttggcacaagcgaggctttctcttcagtttttctaatttactgtttgcaaatatgaagattactgaattttgtgttgattaataaaccctcttatgacataactattttctagacatacttcttgaagcaagctgtctgaccctatttttgtgattccatgacgaatacaaattccttgctca

SEQ ID NO: 17668 - DNA, 2943 bp, Mus musculus
ttgtctctttttaacaagaggggaagttagacattaatcattgtaacttagtgttgtgtgagtgccatgaaatatgtggagaacaactcaactctccttataacagtgatcaaactctggttaggtgatagcagaggttagcttactggtcttgctggctccatcatgggaaattgaaagtgttgtgatacatgcatatggacttgttctcagttgatgttagtcaaattctgaaatgattataaagttttaaataatggaaaatggcttcctgaaacaagatgtttgactatttttcaaattcttttctagaatctgagtctgaagctgaagaaggtgactgaattttgaaacaacatcctcagtaaagcaaacaggagttgtagataaaatgtcatgtctcatgtgtcctggttcttacatcttcctacctccctatatcaagcatgatataagggctttcatggcaatttttattttaactgtttttatggttactggaaatgttggctttggtttctgaaaccacgtgtgaggagcaagctgcaggagccgtagaattgaatctgatgttgcattggttttcagttaccttctacctcctgtattttctactgtaataatgtgatgtaaggccttccgcaatgagcagttcactttattccctgggttttctatataaacagttttcaagatatgatttggttaaaaataatttgttacaaaaagattctgtttgcaaattaaactgtaaaagtattcaaagtctcaaagggcaatgatttgtgtgataacttagtgtgtccagagccctgttcatcagtgaaaatcctgtagatgattgaatccataacatgaaccctgacgttggttatatgtgagcattttcttatattcttaaccccagatgtttgatttctgggtatcatccttagtaaagccatggagagcaaacttgagtttgagaactacatgtggcagaggtaggaagaaggaagctgagtctttttctggaaacttctaggttcatttgtatctttccaggtagaacaggttgataactcctcacacaaacgttctaccccaggatacagctagactgttataagagttcccacaaggactgaatcaaggaaatgtcttgtcactaaaccatacgattgttgagtgttttgggtgagcgtgttctaacaggatctctgtacgactccattttcctttgtgaaggtgaaggacagtcattcgcggtctgccattcagttgtctgggcctggcctcattctactatagtcaagcacctagtaactcaccctagttgccattttcttaaattgccatgagccaaatacttcaattgattaatccatttattttaacggctgccttcgttgcttttctttttgctatccatttatagttagtagtggaagatgtagccaccttttttgggaaaggctaaaagtgaacattttgaaagtttttttttttaattggtaaaaaaaaaatagtaagagaataatgccaccagagactttagtggacattgcccattttgaaggtgccattcttagaagccaagaatttggtatttaaagtttatcttgagagaataacctgtaatataatttgaaataaaggtatagtaaccttaagagcactgtagcaaaaacattggtgggtggggtgaatttgtaaaatgaatgactttgataaagttttatgcacaggcaaatgtattcattagattctgtgtagtgatctgctttccctttgtaatttgtagtcctaaaaagattttttttttttaaaataaagtccatccttgcatttaggttttatagatcagtctttttattcccacccctcccccagtcgcattgatccctaatggtgtgctgtatgtcctgctttcagatgtcaactgtgtataaacattagtaacaatttgtccatagaacttgcagactaaacacctcacagattccaatgtagctaaaactacattgccatttctacaaccagatccttgcatgttaaccgtcgttcaaaacgcaccgtttattatatactgtgtatagtgaaagagtgtgtagtcttccagaactacattatgatctttgatcattgatctttccccccccctttatacacagtagtgtttaattagtatagtagcacacgagtaaggcacctgtgagtacaatgtaaagaaagggatttatgaaattattctcattttaagtttaaatgccaacctatcgcctccaatatgtaattcttaatggagatgttaaaactgtactctgaatcatgattggataactgttgattgaattcctaacttggtgtcagtttctaaggcctttagtgtcttggatattctactgtgtgtttagaactgttaagtgtcaccttattctgggattattgtcctagaaatattctgttcttataaaattttcagataccaaaatgccacatactttactcagcataatgattgatggtgaggggaaatgcatgtgaccaagtaattaacttataacagtgttcaagctttttccattatccaaaccccccagaaaccttttcccctaatagcaccccaataaattttaatatagatatactacgtactgtgtctgtgctttatacatgaaacactttttttgtatcccgtagaagttttttggtttttcgagacagggtttctctgtatagccctggcctcactttgtagaccaggctggcctagaactcagaagtcctcctgcctctgcctgggattaaaggcgtgcgacaccatgcccggctccgtagaagttttaataggtcactttttcatagtgtaaaagtttgttatatttctcacctctgatgctggggcttgaacccagtcttgtaccacccagccattttgagaccatcttgttaagatgctct

SEQ ID NO: 17669 - DNA, 1195 bp, Mus musculus
tagtgatatttagttctgtaatgataggaaagattgtcttaatgctattccaagaaatactattttgataaattgtcagtttgttccaaggaattaggtatttttgtgttagggttagttatgacttattaacatgtgtaaatttttttcctcattaagttacagatttgaagttagtgttttcatgtattaatttggaaatctatcagataacattttaaatgttatagtgttatataccttttttttcccttcccaaattagggctatcattttatttactattttaatatatattttctttattagttaggccaaatcttaatttggccacagggtactaaagtaaatactacattctacagttttgtagtatgaatttaggacactatgtttgagtgaatgccacagataagttttgttttgttttttaagaagaaaagcaaatgtgtttatgttttgttgacttaccactttgagtatcttatctgaaaatctgttccttgccatgtttttctcctgttaacataaactatgtgccctgtgaatttctggggactgaatttgaaattgctcctgccaaccgtttgtggcctggcgtgtatctgaatatctccccgctgaatgaatttcgtattctgccctgaattcactcgggtgtattgattggctggatgatgttggtgctggtgccgcccacttgacgtgtccagaagagtcaccgaaggaaaagatcgaggagtgtagaggatgatgaggagggtcacctgatctgtcagagtggagacgtactaagtgcaagatgtatagaatatttttcaacacttatttacttttcagataacataatctatatgtatatatagattaaagtttcagggatttggaaatctttttctttcttttttttctttttttttttgctttcatttcttttggtgggaggggattgtctttgctttctttgaagttttaatattaaattccacagcagtaaatcaagttaatgaaattagtctgagaatgaaattagatctaagaatagttgtatgttttttggatggtgttggctgataagtaattaatgataaggaaatttgcagcatcacctagaataatctgcattgataatacttataagtacattgttctcatttcctgttatgaataataattattcctcttttttagatga

SEQ ID NO: 17670 - DNA, 1395 bp, Mus musculus
tccagtcatcacttggcagggattccatttttggtttcatctatacattagtcataaagtaaggatcgtatcatacaggattttaagtgtgccagcatttttactataacctattacatggtccatgtgtgaaattttcctcttatgcttgtattactcaaaacagttttgtaacattttagacataatattttctttgactgatgcaaaatgctgccaaggatggcagtatacctgtacttctagaatttgagacgctaaggcaagaggatcaagagcccagggccagcctctgctaaaataagggagtcagaggctatactgggttatagagaccctgtcacagataagcaagcaaacaaacaaatgccttgttaggaagttatagtggccaggctatggcacatgcctttaatcccagcactcataggcagcctgaggccagcctggtctacagagcgagttccaagacagccagggccacacagaccctatatttgaaaaaccaagagaaaagttaatgtgagaaaatatagggaaaactcaaatatgttttggatttttgtttttgtttttgtttttcgagacagggtttttctgtgtagccgtggctgtcctggaactcactttgtagaccaggctggcctctaactcagaaattcacctgcctctgcctcccaagtgctgggattaaagtcgtgcaccaccatcacccggcatgttttggatttttaaaagtaccacttatgaattcgataagtgaatttgagaacaaaaacatattgtgggggaggggaaatgaatataatcaaaacatgaaattcttgaagtgcctctgtgtgtgtcatatggaatttggtttgttcataaaaactttgaccagtgtttacagacataaagccattacaaataactttaaaaaaaatatttgttgttttgttttttcaaaacagggcttctctgttttgctctggctgtcctgagaaccactctatagacaaagctggcctcaaattcagagcttcacctgcctcccaagtcataggatttaagtcgtgcaccatcaggcctgcatacaatttttaaatgcataaataagagaaaaatgtgttcttgggaaagtgagctattttcagtgctgcacaattgtatcagttcatggttgggaacagtttgtatccgagcaccttttaaaatatcttggggctggtgagatggctctggttaagagggccaactactcttccaaaggtcctgagttcaaatcccagcaaccatgtggtggctcacaaccattcgttttgaaatctgatgccctcttctggagtgtatgaagacagctacagtatacttacatataataaatattaaaaaaatatatatcttaacattttg

SEQ ID NO: 17671 - DNA, 1127 bp, Mus musculus
ctttcttagcatgtgcatcccatcaccctcatttgttcttttttttccttaaaaaaaaaaacctcgtcctgtctcatccctttttggttctatcacctgtgtgcacctacgtacacacaccacacacacatacattctaggttcttcatagagaaatacagtgtgtcctttttttaaggtttatttaatgtatgtgaatacattgtaactgtctttacacacactagaagagggcattggatcccattacatgtggttgctgggaattgaactcaggacctatggaagagcagtcagtgcccttaactgctgagccatctctccagccaccccttccccccgggcaccccagtttctttctgggtctggcttgtacagtgactgcagaaaatgctgggtagtaatcagtcatattttgaacacttaacaccattaattaggaggagtttggagttcagtggtagaacacttgccttccattcatagagctagaacatagtccaagaatagtccagtcctgtgagggacttctgagtgtttgtgagaaaacagtttcttcaaaaacacaaaattgttcttgggatgtgcttctgtgcccttccccagtggagcaagcagataggagtgaggtgactttagatcattccttacagttggctggctattcttattgttcatacacctccatggaaaccatggttttgctacatgaggcttgtccttgtgattgtgcctttattcagttgactcttagccctcagagtgtaaattgtccgatggctctgaataaacttggctattgcgtgagacatcagctcacctcatttttaggccctactctcaagtccatgctgccaactagagtggtaaacagtgtccagtttgatccctgcaccaccaagaaacaaaacaaaaattagagaaggtttgcctttaatgtactctttacagacagttttaccgaatgagctatggcttttgttgagccagagtcgtgaactgaaatgagaagtccaatacagctctgcagagggtggaacaccaactcctgcacagccgtttcaatccaggtgatctgtggcttctgtcatcatggtgtccttgacgtccttgcatttaaaccacac

SEQ ID NO: 17672 - DNA, 1445 bp, Mus musculus
ctttaatctcagcacttcggagacagagtcaagtggatcattgaatttgaggccagcttggacaagagtttgttctaggacaggcagggccacacagaaaaaccctgtcttgagaaatactgtcttgaaaaacccaaaataaacaaataaatataaatttaaaattcagggtttttttgttttgtttaaccttcaacagaaaggtccagatagcttccttacaaggggttaacagatggaatgttcttttctcttgtagggaactgatggtgtagaatatttattaattcctgttgacagcggaatattggctgatttcttggagaaggaagaggaggaggcataggctgtctcttatccttgaactttctgtggaagcctcattgtggcccagctgctgctcctcagtaagaatgctggtttacatccaacattaggtcattctctccagcatacaagatgttctatggaagaggcatagcatcaatttgaactttgattagcctggctggtgtactgtctctaatactatgcagtggtcgttgagttggataaaagtgcctttaatttattacttctctggagacttcttgctggttgtacagtgtgctcagggattctttggaactggatggttttgggttattttatactgaatgctatccctaatttttgagggcaatttaacactccagagctgaattactacaagtgcacttgcttcagacggtcagaggacaagagttcagagtagcgttctcacgggactgatgaggaaggaggtgtcctgcttctcctgagatgatggtagaagatgtcagtggactgagatgacacagccttctccttgtggacttaggccacacatgctaaataaagacagccagcactgttcaaatgagatcacgggagaagtacaagggatgtgtgcatatgtggagcatgtgtccaatctagaaagcatatttaaaatcgttggtatcggtaccaggagaagccaggctaagaaataaagtcctgatttacattttattgttttcagtacagtagaaaataaaaacatttcatcattcttgtacattgacattttctattttcttaaatagctcacagggataggtagcgcacacctttaatcccagcactcaggagtcagaggcagacggattgcttctctcctttaagacacaagacctgagctcacatttgtaataccaacatcaagaaggcagaggcagaggaaaacatgagttcaagacctagactagttagtgagttctagaccagtctaagctgcggtgatgtcctgtttcaaaaacaaacattcagtaaataaatacacattggtaacatgaaacctgctggtctgcactttgcttgtgtggaatgtggtatgtgggtgtctgtgcagagactgagtaagatgtcttctaccaccttctgcc

SEQ ID NO: 17673 - DNA, 1220 bp, Mus musculus
gaaaaaatattaatttgccagttgtattatcctgtgtgacagagtaagttgcagttggtaaggtacttttgcacttctgtgatgcagatcctgaactctataactgaagatgtcctcagtcatgtgggtactttccaaagtgttctggatcagcgggactggataataaacagatttaaagaaggtaacacaaagtacttcatctgtagcatttagtgtgaagttatatactgcattgctatatttaattattttagacagaaaaaatgaagattattttaatattgatactctggtcagtgccaatttagatttctttaaaataatttgtcttccctattacacttatgtggtctatgaatttcctctagctgaaaggagttacacctaattgtcttaactctgtgtggcctttttacttctgaatagttttactttttgttttctcagtggtgtgaattgcctgtaacagatttgtatttttatgatgtttaatattgtgtgtatatgcttgtttataagtgtgtgggtgggggcagcagtgatcacacttgactgtacttgtgtatacagaggccagaggttgacatggagtgccttccttaatctatcttcctccccacctcccgggtttgtgtggtctctcactgtagcactgagctaagaatttagctggctgaccatcaagcaccaatgatcctccagtctcatccttggcttctcagtccccgggatgacaaatctaggctgctacacccaggcttttatgttttccttttgtcatttaatggtgctaagtgttgaactcaggtcttcatatttgaacagcaagcagtttatctcctgagccatctccccagctccagatattgttcagttatttttttaagagttttttatgtatgtgagtacactgtagctctcttcaggcacaccagatcagatcccattacagatggttgagagccaccgtgtggttgctgggaattgaactaaggacctctggaagtgcagtcaatgttctttttttttttttttttttttttttttttttttaagatttatttatttattatatgtaagtacactgtagctgtcttcagacactccagaagagggcatcagatcttgttacagatggctgtgggccaccatgtggttgctgggatttgaactctggaccttcggaagaacagtcgggtgctcttacccactgagcc

SEQ ID NO: 17674 - DNA, 1220 bp, Mus musculus
gtctatagagtgagttccaggactgccaaggctacacagtgagaccctgtctcaaaacaacaaacaaaaaatgtattgttcttgggaagagaagattggccttcaaataatgactgataatggtttgtattacttttaattttattatctgaatacagtgcaaagataatattccatttgatgttaaaaatattagtatgaggtttatcatgtttttttacactgaatctttttggttctaaaaactaggctggctaacattcagtttaaaactgattagatgaaactgttttagcagtgtacagattttactaccttggctttatgtactgtgatttctgtaacaggcaaacagaacatcccattttcattatttgtttctgtaaaaggacagatatatttgatcagcctattgttattgttaacctgtatcaatttatagcttggtataaacttcccaagtattgagaggattctgctggtgaacattatgggtaggcatataagaagtatgatctttattaagagatgtctttcaacttaggactagtgaaaaatctttttttgtttgtttcagagctgaagaaaaaaaaaaccaaaatgcacatttaagatcttatgtactggtgcatgtgagccattatcttgtcttattgaatggatcgatgctgttgattgttgaaatgtgaaatgtgtcactgttgaacttgtaaatatctgccagagatgaaaaatattttaatttattgtaaataaagatgtataaaatttagtatccgtctgcaatgcagaaataaaacatctcagatgttaaatattgtgtctcctgagggatgtgtcattccccccttgatgtatctagctacattaagaatgtaaaatttcttttgtacagtataaaaatacagctttatttggcttttaactggatttccctgagttgattgtatcttaccttagttttatactctaccatagtcctttcattgtattttcaaatgtgattttacttatgtgtctgtttttatttcattttgaagcagaatctcactgagtaaccctggctggcctagaacttgccatgtagacaaggctagcatataactcctagagatccagctgtgtctgcctcccaccatcacaccttcctaggtatatctggacgtttacattacattaaacttatatgacaccaggaaataacacaaagaccaaaaact

SEQ ID NO: 17675 - DNA, 1145 bp, Mus musculus
gttcacataatctatgaactatgaagataactggatcatatgttttctctctaaccaggagtgcctcagagattctgctatgactttgggcttctctgagcctgtgcaattttatattcttgggaagcatgggggaaagtggtagactactgcaatttttttattaaaatgaggctaactgccccccttactttatcccaaggacacaaatgtttaattattgaggcatttaaatcaatttgtgaccacctccattggagggtagggctctaagttgattgtgtgattgataatgcactttctcaatggctctctagtcattaacaacaggtcttccctcctcccacaaggacttaaggacatttctgcccttaaagtttgaactaacaaatcagagactcaaaggggcgtgttctatttcccaggaatgattgatattatggtgctggggctttgttgggggaagggtgttgtttgtttagtttgtgtgagattgtaaatgaggtgaagttataattgttttctttcttcctttcctttgtgagttggtgatgactgaagtagacactgtacgtcttcaggtaaagagagggatttctcagtccactctctgagatatcagactagagaaaccctttcagctgcttcctagatgtacctagattcagtcagatatgggatacagaaacctaaagtcctgagatcatatactccaaggaaacacatcagggacaggtgattggttgaaaacactgatgcttctatgtgacacatttgtatagaacatttctaccagagggtactgacttgattgctctacaaggaccacactgcctttgtgtttattgcagtttgtgtatcttctgattatctgcaaagtttctcgtttttataaaacgttgaaatcatgccagtaaactagatgttgaatgtaaatgagtagcatttggtaactgctaagaggctacaaaaatgcattattagtttaaaggatttttgttgtgatttggttggataagactttcttataatctcttctgggtctcaggctttgtttgaaaaagaagggaatatattaggattttaaaaatcagtattgtgtgacttcaattgctatgaattacccatctcaagaacatcagtta

SEQ ID NO: 17676 - DNA, 1202 bp, Mus musculus
gaggcagaggcaggctctctgtgagttcgaggccagcctggtctagagagtgagttccagaacagccaaggctacacagagaaacctgtcttgaaaactgaaaataaaattttaaaaaaagttacgcagactcttctgtattgttctgctttataatagcacaagagatatgaagtcatggttcaaaatggaaatggtagcttgagaaatccaagctcaagactagcattcatcatagttatgaagttgctttttactgtcaaatcagaagcttggatcatgcattcagtctttgagaaatctaagataataaattctgaagaacccagaactctcctgcactcatagacagatgcatgttaaggcctgaatttgttatattctgaagcatcatcaggtgtgctaccaagatattatttcagaaaatggccatacactttatttaatatgaattgagctttggatagtcttaaaatcaatgttgctttaaagacataaaagtcctagatatacattctagaggtttaattttacatgtcatggctacctttattgcaatttgacttttaaactctacaccaatgatactgcttttttttctttttttaatcttaacagatcttaatcactctaatgcttcttccattttgagccctccactctgtgagtcccctttgtccattttatattttctttgatttcatctctagccttccacttttctgagacaggtgtgcaagtgtctgagtgttgtactgtctcccttcccgtctgcctgcgagtgtgcaggggttaagatgcacaagtcctgagatctaagtcaggtccgggactgcagtgccaagcactttacccactgacccatgcctgctcacttcatttctttaaaacaaaacatgaactttttccagtctaccttctattatctagctcatttttctgtcatcattcgcaaatggacttataaataattttattgcttattgtctgtcttattgtgtccatttcttgatctaactttatttcttctaatcaagttagaattaggattctgtttcccccaaaatgctttctgatgttttcatcagacagtatgtctcagtaattatggtcagccctgtatgcttagtttaggaaagctgtcagttatttcataactttttaagccaaagatgatgatttttatcacttttgatgtaaat

SEQ ID NO: 17677 - DNA, 1392 bp, Mus musculus
tttaacctagtgagaggagccttttatgcccttaacagaactgatccaagcgctactgaggactgctggctatgcctgtcctcgggtccgccttattatgaaggaatcgacttcaatggagatttcaacagaaccagcagccatacttcctgctcttggggtacaggacaaaaactgaccctgactgaagtatccgcgaggaatccaggtctctgtataggtaccccaccttccactcacaaacacctatgcggacaaattcagtctgtgtccagaacggaagctaattactatcttgtaccttccccagttggatggtgggcttgcaatacaggacttactccctgtgtatcaactaaggtttttaattcatctcatgatttttgtgtcatgatccagctgttaccccgcatatattatcaccctgcatccagtttagaagaaagctatgctgggcggcggtcaaaaagagaaccaattactttaaccctggctgcattcatggaaataggtatggcagtaggagtggggacgggagtgtcagctttgatagaaggaagacagggaattcagtctttgagagatgctgtcaatgaagacctagcgacaatagagaagtccattgacgctttaaaaaaatctttgacctccctgtctgaggtagttttacagaacaggagaggtcttgatttgttgttcctaaaggaaagaggactgtgtgctgcccttaaagaagagtgctgcttctatgcagatcatacagaaatagttagagactctatgcagaaactgagagaaagattagagcgaaggaaacaggaacgggatgctcaacgggggtggtttgagtcgtggtttgaatcgcgaccatcttggataacttctttaatttccgctgtagccggaccaatccttatgatatgcttagctttagttttcggcccttgtataataaatagaggaatggctttcatccagagtaaaattgatacagtaaaactcatggttcttcaaaggcaatatcaacttatagttcaggtagatgaagagttaggggacaccaatctctaaaattctatgattagaattagtctaaacagaagaagaggggaatgaaaggaaataaaactgtaattcatgtaatgtatgttaaatagcccaaagagttgtttgtgagctttgaaacctggggctgagaacatagcagaacagaccaggacatgcccgggcaggcccatcgcctccctagctcccacccctttgacctaagttaaatgttacaggctgctgatgtttaaatgggccaatcatgtgaaaccgcgccaattcctcccccagccccactccttttctataaaaacccctagcttccaagcctcgtggtcgaatcca

SEQ ID NO: 17678 - DNA, 1665 bp, Mus musculus
agagccaagacttcttttcctctgatttctttaacaagctgaaaagcaagtgaggcctgaggctggggtttaggccttcagcctgtggtgcaggcctcacgctgttggggggggaggggggcagatctgtgctctgaggtggcaggccatggtctgcctctgcagctgacatggctttgtctccgtggggttgttcaagcacctggggaggagataaggggcaactgttggttttgtttgtcaaggcagaaggtcctttacttggtcctttggtgcttaacttgcaaatattttgcttcagagaaattcttttctgccagggagttttgcctttctctcttgagcctcctccccaagaagagatgctctcagagggttagaaaagccagcctccacacagtggtaagagcatatgagttttctatatttctagaatctttaatacaacttttctaaatttttcagaagcaaagggtggagagagatgtccctcccttcgccaccttcagccccttcgtccagactagctgctgtcaacagttcatcgcacacatgcacacatttatgaacgactctgggttagtgagtgaccctgcctgaagcaggcaagcgggcattagcaagaattctactggttaaatttcctaaatattccaattcctgttttaaaaacagcatttgcgtttctagtctataaataactgagtaccacctccctcagcaggaccttaaagctttgccttggttcctgaaaaaaggactcttcctgctacttggacagttacagcttctaaggaaggaacagcacagagtagggaagcctggggctaaggggccagtaaaatgttaaataaccaggtttacacaaaggacagaaaccacactactgagttagagattgtggagttctgtggtgacaataattctgtccttctgtcagtgcctaagtggccactggaagcagagttttgccttggaagccagatgaatatggccaattaaagaaagccaaacttacgtttttgaaaattaaattgatcctgatgttctgtcagaacaaattgtacctgtgcatgtttgtcgctgaaatgaatcctgtctaaagctgggccttgctgactttcagtttccacctaagatgatttgggtacagcctgagaatctgttccatgggactatctgcaaaatataacaagaactggaactttccagtaagttcttcctccacaggactcttaactgttctcgttttgtttttgttatcattcagagtcagctggtatgtactttcatgcttgcctgggaaaactcaactgttttttccttcaagattttctgtgatgatttctcaggtactttcaagtagcctgttacctattcagagagtctccttgagctcagaattaaaattgccctgaatttttgaagatccaaaatcttatgtaaatagccattggtagttaagtgggttttattttttagtcttgtgcttgcccttggtctgacataagtgatcagactgccaggagaagatgttagagaagctcactagagcctaccatctgttgaaggcacattttacacagtattccaagcccctagtgcataattagtagtgggtggttctcacatcagcttgacatctggagttagggttgtccgtct

SEQ ID NO: 17679 - DNA, 1126 bp, Mus musculus
gtttttttggtgaatggctgccacaagacctttctcttctcacacgtgtgttaggaattttaaattgtgaaagcatttatcaggtggatcttgattttgtgctttgggggctctttttcattgctcaccatcctttatcaagaggacacctggatacctctctgctgttcgtactaaggctctctattgtgcttacaggatttacatggatataatgtgaagtcagatatttacagtgttgggatcacagcctgtgaattggccagcgggcaggtacctttccaggacatgcataggactcaggtaatgctccagaacttaactgtgacagctttcttaggtccagataacttctattgaccatgtttattgtagactctagagctttattagcacttttgtgtacatgttttacctatagatgttttcctttctcctagatgctattacagaaactgaaaggtcctccgtatagcccactggatgtcagtatttttcctcagtcagactctagaatgagaaattcccagtcaggagtagactctgggattggagagagtgtgcttgtctccactggaactcacacagtcaatagtgaccggctccatacgccatccacaaagacgttctctcctgccttttttagcttggtgcagctgtgtttgcagcaagatcctgagaaaaggtaatactagtcacctctaagtagcataaaacatacgtgctttacatcttatagtagttttacgatattactcttcccataaaattaacgtatcttgatcaagaaacttaatctgaagagtgtcagtgctaagaacaagtccaagtaatgagcaggtatggagagcagttgggctccttccgtggccatgccacgcccagctgagctgcctatgccacgcccagctgagctgcctatgccacgcccagctgagctgccataaacaaatcagttcttagtgtgtctgttaaggcacctttggaaactcctaagaagttaaaacagttttgtgtgtgtacatacacacacacacaaacacaataatgtacacatacacacattttctgatgttagattttctaataacttttccaaaaatttcaggccatcagcaagcagttt

SEQ ID NO: 17680 - DNA, 2385 bp, Mus musculus
aaacaaaagtgtctccctgaggaaaggcctaactgtgaagccagcagcttttacaggcaaagccacagaaatccgaggttttcctttggttgttaatttggttgagataaacattcctttttaaggaagagtgaagagcagctttcatacccattcaggcacacgttctgacttggataaaggaaatgctaggagttttgttatttgttttaaacagatttaattcagaacacatgatctaatagactcgtttgcttaatgaaatctcctcccattctacgcccccataacccaaattttgatttttctgcccccttccttccgtccaatttgggatttttgctgtttttgttttgttgtgttttgtttttcctccagacagggtatctctgtgtagccctgactatccaggaactggctctgtagagcaggctggctttgaactcacagacatccacctgcctctgcctctcaattgctgggattaaaggcatggtccaccaggcctggctccccttcctaatttgtatctttcaagacataacgctcacattagtaaagataaaagacaaaaattttaacttaaaggtttaaaagcattttgccctcattttcttgttctagagatgtaaacatctatctatcagacacatgagctgaccctttctctctctggttgcatgaggcgagggcaagaggaatgatagcgaaggaagaggagagtttgagtcaggtttcaagaaagtcattaagggaaggtgaacttcaaagtgattctggagttctttgaaatgtgctagaagacttacatttattaatcttaaatcgtgtacttctctttttttccctgcaatagaagtctggttctttggcataatgtaaagctgagcagagcatcatgggagttgacctttaccctacctttgacactgactgtcctccaattttgcaatgttcttcagtttctcagagcagtttttaatgccagccagggggggattgtcgggaggacagattacttcatatgtgtcctgttcagttgaatggagctgcttttacaattaaagtgatcttgtattttttaaactttcaaagtgatctcacctgtcagaatttttttaagctgccactacacaggtttggcatcttttgtgttttatctctttaagtgcatgtgaaatttgtaaaatagagacagtgcagtatgtatattttgtaaatctcccatttttgtaagaaaatatatattgtatttatacatttttactttggatttttgttttgtttacctttaaagatctacaatgaagccccactttatcacatgtacagatcacgaataaattttttaaaaaatacaaagtgaatgtttatttactcttcctgagatagtaaccaaagaataaaacttttacgtgggaaggaggtggagcgagtgtgtggggtgtgtcctgtcacatagtaccttagcgagggtcacaaaagcttttgggtttgctttgttctcattcttgtttcctgtttccaccaccacctccttatttacctctaagccagccgttctcaacctgtggattggacccctttggggggtcacatatcagatatccttcatatcagatattcacattatgcctcatgacagtaacaaaattacagttatgaggtagcaaggaaaattgtatggttggggtcaacacagcatgaggaactgcactaaagggttgcagccttaggaaggctgagaaccactgctctaacagccttttcagggaagcttttgaggaccgactagaagtttagaatccaagtctgatctgtagtttactaaccttaggaatctaagctcgggtttgaaaggactagaagatatttttgctatttctacttttcccattgattgtcttgggaaatgtgtgtgttgtaatgcaccttatctaaattattgatatttaaatgctttgaattcaggtgatagggaaaagtttccatgcttccagatgagcgcaggggtcacctttgtgcagaacactcagctggaggcttccctgaatcttctaggtaaattgaaacaggctcagcggctctccccaggggcagtgactcagcagctcagcaggactagtctccacgcctgaccccgagctggcctcggaagacactgctctcctttgctgcactcagagaggctaactttggaatcagacgcgcctgggtagcccctcagggaaatggtgaaggcgtctcagactcccagttctaagcctgagagtctttccatttgcttcttgtttagttcaggtgctgatgatactgtatgctctccccagagcaggcgctgcactgctgtctctcccattccgccacaggctggaagtttctgta

SEQ ID NO: 17681 - DNA, 1388 bp, Mus musculus
gcactgggattaagccacacaccaccagtctttctccagttttttgagacaatctcatttagccaaggctggtttggaactaactgaagatggccttgaattccttattctcttacttaactgcctaggtgttagcattacagagcaacacttttcaactttagaggcttattaattatagatgacatgtttcttcttgtaccttaaaatagtggccactaattgcagccaatataaaaataatgcatttttcttttcttccagctgggaatggaggaagaagatgtgattgaagtttatcaggaacaaacggggggtcactcgacggtttagataattctttttattttttatttttcctttccctcaatccttttttatttttaaaaatagttcttttgtaatgtggtgttcaaaatgaaaattgaatactggcactccatctcttagaacatatgaattctagtgttcaatattcattattggttgtttttgttgtgctgatttttggtgatcagacctcagctcccttaatactgccctttttcctttaagagatttcatgtgtgcacagagaggccacccttttcaggactgtgcattttcaggtttgtgatgataaaaagatcgaccaatgggagctttcctatgacctttcaattggctctgaagttccagcatgtggttgcttcactcctggactgtgattttcagtgggagatggaaatttttcagagaactgaactgtggaaaatgacctttcctcagcttgaagctacttttaaaatctgcgggtctggaccaaaagaagaacatcatgtttgtagtcaagatgacagatacagtgagagcaacagctaactccaaaggtggcttcactggagagaaagaaagtgtcttgagcaagacagtattgtcagaagatcccaggaaagttctaatgttcatcagcagttattaataaagttactcatacagaagtgtacgcaacagacactgcttttgattctgtttgtactttttggcctgggacatgggttttcaagggacatcgtctgtaccagcttcattaaaataaacaatatttgtaaaaacattactgaagctccttttattttagccatgtagggagaaaagtggaaatgccccagataggattttcttgcatgagtatttctttagtactatacagtaatgactttaatggctttgaagcattaaagtttctagaatgttttctgaatcaagaatttagttatagtcacaatgcctttttaaaaactcactgttggggttggtgagatggctcagcgggtaaagagcactgaccgctcttccaaaggtcctgagttcaaatctcagcaaccacatggtggctcacaaccacc

SEQ ID NO: 17682 - DNA, 1179 bp, Mus musculus
gacctagtggaatctagtgttagtctagtatagagattttacacttagaaaaagtatgtttggggctggagagatggctcaacggttaagagcactgactcctcttccaaaggtcccgagtttaaatcccagcaatcacatggtggctcacaaccatctgcaatgagatctgatgccttcttctggtgtgtctgaagacagctacagtgtacttatgtataataataaataaatctttttaaaaaaaaagaaaaagtatgtttaagggaaggactattgtgtatgctggattaaaactaaaattgggtaatacagaagattacaaactagaaatgagctggagagactggctgctctttcagaggacccagattcaattcccagtactcacatggcagctcacaggaattcataatcctaattcaattggaagggatctgatgctcttgtggcccttataggcattaggcctgcacatggtgcatagacatacatctagacaaaacacccatatacataaaacaaaaatttaaacttaagctaggaacatgaaatgcaattttaattttaaagagctttgtgtgtgtgtgtgtgtagtactaaggattaggcccaaggtctttcacatgctaaacagacactttatccccagcccaaagaaaagaataaagaaagtctctttacaaaaaggtagatattaggaatcagtgtatacagtattagaaggcagaagaaaatagccagggttctataaaaccctttcataaatgccaggaatgatgatgcacatgtttatcccagcacttggaaagctaaaggcaggctcacaaatttgatgccagctgaggctatagactgccctataaaaagaagctgaatctttttatttatttatttatttatttatttatttattctatgtaagtacactgtagctgtcttcagacactccagaagagggcgtcaggtcttgttagagatggttgtgagccaccatgtggttgctgggatttgaactccggacctttggaagagcagtcgggtgctcttacccactgagccatctcaccagcccaagaagctgaatcttaacaaacttatttatttcagagtaggatctcactttgtatacccagctggctttaactcaggttgccctgctttttcatgcctcccaag

SEQ ID NO: 17683 - DNA, 1209 bp, Mus musculus
agagtttagagattcttgggagttgtaggagatcagtcaatagttgtaggagtattattacatgttatgtggccttatatacaccacagcattcattgtgtcagaggcaacttatgtaaatctcattccttgtttcatcttgtgggtcttggtgattagactcaagttatcaagataggcagcaagtggctttactccctgggccattgtttgtctttagtttgtttgcttggttggaaatggattcttactatgtagtctagctggcctatgaagatcatactagccttgaactgcagcatccacctctagattgctggtattaaacctttagtacctggctccatgggtaaagggtataagatactcaatttggaggatattttaaaaagagatgggtataatggttatatggcataaatgtactttatacaactaaatttttacttaactgctttaaggcaatctgttgtgtatattaactactattatcagtctcattagttctgtttttatttccttttacagccttattagatgacttggataaagaactaaacaactacattatgcggtgtagggaatggtatggctggcatttccctgagttagggaaaattatttcagataatctgacatactgcaagtgtttacagaaagttggtgagttgattgttatagataaaaattaatttgataaagctcagtaggtattgtattaaatacttaagattattgaagttttttaaaaattacaaatggaactaacatctattatcttaaaataatttgaacatttactttgtggtttggtttgattctgcgttttgaaacagtgtttctttgtgtagctttggctgtactagaactcactctatagaccaagctggcctcgaatgcaaatttgccaatctctgcctccagaatactggtattaaaggtgtgtaccaccgctgccctgatcagttttcttttttttctttttttaaataatcatggcttcttttgaatatctaactttgcaaataacgggtaaagtcaatatcctaatgaatccaactgaaccagatagccaagattattgtttattacctaatacataaaaatgttgcttttagctttatggtagatttttaaagttacagttatttggccatatactgggaatactgagtatggacctggccagatttaataaagcttgcttca

SEQ ID NO: 17684 - DNA, 1159 bp, Mus musculus
tatataatagtaaattgtatgcatatacaatgtactgaagattttctaaaaaccagatttggaggtctaattttgcatatttctgtgtgtttctttagatacttaagtaggatttaactagaatacttaagtataactagatacttaactagtatatacttaagtataactagaatacttaagaataactagatacttaagtaattaagtaggattaaactagaatttcatgaaatccacagttactaacacaaaatagtaaatggacaccataaatgttaaaggagcagcttctgagtcaaaggtaggaagggatagagagaaagactgaattcgactttttattaataggcatagaataaatgttaatgtgatttcctataatattctcctgagtaaacaattgaggattttacgttttctgaaaagaatcaatgctgcctctcattttatgcttttgttgatgatagatttctcgaatgctggcagccaaaactgttctggctatcagatacgacgcttttggtgaagattccagttctgcaatgggaattgagaacagagccaaattagaggccaggttgaggattttggaggacagaggggtaagaaccacattcttcctgtggccaatgcttgctgactgtcttcatgagctataagcatttcgtgttaacaacagcatttcttatttcttagataagagctgatgtgctaatagtattagtcattgacacatgtttattcaaattagcaaaaccattatcacatactatggcatgctatatgcagtagaagatgtgttaccggttttgatgttattttcatttttctttttagataagaaaaataagtggaacaggaaaggcattagcaaaagcagaaaagtatgaacacaaaaggtaaagtcatttaagaataaagaattggttttgttaatttaaatgttttgacaggtgttttttgttttggggggcattattattattgtaaacttgagacacagcagtatggactaattcttatgaaatttggcaaggggctagagcgatggatcagcatttaaaagcatttgttcaggtcatcttttagaggacctaagtttttgttcccagtacccatatggttgctcacaaccagacacacttgtacatatatg

SEQ ID NO: 17685 - DNA, 1623 bp, Mus musculus
ttttaattcatttatttatgtattattttaaacgtaggagtgttctgtctgcatgtacacctacatgctgggagagggcctcaggtccttgtgagccacattgtggttgctgggaattgaactcaggacctctagaagagcagctcttaactgctgagctatctcacaagccctcaaatttagtttcttaccctgaaacagtttactgtgctaagaattgaacctaactaaaagctttatgtatgcaaggtaagtactgtcaccatgcccccaactcatgatttactgaagcttgctttgttgacattacagttttagattttttagtacaaaatttatgttctaaatatatagcgaaaagttcattttaaaatggccactatttcaaaaagatttcttcttgattattttcagagtccagagaaaaagaagaaaaagaaaaagaagaaagatgctgaagactaatgtaaaggaaccatagccctgtccccgaacacatcatgcttacgattcagttgggagcagagcacatcagatgctctcaaataatcaagggaggttgaatatctagcttttcaagcctttttgtgtcttgacatcaactgttgaccttagtctttgatacacaaataaaatattttctttgtattataaggcagttttgtgatctctttatattttaggcagagaatctttagccctttctatgttgaacttaacatcagactaggtattgttattgttgaaaagtgagttgccgggaattggaaattccaaagttttaaatagctttttggaaggtggtgattagacagaccaatttaagatcttatgtttcccttgccttctcgagttttaaaactgagaacattctgctatctgcttcagaaggacgaaggtggttgtgatttttatcattcactactcttgatgtgtggtttttgagacaaggtcttattgcgtagactcactgtgtagccaagagtgacattgaacttcctccacagagacaggattagacttgtgtcacttggtgtttgtgctggggatggagctcacagcctcacttctgaactatagctttagttccctgcctgggccatgtgtgtctatgtgtctcttgtttttcttgcatgtgtatatgtgtactgcttatacaccttagtctgtggagttcaaaagaatccattgtttaacctggatggttgtgagtcagtatgtcacccaaggtccactggaagaaaatcagctcctgtattttttacaccaaaaagattttctctgaaagtaatacaaggtgattcataacttaaataaaatacctaattgaaacgttaggttttcttagctactttggctcgtgttttaaggggatttggtcagaattgttggtcattgttttgggttactttgttttcctctcacaggatctcatgtggctctggttatcctggaactcctgcctccaagtactggtcttaaaggcatgtgcacccacgaccccgcctatttgcaacttgtttaaggcttgtaatcctaactgcctagcacactaaacgaaagacatggtatgctgtctttgtgattaattttgtgtctaactttaagtactatatttggact

SEQ ID NO: 17686 - DNA, 1185 bp, Mus musculus
gagggagaggcagtcacatctgagtttgaggccatcctgctctacacaacaagttcaggacagtcagggctttaaagaaaaacttttatctccagaaaataaataaatgaaactacatttttctttttctatctggagagatggttccacagttaagaatgcctttggctcctccagaggaagagtttggtctggcagcctagaattatagctctgagagatttgacttttttggcttccacaggtacccacccagcatgtaagcatgcatatgcatatatacatacctataaacttgtttatttttcaagacagggtttctctgtgtagccttggctgtcctggaactcttctgtaggccaggctggccttgaactcagaaatctacctgcctctgcaactctttaattgttgtgttttgaggctgagtctcactgtgtatctctcactggactagaactcagagttttacctgccattctgcaccacatgcatgcctggtgcctttagaagtcagaagagggcattggtttctctggaactggagtcagatggttgtgaactgcaatgtggatgctgagaattgaggctggatcctctgcaagagcaacaagtgctcttcattgctgagccatctctccagcctgctaaatgctgggactttaaggatgtgtgctacaactaacattattcttaatgaaaagttgtgagttgatggtttctacatcatagactggcaatggtcctgtgaatggtaagccagtgccccaccccaccctgtaatgcatctccgaccctttctaatttttatacaatacttagaattatacacctgttatcaccagtctgagtttataactgtgttttctaagcaacagatgcacactgtgctcattgaggttttattgttgactaaactgtagctatgtatgtctccaaaagaactgagtatttgcaaacagcccacgaaccttaagattaccttgatattacctgtcagccctttggaaagactttctgacttcaggctttgattaaaagggatttgaaagagtcaaatacagtgtataagccttgatttatcttagttccatgagaaaagaggtcagatattgaatacaggataatagtaaatggtttggaagaattgtgtcactttttagatgtaataatggcactatagtt

SEQ ID NO: 17687 - DNA, 1192 bp, Mus musculus
actactcttccaaaggtcctgagttcaaatcccagcaaccacatggtggctcacaactatccataatgagatctgacgccttcttctggtgtgtttgaagacagctacagtgaacttacatataataataaatctttgggccggagcgagcagaggtcctgagttcaattcccagcaaccacatgatggctcacaactatctgtacagctataatgtactcatatacataaaataaataaataaatctttaaaaatatttttacatcacaaaaagtcttcgacccattattaatagtttattcattctttaactcctgataatcactaaccagttttatctctgtgaatttctcattctggacatttcatagaagtttaatcaagtaatatttgtcctttcgtgtgtggtttatttcactgaacatactttcaagatttttccattttgtagcattaatcatatgtgtgtgtgtgtgtagtatgaacgtatggaggtcaggttgacagtgtttttctctcattctctaccttatttttgagacagcatctctcattgaacctggagctcactaactgactagactggctggccagaaaatctgtaaggctttctcgtctccatctcttaccagtgaagtgcaggtgcatgttagcatgcccaccttttcatgtgggtgctagagatctgagccaagtccctatgcttccgcagcaagcacttcacttgttgagccatatccttgatcctcgttttatttttaagttcattttaaatatcattacttgatagatacttgattgtttccacttttcagtattatgaataatattgttattaatgactatgtgcaagtttttattgggtatattcctaggagtaaaattgctggtctgtatattttaagtgttagttctttttatatgatggacaccccaataggaccctctgcattctgtcagccacctttatttatactttgaagcatgggaattacagattttgataaagcaatttttttttttttttgtattttcaaaactctgtgtagcctggctgtcctggaacttgctctgaagaccagactcgcctcaaactcaaagagatcctcctgcctctgcctcccaagtgcagggattaaaggcatgcaccattactgcccagcaaagcacagattttccattctaccttct

SEQ ID NO: 17688 - DNA, 1237 bp, Mus musculus
gcaggttttcactgaaatgcattatctggcaatgaaaaattccaaacataaaaaagttgtgtctgattgctttttatttttatttattctttttttaaaagtagattctttaaagtagaatcaatagatcataaaaatgtatggttatgctctagattaaaattgctaagtttttccaaaattaccatcatacacacattgattacagaactgtatgcaagtgaatgtcactcagtctttgttatgattgtattattattttaaagttaaggacaatgtaaatctaaaatagttggactttgctgtttcttcagtaattcttatattatggtgcagttaagcataattgttttgttgtttgcttttccctgtgaaatgtctgtggtaccgtttttatttaggtttctttatgactacattagttttataagactgcaggtatttcataattagttgttatatttaccatattgcttcctaactaactttaatatcgatctgtaggatgttggtctcacatcggtgatccccaagagtgccactatgaagagtgtgtagtaactaccaccccaccctcaattcagaatggaacgtaccgcttttgctgctgtagtacagatttatgtaatgtcaactttactgagaactttccaccccctgacacaacaccactcagtaagtatttacagtaatttctttataattccttgttctagaagttttgaaaatataaatagataaacattcaaggttagtaaaattttctctaaaatcttcaaagtaagataccaccaccagcaaagcattggtatatttattatcaacgaaatctgaatcaagatacagttttccctttgtctggcatgatggtgtgcggttgtaatctcagaactccagaggctgaggcagaaggattgtaaactcaagacagcctgagctacctggtgagttcttaccagtctggactacataaaacaccatacctcagcaaacaaacagaaaaatctaaaacccacttaaggaagggaatttggtgatatcagatgtacatgatggcacatgcctttaatcctgacacttgggaggtagatggatctctgtgagtttgaggccagtctggtttgcatagcaagttctaggccaaccagggctacacagtgagaccctgtctgaaaaacaaaataaaacaataataacaaaaggagagaggagagagatgggggttagggggtggggg

SEQ ID NO: 17689 - DNA, 1102 bp, Mus musculus
atattgaagactctatccatcatactgacagcattgtgaagaatatttcctctgagcattcgatgtccagcacaccattgacaataggagaaaagaatcgaaattcaattaattatgaacgacagcaagcacaagctcgaatccctagcccagaaacaagcgtcacaagcctgtccacaaacacaaccaccacaaacaccaccggcctcactccaagtactggcatgaccactatatctgagatgccatacccagatgagacacatttgcacgccacaaatgttgcacagtcaatcgggccaacccctgtctgcttacagctgacagaagaagacttggagactaataagctagatccaaaagaagttgataagaacctcaaggaaagctctgatgagaatctcatggagcattctctgaagcagttcagtgggccagacccattgagcagtaccagttctagcttgctttatccactcataaagctcgcagtggaagtgactggacaacaggacttcacacaggctgcaaatgggcaagcatgtttaattcctgatgttccacctgctcagatctatcctctccctaagcaacagaaccttcctaagagacctactagtttgcctttgaacaccaaaaattcaacaaaagaaccccggctaaaatttggcaacaagcacaaatcaaacttgaaacaagtagaaactggagttgccaagatgaatacaatcaatgcagcagagcctcatgtggtgacagtaactatgaatggtgtggcaggtagaagccacaatgttaattcccatgctgccacaacccagtatgccaatggcgcagtgccagctggccaggcagccaacatagtggcacataggtcccaagaaatgctgcagaatcaatttattggtgaggataccaggctgaatatcaattccagtcctgatgagcatgaacctttactgagacgagagcaacaggctggccatgatgaaggggttctggatcgtttggtagataggagggaacggccattagaaggtggccgaacaaattccaataacaacaacagcaatccatgttcagaacaagatatccttacaca

SEQ ID NO: 17690 - DNA, 1515 bp, Mus musculus
aaatattagccttttccattttatttttctatgtatatgtcacgtctgtattcattatttaagaaatattttttattagaaaatgtatagagctgaacctacatggaatttttaagtaagtagctgggcaaggtgactagtatagtaactttcattctctgaccatcacaaattaaattacattttctatttataataacttcagaagtaagtgatagttgatttgaatctttaatacgtatggttcgttatttcccagcacagcctgacagttctgtgtgaaaagaacgatccctccccccgtgacctaaaatactatggaaagctcatcctcccagcatgccgattcctgtggaataaaggcttgctgcaaacttgccaccagtgcgcagaccaggattgaccctctgtctttcctaagtttatttcttcactaatcctggctttgtagtgtccccttctgccagtttcatgtgttctttgactgcgagcagcattcactgtgtgtgttgtagtagagcatacttctggtgatgatgcaccgtgacgttgctgtcacgtagcttctggtgctgctgtaccttgatgttgctgtcatgcggcttttgcttcttttgaaactaatgatctctgaaacaacagtctctgtgtcttttaataaagactttctatcaaaaattgaggagttttccctcaacattgcttcttatcagtttgcagacaaattgttaccatgtgttttcagattctcagaatccttaatatccgttatctgattacgttttcaaatttagcaggaagataaaaagttaagtgcaaatctccaaattcctgattttggttcttctgtcttgaacaccgtttccttgtctataatcctctctccttctgtttaactcatacacgagcttccttcacttaccgtctgctgtgctctgacgtcacagcatttaccgtttggtcagctgggatgctgactggagctcagttcttaggattaagtttatctcacttgtgcccaggatccctttctcacctttgggtttcattggccctcttatggttcagagtcttaatatatatttttgtcttctaacattcagttttttttctttctaattagttactgtcctttgtatatttaacaaataatttgtatctttcacttatttcttttgtccaaatggctttcaaatgcattttagaattttaattttcagttgtaggacaactttaaaataagttatattcctcccatctcccaatttgaaatattaagagtaaatgaatctttgaggtccaaaagatcttttcctgtcagaaaaattgtcctacattctgatacagtttgtattaggaccagtcaattgtgaattttccaagtcttttaatgtttattaacagaatgctttaaaaatgaatatgccagataaaagaaatctgtagtttcccatctcattaaaatatatataaaacaaataattcctcgaactgcttgaagagtaggaaaggtag

SEQ ID NO: 17691 - DNA, 1244 bp, Mus musculus
catatacatctgcctgcctgaagaaggcatcatatccccctatagatggttgtgagccaccatgtggttgatgggaagagcagcctgtgttcttaatctctgagccatctcaccagcccggaattacaaattttatttaaaatatttccaagtttggtttctgaatctcagaggaacacctgttatggtatcacactgcacttttactctgttagtcatttaaaataggaaaaagaaaataaacatcagcttcctcttaatcataatcatgttcatggacataaatatttcattgcaagtcactcacttctagaatttgatgttacgtcatatcacattttataaacctatgttaagcttatgtatatgttattacatgactatccagatttttgaaaatatataattacattatttccttaactccttaaaatattctgcacacattctaattctactgttctagatcagtcagtcattctaggaagtgtgtaacacccctcataggccctagtagtctctcttagtctataatgttaatagtcacacccttacctagcagtgggttgtgtgcattgtgggttttttttttttttcagattatgagctatgcaaacttcatccaaaaactaccttacatgatcccttcctaactgtgctcattgattatatcagtctagccggttactttctgagctactgaacaaaggctattatcaaaaaaggcttttctgtaagtgtccacattaacccagaggaaatctccaagtgcccaaagaggtggtaacacctacctgttcctctctttaagtttctcatggtttatagagcctgtccctttactatctggcctgcagtcatatgccaggaaagttttctccatgcctattctgtctctcttgtttgatctaaggtctgtttctcatacctagtagggagaagagatggtcatcctatctagcactcttcagtcagcttcaggcttctcaacaccagatcaccagatcaaagtgttccacttccttcaggtttttttcttcctaaatctattttaattactttatttatatttaaagcactaaaattctatgttatattcaaattaattactccagttaatttatagcatagtagtttgatagaattgagaataaagatgttaccattgaatttaatcaccagaccacctgaaaatcagcacctaatttttgtattatctaacattcttctattaaagtatgttt

SEQ ID NO: 17692 - DNA, 1174 bp, Mus musculus
tggtctgctgtatatttaaatcttagcagtgagttttttgtaaccagtctcttgtctcaggctctctgccttgttatcagtcttaagcatataaaagaaacatttgtaaagatgtataagagtaagaaaactaatgactaaaaaatgcaattcaaagcaattaagtttcaatttaatattgagttgcttcacttctgtggcttttttttccctggtaacatatatttatttaagcaatgttgtatgccttgtcttcatttctatagagattgtattgtatgtgtttgtgtaagctggaatcatccttaattttctgttgctaatttttcaaatgaatttacatgaataactgtaaaatacactaactcttagggtgttatagctgaaacacggagatgtgtagctgccatgctttttctgaatggacaggagaaacataagctaccaagtattcatttctgagggtgctttgtagggaaagaaaggctggcacttcctcagaaccctctgtcttgttaacgggtatcttttgttggtgtgttttgctcttacattacagatagaatatcgtgtgtgagctgatgaataattactttcagttattttgcttttgtataagccatctgagaccttgctatgctgtataagttgtgtgacggagcagtgtgagtatgaaataaagcagatcactttccttttgtattatctatggatgccactatgaacgctgacattaagccactcaagagttttctatgaataagtgtaagtaaatgctttgatatatataaacctaaataaaagattgtattgagacagagacattggcaaaggaagttttaaggcagttctttaggtgtaaaaggcttgctgtaaaatggtgcgttattccacttattaaagatcatattaatgacaacagtaagtgtatttttgatttcatgaaatcttcagaaattgttactgctaatatgatattgtacagactttgcaatagagtcagcacacactatctctaacatgactcttataacagtgtgatactaaaaaaaaggtcaactgagattagaataatagctgctgcttcctagctactacaatacaccaaacaccatgttactcattttatactcagttgacagtttttaccactgccttagaaacgtgttctctg

SEQ ID NO: 17693 - DNA, 1144 bp, Mus musculus
aatgttataatttcattcttccttatagctggatgaaattccactttgcatatatactacatctttatctattcatctggtgatgataatttcttagatatcttgaatattgtagcaaaaaacaaggatgtgcatatatctctgtggtagctggtttaccaccctttggctagcagttttggagtttcaaggcttatattaaaggcttattggttgttgttgttttgtctttcttcatttgtattacgtatgtatacgtatgtgtgtacatctagtggcaatgggcaaattacaccttgttggacgtggtgtgcttctatccatgtcctttcacctaatgggtcctagaatcaaactcaggttctcatgcaaatatgacccactgtgagctatctcactaaagtcttctctctctcttaaaatatatattcatttaatatataagtacactgttgttgtcttcagatacaccagaagagagctctgatcccgttaaagatgattgtgagccaccgtgtggttgctaggaatggaactcaggacctgtgggagcgcagttagtgctctttacagctgagctgtctctccagccctgaagtcttttcttaattgtaaaagatgctttgccaaatgtgagtagtatgtagtaagtgttagcttacacttaccatcacagcccctcatggaaggaagtcacagcaggcacctggaggcaggaactgaagcagaagccgtggaagggagggttgttactgcttttttcattatggcttgctcagtctgctttgttaaacatcccaggaccacctgcccaggatggccatactcacattgggctgaatttcagcatcactaatttagaaaatgggatacaagcctgcctacaggcagattttatggaggcattttctcaactgaggttccttttcccaaatgattctagcttgtgtcaagttgacctaaatctagtcagtgcattcactatctacatcattcacagaggtaaactacatgtaaacttcatctaggataaaaacatgtaagaaatgtcattttaaaagacgttttgttgtcctttaatccagcactcagggggcaggaggatctctgaatttgaggccagcctacagaatgagttctagga

SEQ ID NO: 17694 - DNA, 3830 bp, Mus musculus
tccctgcaaacatgatttctgaagggagatgtgatcgatgctgcaagaaaatcatcttttatatgaaaacgactattttataataccaatgtcacattttctgaaagtaacaaacaagatgttccaatgatcctttggtggcctctgtttcttgtttcctttttctagatattgcttttctcggctgttttcagctttgggaccaaagggattgttgacatttccccagcaatgtcaatctcatgactgttcttctcccaagtaagaattgataggtaatgcattgaaccaagtatatataaaaagataaaaagcaatatttgtacattatgtgatttatgtttttttgatgtcaacagtttgtgatttgagtgaagtatttgtaaactgctgttttctgcactattcctgttcacacttcatcgtgtggtcagtcagtgtgaagacaggttgctttaacagtcagtgagccaaaagaaactctcaagtgtggattgttagctaggagtatggagctctctggtcttctgtgagctgtgtgtcccgtgattgcccttcctcgccgctgtcagtctgactttgatcatcactgtatcatatagccccaagagaccctgaaaaggctgtgcatggatcccccctctgcttccgtggtggtgttgtcttgtggatttggtcagggttagtagtttgccaggagtgtgatcctttgagtagcaatcgggagctgcagaatcttgagaactgactttttcttcatgtgttggcgctgtgatttgctacttacagattttgctagtttcttctccaacattccacacactgggggaaagagaagaggattagagcttagaaaacaggtacctttggaacgtctatacagttttggattcgagctcatctgataaccattgccagtatcacatgacagtatttaatttctaggtgtgtgataataaaattaaggagctgctctttagaaatgaattccatcagtgttggtaaacattgttttaatatattctaacttatgctgctgtgtacaacaggtagatggcaaaccctgcatgagagggccacaattttgaaggcgaattccatccactggtccagtcattccatcatgagaaaccaagaggtagcagtacatcttggcaagctgtttgtcaccttagaatgcctagacagtttaaaatgggctctgcttaattttaaggaaggatatttaggttaattggataaattcagacatctaagtaaaatccatcagtttttggttggaaaaactgatacattttggtacttttttttacccaaatcttaacttcctgggaactagtaaagcatagctccttagtcagtaaaagcctcgggttttggagtgtaggctttttggttggtggttgggttttgtttctcagtttagggtttttttgtaccttgatttttcgccttgtcaggccttttgactttaccattttaccaatatcagaagtacagaagaaaggcagctggcagtctgttgagttgatctgaagggagaaggagacatttaaaagcaagggttcttgttttgtttgtttttgagatggcttttattatgtagaccaggctggcctggcactcagatgcccctcccaagtgctgggattaagggcatgtgccaccacaccatgcttgtcttctttttaattctgtgggttttccccacttgaatgctgttaattgatgttctttttcctttatcttataccatctcatctctcgatttacaaatagagtttactctgtaatagatttttcccttttctgttatacttgtttggcagattgacacctctgcctttacatctatccttgaagtaacagagagggacaggtttcaggtcagcatctgctcctagaagtagaactttagtttgaggtttggttggaagaagattgtgaatttgcaaataaatgaattataaggtgaccaaacattcctgagatctaaagaaaaacaaaaaaggtctatgtccaaaaagaaaactgcctgggccaaagggctaatttttaagcatatgagctttattgcagtcttaacatatattaaccgtagatccacctagctgttttatttaactcttaattcccaggggcttggttttaaaagtgggtctactcttagtagagtgggcatgattacattgacaagccacactccataattaggttattctgtagaaactgtacagcggtagagtagtttcaatgcaaatacagtttttttccagtgctggggatcaaacccagggcctcatgcatgctgagcaagtgctgtgtcgctggcttatttccccagctcctaatttaaaactttaattaaaaaaattttgttccattgcagtaaaagtgggtggcatgtattttttggctaagggtgctgttccctggttcctggcccatcttagttatacttgaccctcaagcagtttcctccctgcagtgattattgcttctgacacggtaagtctgttacttatcactggtttatgggcagttgtgtttaaaaaactagtagttttgctttctttggttaaatatggtatgaatgtcaattttttttcctataccagatccttcattttgtttacagtgtttcttacttagacctaggaccataaccaaatctgcctctctatagatactgttgctaattggagtgtatctggcaacagagaaaggctgctttttatttttattttttaatgttttgattaaagaaacagttagcttttcctaggagaaggtctaaacacagtggccccatggagagctttctctgtctgggattgaactgagatcctgaggttttcttttaggaaactaaagtaaacttgccattactaaatttgtaaagttgagattcactccttaatgctggtgtggggggtgtcaaactggaccaatggaaatgctggatttgctaaataaagccaagatgcatagccctgcactttaaggtttctggttgctctgccttcattagtgaccctgcagagtggctctgaacagtactttgtttatacagtcctgttggagatatataatttatgttttttaaacagtgcatctttgtctctgttgatgtaaattttttaatgcaattttttaaagttacaacaaaattctcccccaaaaacagcatttccagtgatgataagtattgttgtggactgtgtccctgaacctgagcacttactgctttgtcacagggaatagaacttcctatgttcaaataaagtctgttgttcttgagtctttctttctctgtgtgtttttatgaatgtcactgcaaactcacagttcacttatttttaggcatttctagccctgtgtagcttatgtatagtttattctcttacaaggctgttcttggccacccctgactgccttagaactgagtgtagcctatccttataagtacacagcagacatggacacacaaacgcacactgacagggattcactcataagtaatccatgaatcccttgtttgttagagattattaagctggggaaatgagtgttctgtattacatggagaaggttttttttgtttttaaaattattgcaagattgtttggtctcgggtgttgagtctatatgaactagagctggccagatcagccctgtgaagatcatgtaaccacctaggaagaggagccctgcttaataagtgagaggagcttgatcctctcatttgttaacattattaaagtctatttttgagccgggcatggtggcataccacattcccagcacgtgaaagaataagaggattacaa

SEQ ID NO: 17695 - DNA, 1178 bp, Mus musculus
caggggagcccggcccacacagtgagatcaggacagccagagctacatagtgaggcccaggaagaaagaaaagagataacatatttctgtcacttcattctgtttgaatgggtcttatgttaatattttttattatgagaacagaaagttacatacattcttcccacaaacaaaaagaaaacagaaaactgaatacttatatctctaattgtatatttttgctttcttaggtagaaactggaactattaatatttttgagtatttaaataagtagtttttaaaaaatggtatctaaatgagtttaaaaatgtatttgtcttctaaactcatgtatagtcacaacatgtcagtgttggctaaaggtgcttagtaccagtttttgaaaactatgtttacatatttaaatatttaattctttacaaatgtacaagatcttaaacaaaagtgtataaaaatttcagtatctgtatttggcgttctcttaacaactccacagcaaaatttggcaatactcttttgttcatgtattacaagatgtagtatctgtagtggaaagctggacatttaaaataagcagttagaaaatcataatcatagcctggcttgtttctctgcagttttcatggtctaggcctccaggtaaacttagtatatacccaggaaattacagataaacaaccacaggagacttgaccctcggtagtaattttctgtgtaagcagccaatgtacttagagagctttaacatcttatgcagagtgaatgtttcctaactgataggaaacataagcttggagatccggtcctgcattgaagtttttaattttaagccccagcttgtgctttatcttgcttatatcctgtcaagctatatacttaatcatgtgggtttgagatagtgtttgctttatactagatttgtaaaaagattttaaaatatgtatgtatatattgtaacttgatgtacagtgttcttattataatgtaatttttattaaaaaattctgtttttttcttatgtgttagtttttgaaaatttgcttttcttgaagataatgaaaattctttttttttttttttttttttttttttttttttttttggtttttcgagaacaggtttctctgtataaccctggctgtcctggaactcactttgtagaccaggctggcctcaa

SEQ ID NO: 17696 - DNA, 1196 bp, Mus musculus
tgtctatgctgcagtgagaaaggaaatttgaggacaagttggggaattgccgggtatacctgcaaccccaacattttagaagctacataaggtagctgagggtctctgaccattaccctagctccaggttccatgagagaccctgcttcaagggaatgagttggagagtgataaaacaaaacacctcaatacccttctctggcctccgtgtctatgtgtattcatctgcacacacacactcacatacaccatgcacacggaacagaatcctaaaggataccttcttattgtttctcgttaaattgctttgttattaaagtaattgaagagaccttttcattaaaaacttgtatacttttaatgaattttatattttttgttgtacttttttgttttgtgttctctttgcagatattacagattttgcagtcccagccagatgcagcataccagatatcacaacaagtgggttggcaagacacctttgttagacttttcttaaaagcaaattttgaaaatgtaaattcccttaacaaacacgggaagacagtttcaatgaaagaaaataaaaatatgtcaactgaagatgttaagaggaactttgaaaaactggatgatgaaaaaatgatgttagctgacgtatcttcagaccattggagtttagaagatagtcagtccctgaactcaaacacaccattatttcaagaagatagctctgaaggagaattatctttcaagtcagagaatcaagaagaattttggcatagtaatacttcccatctgagcttagatctcagtggaattgatgcatgtgaactgagcgacagtggaagtcaagtgccagacagttcacctagcactccatctccagtagagtctactaagtcattttctttgcagtctgacaaagaaagaagcatcacgaatgaaatgggcttcagtgatgacttctcttttcttgaaagccaagaggtaaatttgcttatctttccaaataagattaaaaaaaaaaagatttatttattattataaataagtacactgtagctgtttcagacacaacagaagaaggcatcagatctcattatggattgttgtgagccaccatgtgggtgctgggaattgaactcaggacctctggaagagcagtcagtgctcttaattgctgagccatttctccagccctccaaataaga

SEQ ID NO: 17697 - DNA, 1172 bp, Mus musculus
tacttctttaactgtaacaattagtgtcagaccagctgttaagaatctgagaggatttactgacattattgaggaaggctttcgacctaaggttgttgggatctgtatttgaaatcataaagtattcttgaatgaaaatattgaatgatgtatgactttaagcagtgtttttgtggaaatgtgcaccagagtctgagagtataacttagcagtagagggctcatccagtttgcataccacaaggccctaggtttcatccgggatgattgtccataaaagaaagttatttgtatgaaatataaaaccaaaagaaaagataaagctataaaaagaaatccattcaggagacattaaaaaagtggaataattatagatacagaaattagtaaaaaataaacgtactgcaaaactatcaacttttagctagactgattaggagtttcaaaagacagcaacacaaacacccagcatcagcagtgaagaagaccctgttcgcctcagaagtgagctaaattcattattgcttcttttaaactttgttcagtgatgaaaaggaagaacagaatcaaaaggaaaaattggtattgactgaagactgtgaactcattactgtaattgacataattcccggcagattagaagtcactactcaacacatttacttccatgataacagtgttgaaaaagaagatggtgagtagttctgggaaaataattacctttcattattaagaatccaggtccatgagtcatgaattagaggaagaaacaaacaaggtgggactgtgaaattatagtttatcttgtaaaatgaaaaatggagagtcaggaattaggttcattcattttcttacctcagccttgtgagtagctaggactgtaggcatgcacaccctctccagttgctttcattatcctcattaatgtattaatgtatctttcaagatttggcttgagggtttcagagtaaacttagttacaaagtgcagtcttaattttatcctactttgtatatacacactgtcctgtaagctcatttttatgactaaatctgaagatccacatcctagaaagagctctaggcatacattttagaattactatctggcctcgtagaaaggtagtagaatagcttcggggttctagaataatttaaaagaaacaatttataa

SEQ ID NO: 17698 - DNA, 1175 bp, Mus musculus
tcgcttctcaatcaacatgataaaagtatttaatgaaagagcttacattctcagtattgtgatgtttgagtatagtaactgaccttgaagagtttaagacgttttacaagttgcctgtcaaggtggtacattaaggtccatacttaggaggctgattgtgagttcaacgtcagcctagcctgcatagcaagaccctatttcaaacaacaaaaagaaaagtagtgtgtgcaggaagagcttaaagattgctaggatctgaataatcaaaggagtcttgttgaagaattagtaaaatttgaaatggagatcaacttaaggaaattatgagagaatgagttggagataatggtcgtaaatctgacatgtaaagttggaatgcagaactagatgatcaagtcaccttccatgtgtcaacttgtgtggatccatcctgtatgcatggataaaaactgtgaatggtttttatctcttctagcttgaagctcagcgtcactccattagccatgcgattacctatccactgtgtttctataaccaaagaatacagccacattcttgttggcttagaagatggcaagttgattgtagtgggtgttggcaagccagctgaggtaagacttagcagcgtgtgttccttcttattgttgtgtgctcctttggtccttcattctagctaattcagaagtctccactatggataaactgaaacataagtttgacttttcagaaaaagccaaagtaaaaagttgttagtagtatttctactatgatataattgaaagcatgcttgtgtatcagtcttcgtattaatgtgtgaataagaataataagcaaattttttacttcaagtcaagactccagaggaattttttgcggcataagaacccttgtaaaaaataaaatattagtttcattagtaagactaatttgatttaacagataccaagcaggactataaaaagtcattttttggaactacaaatatttcatatgcacatgcttattcttagtgagtttactataatgataaatttacttgttcaatagtcttttatagataaaacatttgttcctcagaaaacataacggctgtaacccagtaacctagtcattcaatgtttttgatacattcttggcttcttcagagaatcataatatggtatctgcaggttttt

SEQ ID NO: 17699 - DNA, 5686 bp, Mus musculus
catttagataaagtaatattgtgaaaaatcctttttcttgatatatatatatatatatatacacatatatataaacatatatatgtgtgtatatatacatacacacacacatacacaattgttaggatggtagctaatttttattatagttaagtattatatttaaaaatttaaaatagctaattaatttggaatttaaagtgatttttatttgtttgtttttgtaaaattgactttgagttaggtcagagtagttctataactagtagtattgttaattagattccatggactttggaaaaagatctgtaaatctttgaagttatatagaaatttatatgttgagtttaatttcagggaagaactattgcgtggctttcttaaaatgatctatgatctttatttaaaagatctatgatctttactatgggagcctttaaaagttataccttttttttattctaataaccatatatttccttatatctacttgtcttttcagttgagtcttaaagaacttttgatttttcattttctctctccttttgaccatagtatccagtggccttttcttcataactcaaaaaaatgtgtttttagaaatttagatttagaaataaaagattgtgtttagggaaattttccaatattttgttatgttaggagtcaggattagtaaaacactgcaaaatcactgtcttcttagttaaaattatctgataaataacactaaaccagctggtacaaaggaacttgtgtaagtgtagagacaagacttcctttttggaaatgtgttggaagtctcccaagtcagtagatggttgtgctgtatgaaacatagcttctgctccgttcccctcccccctccaggtgctacaaccacaatgccatcagggctttgttcaccctaaaatccttaggagagttcaaagtcaaccaacatgagtgggttttcttaatttgaaaaatagtgatttgggagtagggatatcacccgacagttgaatgcttgccttcattgttcaagactctgggtttgctccctcgcatgggtgcgagatgagtaaagggaagagagactgaaaaacacagagacagacactgatggccttaaatcaagactcgaatgcctcgttggtccttgatttgaaatcacttaatattggatttatgattttttttacttaagaattataaaatctttgataatctaaggaaaaaatcctaagtgtatggtgtttgactcctgccttttaatgggaagtagtatttcttttataacatgaatacaaagctttgctcagtttcatagccatctgacccaaattactgctagatgtaatcattcctgataattggagggttttttccctaaaaactataaaccataaatgtggtatgaaaatactaacaatattcttgaaggatgaacgtctatatttattaaaacaagcaaatacagttgaactattatctgatatactcatatatgaacggtaggttatgacattaaaaaaatcactaaataatattactgggaagatatgctttgacacattggaacgtagatgttatccatagaaatttttgtaaggtatagtgaaaacattattagaatgaattgataactgggtgttttggttaatgagtataaatccccagcttgcttgctttgagtgtcaggtcatcttttcaggactttccatcagcttttgtttcttgatagaagaatcatgattataaaactctcagcttctgggtaatgagcgctttattctcaggtgtcactcttacttttggaaaggaggatcagtagaagttggtggcggttgtgtgtagacgtgtgtgtctctgtgtgtgtgtttgtatgtacacatttatgtaattgctatatatgcttaaagagtaaaaccatgagtattctgttactacataggtaaaattgaagaagaaaagaaggaacaatcagaacatgaaggtcagggaactgtaaatacagactggcagttaagttttggtagccagagttgcctgtgagggagtttgtattcccttcctttaagtcgcaatgtatttctttgtaggagaaaatgtctgcagagttgtaagcctgtttttttctttttccttgtagatttatgagactatttttcaaagaaccgatacagaaatgttgcatgctggtagaggaataagtatgcccacagaattagaatttagacttgaggatggtctcctaatcttagcctctttatatttcttttgacataggctaagaaaattaagtcgagtcccagtttttgtttggtgatggtagagccaaggtatttgcctataacttttttattaaagatatctctaaggaaagattttagttgaattttgagaggttagtttctttaaaataattatatttttaaaataaatagcatcatctttgcctccctttcagtagaaacatatgagtacttggactgtattgaatataagcaaggtattaactgcatagtatctgggggtgtgaaggtgttagtcttctcttctcacttcctacattgctattcctgtccctttttttttttctattcctgtcttaaccatatcttctaggtacgaaatgaaatgtattgtttgtacctgcaaagtctgttgtttttatttctcatccagacccatgctaatgttagtgttctgtctccagtcgaaagtcttctgcatcctcttaagcatccttacatgggcagcaaatgttcattttcagtcatttttcctaatctatgtgtgtgtgtgctttgcatttgattggtttcagatgcccatatataagcattattttgtagaattttttcatagtctttttcctgatggcattaggcaacaatacaatattatcagtctttaatattgtgtacagtgtgggccatagccatacttacttgatttaaatgtagtagtttctgtgccagtgattttccccaacctgtcgctgcctatattaactatgtttcacatggacagaaccactgcatttccttttcattatccttttcattgttgaaaagttcacttgtcttatgaattctccttagaccttttgcatttgaaaatcatagttaattaacatttaccttcaacaaaattgtttctttgctaggttcaatacatatacttcccaattcctactagtcaatattttccacacttgaaaaagtgcaaattttttgctgtattggggattgaattcagggcctcatgcatccatgttagtcaagaagaaaagcattagcaagcagtgttaaaagaataaccgaactgagtatcttgtagtattgaacgtacagtgaagagagttcttccactagaaaagcactggtaagctctcctaagtccttctgatgatgtctgcaggtatgacagaatagtgaatgcaatgttatttgatttttcataggttttagagcttagagctcatagagcattaacatttgagagctctaagcttgtgctagcgatgtgtctcagtgacggtacccttgcacatggaggaagccctaagtttgggatttggggtagcattttccccacaaccttggaaacagagtataggcctcatacacagtaggaggggttctaccactgagccttacatcctcagttcatagagttgttcttcatttgagatccagtttatgtgtaagttaataaatgactatgcctaggtactacttgggatttcagtgatttaattaatcctaactctcaaaaattataaatacattatgtacttataatgtgtataaacaaacatgtgctgaaattgccgatggttatattcttatttgttgtaaatcatgtggccatcctaatacaggatttatatctcttctctgacttttagctaccataaagtttagagtataaaaattatgtatctttattataaaacccttatataaaacagctatattatcaatgtcagctttttggcagtcatagttatttatcagccatattttctttgaccactatctttactgatattcaccacacagaagtggttgctgaacacattgcaagatttggacatataaaagttattcttttcatgccaaataaaaaaccacaaattcagtggtatatgtcttcccctaaagcagaaagcaaagtgaatgtcactgattcagcatccttttttctttgatagttttcatgctccttgaaaatgctcatcatttgaaaattactcaatcagacaaagtggtacatgcatagggttccaataacttgggagactgagatggaaggatcacttggacccgaaagttcaggaccatctgacagtgtagtaagatctccatttcaaaaataagtaaatgaacaatgtttcaaagttgacaaagatgtgctgctgctctgtgtgtgtgtgtttgctttataatggctttctagtaatttaccggcattcttaactatttttgagtgcttacaaaatttcagtgcttttatagtgctactgtaaactaaatgtagcaatcaaggtaaggtgagtttcattgagagtaagagcagttagatttagatgaaatttaaaagttttactgattaaaatgcaaactatttttaaaacaagtcttattccagttaagattttatttgagtaatatatttctatttaccttatattaaaattacatactctctgtgataccatagtaaaattgagaattaggctttaatgttgtttagtttagtttagttttgtttgagacagagtctcactaagtagccttagctggcctgtaactacctatgtagactagactaccttgaactcagagatcatctgcctctgtctcccaagtgctaagatttttcaagaatatacataatcatcttgcttttcataagtaattctggtagggagatatcagtagttaaaatttaattgaagacagtttaaattcttatcatatcaggtcttaaacattttttggaagtctgaatgttttgttagctaatccctagtgacttacttggtttccgtcgtccttccaaaatgatgtgttaacgtggctcttactgctgaaagccttttgtattttagatgattcttttttctattctgccttttactttcaaagactgtgcctcagagacatcaccacaaatgttcaccacaaatgtatctgctgctacttacagtccatttcacagaagaaaacttgtgaggaagccatgtggctttctgctaaattcttttataggctaattattctctttcccatcggtttgcttttgtatagttggaaggggggaaaagcaaaaaaaaaaaaatcagatttctggatagccattttctatcaaatgtattgctaaattaagtcaaaattaacaaacatatttgattaatttgacagtttttctgagactcaattagaagcatttcagttttaatagggtaacagtctcttgaatccatgaatatatgcattggttcagaagagttagctgaaaattcaaaatgacttgtttaataacaaaaggtacttagctgagtatgataggagacctgtaatctcaacacccacaggctgtggcaggaggattgcctcgcctgtaggctaccctgggctactgaattaagtgtgtttatatctatctgcctacctgcctgtctctcttgtct

SEQ ID NO: 17700 - DNA, 1150 bp, Mus musculus
ctatcacttcagagaaaattgagcagctcaggtaagacgacaatgaaaggaaaatctcattaaaaggcaaacatcaggtaatttatttataacataaagcttatgctaatatgtaggaaagatatatggatcttaaaatatttctatagatttgcaatagaatataatagaaaaatatatacatagatctacatatattttcatttgtttctgttttttttttttttttttttaattatttaaccaggcatagtggtacatgtctttaattccagcacttgagaagcagggagggataggtggatctctgtgagtttgagaccagcctggtctacaaagtgaattctaggacagccagagctacatagtgagaccctatcttgtaaaacaacaacaacaaaaatagctaaaaatttatatgcatctgtgtctatatgagtgtttgtacatgtgtgtgtgtacatgtatgtgtctgtatgagtacgtgtgtgtgtgtgtgtgtgtgtgtgtgtgtacatgtatgagtgtttgtacagatgtgtgtgtccctgtggagaccagaagaggaagttggctcccttggaactggagttgctggtagttgtgagctgcccagcatgactaagcagcaagtactcttaactgttctggacagttgctgctttttgaggcaaagtcctcctgaatgctgtgatcacaattacatacaccacacctatttaattacagattttaatggataatttaatctcatgtgtaaaaaatcataaaagtagttctgggagctggagagatgggtcagcagttaagagcatcgactgttcctccagaggacccaggtttggtttccagcacccacatgtggttcataatgatctgtaattccagttttcagagctccagtgccctcttctgtcctccatggacagtatacactaatatggtacacagatacacatgcaaccaaaatacctacacaaaataatacatttaaaaacaagactatgcaactcttgtttcacattaaaaaataaataaataaaataaagtagttctagataacctgttagttagcctatatgtagtagcaatgatatccagcatgtgtacattcatgctttgttcataggactacatgtcagaagccatc

SEQ ID NO: 17701 - DNA, 1190 bp, Mus musculus
cgctgtggacagacaagtttttgaaatgaagtatgaactggtcacatcagcaagggaagaagcttggatcactgtctccaaaagacactaaacgtttatgcacttaaagtctgttaggtaaatgaagggaaatgcccagttagagtatgtgctgagaccttttataaacccagtatcattttgtaatgtaaaacctgctagtgcttcatgatgtaaatttgttttttggtttttttgttttgttttgttttgttttttgtttttcgagacagggtttctctgtgtagccctggctgtcctggaactcactttgtagaccaggctggcctcgaactcagaaatccgcctgcctctgcctcccgagtgctgggattaaaggcgtgcgccaccacgcctggctaaatttgggtttttatatgtcaaaatttcttactgtatgacatatgtttatacttataatgacaactttaacaggaaagtttaattttcttttaatttgcatcattctctaaaaccattatttttaaatttttattatcatttgtggggcagtgggttttgagacagggttttttctgtgtagccctgactgctctgtaactcactctgtagaccagactggcctcaaactcatagagatccacctgcctctgcctccagagagctaggatcaaaggcctgcatcactactacctggctaagctgttattttcaatcttgatgttcataatttgacctctcaaatgagtaatcttagagagttcttttgtgcaagttggagaatcatgttttctaaatattcataaaagagaaacataatgttgcttctttttgcatttctaataaatcacctatcactctatttggaggattgttttgttttctgagtattagtgtgtctccatcattttcattaggctttagtgagtccctgggcattctgtctaccatctgttatgttctcgtgcacctaagcattcatctaaaggcttgctcgtggcacagcagttcaaatcatctgggaataacacagttgcttccgaatctgtttcaaagccagtgcctctcccgtgtgacaaaccgaggcgggaacttgtcctgattttctggaaatctcacagcattatgttaaattctgttgctcatgcagagaaacagaattcccaagttgggaattaactataatatca

SEQ ID NO: 17702 - DNA, 1115 bp, Mus musculus
caaaacataaaaatgcaaccaggaatagaatggttttaattaatgaatttgttgtatttgtttttaggccaggttgtcactacataatgcaatcccacccttcctaaagttttggaatgctgggattccaagtttgtgcctgtaattcagtttaggcagtttaggtaattcagtttatctgaaatgatctttttgccctcaaagaggaaagaatctagcaggtcaagtaagtttagacttgagagggtatgaaatggctgtggagtgtggcaatagcagaggggccttggctttgtttccctcgggtggaccacctagtggaattggttagggtttaagttaaggctgttatccagtgtctggtaaaattaaagtttctgttggaatgtatgtattcatgtgccagtaatgcatttttttgggtattagcagaagtgctaaactccattgcccatttgatggtcctgggctgttttagtctttctctagttactatattctcttcctcctgtgttgttgttgttgttgttattgttttctcccttaaccctgttcgtatcattattattttattttttgtatagttctcatgtagtgaagttagaatggaatatttttgtgtgcagaaaacatagtcaaaaagtagagtttagaaatttatttcctgatatagatatcatataccaacatattatatgtattatatgtcatatatagaaattataacttacttaaatgaaattatttgtagtttgtttatatatgtgcattctaatttcagagatggttgtttttggttttttaagacaggatttctctgtgtaacagtcctggctgtcctggagctctctttgtagaccagtctggcctcaaactcagagagagctgtctgcctctgcctcctgagtgctgggattcaaggctatgccaccaccacacagctgttgcttgaatacttaaaaaactattttaagttcaaagtcctggtctttccctttccttttgacacaatagtatttattttgaattgttattttgtttattgaacagtgcttgagagaagtaggatgaacagtgcctttgaaaaaaacgatcttatgtgctgggtggtggta

SEQ ID NO: 17703 - DNA, 1162 bp, Mus musculus
cctcactctgctctcccaaacctcatctgattcttcctctctctcctcatgttctgatgcaactttgaacagccaggaaggtgaaaaaagacatcccagagataaacttaagttaatataaaaaccattactaaccaggaatagaaattgcaagttattttttgctggaaatttacagatgaaaaactattcataataaaatattagtatattaccatgccattacaaactgaaataaaataatttagtaaaatttactaaaagcttctttagatgggtatcaggccaggatataaaaggtagtattattttgatgtgtaagcaccaacagtttgctcttacatttatagggaatttacttaaattttttttataaggtagactttataaataggtatcaaaacaagtttactgaactcaagagtttctccttatttattaaggaattcctatttgaaatggaagcctttttgaattatgtttcttgtagctatgtccgtttcagaaatacacgggaatcctggtattgtgctctgcatactcattcttcggtggctcttcctccttcagcagcagtgggagcagtggaggaagtcacccaagtagtcggagcagcagtcgggagaacagcggaagtggtagtgtgggggtacccattgctgtgcctactccgtctcctccaagcgtctttccaggtagagcattagtggttatttgtttggttttattttgtgaatttgaattcaatttgttactgaacttagtgagtgtgtatgtgtgtgtgtgtgtgtctgtctgttttgctggctgttaaacccagattcttcttaatgaaatatttaaagaattcttccctagcactctgcaaggttttgggaagtctgcacatatccagctgatcttaatggctttgctattttttctactttgttattttgttttatgtctttggtgagtacttcagttggtactttgaggttcatgtttgtattataactgcattttcttggaaatggggaagacatggtttgagaatcattttgataacaaaggactggaaatgtaaatttaggagcgttagaatccagcagtttctaaaaaactatttcttcaatctctttcctttctcgctctttcgctctcgctttctttcttaagattt

SEQ ID NO: 17704 - DNA, 4709 bp, Mus musculus
cattattcggagtagagcccggcacagctgtgcttctctcaggaggtcaggtcttcccagattagcttgaggccctgggaatttcctcccagtgaaatgaatgaagcatacaaatgatgaagttactccttttattactgttttggtttatccccttgtatcaaaaactgaaagccaagtctgaacaagtggatcttcttgctgtcatttgcattatgctgtctagattgaaaatgtgaccatttctcaatcatgaaaggcataccaacatgaacatgtagctaaaacatgtaagaccaagactgacttgaggaaaaatatctgggatctttctcaggaatactgtacacccttggatttctcttcctgcagaatctgtgacattggatgctcattgcctctgctttggggctaacctcatggcctggtggacacccttgccctttactttcagtatatggagaggaaaggaaccagtgtttaaatactttatttaactgctttttgattgcttaaggctgttttccttctttaacactgtaaaccctgtgttctcttagcactggagtgcgctaggtgagttaaccttgaactcccttgcaccctgtcctgtttgtagattataaggatgacaaaatgtgaaagtctccaaatattcccagggttgttaacagtttgattttaatgcactgttgcatgagactgcattgctgatagcagccagtgaaagcaatgtgaaatgtggtgtaggtacttcatgtactgaggtgagcttgttggatacgaaggttcctaaggatctccagccttaggctgtttcagagcaggaagtcagaccagctattactgttcttttgatattcaacccccccaccccacctttaattttttagcagagactagtgttgtcaagtctcttgacagtcactggactgggaatgaaaggctgctaccatgctcttggaccattatcaatggcagtgttagctgatgccaagtcattttcaatctctcagctatagaaaaataagtctcctcctgatctgaagtgattagactctaaagtggcactcctagtaatattctgaattttgtgattcagagtgaagagtgtgctggagaagactaatagaataaaatacttgcccagtcacactgaggaaaatcagtagtatgtatttgaaactattggcatctccctcatctaccgaagaggaagtaaagctgttgtaatccagatgcaggccttgtacatgctgtctggtgatgctagaagaacaagcgttgtagatgtgaagaaaagcagactataaggcactgacactccactggtagatccgctatctgcacctgaggcttcactgtgcaactcggacccagacagtgttcttctcaagacctcttttgctttaaggttgtaggttttgtttgtttcagacatggtgtcttcctgctctagcctctcaaatactaggattgtaaggaggagccactgtaccaggagcagcaggctgttttggttttaattttattttaaaaccacattgcacatcagctatcacgcttttagatggtttgttttttttgttttttgtttttttttgtttttttttggattttttgagataggctttctctgtatagcccaggctgtcctggaactcactttgtagaccaggctggcctcaaactcagaaatccacctgcctctgcctgccgagtgctgggactaaaggcgtgcgccaccaccgcccggctcacacttttagagtttttttagatgctttggattctttaacttgcttctagcacacgttccacttcatggatttgttaggtcatcttgactgtcttcagaatatatccctgaagtcctctgaacctttagttccattatggacccaagcaagactgtatatgaacgtttaactctgattgtattggtacatggaaacttttgaaaaatagttgcactaattatttatttaagtagccttttgttgaacaagcttagttgactaataagacgtttggaaacccagcaaacaactagcttttgtagtcatagaaacaactggtggtaggcaccaggaatacagtttatcttctggactcctgctgagttggggtttgcagaaaacacttgtgaaatcctttgtgctgaagacttgcactgggggtaatccatgggacagatgactccctcccccttgtattattgagtactaatagggtttaaaaacgaaacacaaaatactctatgttggccttttcccccaatcttaaattttttcaattttggattctatgaattgttttggaaggatactctgtaacaatgagccaggcctacagtaatcggagacttttaatgtatgtaatattttatagattgcatgctgttaatactgtgaggttatttcctgttttattgtaaattttcccatttatttgcccataaactaaaatatggttgatattaggaattttaaacaaatgttgaaactttgctgaccagaatgcaaccactttaccaagacacaggtactgagggctctggtctatcctgaaatgtctgattctgtgcacagttcctttacccttaaaaaaaaaaaaaagaaaagactggacatgtctctttttttgctgttaatatttgaaggtccaaggatctgagtgaaaatacattcttgtgtttgatcttatagccaaggcaaattagaaacaaaaatagtgccaatattttgaaatctagacccaagatttcagcctgctgtgtttggaataaatatgaatttttaaagatgtctcctacagtattttccttttggctacttctgtcttcctgagaggtacttgtcctcatctagggattagcacaggactgctgagtttgctattcttaagtcactgggtgacaatttttaccccctcctttccttaccagtactactgctgtttatattgcctggctagagactggtttatgcatctttacaaatgatgtctaccatgtagttgcctcgttaacagttttatgttgattaaagatgattcttacgtgtgggacatcaaaatgatagcttgcttttatctttcagttctcattttcttttaaggtcacctttctgcagtacagcttgctttactcttttctcctcatggagaacatggtgtctcccgaaggccgcctttacgcctgcaaagggctttggtggaagaaatggttggtagacttccaaatctttgaaatgaatgggagctgtttacttatgaatagctttggccagaaactcctcccgaaggtgacttgatgtttccctaacaccatttacttggaatcagaatttttgaactaataagctttaacaatgtttgtcccggtctcacctgagtgatgctgtgttttagataagcagctagttagttcttgactcagtgctcggttctctctccaccggaccaactgttgtaactaagcgtgctgtacttttctttagaaatagagttctatctgtattcaggattatacttgaaaaaatatgccatgttctgattaataaccatcaaagtattcagattgcttaaaggaattcaagtgcaacctgcattcaccccttctaaaacttaattcataaatacctttctataaagctgtgtgtagcaagaatgcattgtatttagttctatgctggcaggaacagaatggagcacaacaaagtacacagccttacttacgagagccttacaaagttactaaatgaagacattgagctggctatctaaatttactttatgctctttgttttattgagaatctctatttaaaaaaaatcaacaaatgacagggcctagctgtgtaaatgaccttgcaaaatatgttaatttttttgtaaaaaaaggattattttcacattaaagtgaagcctctttcgcaagttcagaaatctatgggaaagcagtttttaatcatattttatgtcctatacctttttttcttaataaaatggtttacaaaaagaatgtaaacaatttatgatctggcagttacactaagggttcccagagagttggtggtactgagtaaaaaaccattcaggcaacttgagcagacaactgttgtcagtaacattccttgtgtgcgccattaagcacctccagatgaatgagggacagtcacttaatttttaaattgtattcggaataattactgctgtgtactaagaacttgacccaaataaaaatcacacgaagtatattgcagtgtcttgtagaatcatttatatatttactacttctttctaaggtggttctaagcattgatgtactgttcagttacgtaacatttaaaaaattcaaatactgttggacttcttgcaagtttggtctctgaaatattttgttttaaagacagcttctcattttagttatgaacacggctttttccagatataactaaattttgttaagtgtaaaattttccatcattggaatggggttttaaaacaaagtgtgggttaagattccagaaaaaatgactatagaagttctctagtgatttgagtgatgtgcagtttatctccagagtgaggatactacagttcttgctgccttacaagcccattgttcttcagtgcctttgtcacttccatgacacataatgtggaaactggaaaactcaactaaaacacattttaaagaaatgtttt

SEQ ID NO: 17705 - DNA, 1710 bp, Mus musculus
gatgtaatcccagactttactgcaatttactaattaaaacaatggtcctgtgtgggtaggtgacaatttttgataaaacaggtattactatttttgttatacatgaaaatggctttctttttttaaaaaatccctttcaaattaaaaataccttttggagtattagttactttacattatctgtaatatgtaacctctctccaagtttacccaaagggaatgcaaaatctgaatatcccaccatcttttaagatggtcctttagtccaatgaaaacatgctacatctttaaaactccagccataaaaattacaagtgctcagtgcccttaggaggtctgtatgtaaaagaaacccaaaatctaggtgaatttaatgaaataacatacttcatacatatacaatgtagggaggtgggcaggggctctattggattttctctgaagtaaaccattttagagagctatctgctgttatccccagtgccttgaactctttagaggaatagcatttaaaaacaacaaaaaaccacaagtaaacttttgaggtgctaatgaaagagaaggaaggtaagtacttttgaagtttgggcagaaatgggaagggggtgactcttaaaagagtttttcatccatctacatggaatctggctgtttcctctcaaagatgtttagaaaagtggttcaagtcaatactgagccatacttaagatctggccaaactgggagcatgttgttcatgagctgtgaatttcaagaatcagcttagaaagacatggttgcagcagtaggggagacatttttttttaaactatccattaaatttgttacaacttaataccaaaacctgacgttttttcataattccacctcctagttcttcctgtatttgtaaatagtccctcctagaaaataagcatcaactggaatgtgtcaaatgactttgcttagttttactatcagccactagtgaactcttcttcctgagatgcataaggtaaaataggattagcttgtgctaagtgttgtaaaaatactgtttactgttttcaaagagaattgcacagtatctttaactggggttgtcctcttctgtttctttttaaaaaaaaaatggagtcaaggctcactctgacttctagctgtgggaattctgtcatagatataatgtagaaatatacttttttaaagcatgaagaaaacaaaaatgtacctgaaagaggacattattcagaggattatgcacagctcgataaggatgaagttgtggttttctttcagccttgttgctattattttcttctgcataaatgtacactcatttcattatgtgccttgctccctgattgtgcaaagctatatatatacacacaaatatatatatatatatgagagagagatatattcattcagtactactgatgtttttgttctactgctggattaagttattgtctgagttacacttgccacttgtcataaactattgtaatggcttaggacagtggtcatatagccagagtaaatttgtttttccagtttcattattttgtcatctatcccaattcttaataaaaaaaaaaaaagtacatagattccatttaaacaaaggatttcaagtgttttggatgagcactattaagagcctggctttgtagggtgggagagatgactcagctgttaagaatgctttctgctcttccagaggaccag

SEQ ID NO: 17706 - DNA, 1148 bp, Mus musculus
ttcatgtttttttttcattgtggatttcatgggaatccttaaggcatcctgagccatgacttacttctgttttattgtcttgggagagcagatacctttgaaaactagtaatgccaaaaaaatgagagagcagtaactatccttttctaactccagtcatgtgaccgcatgcaatttctttatatttctcaaagataacacctgttaatttaaaaaaaaaaaaagtgatacatccctatctttttcttttaagtaacattccgatttttgtttttaactgcctagtgtgtttgaaggttttgttgaggtgtagttttgtttcttctcttgtctcggatgtgttcacagacaagacccacagccctctgcttggcagctccagcttacatggctttcaggcctgtgaaaggcacgtgcagctttctcagatgctgactagtgaatagggtgaggatgttctgaccctgagggcaggacactggtgcttttcagaattggtgactcactttctgacaaccttcatttttactgtataagcaatttcaagagtctctagtgcttaaggtttggcaccaactctgaagggcagcagaacaaccaaactccagctcacaggtagtacaaacactactctatgttaacctcaccatcttggcttttactcccaagagatttaaatactttgcctttttagtcactataattctcatttgaaggggagaaaattcgtttttttagatgcccacttacagataactagatttttttcaatatctaaactttttaacatgagaaagatggctgtatcttagagattaccaaaaagacttgttttcatcaggtaattaaaagtaatagagatgacaatgtggttttttttaagtcctccaaaactaaggtgctcctacccacagatggcatatcttgcaaagggctaagaactgttttgggttccttctctctgtgttactttgatgttataaatagtgctgaatttgtctaaacagaattgagaggtcatagaaatccttaacagggtaacaattccaaggtttccgaacctgggtgttagtgtggactcgttcatcagactttgaacagaacattttgccacctttgctactcaaaaccaattttatgttgccaac

SEQ ID NO: 17707 - DNA, 1131 bp, Mus musculus
ttatagaagaaatagatgggcagtttctcagctagagagtaccatcagaatgtttggtgtatctggtagggctttttttaatttctcccagtttttcccagttggctgaattgagaactgcttgactgacataagtactacatgtaaagggacactgtacatcaggaaaaccttcactatacggaacgggtaaacagtgcaggaaagggaaatccagaagacactgtggctatacataggaaactaactcatggctgctctagttgcactagtcctgccatgaccccagccacatttgagatgtcttcacaggtaagcttcttgtctacaacacaaggaatatttaatgctatgaacctggctactttcagtactgtcttgcgaagcttcatcaacttggcctcatgattctcgctttattgtgaatgtccagtacacattgtaatgtactgtccagttatgtctttaagtgacagttaccttcatatatagtgtgtgcatttgtagacatttgaatccatgaatagtctgaatatgaaatatataccctgtgcccaatttggttcatcattataaagacagtcacctgctgcaatgccttctttaaaaattgtttggtaggatagaaaagaactgaactggccctgtacaggtatcactcactcatgaagttacaatgcaaagaatctatttgggaatgggattatcatgaacaaagtgagttttcataatttcatcgatagctagtggagctgctaagatctttgctatttacagcacaagtgtagagattttgtaggtaaccaggtgtctgatggagtagtgtcacagtccagtgacagtgacactggctatgcataggcagctgggcaaaccttggaagcattgctccgatgacgctactagacttcacattcttctgtgtgcttttggtacttttatcaacttacaatgacaggttgaagggaataaaatacaaccttagagctattttttaagagaataaaaactgtccatcccatcaattacaaatgaacatatcttgtaaaggaggtctgtgcctgttgaaaagataaccagtgccaaacacaaaactccttagttcctgtccctcaaggagatagaaactgc

SEQ ID NO: 17708 - DNA, 1174 bp, Mus musculus
aaactagaggattcttaacagactcgttttctttagctgatcttttgccctataatgaccattcccagattcaggacatacaaataggtgatttacttacttgtttgaaatttcagatttaacaagaatttgttttaaaatgttaggagacctggaaattgagagagacacgtaagttttaaaaaatgaagtctttaaatagaaaggagatgattagcatatattatttgaatactcagcaaattttaaaacttatttttagggttaggtatcactgtgtaatactggctggactggaattcactgtatggagcaggctggcctaaactccagtgctcttatgctaccacacccaggttccatgtagttcaggcttgtctcaaacttgctatgtaaatgaggatgaccctgaacactgccaggtagaagcagaactttaaagaaacttgttagaacagagatagccgttagaaggagagctacatcatgacaaatgtaatttttttcactttagggaaaaaaacacattttaatgagtatgcatgttcatgtgcacaccctcacttacacagtgtgccgtggcacatttggaggtcagagaacaacttgtgggagctgtttttctctttccaccattgactcctgaacatcaagctaagtgctttgaggcgagcactttttttttaatctaccatgtaaggtttcttaatacttataatttgaatggattattttaaaaaaaactaatttgagttcagactttgtccttataatatgcatttattattgttagcataactaaatcatgtcttaaaatatccttaggaaacattccactgaaattgtgtggagtcagattttcctggtttttcttaattctgctgttggtagagaaattttaaaatgtggtcgttcctttatttatttacttttaaccagatgagttgattttttttttttaaagaagtgtttctttagctttgagtcatcttaaattaacatcatcttaatatttaaagatcctaaattgggaatatttggggaaaaaaaaagttttaaaatttagatcaataaatatcagctgggaaattccagagaatggccctgacctaggtccatctcttagttagtatttaatatttaataaagcttgctttaaatttggccccccaaa

SEQ ID NO: 17709 - DNA, 1530 bp, Mus musculus
cagcgagctattcttccttgtatcaagggttatgatgtgattgctcaagcccagtctgggactgggaaaacagctacatttgccatatcaattctgcagcagattgaattagatctaaaggccactcaggctttggttctggcacccacacgtgaattggctcagcagatacaaaaggtggttatggcattaggagactacatgggtgcctcttgtcatgcctgcattgggggcaccaatgtgcgtgctgaggtgcagaagctgcagatggaagctccccatatcatcgtgggtacccctggccgggtgtttgacatgcttaaccggagatacctgtcccccaaatacatcaagatattcgtactggatgaagcagatgaaatgttaagccgagggttcaaggatcagatctatgacatattccagaagctcaacagcaacacacaggtagttttgttgtctgctacaatgccttctgatgtccttgaggtgaccaagaaatttatgagagaccctattcggattcttgtcaagaaggaagaattgaccctggagggtatccgccaattctacatcaatgtggaacgagaggagtggaagcttgacacattgtgtgacttgtatgagacgctgaccatcacccaggcagtcatctttatcaacaccagaaggaaggtggactggctcaccgagaagatgcatgcccgagatttcactgtttctgccatgcacggagatatggaccaaaaggaacgagatgtgatcatgagggagttccggtctggctctagcagagtattaattaccactgacctgttggccagaggcattgatgtgcagcaggtctccttagtcatcaactatgaccttcccaccaacagggaaaactacatccacagaatcggtcgaggtggtcggtttggtcgtaagggtgtggctattaacatggtgaccgaagaagacaagaggactcttcgagacattgagactttctacaacacctccattgaagagatgcccctcaacgttgctgacctcatttgaggggctgtcctgcgacctggccctagcccagggttcagtcctggggtggggctaaggaagagctggaggggggaggggagggagccaagggatggacatcttgtttttgttttggtttttttttttttttttttttgtttcagtttttttttctctatgaataaatgtcactttttgaggcaaaaagaaggaaccgtgaacattttagacacccttttctttggggtaggctctgccccaggcgccgtctccttctcccccaaacactaatgcatttccctaacctagtcacctcattcctaaaggctttcctaccccagccaaatctccaaaagtgagtcaaggggctaaaaaacaaggctggcctcatttgctggaccaaatctacagggagaacccctgagtgaggttgtccagggaattgtcccccggtgaggggagcaggggagagaaaatggtagccatttttacattgttttgtatagt

SEQ ID NO: 17710 - DNA, 1348 bp, Mus musculus
ccaaatattaaactatttactaagtctttctgcccctttctcctagataatcaagttatatgatctaatgggtagtcctgaacaagtcaacgactgtttcggtaaaataacatgggttcctattttgaaaatatctactgtttctgtgatggttattgtcaatcagacaggatctagaatcacctaggagaagggcttcaagcacaaccgtgagtgtcttagttagggttttactgctgtgaacagacaccatgaccaaggcaactcttataaaggaaaacatttaattagggctggcttataggttcagaggtttagtctattattatcaaggcaggagcccttttgtgactggcggtgaacgagcgtgcagtgccatgaaggcctcgggcacgcttcgggagtacaaggtggtggggcgctgcttgccaaccccaaaatgccacacaccaccactgtaccgtatgcgaatctttgcacccaaccatgtggtggccaagtcccgcttctggtactttgtgtcgcagctgaagaagatgaagaagtcacctggggagattgtgtactgcggacaggtgtttgagaaatcacccctgcgtgtgaagaactttggcatctggctgcgctatgactcccgcagtggcacacacaacatgtaccgggagtacagggacctgaccactgctggtgcagtcacacagtgctaactagacatgggtgcccgacaccgtgcccgtgcccactccatccagatcatgaaggtggaagagattgcagctggcaagtgccgccggacagctgtcaagcagttccacgactccaagatcaaattcccactgccccaccgtgtgttgcggcgccagcacaagccacgcttcaccaccaagaggcccaacaccttctgctagacacaaagacccactgaataaaaacttgagactgtcaaaaaaaaaaaaaaaaaaaaaaaaaaaaaagcaggagcatggcagcatccaggcagacatggtgctagagaaggagctaagagttatacatcttgttctgaaagcgaacaggaaaagactggctcccatgtggttaggaggagggtctcattgtccacccccacagtgacacacttcctccaacaaggccacacctactccaacaaggccataggttctaatagtgccactccctgggccaagcatattcaaaccaccacagtgagtgatcatttagattatatcaaacaatgaccatgcctttaaggaattatcttgtttagatgaattgaggtaggaagacttgaagacacacactaaagtaaggaagcactattccctgggcatgtgttctggacttcaag

SEQ ID NO: 17711 - DNA, 1163 bp, Mus musculus
acatatattatctggtcaattttccagatacagttcaattgctcagtggttcatctgtcttttctgggctagagttgaacaaaggtgaccctcagagctccttacaaggtcttgttatttcagaaacattttatttgtgtgtgtgtgtgtgtgtgtgtgtgtgtgtgtattttcttgagacagtctcaaagattaatgtctaaaataaactcagctgttgaaaaattgttaagataccatcagaaaagtaattcaacatgtcctcgatgcttttaactcatgtgttgaaattctaatcggcaacacacttgagagagaacaacaatgcctaggtttccagatgatgtgttgtagcgaacaattttgaattcattttcgtcttaggaaattaaattagtctttacaagaactcagcaagcatcttccttctcctctaattatcccaaggaatatacttgaaacaaaaattttaattatcacaggtctcttagaacaatagagtattagcaaagcaaaaaaaaaggtgtgtgtatgtgtgtgtgtgtgtgtgtgtgtgagagagagagagagagagagagagagagagagagagagagagagagagggggtgtgtgtgtgtgtgtgtatgtgcacatacatgttcacgtgcatgtaaacttttgactaccctgggggctctaagaggctctgtttgggtacagtacccttcatttatttatctcatctgtcttatcaccaaaatcctttgttcttatattgaaaacaattcctagcacatggtagggactcaataaaatctgttgactgaatgaataatcacatattaataaacataaatctttctctttactcttgtgtatattcgtctaggatttatttgctggctgagggcaataatctgtctaactgatggcttaactgtggatatgcaaaactgcttcccaccccaggaaacagtatgcaaacaagaagtgaaggtatgcctgggtgtccgggtactggaactttcctttgtacacacagtacatttcagggacaggtggtaaaggaacaaaggaatgatgtgtttccatagttctgagatttgaatacttactaccgagtgtaaatgtataacccttcaaaattcgtagaactaattcagtccactgaattcatcaaat

SEQ ID NO: 17712 - DNA, 1226 bp, Mus musculus
ggttgtggccgaggctgtggccgtggtcgaggccgcggggctcgtggaggtaaagctgaagacaaggagtggatccccatcaccaagctgggccgcctgattaaggacatgaagatcaagtccttggaggagatctacctgttctccctgcccattaaagagtctgagatcattgacttcttcctaggtgcgtccctaaaggatgaggttctgaaaatcatgtcagtgcagaagcagactcggctggccagcggaccaggttcaaggcttttgtcgctattggggactacaatggtcacgttggtcttggtgttaagtgctccaaggaggttgccactgccatctgaggggccatcatcttggccaagctttccatcgtccctgtgcggagaggctactgggggaacaagattggcaagccccacactgttccatgcaaggtgacaggccgctgtggctctgtgctggtgcgtctcatccctgcccccagaggcactggcattgtctctgctcctttgcccaagaagctcctgatgatagctggtatagatgactgctacacttcagccagaggctgcactgccaccctgggcaactttgctaaggccaccttcaatggcatctccaagacttacagctacctgacccccgacctctggaaagagactgtcttcaccaagtctccttatcaggagttcacggatcatcttatgaaaacccacaccagagtctctgttcagaggacccaggctccagctgtggctaccacataaggattttgtacaagaaaaataaaagaattaagtctgctaaaaaaaagaaaagaaaagaagaagaagaagaagaagaagaagaagaagaagaagaagaagaagaagaagaagaagaagaagaagaagaagaagaagaagaagaagaagaaactctgcagaatcaaggtactgaaggttataaccactttggttcaggccttcaggcctgcctcctctgcttcctagtctatagccacaaagtaaacaataatttaccacacactcaggttatcatgaaacttcctccaccgtgatagactgtggccgccgaaagcatgggctaaaatcaacctttcctctctgaagttgctccggtcaggtatgtgtcacggtgatgattgtaactaatacaacaatttaaataaacaaataatggaagtaaaccaagaaaaatcttgggataatcataggcca

SEQ ID NO: 17713 - DNA, 1181 bp, Mus musculus
gtgtgttgttgtatgcatatgtgtttgtgtgtggtgtacggtctgtgtgtgtgtgcggtatgtgtatggtgtatgcctgtgtgtgcctctggtatgtgtggtgtgtgtatgtgtgtgtggtatgtatatgagtgtatgatatgtgttggtttgtgtatgtgtgtgtggtatgtgtggtgtactgtttgtatctgtatgtggtgcgcatgtatatatggtgtatacctgtgtgtacgtgtggtatgtgtatgtgtgtgtggtatggtatgtgtagtgtggtgtgtgtgtgtttatatgtagtatgtggtatatgtagtgtttgtgtgtagtatgtggtgtgtgtggtttggtgggtgtgtgtgtttgtgtgtgtgtgtgtgtgtgtgtgtgtgtgtgtgtgtgtgtgtgtgtgtaggagtccaggggactcaggggcaggggcagactaagactatttacagaatcaggcctctagcttgtcctttaagacatagaaaggcttctctttccttgactgccttgctggcatccacaagtgacctcgtggaaggaagaggtgaagcaaggctataaacggagcaaaggaatggctcgtgggattctaaagaaacctgtgctggacagcaggtgactgctctcaacgcattgaagcaggcatggagaggcagctgagggccatctggcttccaatccaggcctcctgaagtccaggtgtgctctctcaaagcctcagtatttccttctggtcagtgggaatactggtgctgagcccacagcttgctatgggcgatggctgtagataatgtctgccgcctttgagaacacatgggtgtttgctattgtctaactgatgatcttcccccacaaacacacagctctgtgtgtttgtggcctctgatatgcagagctggaaacttcctacaacagtccacgatgcttgcctacacagccacgagaaaggccttacaaaactgtgtgctttttcttttaccatgtggtcctcttgaacccaagccaaacctgggtctatttctttcttcttttccttagtttcttgaaatttaattttgacccagctaactttttttttttagggattttccttctaggaagaaaaatttttttgattatgtaaattgaatacaggcatctattctgcaatcaactgggatgggttgtga

SEQ ID NO: 17714 - DNA, 1198 bp, Mus musculus
ttgaggacattagactctgaaaggcaataacttacccctaatcatcatccatccagaaggtgatagaaccaagacttgtacccaggctaccacaagctcatcttgtaggcaaaatgatcttccactgtgcccgctgtccttgagagggtcagtgaggatctggtgttgtggataaattgtgccaacaacacacattctcagaagccctggtcagagccatacattcagatagctaacagccactgtgtacttaggtgtaccagcctctattctaaggccagcacaacaggtaggccccactcagagcactcctttagagtcggggggttcgatgtatggaataattaaatcacttgaccaaaactgtacaactaagtaagctgcagagtgaacataaaaccaggcattctgagtccaagttcaggctccgaaccacagttcaaactgcctcaaaatgcaagataaaatgaataagcatgtgacctgacggcctgacagttgcttagtgggtggactccaattagtaggtctcagccacgacttctagtatcctccttgtctctcctagatgcaccctgctccaacatgctggggatgctctcgggcctcattgctgatacccagatctctgcctcctccacccgagagtacctctggagccccagtgctgcccgcctggttagtagccgctctggctggtttcctcggaaccctcaagcccagccaggtgaagaatggcttcaggtagacctggggacacccaagacagtgaaaggggtcatcatccagggagcccgaggaggagacagcatcactgccgtggaagccagggcgtttgtacgcaagttcaaagtctcctacagcctaaatggcaaggactgggaatatatccaggaccccaggactcagcagacaaaggtaggtcatttcccagaggggttaaatggggtacagagagttggggtgctgatttctcatctagtaggtatctatcaaaccccatcagcacaacaaatcaggtatcatccaagaggcaatgttgcgcagggcctggttgcttaagttagatttgttcttaattcccataatctttctacaaaggtatttttggtcactcacgtttcagagatggcagaactaaggcgtatgtcatatccagggtcacactgtatgtcggtgtttgagccatgattcagaa

SEQ ID NO: 17715 - DNA, 1952 bp, Mus musculus
aatagagaccattgggaatgcaatgtggcttcacccatccttatccccatcccaagccacccaagactatggttcctccagtgcactcagacatgaccccttttgttatgtttcctggtgtctttgaagtcacaagataacagccattgggtgcatggagtcatttctacttccagccctgaagcaaatgtgtctcatgttgccttataaaaagaaaaaagaaaagaaaaaaaaaagaagaagaggaataaaaagttcataatgaatgtttagctctgacggtccagttgtggaatgtcataaagaataacacacctgggatgatgtaaactcagtagtctgttttaattgtgagcaggaggggaccgatagaagggaggagatggaaagacccaaatgttgtctttgcagagtctcctcacccccgggcatcattatgttgagcctaacgtgggatggggttgaggaagaaggtattctttggtattattttggtcattgtcatagagtttgtaaaatacaagggaggggtttatttgctctcctttcatggtgttaacgtgtgcctgaatccatagctgctgaagtatgtggctgtccttctgacttagttaaatagtataagaaagtaaaaaggaatcgtttgctaaaatgaacccaagtgctgccaccagttaaagcactcatggcatctggctaatacacccccaatgtctggtctgaatacacccccaagggctggtctgacatcagcagataaactagcatgggcagagagaagacgccgtggtaaagttatacctgttgcccctacttttcctcccccaaactctctaccgagagagatgttagagatgtgcaaaagctgcattaaacggcagaatcaatttggttgcaatgaagtgtctatttgaagattccaagtatactagggctcagtcttgaagccatttgctttctactttccagctaaaaggcttcttagaaagtgaacaattctctcaagatggttgcctggtcacatgactctccagacaccttctaagaaagaacaaaatactaatgatttttttttttattattgcttgggagagagccattcagcattctctcagagtagccacataggtccctccagcacactctcagcttttgcatctggtgcctttcatccccctgaaaggacactgctctcctgctcttactctgtttcaaagagctattctgtctcaactgtagcaactctgccaagaaaagaaagatgaaaggctagtgtgtggctaccttgaggtgtcctacctcagtggaagatagagaaggaagtgtgaactcaggtgggcaagcagccctgagtgctgagagaaccatggcgtcacggagcactttttgttgttgtttttaaacagagttgtttattcaccactagctgaacatttagggccagtcattccttgcaaatgattgacattcctacaggtgccctgtgcaggcatttatagaaaaccacagctggagagtagctgatgagagtttcttcctctttaaaagaaaatggtggccatgttgtgaacttgctctatgctcacctgatgccccatgcagcatcatattcatgtacatgtcacaaatgagaagatggtgaatcccatgataccttcaaccaggactcagcttaagctctctctctctctctctctctctcctctcctctcctctcctctcctctcctctcctctcctctcctctcctctcctctcctctcctctctcctctctcctctctcctctctcttctctcttctctctttctcctgcttccagcatctctcatagcattatctaaaagggcagctcatgtgtaaaaaggccatgccttgatgctttagaaagcaaaattctgtatcctgttagagaggaaagaatcaatctcttctaagcaaactcgaccggaca

SEQ ID NO: 17716 - DNA, 2484 bp, Mus musculus
gaaagaataacaaaggaagagagagaaacgcagcctgtattgggaagaatgaccagtgtggacagagacattttgttgaatgagtctccttgataggttaagaacattgatttcttgtgggaggctacatccttatagggatataagtgcaaagacatgcacttctacctacaagtcagcaagttctatggatggagaagcttacacacagcttcaacctcaggagacctgagttcttattcatacacatatgtgccatgtacgtacacacacacacacacacacacacacacacacacacacacacacagcagttcatgtgttttttattaagtgccttgaaaaacaatgaagaaaaatgtcctttcctctaggtagaaatcaccactgtctcacaagttaaggctcctcctgcttctcctgccccagtgactccattcccagcccccctacccacggctgagccacagtggactgagtctggctacccggggaaaaaaatcagagccctagatgactccagaaagggaggcatcaggaagataatgaaattgtgtgaaggataagattgtcctcatcaagatccaaatcttgactttctgttaatgcctaaagattgtctgtgccctagaaatacagtctaagccccaccagtatgtccagactgttgcatatcagtggtaaactgtctgaccgttttttttgctgctgtgatcacccacaatttcatttgtcttgcacccaggcaaaagggggagggtggacgggactggctgtggtccctttaaatgttaacttatgaaaaccctagttcagatggtaatgtcgcagtgttttgtatgaagagggggaacagtcatgccgacatctatttattcccgcgtgtgtgtgtgtgtgtgtgtgtgtgtgtgtgtgtgtgtgtgtgtgtgtgtgtgtttgtgtgtgtgtgtgtgtgtgtgtgtgtgtgtgtgtgtgtcgcacccttgagttctctgtatctactgtgtatgtgagtggtaacgtgggactcagtgctggtgttgtgatttttgacctagagcctgggtgttactgctgatcttggcactcgttggcacagtggtagaggtgaaaagttcatttgtctagcccaggggggcatagcgttaggagccctctgagctgggcgtgcagtagaagaaagttggtatttagctcaccctcttcttcaccctcccatgcagctaggattcagaaagctgggggtttctaaggaggagagaagtgcccactccgggggtcctgccctcacatgcccagtggaccatttaccataatccacccccccccaagaccagccctgtctaaagttatgtgcaactcaacctgcattcctctacaagtcctgcatccacttcactttggctgatttgaggctctgggtgagtcctgagggccgaaaagaagcagggtccccggggctacatgtagatacctcaccaaggctggaggctggtctgttgtaagatgtaaagaaagacagctgagtctgattctaacttagccagaggacaccttgacgaatctgttatctctatctgcaggtaagctagccagcctgtctccttgaattgttccctttgggaaatctaattcacagtattgatctccttttttgccttgtactgaatgacacattacctccacgctctcccggactaactggtccacagggccacagggttgcttgctctctcttgcaggaatggggagtcgacagggatgagggtccaaggaatgagcatgaatgacaagaaaacaaggggaacattaagcttttccagggtgtgcggttaaaggtatttgaccattcactggctgagccagatcacgggaactcgagagcttttactgtgattcttcaatgtaaaaaataaaacaatgtcagactgtgtttatatgatttgtataaagcctttttaagattactatttaaataaacattataccagaactatttttcctacattgtctttcttgagaacaaagagagccgggacctgagtgaccagattgccccatgtgctggagacttttctgggttttaccactcagagttttgtgtcctggaaaatgctccaagttagtcatcttggacagctataacagataccgtatgtcaggtgacttagactcaaccatttgatgcttagtgctggagactgagatcaagttcaagcaactactagcacatttagagtctttctaatttgtagacatctaccttcccttcatgaaccatatggcttttccttcctgagtttctttgtctgtttcttcttccaagagtattaacctcatccttgcaacctagtctaagcctaactactatctatgaccccacaacctcctaataccatctcagaggaagttagattctcaatatgtgaatttggagagcataccaacacccgtaattgtgaatgaactcacatggttggtcat

SEQ ID NO: 17717 - DNA, 1077 bp, Mus musculus
ggagtggacatagaaatattcaaaggcaatgaaatgttgctctctagatatatgtatataaatagtgttgatataactgtacatacacgtgtatatgtatgagttctatggcaatcttttacatttagcaaaatgctgccctactggaatatcgccactgcagtggcacttgtatgtaatgatttaaaagacattatcaagaattatttaaagaacattaaaggtctcatctaaagacagccacacactatttatttagcttcctagtcctttgattgttgtgtctgtataactgtaagggagactgtcattttaagtcaccacccgtgtaggagagctgagattcactcgggtgctttgtatccctcccctctctgaaacagtgatgtaccacaacccagcttgtttatctcagttttaaagcagtcctagtattgccattggtgtgtgtcatccaccatgtccttgatcaacttaattcaccaatttgcctcttcctttcattaataaataatgatcgttttgatcattttgcctgggggaagctaactcctctcttgctgcagggaaatagatcatctagctgttgttctgccttgttccaagttcaccatggaaagaagatggttctcataacgctgtcttaagcatagtttattttgcatttatttaaacatcttacttttttttttttttgaaagaactcttgagttgcacatacttggcacagatttctttcccactgcccttccccacaagatatcttttcattggtccatcagttttccataccaaacgcaagaacatcaagacgaaactgttaactcctgttactgtctgtgaggagctggcggcaggttctacctggagaatttagagggagagaaaggtagccggataatcctgaaccctcctgaggaaacagttcacagagtagctccctggaaactgatgtcaggatcagcctttaacagcaagcctcttggcagagggcactaactaacctgctgccccagtgtaaactgaaaccaagttccagtgggaaatcaagggtgggaggtagccattggaaaccag

SEQ ID NO: 17718 - DNA, 1849 bp, Mus musculus
ttctattttataaacatgccatattctttgctatattatgttcaaaggctagctctgatatcacgtgcatttcctattaacttttggattaacttatgatgtttttaaagtgacataagaaaaaagcagattctaagaccagcctcgtagtcataagcataaaagtgtgtgtgtgtgtgtgtgagagagagagagagagagagagagagagagagaaacagacctagatagataacagctcatttatcttttgaagtgatgggaccagagatttgttgaaacattatgtctagtaaattttcttcatattccaagtaataaagtaatatgttttcttggtcaagttcagaaaacataggccttggtgaggaagctttgcaggggctgcttttaaggagttggtgggctccatgtatatttcaaagctggtatgatttcagttgtttgcaaaatatgttttcaaactgaattgtgccattggtagtggagtggagcagcccagctccgccctctggctgtgggaaaatcccgctaccttcagtgcttacctgagtcatgtggaaaagaaagacacattcctgtcctgggagctttgtcagtcgctgtgcactctttcctggagcacctggtgatcggagacaggcaacgagagccaagtgctccgtcacacttactctactatgagagctctatacttagatacgccagaacaactcccaggaacacacttgaattggcagtcgtctctggggcctcagttacttcatcttaggttcagacaaaacccaggaaagctctccatgttgttttttacacttgtgtttttgtagcatctccctgtttcatttactcttgctttcagattttaacaaatctacatatttcttgtacatatgcatgcaaacgaaagaagggagtttgtactgatgccatttctcccttcagttgctggttaatggaatttgctagactcaattcccccttattgaagggtgagaacagacccttgtttatatctgtacagagatgtgtatatgggatgtggtggcactttgctgaatgtgaacttgccttgtcaatggaaagattgaaaaagtattatgtttatttatacatttgtataaatctatatatacacgtatgtatatgtgtgtgtatagataaagctatatacatatattccctaaaaaatgtgtgtgtataatagattaacagcctttgctaagcaagattatgcatctgtgggaaattctgggttattcggcaagccagtggaaacgacgacagtgtagagaacattaagcacgctgaaatgggactcctttggattacagtcacaatgacagattacattggtcacaaatgaatctttgtctggactcttctttctcagatttttgctagctattctctcattacttaacaatcacacatctttgccaagttgtctgttgtccaagtgctgggcatgtgcagagccacccccctgagggcggccttctgggcatgtgtggagccacgccctggccgatgttccccttttcctatttagttctctcactagacaccttggcatgaatatctcagctgtcactcacaggccttatcaatgacatttccccacagtatacagctttcagtaatattttctcttaagaattgggtagtcatcaaaaataaaaagccaacattcaaacagttaattttcaattttttaacttaggtaactttggagtattttacttacattgaaaaaacataattaatgactttatgattgatattagtattaggtgtattttcacacttattatcatttaaagagtttgatttgctttgtgttttaaat

SEQ ID NO: 17719 - DNA, 2049 bp, Mus musculus
tggcctgccactgtgctctggcatcctgggtggcgtgggtgggtgggtggttgtgggtgggcttcctctgcagtgactgtctaaaaccactgccttcttctagcgcagttctcagcatggctctgcattgttttgacattgcagagtgggagtgaggatattaacactaaactgtttaataaataggtttggagttcattacaattttaaagtatttactttttagtctcctttttagacttaaaaaaattaaactctattctttatctgacatgtgtaggataatctagcacagtggtttgttgaatggtcaacacaattctgcagtgtaatgaggaaacttagaaacatctttggaagagaatttagtcggagtgaatgaatgttctcttgtatttttttttctctattgctacccacattggtctatggattcttcatgtcaaaattatctcatgggagacagtcactcatgaaaagacatactgttttccccctttcaacaaataaaaaaataactgactcttccctgaaattcattaaaaaagaaaaataatgacttaaaattttggcttctttaagctttcttattatattcttgtggaaaccaaaatcacactttaactaaagttgtattttaaatgcaatctttcaaaatttttataatacggtgtctgtgaaaagcagaggcagatgtttgctggccagtgagtggaaggacatttctgggtcttagttctgcctcttgtagtccagtgtcatagatgctgcagctgtgggtaaatgtaggagcctgtgggctttcactccagtctttattcttggctagcttcccctctgcactgtggaaaggagcaagtaaaattgagatgtggcatttcagagatttgtcgtgactttatttaccctgtgttcctgagtatcaggaatgttttgagtggtttgaagagcagatccgatataatctctggctgacctaagttagtctgagaagcagtcttctaagataaacaaacgctgcttgactcttggtggccagcagcacagcatgtttccttttctccctcccctctgccttttgcacgctcatccccagtgttgcagtgtgctcgtgcacaaacatgaccacactcatcttggcccaggagtggtaggatcttcttttgttggttttcattgttcttcttatgtgtttgtttgtttgtttgtttgtttgtttgtttgtttgctttttaagctggggaccactgacctaactctatatgcaccccaagttccccatggaaaacgtttcaacatgcaggacggaaggcaccagtacagctcaaggccacaccgtcactttccttggggacttaggctgatttgccccaaattgactccagcctgtatcatttagtacaggcggctcccgcgggtcaatgctgacacagtggagagcttgacacctgctgacagtgtgtgcctctgttccaaagggttgaatcagttcttctcaacggtgatagctcttctcactgtctagtgttgagtatgtctcagggattccttgtggaaattagggcagtttttaaaataaaaaactagttttaaaagaaactaaaggtgactcctcattgatgagagctccagagagagaagcgtttgctctcacagccccgtggtgttgcgtcgaggacttctttctacgtcagctctcatctcagcttcagcatacagaatcctttcccatcatgcacagctttaaaacttttatttaaaaacttccttccccaatgagctttcagaatacttattgtagattttaagagaaaaggtatattaatttatgctattaacatcacctcataaattataagttttatactaaagctgtattgagtgtaatgaattatgttgcctatgtgttttaatagcttaaaattatatatgagcttctttttatttttatttttatttttattttttgacaaaacaaactagtgacgcacctttttacactggatctctgccgtgtcaaggtgtatagctgtcctttgctaccttgca

SEQ ID NO: 17720 - DNA, 2558 bp, Mus musculus
gatagatttgaaagctgacgctaggcctgtttggtccatcattggctcctagtttttacatgtttacagttgtgattctttggtgagatttgtgaactgtggaggacacgtgtagaatccatgtaccagttgtgaagtgatgtgtaatatcggaaggacacacattttaacagttctttcaaagcagaatttggaaattagacataatttgacttaccttaggtacttttaaaataatttaagtacttaggataaagtaaaattggaattttttttttttttaagtgtaccaaggtttggggtaaaactctttttgggtagtgcagtaagttggtggctgtggactggtgtgaggggtttcctcttgcctgcccacctgccttcccctcccagagcagggtgcagcttcgtgctctgcctggctttgctgatgggtccctgtcctttcatgtaccattaggtgttcatacctgagctcaacctaatttacatatgtatatttttaaaagtaaggcaacatatctccaaatgatgtggtacagtaattcttttgtcagggactgtctgatcctaactccttcctgctaggtaaaggttgggatgtattttccaacttctgctgtgtgtgttcttcatgccatgctacgtctaaccaggcccttctgttgaaggcttttcgttctctgccttgtgaaggaatgatggtgatcagcaggcattctgtagatactacgtgcctgagcttttggaggggaagtgccacatgaaatcatgatatgccctattttgtatttactgaggttggggaggcaaaatatgtttgtatttacttttttccttaaaaatcatgttaattaattgcaacatttatttttaatagctttgcctcttttgcatattgagaaatttttaaattataaattatgtcacaaagcaaaattatgtttggtgtcaccatgcacttcttttctggactgtgagaacagccttttgactgctggacctgtgagcccacgtcagtaggtttcttactttagtacgctgtgatggggtgagagtgagtggttgcctcacctcaaaagtgtcattttctctgctaggctgttctcaccacccactagagtcatcattagataactgtattcccagaaaatgcattttgtctccagtgtgcatcaactgaagactgtagcagagccgcactcggacttctccttatcagctcttctttgccagggagaggagagtcaggagtagtcaatttggactgttattggctatgtgtccctatattagctgctgaaaattgtttagttgtcaaaactgagtttgcagtaggttgcaccttttattgtttgcaattttctgttttatgtgcatttaaaagcccttctttgctttcgagtgaggaggcatgaactgatcaggaatgttgccagctacagcttcacgccaaaaatattgagtaagctcccttttgtttagatgcccatgatggcttctgaaggaatactgatagcagagcgaatgagtagcaaaagcacactcccttctgttttagagcagacagccaagcctatcatttgctttttttctagctttttttgtgagccccctgttgggagattatctgtctctaagcccagaggtgtttgtccactttgttacaactctagttgctgaaacaattctagtctctcaatagtaggtgggtattaatatgcaaagaaaaattcagcatcttttataatgcttatatgagatcatagcacttatggtaaggcaatactggaatcaaaaacaaaccctacacagatcctgatggggtagaagctagttttagtgtagtgctcagtgcgcgagagacagtaacaaagaaggctccctctgtctctgcaggtttctgggaccatttataaaggccagttcgttgtgttactgtgatttaccttggaagttgctgcagttagtgactgcatatgtgctctgaggatatgaatgtcagcaactgtaatctctggtgcctgaagggaagatgggctcctttaattgttgatgttattttagtaataatactcaagacactttttttttttcttctgtaaaaatggcttagcaattttcacacctgggtaggttacacagctagggaacaattcaggacaataagtggcagttacaagtagcccagcaagtgatagactatgcaatggacaaatcttctagttaccatcacattgctgaaaagcaaaggtgatttttctctagtgagcctactgtacgaggtattcctgcttagaaatgacagcagttccctgttggcaggtaatgtggtctgatgcccctctatgaaaagagtatggtttgatgagaagcagatagtcattagagatggagttgagaagtgatcattttatgttgtcaaataactatttataagtttaatctcttaaagtaaaccagactctcgactaaaggtcagaaaatcattccctctgtgagtcacactaaaactcctccgaagctcactgtccacacagcaaagttagtcctctgtg

SEQ ID NO: 17721 - DNA, 1340 bp, Mus musculus
ctgttacttttgtttgtttgttagcatgtttgtttgtctctgtttgttttcaaaatagggtttctctgaatagtcttggctatcctgaacttgatctgcagaccaagactcgctctgctagctgtgaactcagagattcacctgcctttgtctcctgagtgctgagattaaaatcatgtgtcaccattgcctagctggctatatttttttccaatgtggttttgaaagatagagtctacaagctagctttgaacgtctgatcgtcctgcttccacatctcaagtgcttagattacaggcctgcaccaccacacctggccttggccatttgatttttagtatatttggagtcacattttgtaatatgtattttatgctctgccttctgtatatgtgaggaacatcttcacgtgtctgtgcatttttgcaggtactgcaacagccacttgcaggtactcggctttatcccgaaaaaagagaggaagaaaaagactgacccggtagatgaggtgaaggccaggcaccagatggatgccatggcgtttagcctgacggtgcctaccctggccttgaagatgcccaatggactggatagcatgtccctctctccacctggggcaagggttcctctccactacctggacactgagttggaagacccctttgctttcaacgaggaagacgatgacctaaagaaaggggtgactgtgagaaaaaagttgcagagcaagttggctcagaaccggcaacgccagagagagacagagattttaaaagttcggcaagagcactttagcacccctcccacacctccacagcagcacacccacctgtcacctctgtctacttctttaaaacctccagcaccaccacagggttcagtctgcaagtcacctcaacctcagaacaccagcctaccaatgcagggagtggcccccaccacacactctatagcacaaataaggcaggcctctcacaagaggcctctgcccctccttccctccagtcgagctcccatctcagatgcccccaggactgaccgaatcctcatgaaagccgccgccttctctccacacttgtcttgtataagccgcctgcagagactggtgaaactgtgcacccaaaagcgtcagctggacgcggacctgtttcctcatttaggtgagttggcctcctttcctggaactgattgctgccatgaagtgtgcctgtcacagctattgtatatttcagcagaccactcacagtagaaatgttttgggatagttggttgagtagatacagttctgaattgaccatttgaacttttgttatagcttttgaaaattaaattcttgaaat

SEQ ID NO: 17722 - DNA, 1135 bp, Mus musculus
ctttttccttttcttcctttatttttattgcatttatttctttattttttttgtgtgcttgtgcacacatacataccatgggcgcctttacttgaaacttatgtttctttgtgaatatgctcttcctgtgtacccctggatggcacagccagagctctatatagaacaggctggccctgagttagaagtaatcctcctgcttcatcttcccaaatgctgggattataggtatatgatactgtaaccaactctgttttatatttcatataaacattttttaacaagttgctaaatattttgtcaatataacaaaaaatgtagtgctttgtaaaaagctatttttgaaaatgtatatttgttttatgtgtatgggtattttgaccccctgggtgcctgaacaccacatgggtgcctagtgcccacagaggcccagggactgcagttacagatcattgtgagttctgggcactgaacccaggttctgtagaaagacggtcagtgctcctaactgccgagccacccatcgagctcccactctttctcccctcacttagcccaggatagctgaggatgacctggtccttctcctagcacctcccatgtgctgagattataggtatagaccctcatggaattaacttgatagaagaggctctagctttgatccactttgagctagtcacagagtgaatctgatttggtccagttttggagagtgacataacacattgtataaaccccttttcctcttggatcttacccttggaatattagattccagacagcctctcatgttgggaagggcgacatggaatactttatgttctggctgagctggttttgtttatgtctgtgttaatgaggcctttgatattttgtagacaatctgcttcttcttggttgagcagcagtccaaactgtggtagcctgggctctcttcccgttgctgtgctgcagaagatttaaaatcaggtatggctgagaggccgcaagccccacagtgaaattctccacttgagtatgccatacactctctgatttgtttatcatctgggtttcttttttgtggtggccttttagctgatgttcacaaggaatagagtcacgtgatgtatgaagggaaacatatacactt

SEQ ID NO: 17723 - DNA, 1164 bp, Mus musculus
gtaatctccccaccatgactggaggtaaggggctgtgcctatcaatctccactgtaccccacccagcctagacagctgacctcaaaagcccggaagatggcaggtaggtgtgtgcctaaattctacattaacatgaccatagacactttcagtctaaaccttactgttttagaaatggccatttatagtgtttcaaagatttgggttttattgtggttactgggtcttgaaagaaactgttcctgaggtaagcaccgaatgaagcaggcatgtgatcgctttagattatttcagtgtgaaatttctgtaaaaaaaatacacaagtttaaggtaggcatggtggcacacatctttaatcccaacaactgagtagatggagggagacggatctcttcaagttcaaggctagcctggtttatattcaggagtgctcactctagataggtaggtaggaggtagggaagtaggtaggtaggtaggtatctctgattcaaatgtagtcaaatataggcaatctgaattctaacttatccacgactactcagacctgagaactgttacctgatcttatgctaaataagaagggagtctgtctgagagttgctgagagggctgctggtttgtctgtcttaagtctcctcaaagcccagcaggagcccttccagaactagatggtcagtggctgtgctggaggaggcccctttcaggctacaggcagagaatgacaatgtcacacatatcagggaacattattcctcctgatgttaagaaaataactctccaacagaagtcacatcttaagtgataattgggtgggttgttttgttttgtttaattaaagcttcaaagtaagattaaagattgaatttaggtagaattagcattaatagtcaatcttttctgtaatttataacaagaaaaaaaaagtgtccccaaagttatggttagattagttaaatattgtagtaaggagagaaatccatggagacctcaggataataagcaggggttagcagaaaggtgacactgttcatttctgtgacatttctggctaaacaagcttttgtagacccactgggaatgtaaccactatttccatgggaaaataaattccaggttccagacaagtaatttagagatgttgtggaacacagccactaataa

SEQ ID NO: 17724 - DNA, 1185 bp, Mus musculus
tatgatttcaaggctgactgactgctctgtactggacaacctatatgggggttcattcctgagagaagctaattctttttctcccagcagtcagttgcttgcagttctttgtctagaggtgagacctgtggaattttctcccttccatgttaaaattcctgttggtattggtattcggatcttgtttatgcagcctttctaggagacactgctttacagcagacttctggtacgctggctcttagactctttattttctggttccttgagcaatagctgcaagagccatggtgtagatgtgtctgttgtggctggggtccccacaatttgttgatttctgcattgtttccagtgtggttttcctctgcatttgctgtaaaaagcttctttaatgtgcagtggtagctacactaattcaggagagacggctgtgcctcctgctactctggatgcttgaaaatgacttggtttatttcctgaacagtcatggtctttgctgactgtaggtttcttagagatgcccttttctgtttccagttacagaattttgaaggcaatgctgtggcagcgattgcaggaggcttggtggatgctgaagccttagtagctctgaaagacttgcttaataaagttgactctgacaacttatgcactgaagagatcttccccactgaaggagctgggtgagaagcagtaagctgtgctccaggctgctgtttgggatttcattttgatttttgagtttcttgtagcccaggctggccttgaactctgtgtagcagaagaactttctgtctttacctcctaagtacttggattgaagatgagtgttacaactgttctcagctatcgttttccttttttaaaaaaaaaaaagcagccacatctgtaatgtcactgttcaatctttgacacactgggttctctaacataccagtacactttcacatctaagtcaaaccagacagcatgaacgtagaaagatcctgtctgagcaaaggtagcttagaggggtgggaaggaagctccgagggcaatgagaggtgaacgtgatcagattacacatgtatgaaagtggaattctcacccatcatgtgtagttaacacaggctaataaacgaaatcaacagctaaatcttacagaagaatgtagtccttaatacatgttgtaagtttagtttcatt

SEQ ID NO: 17725 - DNA, 1218 bp, Mus musculus
catttgtaactactcaagttgattttcttctcattctctttataaaaactcaaatttttcaaaaatgtatatcattttgcaacataaaaatgcccattaaaggggctggagaaatggctcagcgattaagagcactgactgctcctccgaaggttgtgagttcagatcccagcaaccatatggtggctcacaaccacccataatgagatctgacgccctcttctggagtgtttgaggacagctacagtgtacttacatataataaataaataaatctttaaaaaaatgtccattaaaaatgaccatgagggctggagagatggctcagtagttaagagcacttgttcttgcagaggacacaagtgcaattcctagcacctacatgtcgactcacaaaccatccataacaccatgggacacacagattatccataaaagcaaaacattcatatacataaaataaatctcaaaaaagatcatagatttttaaatcaatcgcaaaaaattaaagacaacacctggttttatcagagatccattcttcattaatatcttcatgcattcttggcaaaatcctcattacctctccagttcttgtgctaaccacaatgttacttcccactgcatccattacatcaatggactctgtctttctgagaaaataaacacaatttagtatgctgattctgagagtaagaagagtttctgttagctagttacttccatatcaggtttccttttttggtattttgaggcaagtctcataaggccatgttggcctcaaaccctctagataacaagtgaccttgaacatgtcctccagcacctgcatccctcgtgttgggattactaccagatccaccttgccttctacatttctaaaactagcggaactcagaacagcaatagaaataagcacctccatattttaatcacattatttgataggccaattagaagggcatacaattaattagtccttggctgctggcagtcagataccaatgaatcaaccattccagaaagcagaaacaaaacccgacaaaaatcaacaaaaatcaaaatcctcccaaataacattttatcacttatacatcaaaacataagaagctttaatgtggggttggggatttagctcagtggtagaatgcttgcctagcaagcgaaaggccctgggttcagtccttagctctgaaaaaaaaaaaaaaaaaaaaaaag

SEQ ID NO: 17726 - DNA, 2278 bp, Mus musculus
ttcacatgcaaagtagggaccgggttaaagttggctttagcattgctgacctagtgtgagctgaatttctttgtgaccttacaaggccaagagactgaagtcctccattttctcacagaacaggtagaacatggacaaccgcagttcacctttcccacacctctctgatcatgtgctttggacctgggggggccaccgctggggtgtgagggtagctcgctcattcggtccctggccattcttctgaaactaccagcaagggtggaagtttggggaagtggattccagttcactaagaatggaagtgagcatacttaatgaaatctcaaacagatgttcattctgaaagagtaagccgtagtgagtactgaatacaatgtctcccatgggtgaagagtaaagttatttgcctgggattgtgctaaaggttaaataaccagaagagagtgggagttcctgggaaaggaagattgtgtgttttgcctagaaagggctttgacactgacctaatgtggcagaatgtttgttttcaagcctgccgggagtgaagaaatctttgggcaagtatggccctagcagtgtagaagacaccacaggaagtggagctgcagatgctaaggatgatgacgacattgatctctttggatctgatgatgaggaggtatgacttcatctttatccaagcatattgagaagcctgaggacagatgccatagccactccctggatggatcctggcgtggctttattgtctgccttttaaaatttatcactgggtacatgatgaataaaatcaaatcaccttctttcggctgagctcctgatggatttgctttttctgataaatctggtgggttttgtgatgaccttgtcactacatttaagcagaagataaccaactttgtgaaacatcttttctctgtacaggaaagtgaggaagcaaagaagctacgagaagaacgccttgcacagtatgagtccaagaaagctaaaagtgggtaatcttcattgttagtagtgttgatttcaggagcttgtccagtgcttgccctaaagtggattttccccagttaaattgaatgggtcaatattttaaaacttccacagctactggtctacagctgtctttatggtagcagttgtagcattcctctgtgggaaagaaactgttacacaatttaatgcctctttcttagccacacaggaggaggattatgtgtgacagacacaaggcaaattgtgtgtgtgtttgacaaaaagatggtctgttttaaaacaaatttgagatttgacttaatggtgaaagtgttgagtgtttaggtgcacttcttaatcttccttagagcctgcagttgttgcgaagtcttccatcctactagacgtgaagccttgggatgatgagacggacatgacaaaactagaggagtgtgtccgaagcattcaagcagatggcctggtgtggggctcctgtaagtgtgatgcttgtgttttagggatttgtgcgttttcccgtaaggatttcctaacatttaccccttgatgttcttttttagctaaattggttccagtgggatatggaattaaaaagcttcaaatacagtgtgtagttgaagatgataaggttggaacggatatgctggaagagcaaattactgcttttgaggactacgtacagtccatggatgtggctgcttttaacaagatttaaatcattcttaagtcagtgcacttaaataaaagcttgaaagataacccttggctcttcattttgctgtgaaatggtatgtcttcattttgaaggaaaggattcagtgtaactcattagtggcgaaaacttgaactggaaagagaaatagctcagcatttttaaaccactcagcttgatgaccagaccaacctgaagttgtcttttagccaacactgtgtgtaccatagatataattaaaaggaagataaagaactgatgtgttattaaagatttagcaattagagtatacttttgtgattagtgaaataattcttttgctgttagcagtacatgatactattgataaactgtcactagatgccttcgatgtctttctgaaaaactgaatcttgggctgctgagatgactctatgatagccactgaggttgcttactgtttggttcactccatagagtaagagcgaaactctagaaggtgctctgatggccacgagcacaacacctgtacataagagtttttggaagtgtcctgaaaggaacattgtaggctcataaggtggtcaagtgtgg

SEQ ID NO: 17727 - DNA, 2278 bp, Mus musculus; identical to SEQ ID NO: 17726

SEQ ID NO: 17728 - DNA, 1190 bp, Mus musculus
ataacttccaactccagactgaaatggaagggcttttccagtcacttaagctgcgcaccctttctagcctcaaacagcttttctttgacttttgaaatgacactgtgttaaaaaaaaaaaaaagggaaaaaaatggactttgagtgtagtttttttcttttctttttaagaattactactttttatttgatgtgtatggccatttgtctgcatgcctatctctgcagagcatgcacgcagtgccaaggaggctagaagaaggggttggatctcccagaaccatgtcacagatggtcgtgagccctcacgtggatgctgggcatcaaactctggtcctctgaaagaacatccagtactcttaactgccagccgtcattccagccccaagtgtggtttttttttttttttttttttttttggttttgttttctttcttttttcttttctacaagacagatccttgtgtatcccagaaagggagtgagcagtgagtggagggtgtggcttggttacttcccagagcgatctgtagcattgcctgctgtgttgctgttgtttagttgggaatcactgtggcttgctgccctattgctggcaggaaacacagtgcctggaagctacctctcttttgtctggagaggtttttgcttatgaaaagtcagattatagtggcagcaatggaatagaagccagaagatgtcaaaggggagttgttgaacgcaccagaaactatagggttgattaggagagatttttcaaagtgatattttacctggggtatatatagaggtcaggggacacgttgcaggaggctgttctcttcttccaccttgtggactccaggattgaactcaggttattaagcttggtggtaagtgcccttaccctccaaactatctcaccagactgagttttttttttttttgtttgtttgtttttttttttttttagctcttatcacccactgtctgtggccctggtcatatgtacttttgctagaggcaggcctcagtacagaaggttaagaataagtagtatggagacttgacaataagcaagcttggacgctgttggcctcctgctgaagacagaccttgagtttcatatgctccacgaacctgaccacatgatatttgaaactgggcatcattgggcctttaaaaggtcagcttttgctggccagtggtagg

SEQ ID NO: 17729 - DNA, 1121 bp, Mus musculus
atatagaacaggctgggaatccaactttcttggtagatgctttcctagtgtgccagaagccctgcatctgattcctagcactggaaaaacaaaacaaaacaaaacaaaacaaaacaaaacaaaacaaaacaaaacacaaaccatcaaggctttcaccaatttgagggagtgtggatactttaaaacaaaacaaaataccccaagtatagtggcttacacataatgccagtatttggaaggttaaggcaggaggattcccttgagtttaaatcagactgggttatagagtgagaccttgtctcaaaagcaaaacaaaacaaacaaaatcaccaccatcaacaacaaaacaacacaataacacaaagccagttgtggtggtatacctgtataattccagagttctggagacagaaacaggcaggtctccataaattcaagggcactatcagctaccaagtgagttccagacctgcaaagattcaaagtgagatcctgtttcaaaacaaagaggactgtgtgtgctgtgtgtgtgtgtgtgtgtgtgtacgtgtgtgtgtacataaaaatgaattgaggaagggcttaattggtaaagtgcttgcttgagtttaatccccagaatccagtatttgaaaaataacaaaacaaaaccaaaactgggaggaaggtagaggcggcatctgtggagctcattggctgccagtcgagcctaattggtgaactccaggtcaagggagagaccctgtgtcaaaggatgtggttaatatttctgaggttgacacccaaggttgtcctttgacctctcctgcacacacatgcgtgtgcaggcaatatacacatatgtaagcaatgaattagagcagctgggggtaggtggattttaagaccatcctcagctatatagagagttcaaggatatcctgggatacaggagtctctctctctctctctctctctctctcaacctctctctctctctctcagaaaaagtgtctaagaaaagaaaaagagaaatacactttctaaatgtcccttaatatgtaatttttgattttgtaccatagttgttttgtattactaaaaaaaccaattgaatcaaatgaaaagaataacctttagaa

SEQ ID NO: 17730 - DNA, 1109 bp, Mus musculus
ttcatacctattgtcccacggtgatgccattcattgctggctgtgagcttattccccacagagaatataggctagggatggtcctgcagtaactcctcactcaatgggttcagggacttgctccctgttccctcgctatgggaattaatttcctgtatacctcagcccttgacccgacaattagatcccacctggtcagctctctgttgggaagggggagggggagcccttgccatcagtccttcctctctatggtcggtctgtccgttcctgtcagaacagagatgtcattttcctcccaatgggaagattcatgatgacactggcaacagaatacttgagggtggacagagatgtggctgggacactatgctatgcagcatgaaagagctacagcccctcagtgacagagccctgagtgtcccagtgcagtttctgggctttccttcgtttatgtgagtgtagaagagctaacatccagggcaagtgcagaccgccacaatgctttgactctcctgtttgcaactctctttttacactgttatcctgtcttcctctaatttccttgtggcaggaagcaggactcagctttgggctgacaagatttggagctagtcgtggagcaaatctatgagcctttctctagacacctctatggcctggcttcataatggttaagtgtcagaccagtgaccaggcgttctacacagggggaacttacttttgcagatgagcctttatttataatgaggtgacaccttgataaacacattgtaagatgaacacatcttaaattgaaaacagattgaatacgcctaagctactgcacattgttgcttagcaacactgcgcagcagagtaccatttttttttctcctggtgattacgtggctggctgagagctgtggcttgctgctctgcctggtatctgaagtgtttgttatattgctaatccaggaaaagatgaaaatttaaagtatgaagcccagtctctgctgaatgaacattgctctctcttccaacctaaaaccccattccaaggcttatcatcacctctgtgggtgtcttactaggacacacccgtggttactgtctggtttttatccagt

SEQ ID NO: 17731 - DNA, 1166 bp, Mus musculus
cagataggactagcttcttacatgtgcttgtacaaatagaattaactgtatacagttaatttttgacatagctcttaaaatttgaggttgtagggatcagacctagggccttgcacacacttggcaagtgctttagcaactgagtgacatcttgagcctctgggtcaaactttgtagtgtttactgtgataactgaaaaatggatatccgagacttatttgcagttttgtatgtccaggagccatttgtttatgaaagagcagtttgtggatttattatatcttctatactaactaacttcctaaggtccatggagtgtacaatctggtattccttttcctctaagaatggtccataatagaaagaaaacaataccatggattgtaagcaagaactaggatatcttaatgttttctccccttcttctttagatctgcaccaaatgagccagaggcggcggcagcagcggcagcagcagcagatcctggatcacctgaagtggtggtggttttggatgattctgatgagaaggaggatgatactgcagatagcggtgcagagaggaactccgaggattcaggatctgttgaagagatagattatagacctggtacttctcaggaacacgcagaagttgcagttcgaccatcagttattcaaaaactggaacggggacagcagcagtccttggaattggctcataaagttgagagtggtgtgaaaaaagttaattcagtcggtgttgttcaggctacaactagtggaaaaaagttagtgcgtccccctgtgatttgtaatgctcctgccagctctttgcctagcggctctttcgagagaccagttgcggctaacagtgttcctcggttagtactggcagttgcttcagattcttttccagcttgtgacacagagaaccttgaaacatactttgactccccagatcagggccctagcaacccatcatctcaacccaaaactaaagacccaaaaaagaaactaagtataaatttagacaaattgcttgcacagagaaatcttagggctaagggtgcgtctttttcccctgtcgtacgagtccgtgagctaacaggttctgagctttgttctgtaagagctgagtcttctgagttagaggcaggtacagcaggaaacccgagggagactga

SEQ ID NO: 17732 - DNA, 1276 bp, Mus musculus
tgagtctcatggtcctgaagtgggttttcatgctgatgctcaattagaggctgatcaatctccagtaaaccctgaggaagtagatcttgacctagaaaatcagagtgttcactctggcatttctaacctaagttttgattccaatgcttcttatcagtcagctaatgatcaacctcaaggggcttggggtgaagtaaatctcgatgagttaaatgtcgacatggaagttaagagcaatggctgctccagttctgagttgacatttgattccgattcccctcttctgtcagttactgagcggtctctgctggattttgaaggattaaacgaagatgactttaacctggaagatgaaaactgtgtgtcaagtagttctgacataacttttgattctgatattcccgatgactcagtagctgaccaacctcaagtagctgtttatgaggaggaacctgttggtctggaaaataagagtaatgaatcttgtgtttctggaataacatttgattctgatattcctcttcattcaggaaatgatcaccctgaagtagctgttaaagaagtaatcattaaggaagacgaaaacgttcacttagaagggaagaatgacaatcccagtggttctgaaatatgtttggattctaatgtccctcttcattcagtgactaattctgatgtagctgttaaaaagataaatccccccaaagaagatcaggtacaaatagaacaaattgaacaaaaggaaaatgaacctactgattctgaattaaatttggattgtaactctgttaattcaaagcccggatgttctgaagatcccattatattacgtgtttctgaaacaagattggattctcatgtcccctttcagtcagttattcgcaaatgtgaagtagttgtcaaaaatgtctgtcttcaaaaagaaaagcatgctgagttaacaagtaaaagcacggaatctcattctgaagtaagttcagcttctactgcttctcacccagtgacagaaccttatgtaggtaaaaaggcaaagagaaagacaaagcatcttgaggaagtcaacagtgatgatgaatatggtggctctcaaccaactttcaagtttgatgtttttcctcggacaatgactgaaaaacctcaaccagctgctttgaaagagggccatgctgacccaaaagataaaattactgagcttagagggatggccgtaaatgtgaatactgctgattgtcttgattcagtccttagccagcctcagttagcctcaaacgaaaac

SEQ ID NO: 17733 - DNA, 1315 bp, Mus musculus
aatgaacatagcaagcttattaatttcatcttttaaacaattgggaccgatatctatttacttagttaccacacttccaagttgaatagccagtaggtattctaactggataaataaaaagagcgacattgtgctatctcggttttcaagtatctcagttttgtgatcaaacgatcacaaaaatatataacttctttttcttttaaagtcattccataaaatatttaatccagtttttttaagcacctggtgaaagacaaattctttttcatttaaattggatctgcagttctgtagcttttctcatttgcacacatacccacagatctttttgttaacattattaagtcttacgtggaaaagattttgcaaatgtgaataagctttgaaggtaccttttctccctttattagtaatctaaaatgaaaatccaggtaattttatcatcttatttactaatattttggataacatttttaaaatgatgagcttaagctgttggtttgataatggcatgtggactggccattaattgtcattagtgaaaaacttgacatttcagaaaaattaagttaaactagtaacctaactagagacctacttttcaagtgaaaaacagtttatacatcagtttatcttaaactatctaattatattaaactagctagatagttaaaggttaagccaatttgacattttgtcttaaactacctaattgagtttaacagttgagataaagagcttggatacacagtgtgaacctctgtggtacttgagtctattcctttgagggtcattgactgagctggtgcagatgcatccccttttcttgttcagtcaagacctggatctttttctgtcattgatgttatgaggaaacacgaagtttccctttactgtgtaactactatattttattgaaactagagtcagtgttaagatgtgtcttgatttcagagataaaactgtgttaccttagaattaatgaaatatcaacgtggttttgttccaggggccattatttaacctgtgagtcgttaatggtgatactatagtcatctctttacttctaaatataagtggtaattatattgcagagtggacaaatgtgcttttttagtcggcaagtaacgtgtttaattttttcaaccttgcctctttatcttacaaacattttaatttctttaaaacattcttaatgggctgctagtttttttttaaatcctcaaaatttaattaaggaagaaaactctttcactgattatgaagtaaacatgaaaaagtattctttgtaggtattaatgtcttttgcagc

SEQ ID NO: 17734 - DNA, 1465 bp, Mus musculus
aataacctaccatgtaattatgccagattatatctattgtgattatgtcccgcaatgaatattcaaataatcaaaatttaaagttaaaaaattcataatttggaaacttgtctaaggaccttttaaagggaaagcaaggaaaaaattaaaatgtaaaattaacatcaccaaaaatataaaaatgtctggtacagaaattatggctttgtttagcattttgcaaatatttactaacttcttgtaaggattattattttagacaagattggaaacttacttaaaatggtaaaacttaagttaaaagtgaattattttagaatttgataggatataagatgtgcccctttgtctacataaatgttgatttaattttcaggctaggttgaaacaattggttattttgtgtagtcaagagtgcattatattctttcaatagtaatacatcaaattacaaccatatcatttcattaatcttgtcccttttagtatcttgaatagatttttattgtgattgtcctggtgaaacagtgtgtggacaatattgtgtaaagagtggtttttttgcatttgtgcattttaaattatttatgtaactagggctctgagtaacacgttttgttttgttttgttttgttttgcttaaagaaaagctatatttaaatattcaaataattatatatttccatgtaaaactaatgtgaagaccgatgtattttttataatgcaatttaaagtgtaaacttgttttgatgttatcaagataaatttattaaatattgaaatttgtgtgtactctctcctaatgttagaacctttttctggaaatacttaaaaagaatcagagagtaattaaggctgaagtaattctgtaaaaggcctgagagatgataaataagagaatgcaaatgttgatgctggcgagaaaattgtttaaccaaagatacataggttgtactcacataagtaattatttcaaaagattaaacaaccactaatttgcctggaggagtgatggggcagctgtttgactagcacgcctgcactgaaaggattgagttcaggaggcaggatccataccaccatctgacgccctctgggaaatgaccaaccccaaagccttccatctctctccgtgtcttctggtgccatagcatctgacagtgatgacaggatggcatggacaggtgcctgagagaatagtgacataagtgcttctgaccctagaattactgacttggaacatttgttggtcagggattttcgagtgagaattatcttcctatttacaatgagaagttactactttttagtaaaggacttttatgtttagaaacatggaattatagaattatacaccaaaatgccaactcaagtaaattcaaagtgaggagacatagctttttttcatctcttactcagatgaactcaaatattgagggaaaaattagttaaaacatttcccttt

SEQ ID NO: 17735 - DNA, 1611 bp, Mus musculus
agccttgttggatactataacgatcactgtgaagtgagaacattgaggcatagagtagttaacccccttcctacccgtagcaatgggccatcttctagtctctatccccttagagtcatcttctctgtttacttcatataagcagtacctttatgtttctctctctctctctctcctttgtttcatttatcatgattaggtgttttgttgttggttagttggttttgagagtctcctagttatagcatgctgagcattttgggttttaaaattactttttagcagttagttttaaatctacttaattttttttatatatttatgcctctgagagttgaatccagggccttgtgcatgtgaatcaagtgctctgctgcaatgtacctccagctctcagtcttgaatgacaccactaccagaacctttctctcctgccaacagacgggaaagccagcaggtgcgaggctagctttgttccctgcatggttcttattatctgattcctcctcagatccaagactggacagcagagttgccttttagagtgttcctgtggttcacttgagtgttgtatgctctcgtggcctttgactcctctttacctacccatcatgccactcttccctgtgctcagttctcattttcaccatcaacacatcacctcatgctctcaatcctttcacggtggagtgcttgcaggtaactgagaacaagaaccaacaaattgctgggttttaatccagttgtgccacagagccaggaagtgtgttggcagcctcttggttaagttgctctcctgcatatttagatacttactgtcaaaatcaggaagtcagcattgatctcacctatctactctgcagaccgtagtcaaattttgaaaattatgtcaaaatgccccttgtaggtcctggatttgatccacagttatggacttcatagatactttgttgtttcctcagtgtggagcagtttctcgcctgtctgtacttggtagcatggcattttgaaggtactggtttatttgtggaatatccttgagtttgagcttgtctgatgtttctttgtaatctatgcatttttggaatttgaaatttgtgttctcagtgtgtattaacagaagccatgtgatgtcagtttgaataaatgtggtgatagaatatattatgtgtttgtttttattttatataaaaaaaagccatttgaagaaccacagaatgggggggaggggtgtgcctcagaggctttaagaaattaatttatacttaaagttttcttggacctgtttattgtatgtgtgtttgtccacatgtggaggtcaggggggcagtttcttctaccacatagtttccaggatcaagctcatggcgttagacttggaggaaggtgtttgcacttgcacacccatctcacagatacttttgacagctaactttttggggtagttgtgactgaaaatttggtgtcacacactagcaattctggccattttgggggaagctgaggcagaagggttccaagttcaaggacaagtgtcactatattgtaccacatcctgcaaactggggcttagtgtggtatggtgacattcaggagactgaagccaggatt

SEQ ID NO: 17736 - DNA, 1153 bp, Mus musculus
cagtgccttttccaagaagaaaagaaaatttcagagagaatttttctaatacatgagaagtccacacttcaagcatgtgagtccctatttataggccttccctgctgtgttcagtactgttgaacagcagggcatttttgtagtatacaaaaggccattttaaagtctttaagaactttctgcaaggtgaaagccatctcaagtctgatgctgccagtgttgctgtctcagtgtttcccagacgagataaacttaatgcactgccttgtgagaggaccattcagagataagcactgacagacggctaaatacactgactggcactagcgtgagtgaggctatatcaacactctgttcaggattatgccatggtgactgacatacttggtttcttcctcacacgcacacgcacacatactaaataggtgactgtttattgaatctttactatattagtggtagaatcagtggttttgggtttgtctgtttttaattgactttgaagaacaagagaatctaatacttatatgaagcatcttttgcagatgtaacgtattgccctctggctttcaaacaaaccttggtttggaaggctgtattcactgtccccattcacagcatgcaaaatgactgctttgtgtaaggccccagtatatttttttaagtgtctttcttatctatttccttcttccttcctctttatcctaacttatttctgaatgtgttttgcataatcttttctttgtgtatgttcttctaaaacatatgttataatttcataggcctttcccataagtgatgttatctgtagatttctactcaacctggtatttaaagatctgtaactgtgtttatccttccatgatctctaagcatggccgtggatctttggagtgcatccagtacccattcattctccgagggagagaaatctccattccctttggctctgtgcagccataaaccataatctaatgcgtttgcatgagtcagtgtaaatatagcccataggcctgcgtgagaacctctccagtgggtactcagacttgctgtagcatggaaggcttatcctccagacagcctacactcgtctccccttgagcagagcacagagctccacagtgcattcagatccctactcatccatgccagg

SEQ ID NO: 17737 - DNA, 1161 bp, Mus musculus
tgaactgtggccacactctagcctgccatctttgccttacttcacacaaagcctctatccaacctgtaattctttttacctacctcatgtatctgctccagtcttcaatcccagcctcaccacaccgctatctttttacccagtgacaacccttattttattgtttatactcaaaggattatactttgccctacacacttgagaaaaatagcaattgataaaccatttcacttctaagtctaaaaaaaggaacaagccaaaagcaatagaagggcacaagcataattgtaggtaacaagctataattgtatgaatgtcttgacctaagtgtctgtgattgtcttcatttctacttaagaaagtaatcatttgataaattaaaaatatcacaagttggggtgggagatatcttgacaggtacagttcttgacatataagcataaggacctgacttcaatccctagaacctgtgtaaaaaactgtccaaatggtggcacatgctgcaggaagtggggaccagaggattagccagcctagcttcagttagtgaaccccagagcccaataaaataaggtggagggctcttgaggaaagaatgagattgacctctggactccctctctgtctctttttcatacacacacatacatgcacatcatatatacatatatgtatgtatatgtatacatatctacatgtacgtatacatgtatgtaatgagactaaagagaagcttctgtaaacagagggatcaggcatagtgtctgtaaaattcaggatccgcctggtgaccagcagtagctgtcatgaactaattcgttaaatgaactaaaagctccaaggactggtgggaatcgggggaaagagagttcttagaggattctgtcagaggtcatttgggtgagcatgaatacatgtttaagtatagacactgtcttaattgcctttctgtccttgtgacaaaccaccatgaccaaggcagcttagaaaaaaagtttttaactgggattaccgtgtcagaaggtaagggttcatgatgggggtggagtagttacagcaatagctcagagtttacatcttggtctgcaagtcggagtgcagggaaggagacgaagctcatatgtacatgtatctcctgaaacctccaagcccacccccagt

SEQ ID NO: 17738 - DNA, 1184 bp, Mus musculus
ctccaagctaagaagaacaacagcggagaacagacatgttatccttcattgtggggtcactgccttctttttttttcctgattgctatgatcaatgctttgtcccagctcagacacataagaatttgtcatgttgttgttgcagccgtgtctgaaaagcttaatggattgttctaatcaaattcctgacctttaaaaagttaattcagagctcatatccatctcaggcaccttgtacagaatcatgagcatttcccatgccgcatttattttttttcctttatgagataaaacctgggtattaagaacatggtatagttacagaggcttgtgtgggggtgcctgttaatgaataatcatactcttgggagatcactctgctgagaaacatggcaggagtctgtcatcatttgaagtgattggtttctctaaaatgttagtgtactgattatagaactcttgtcatctgatgcataaactgcacatggagggaatactgatgggcagtggtatgttcctggtttactcaatggagtgttttctctaggaatgctatggagtttgctgtaagaagtgttcgctctccaatggggcccactgcagtgacggcccctgctgtaacaacacctcatgtcttgtgagtcccctggaagtttcatgtttcttttcattccttgacaagttagccagccgtgtcaggatgtctgttgagcttttgagtgtcttgatacacatttatgcatgttagctcagtgatactggtaattttattgaacttttgtggaccacagcatgtgtctattcactgtctactttctcatcctcccaggcctcctcaagagggtgtacccacacctacagcctccaaactagacaagttaccctgttaacacagacaaacagattaaatcataggacaaaagaggaaaaattctgttggtctttaaattgaacaacctatttccaacattcattttttaaaacttaccctaatttgttttagacacgtagtataaaaactagaacttatatctcccacttggctttttgaatctcataatgtcaagaaagcgaggtgaggcagtacttacattgtcacatgtgtgcatgtgtgtatgtgtgtgcttgcatgtggggtgtgtgtgtgtctgtgtgtgtgtgtgtgtgtgtgtgtatgtgtgtgtg

SEQ ID NO: 17739 - DNA, 1130 bp, Mus musculus
acctcacctgtctttaatagccttactgaattataaggctatattacaaactaccatattggtaaaacattcagcaagactccttgttaataataattatatccagtttctaattattatccaaattctaattacccctaacgttgaaacataaaaggtaagcactagtaaagtcctggctttctcctttcagttgtgatagcccaatcctttgaggtaatagtaatggttttcaaatcaaatacagccttgctctgctgtgtttgctcagcattatttccctcccatactatcttttccccaccaggccttggagaatcaatcacacactttcttctctgtctacacaaacacctttcacttatccttaatattgagaacacccaaagagttagaatatttcctgctgataattgttgttcctgatgctgtgtgctgtaaatgataacaaacagcagtttctttcttggacttttattaaagataggtgggagggaagaaaagtctcgaataaaccctggctcactgtaacagtatctctgtttcacgaatggcaagccttgtgcgggctggctctgtgttgttggatagtgtggtgcttatgtttatgtgggtcactgttgaggtgtggtcttttgctatgtattgtaatgctgcatactggctctggttgtccttaccttgccccgcaagttagccctgattgataaataaagatgctcacagcctatactgaggcagaagagactaggtggagtttcagttcctgggcttgggatccgaggcaggagaccacgggagataaggaagaaggtggagagaggagaagatggcattgggtaggtaagtcatggaaaaaaatggccatgaaggttggccagctggagataagagcagcccagatagataacagaaaattataactcagggttattgatagggaagtaaacattaatagcttagagggtggatatgtgcccaagtctgatggtgtgaaggcttctcgtaaacataaaggcttgtgacttttatctgggcactgaatgatcgaaggtggggtagaactgagccccaccccattgagatgaattatttaatacaacagatcactgtctgctttcagtggtgct

SEQ ID NO: 17740 - DNA, 1187 bp, Mus musculus
tatcgtcttttttttaagacagaattttgctatgtagttctagctggcctcaaacccacaattctcctgcctcagcctcccagctgctgatattacaagtgtatgccatcatattcagctgaaaacaacataggtgtattagttaaactgctctggctctcagtgggttgctcttctagcgaccagcccaagagctctctggattttcaaatgaaagacacatttgccagtttacttttgatatgccttgactagttcagtggatgggcacttctaaacctccctgcagccagcacacactcccctccagtatttctggtttaacacctcctaaatccatatctcatctttgctttcctggctccttggcgcgggtgtgcgggtgtggggaggggggtggggtgtgtgtgtgtgcggggtatctttgctgcccaagaggcttctgagcagcccttccaggggccactttcttccttgtgcctgcattcctccctcctgttccttccctatagggtctgtcctaccccttctcctgttctcctggtggtcctttctgcccccctcccccaggaacttagaagttctgcctctgtcatcttgcccagccattggccactggctctttattggtcaatcaaaaatcagttagggacatggaccttcagtgtttggacatgtagattcccaattttgggacccaaaataagacaaagcattagaaccaacccccaacaaaataatatttgtcatgaaataatttattgcatatccttccagacatatctcccagtatactaaaattgaactatttttattacatggaaagggagaaggagatatgaatttatgtctagcacactgaaattttgaacaagataaggtatttttataatatcagtattatgctgtcaaataaaggggtttatttagtgtttatttctaaccttcagtttagtaaagcaaacccctgcaggaagaactaactgtggcctagaagccaccagtgctggctttgctgcctattgcctttgaagtgccaagggatttagagttggcccacccgtttcacataggtgaaacactgcctcctcctgttttggaaactaagaaaggaaccacccactttcaaaaagagcaaaacagagactttttttttttatgccataaaggagaacatttatagtttg

SEQ ID NO: 17741 - DNA, 2208 bp, Mus musculus
tataatttatcagatctacctcatgtgagagttaaagggaaggtaggattgactggtgagttttgactctaagggtcggtacttaaaaattaagcccctcccccccaaaagttatgaactaacatatttgttaatttaacattctgaagacagcgattttattttaagaaaacaagtcaagttttatgttgggaatgcctttcctttctagtctttgtctctagagtttggaaatctgagatgtaatttgagtcatgtgggcttcatgccatggccatctcctgtcttcctcctcccgtacttcactagacttctctgtgtaatgttgtgtctccatctcttcagttttaaaggtctttctctggttgtgtctagttactagcctccagactcttgtttacattgtttaccttgtgataaagcgaagtaactgcaaagttgtgaagcaggcttagagatccaagatgctccacaagtgcaataggaagccttaaccaactgtggccatgagtctcaggtctcagtcctgtcccctgtgttcacagagtacagtcctgttgaagtgaagctgttctcgtccggaaggtcgattccattccataccttccgtttttctagaaacaagagacaagtgtctgagccggttcccttttaccctttcagacatcactgaccctaaataatattccctcctatgttaatatctgacttcacgtagcccatgtggagaacacagtgggcatctctacctgttccaggtctttttcccaaccttggaaagctttacacagaagtgatggcgtacggctgcagagcatttctgctctgtactaataagtgcttggtggtctgcggcagcctctgcagtcttcagaggccctctctttctctcagcacacacagttatacactggaatctacagtccaagaactaaatgtccatttcctatgacagaagtgcaaaccttgagttatttagaatatgctttccaatcaccttccaggtaaattacacaggattttaaagctagtctattgggtgtttatgaattttcacaaaattgaatggtatattctccatttaaatgatgttaagcacattttgcagtttgaaaaacttataaggcatgcatcaatggttagtttataattacaatataaatttgctgtagttcagttaaagatttacccttatactgctaggcactataactcagaatggattagttatgagcctaaaagtatttataaggcattatattttaaagtagcacatgtagagtttgaagataaaaattattttcatgtattctctgatgtatgcccatctctgtttcaagtttctgagtgaagctatccatacttagccaactttcacagcatttcctggagaggtcgtttttgtgtgatagtgaaaccagtgtatgatttttctctgttttaaaaacaaatctccgtttccctccacacagtgaacatggccacgagcaggctcataggggccgtggctggcaccgttctggccctgggggtgatttttggaggcacagggtggggcatagagtaagcataccgagtgtctgcgtgtctctctgtggtgtgtgaggcgactctggcctggacctgacccttccatgcttgtcctgtcgatggttgcccgtgctggtgtaatctgtgttgtgatttttggatgtattgtgtcttgtgacttgtgatgtttcttgtgcaccatagaaccttctcctgtctggaacaatgtggggcatagaacagtgtagggtgcttattcacagttaaggcaagagcccaagactccctttgctctcctgctggcaaggctttcaaagtacagaccttattattattattatactattaattggcaaaatgcttttatgtgagtgtttcatagaagcattttaacgattttactccactattcaaataaatccatatatacaattaggaataccagcaactctcacactttttaaaggtagtgagaacgggagccagttaatgctttcctatggatttagactgacatggcaggcttcagctccatctgtctgagaataacatcaaggaagtcaatttctttcctttttttgttataagattggttcagggttcagctttgaagtgttcgtacacatcggagcaaggaacattataaatgaaaatatattaagttcaaacctgcacaac

SEQ ID NO: 17742 - DNA, 1141 bp, Mus musculus
atagccgaagccatgacatttggtcaaccatctagtcttagagatgaataggaatcaaaaaaaaaaaaaaatctttattgtaagcagtcctgttgcctttgttcccatccatcctatccagtgtggctggtgtgttgctatttatgcttgtgacaggtaagtgtctacgtgtatgctttaaaacaaaaacaaaaaactaaaggaagacttgatgttcttgttttgtaaacatttcctctatagtttattaactttaccccctttaagtttcacttatttgtaattgatatgtaatgagtttttagagaatagaatcatctagtacaacatagttttaatgcttcctcatttaattgacagtgtaaccaatgttcatgtaaccaataacatggacagattgaatttttgaattctaatatatagaatttaaatatataccccagggattactttccatggattctgtattgaatctgatcctaacctatcctgaaccaacaaagtaaatctgcttaagtgtgggtgcatacaaggtactatgaacatatttttgaatgccttctccaaatttcactgtggagagatggagacaaaaatatgtggaatagaatggagtttcatcaaggcagttattcacaaacttcctataaagggcgaggtataaatagctttgtcttccaatttctcaacagtgctatcagtatatctgcaaaaagttatcgctgtgctatagtaaaatgtctttacccagatagatagtgaggccagatgtggcctgtgggctccagtgctctgacccttgacttataacacaagtcttgaagtcaggcaagtccatgtttggatcttgtttccattatctattggctttataattgtctgggccttcatctcttgagcaggatggtccacattccaccttgcatgttcctgtgtgaggaggattcaatgcgatgatgtgtcaaatgttcagaagtgagtggagtcggggctcactctgcagtctctatcattatcattctcactgctgttatttattgtccttgatgtatctccaaaagccactgaaattcatgctctaaagctcctctatgatttaagagcatctcaaaacccaggaaccagataagaccccatcctg

SEQ ID NO: 17743 - DNA, 1165 bp, Mus musculus
aacctaactgagtttaagattagtgggaaagaaaggacagacttaaagacaaatcatccaaccagagatggacgtgtctgacctgggataaagctaggacaaaaaaagcatcagggaccttgcacaacagggttttgcctcctgaagctgcttacctgcctttcctttgtggtaatgaaagtagttggctcacatgactttcttcccatgatcctctgtcacaggtcctagcgccaccaatctcataataggctccatcgctggtgccatcctggtagcagctattgtccttgggggcacaggctggggatttaagtaagcaacgccgcatgtcttcttctctgtggctcgggcacctctcttttctgcttacataacctggttttgagttcctgctacgagactttggtgttgataatgcaactacaaccaccaccaccacaacaacaaaaagacgcgcttttactcagaagtgggttagaaacgtagaacatggagcttcaaatgtcatcttcaggcaagcagggaagtacaagctacgaaaggaattccctttcaattgagcccaagctgttctagaaagtaaagacactctgccctgtgggagcagcctcctgcagtgctctcctttgcacttagatgaccaagcaaacatgttggaaataaatacacttgaattcatagttgtttctgctaaacactggcttatagtccattggggttttctgtaccctcagtcagcacacaaccattgtttcttacgtgtaaccttgtgatttgaaaaaccttcattttttcacttaaatatattttaattgaaagcaatggctttgtggcatttactgtaaccttggtataactgactggcctgccgtgctttcataatgacttttattttggattgcatattgatactcaagattgctagagcagaccatactggatagttgcagataaaccctactatgttgtaagttttaaaaccccatttatctagtttggatattttgtacctctgattcattagagaatcactttcaagcattttgagccctggttatttgatttttaatatttgtagataagccttcctctgcatgtagtctctttcatagattaagtaagtttcatccagattaatggggatgaatttaagtgggaaatg

SEQ ID NO: 17744 - DNA, 1273 bp, Mus musculus
caaactaccagagttactgtttttaccggacatcggaacattgttttaatagtgtcttcctgaaaggttaaggaaacggggatgagcattttgcatatgcattaaaaacagggtcgctattactactttcatgaaaactgtttaggcaacacacctgtctttggtagttactgttgctgtgataaaacaccatgaccaaagcacaacttagggaagaaagggttcatttggcttacaattctatattatggtttgtcattgaaggaagctaggataggaactcaagcagggaaggaacctggaggcaggagctgatgcagagaccatggaggggtgctgcttactggcttgctcctcgtggcttgctcagcttgctttcttatagaacccaggaccaccagcccaggtggtcccacaatggactgggccttcctctatcaagccttagttaagatttctctataggcttgcctacaacttcatcatagggaggcattttctcaatcaaggctccctcctttctgatgttaagttgacagaaacactagccagtacaacctcctaaatatgaatacaagaatttagatgtgagctagatgagtgcacacagtatttattgctaacaagtgatagcaatgatggtggcaagaagatgaaataaaggtgccaatcaggtagttttctgacagcccttaccacaacattgatgccgggctgagtgtggagtgttccaccatattacaatgtgttaatcattggaatcccccaatattccatctggtctccacgagttcccatggcaaagtgagtttctacccctgccagcagagaccatagtaacctctcatggcagttcttgatagaatgttctctaatagcctgcagttctcacaggtggctgtcctactgagaagtcattggcatgagcaccctcccttagctctgagccattggcggttaacctgggttccattctgttccatttcttctctaaagaaaagactgttacagttggtactcctctaaaatgacagccaaaggactctggccagaaaaataactgaatcttggtggggagggaaagtatttttgattttctcaaagttaggatgccgtgaaatcaattttaacccgtttctgtccgagaatggtaaccaagtggttgctttcctttctaatttctgtgtcatattccagtgcagattaaggagccacattaccttactgtccaagactcttgggctagacactttcttctccatacatcatcatg

SEQ ID NO: 17745 - DNA, 1421 bp, Mus musculus
atgcagactaatgcatgagccccttgcttgatgccccacatgaagccagaccatgggaggttacaaccaactcacattgttgctgtgttgtgtcttgctattctttttttctttctcttcaagcccaggaatcactttttaggagactggacactgagtgaggcacttgaacctgcttctctccacagagctaaactgctgcatttgcttggctaacctggccctgtgtccattctcctgagtgtaccacctccctgtgcactctgtctgccaactttccaccatgagaagtgcctgttccttagtggagtaagacctcacacacccaaggcagaaatagccaggcagagcaaggatttggtgagctctgttgctacagagctctgggggtttggagggaacagctacaagaccttccaagttcttcctagttctcataggtgaaaactactatgctgtagtacttttcatctggtgaattagcaatggtttttgcttctgaaattagaccaatttgtggttgaaaatgaacaatctgaagtttcccctagtgttccccaaagtgtgtagtctcaatggggaaatgcaaacatgttccaaaacattagcttttctttgtttctgattacttggagactgcctctgtgtgagtggattactctgctctgggacacgcaccattgttgttgtcatcatttgtctctcactgtcatctgattaatattgtggcttctcttttcctctttctgcatcttctttgacgtactctggaagaaacgtcaagaagaggagattcgatcccactcagcaaggccccatctgaatcgtctgcactggaggaatgccaccttgcactgttgggttctgggaatgacatgttttcagccatgctgccggaactcttaagtctgtaaagaagacccttgggtggtaatgactacagagcctcagatctgagaattgggatggggtacaagacaaaggtcccttttggaaataacttcaagtaaccccccccccatcacctgtcaataacggggaggggttaaagaccatgtcattaaaaaaaacaacaacaacttcagaatccttttttttctttttaactaaaggagaagggagtagcaacaagtgcaataaaagaacaaatagcaaatgaccctgccccccagcctgctggcacttaatattttctaaatgatttggcatgattttttttccttttactatcaaggacaaactccagtggcatgaagatccaattttggaaagggtaaaaactgcatggcatatataacaacaagctagcaagccaaccttcagcaaatcctacagtggaaatcccgaggggaagatgacagatgaccacacaaacgctacctgggtctggattaatgcctttccatcctccaccacccccc

SEQ ID NO: 17746 - DNA, 1591 bp, Mus musculus
aggagagcttccaatgcaatcctaagggaacaggctactgaggaaattctctcaggtttgtttcggacatgcaggtgtacagtgaacacccatcaagaactcagacccgccagagagcccctacttctccactggcccatttttaccaagaagacatccagataaactatgcatttcttcccggcactgagttactttttacatttagctctaaggccctctccagcaagactcatgtcttaagttttacaacatattccttgactagaagggaggaggatttcctaaaaatagactgcatgaaactggactttccctcctcccccaaagatatctttaagtgttggcttttcaccctcacagagcagaaaccttgattgctatatactaccccaaaccataacaacatcttaaccttcggatggctttctgagaaacaggtgctatgcaggtatgcagtctttcgcttgaatttgctgtttgtttatatagtaataacagcgctatctataaggcttactggccttattcctggttccataagacacaggctgtacccctttactgaatggcatgggctcagcttggaggaaggtcagaggaaattcagataacttggtatctcttcctgtcgttgcaatgtttcggggtccacttcactatgagataccaagcagctgccaacctcaccatactcatttcgttacaatttctgaggcaccgtggtgacttgatccgacatacgaccacgtcagttacaaaccagatctttatggttaacttttgaacatttcacaaacaacattgtaaatgtgcgatgttatgttttaaatcagaccacagtggtccccaaatattatgtacatatgacaaatgtcagtgtaactttttgttacactgacagtttcataggtaaacaaacctacgctccaatgttaaattatgcttgtgtatgtaaaatacacaagcattgggctatgtgtgtacggacatgagggtagtgcaatcgtactgtacgaaatgggtcagaatcattttcagtggtgttaggttatgtagtttcagactccatgctgcattttctcttgcacatgccatccatttgcttattttggagtgtgagtattccttcttattaatttgaattcaaagcacaagcctcccattgttcaacattacccaacaagagtgtccagtgatgaccgagttatctcacctgctatacttttactgcaataattaatgacacctggatgaggaggcgtgcgctgacttcattgttcacccgggatagtgcatgagcccactgaattagagctgcttctaccagcaaagtgagcagtacacataggtgcatgtttgaaacatgaatcacatagagctatggagttttgccaagtgatgtgttttctttttcttttttctttttttttctttttcttcttttttttccttttcttcttcttcttctttttttttttttttttttactatgcaaagatgggaaatgcacaaacttccaagacatgtctgaagaactttacaatacttgaattttttctttaatcatcccatcacatttatggtcatt

SEQ ID NO: 17747 - DNA, 1188 bp, Mus musculus
atccttatggaccaaggggtggacttcaatgcccattctatgtgagaccctcctgaaagctgtaagtaagcgctcagcttccaggtggcccaaaagctgggtaaccaaagctcctcttgttgtgaggagttcaataagattgtggtatacttgtggctcattttgtgtctgcatgtgtaccctctatcaccagtgggcctggaaaaatgagtcccagtctatattttgcagactctcctccagtttcaaaagttaagttgggagttggagaggagaaatggcttggcagctaagagtgcagactgcttttgcaggtccccagcacccatatcaggtgctcacaactgccaccagcttcagctccgagggaatctaaggttctcttctcacctctgagttctgcacttgcatgtactttcatacacaataataaaagtaaaatcttctttttaaagaaagacatcaattgagtcaaacgagatcatgctttttgcagtagctaagagcatctgctttatccacagtaggcagagttcccatggtgcagcacggcaggatggaacatccctttgctggctaatgcagtaaggctctggataggtcatcatggtgatttcccaggttctgtgctctcagcaggagatgcagctctttctgactgcaggttctgtgacagtgccgagtcattctgaccaaaggcttcttgaggctgctttgacatgtgatcttactctctgcacatttctccaggaggcaaggaaggagagaaaccatcccacctccttttgttttcctcctgttcttttcacacttgggttttctattcttttcccatagttcactgcaagtcttccactgacctctcaggcactgttcccatcctgggatcatgttatcctgaagagagaagagaatgtatcatcaaactttaacccagatggctttagaaaagccatcccttgtccatgttaaatgcagaatggagatgtggaattaattacaggcaaaactttcatcttttcataactaagttgaaagaaaatagtgccaatatattgggaacctttatagtattggttgttgcttaaactcatcagaaaatattataattttttttatcattccccaaagttttttaattaggtattttcttcatttacatttcaaatgctatcccaaaagtccccc

SEQ ID NO: 17748 - DNA, 1227 bp, Mus musculus
ggattgaaatggggccatgagcagtctatttgcatcttgcttccatggaatcctaggaatgcttgcagtgtctcttacctgctggactgataagagtggaaagagatcaggatttagatgttggggttctatggattttgcaaagtgtaaggtagttctgggaccctgggtctctctctgcaacagtggttaaagtcattccatgtggccttgctgaactcttcagaaatactcaaagagtaaataccaaagcatcaggttcatagacaagaagatcatttcagacactaggcatgaacatcttctctgtcttcctggtttgcctgtcaatacatgcatggtgtcctggtgtcctttacctcagatggttacttctctccttccttcctccacagacatgccttgagttggaacgctacctccagacagaaccccggcggatctcggagacctttggtgaggacttggactgcttcctccacgcttctcctcccccatgcattgaggagagcttccggcgcctagaccccttgctgctcccagtggaagccaccatctgcgagaagagctccgcagtggacattttgctctctcgggacaagttgctatctgagacctgcctcagcctccagccaaccagctcttctctagacagctacacagccgtcaaccaggcccagctcaacgcagtgacctcattaacgccgccctcatcccctgagctcagccgccatctggtcaaaacctcacagactctctcagccgtggatggcacagtgacgttgaaactggtggccaagaaggcttccctcagctcggtgaaggtgggaggggtggcggcggcggcagccgtgacaccagctggagcagttaagagtggacagagcgacagtgagcaaggagggggaggggctgacacatgccctgaaaacaagaagagggtccatcgctgtcagtttaacgggtgccggaaagtttatacaaaaagctcccacttaaaggcccaccagaggactcacacaggtagtggtacaagttggccgcaggtcgtttcttcctcttttgggtgttccctttgtggcgggatgggcttctcttataagaagttatcttcatgctcactcgagggtacagagaggcaggagggaagtggagtgactcacttccgaccctaagttccagcacaggacatggatttgtcattgcctggctgaggagagagctagt

SEQ ID NO: 17749 - DNA, 4953 bp, Mus musculus
gaatacattaacagaagtaaccaactgaatggaaagcatggttttgaattttgagttaagttaaaatcatactataaagcttattctggtgagtactaagtcttaatgagtaggtgctggccaggaagctaactccttgagttatacaataaggtgtttaataaataaagacttttgtccttgctttccgaatcctcatactgtcactcatttacctagtccactgctgcatttacactgtgcagccaacaggagcgttttcaagatgtccagccaaagtgatggaaagtactaaatagacaaccttttctatagtcatatttttatcagagaatctcttgggatttttttttttaaatcaaagaagttacaaggatgtgattctaaaacattgtgttaaatgcacacaagaaaagtaatttccttcagacattggagtgtgtgctatggtacaatatttggcaaacacttttttttttctcctaaaaaaggtggtactgctttaactatccaaaagctgttctgtttctgaagatgtttctacttacatccttacctatagtctacatttatgtgtaacattgtttctgataagacttagtaataactcattttttttttattaaacctaataaaatctaagagttacctctttaaaagacaaatatgaggacagtggaggctggcatgttaggttacttcacgtttgaggaagaactcagactcagaagagtgtcttatatttgctttgggatattaagaaagttaatattaatatcagtatacgtatgagcgggaactgtttggcccatttctaagctaagactaggttgctatctgtaaatgttctacgttgtttataacaaaccattgtcttttttcaaggatgaacagtttgtgaaggacatgattctaggagttgagtgatgtaataatccttctgtctggacagttcaccagattctccagaaggctttcaaacggctaaagtttgatctttgtcctgctgagcttgctgggaaggagatagcataaaagctgtctgtgctagcaagtagatgtatcatttgctaaacgtggtgaaacaaaaaggaagcagaatcacaaatctgtcaacaaactggaattacttcacattaagtcagaatgtcagattgaacattttaaatgtcacaagtggaaaatttgcctagcgtgcagaagttgtaatctctaagtgtctatcttcaaaagtcgaggttttctacataatgaggaaacaggtggtctccttaaccctttagagaccaaggcagtctcagccatacttcctagttggatggatattaatttacagaggcctgggtctttatgcttggagcatgactgtactagtttgacaccagttacttgataatgtgagaaatatatggtgttgtgaaacctgactttgaaatttcagttcatacagaaagaaatcaaagcctctttaatgcaagctggattttttttttaacatgagaatgagaaaaacaaaaacaaaaacttgtttttgagctatgtggagaatctttattaagaaaatgacataattttttaaaaactcttatatccaaaattgtatgtggccacattatcggtaatgttttctcttcatgttggccaaaagggaatggaactgtcataggaatctgtacatatgctactgatttgcctagagaatagaagtttggtactgctcactttgcatatatatagtggcacttttatctatagggcagattaactctaataaaaatgaaatggggataggtttatttttgatatattactcttctgagttttcaagctttgatagtgtttaactgaaaaatggtttagaaagggctagatccaatatgttcatatttaaaaaattgatatgagatacaatttaagttctttatcaaaagcaagtaccatattagcaaccatcatattgtcctaggtgctgtgcttgtttagatggtatagtgtgggtggggacgtggcattttgtaatatatgtgtacatatatacatacatacagtatatcatctaaatgctctgagagctggtatgtcaggaatgctgagtattatagcgtattgaggtccggtgagattccactttgctgtgctttctcctgcatctcttctggtgtttcagtgactgttttactccagcactcacaactgggttttctcttttcttccagttttttattaggtttttgttttgtttggcttgatgcttttgagtatgttaccagtcacttaaaaactcctaaaccccaagctcttttccccctgctttgtttctggcagctataaaattggtaagaacattttgaaaaaaggttttaagagaattgtttcaagaatcattttgggcaaagacttttcatgtttcatttgaacagggatttttgtcaagatgtgttttgatggtaggccagcaagcagtgctactgtctaaagcacaaaccagtcaggcaggctgtccagccagaagccctcttggctgaagccggtctctgcctctcaggactcctccctactattttcgaccatttagggtgacatggaatcatacaaatattggggcttagaaacaaacatttatataacccggaatgcttttacgtacttgaagtgacttcagtcaaaatgttgcctttcctgtttaggaagctttggttctctgttgactcgtcagctagtaacacaaatcggtttctctaccaatagctgcttcattttcagttccttccagaggcttttgttctgcctttgtaacactgaaactctggattggcacagcatcccggggcccagtacacaggctgtatgttgacttgaggttgtatttacagtagttctttgtaaaggtttgctgtaacttgcacttttttttaaggacccagtttgggtatcagcaacttgggaaattccttatcaatgagttctcagctgacccttttgtcttcctccttcaaatcatgactccttaatggaagcgtttcattgatcacagtatcatagctagccttaagcatgttataaaagctaaatatctgggaattaggtttgactaatagtgaaggaaaaataagtacttataattttaaatttcatcctccaactttagttctatgtagagcatgccaaaagttttttttcagaagattacaaaccttgttaaagcaattaatttgttgtcatcatgggaaaccatgtaatcgatgttactaaatcattttaatttggctttgttaacttccgagaaatgctgcctaaacgtaactggtttctgactgcgggggagtacagtatgctttgttaggcctgtaggtgactcattctagaataaacgtgttcactgagatgtacaaagcacaactagagttttgggtggcttgtgtgtgtcttgattactttcaatgttaatgttgactttttaagttaacagtcactgttatgtactaggaactggtttccttgactttctagaatcaatggccaagagaggcatataatccttgaggggttgaaggtatcatgaagttgagtcagtatggaagaatttcaaacaaatcaaacagggtgctgaagttccggctgactcatctgctcatggtatgcttactgattagtgaatgtagttttaagcctttgtgtgtgtcctcaggggcagacagactttaacaaggaccagataacatttgaatggaggaattatatttcaggtgttttagcttgaaatttattttttaaaaaaaagaaaaattaaaaaaaaaataagagagcaaagtttgggaagcgagttgacagtatgaaagcagcagagctgaggatgagctggcctgtcccactgctgcagtggggtgggtcccagctggggaaatgttacattgttaccagcaagaaaaaggaagaagggtcaaaaagtaggaaactcctacttttgcaggcatgatttactacttgtccatagtagtatagcatttctaagcttctaagggcatctcaaaagataagagtaagtccgagatgttgaaaaaatcagtagggaagaaagatcactgcagatcataatctatgttggccacatgaaatgatttattatatttgggaagttttattttcttatgttttttaaaattgaattggtaagtgctttatagacgtatttttacccaggtgccacttcaatgtgtatgtaataaaattatttatattaaaagtgggaaattttgtgaacatttttctgtgtgtgtagatttattaggatggtgaagaagtgtgctagttagcagttttctgtgtaaagctgtcttgagctgatctgtacacatcggttataatgccccagtggaacctagacatgtcacttgagacttttgaaaaacaaaataaccagggaagtcctagaatggtatttggctgtttggtttttccttgagtactggagtagagaatacctccccagaactgtcagcacaaaacagggtatcagctttaactctgatgttcctattggagtagagtactaataactatgagaaggggaatacatttctaataaccttccctacaatctagaaacgtccctgtttaaattttttacctaaatctttttgtgctttatgtgtaaagaataaaagtaccaagacaccatgcattttattaacactatgtacatactggctgctttgtgttcagaatggtagcagttactttgtatattaaagtgatccttgtgaatttgtgaaatattgtcttaaagtgcttttcttactgtaatctttgtggtatcaactgtcataatgccctttttacacagacatttatgtgcagtcacataaacatgcttttaaaaactctgtaaagtctcttttttgggcctgggacacccctccccaagctagtatttgtttaccctcattttcttgg

SEQ ID NO: 17750 - DNA, 1219 bp, Mus musculus
atcaaacccttccgaccacccgagggcaagcacaattttcctgagcaaatctcaaacggatggtaaggctatttccccacccacccacctcggagaagactgactaactactgctgatactcagtgtgttacagtatcagaagcactccatagggcctgtgcactgacttttgatgtgggatgatgtgctttgctttgtttactagcagtcttgtaggggagcatgtcgcttttataaacacactcccaccttgttgccgatacagatgcatgatttagaagtggtgtgggcttacggctgtctgtctctttccttttcttccttaatccaacagtgtgtttcaaagattaatgataaataagattttgggttctgttatatttttatgtgaaacatccaaacaagtgtttcatatatgtcatttgaccttattttacatagtaccccctccatgtaagcctgtgtcacacccagatatgtgtaactcaaaactttcaggctatgtaaaacttcatcctattgcaacagacctcagatcagacatgtcctaataattcctaaaaggtttggtagtgtgtagatttctgcttgtttatgttgagggtctgaactatggagtttgtttgtttgtttgtttgtactattttctgtgattttggttggccctctcctccgtttttaaaaggtaactaactttttctgttggttttgactgtgactgtaatggagaattctccagcaatactggaatggtgcagtaatgcagcccaacactaaggggacatggtgcttttagcatgtatttttgtacttgcgtgtattttgtgagccttgagctatacccattctggttactactgctgtatcttcatgcacaaagggcgagaaagcagtaaaagaaaagctatctgttccctctcatcagtggggaggaatgtgttgagtatgcagcctagtgttgacagaggtggcagtgtggggaactggtgtggccaagtctcttctggactctgtgtgctgtggatgtcatgctcggttaggttagcacactcccttcaagggcttattaaggtaggctcagtgtttaggtgtattgcacaatatttttattagctgaatttctcacctgccctagagtatttccacattatcttttgtatatggaaattcacatttgtgcctattagctgttagctttatagagttgattttgacaaa

SEQ ID NO: 17751 - DNA, 2057 bp, Mus musculus
ctaagtatacgattgaggctgtccttgaactcctatcttcctgcctctacctcccaaatgctgggattaccatgcctggctcagatttttagactttaaagacactaaccatataactttggtttttcttgcccctgccccacccaactgctgcatatgcttttagaattgatgcatttcagtattaccattaaaacatgagaatccttctccatttttgtggtgctgggaatcaaattgaagacctagcaagtgcttggtaagcatttgaccactgagcaacactcctcagccccaaacaggattcttaacactcatgaaaccacctaggagcagattgtagcctcattaggtattaaaggttctctcactgtatcatcagagctgctagtcattactggcaatcagtttaaattaccagaaagctgctggaaacactcgccattcacgttgttcgtaagcgctgcttgctggcattttggtgtgtttggagccatagagagagagtgtcctgtgctgaccacttctgttgcgtccacgctgcgttcatttcctgttcactactaatggtgcttctcatcctctgatctcttctctctcgtgtgttaaacaagtgtattaaagatgcttcataatgccaacaacatagcaggtcagtgaacatgatcccatagtaaaatacaaggggtccccaaaattagtgattgcttcacacttactgccctgtgggctctctggggacactgcaacagaagccacaaacttgcacaaaacatcatttgaaagttttaattttaccaatttgaagctaatttaattttattgtttctcagttataaccgtaaaccaaaaatattccaaatgtgggaaattaagttgaagggaaaggtgacttaaaactttcaaataatgtttcattagttttgtagcgtttgtgattgtaaggcatcagagctgacaactacgtggagctgtgggagctgccgtgcctttccatggaagcactctgttctcaagtgttctttgccaggctgggctctagccgctttgatcacctaagtgtctttacgctcagtcaagggaggctattaaagtggtggtaactcacatggaacaaatcaaaagaaatcagatcctcaaacagcaggtgaaatgagcaattaaaaccctgcgcgctctcctgggtgcaggtctctctcaagccgcatccttgcaggcctatgcaccggctttcaacggcagggagcgaagactgggaaagggatggcagtagcagctaaagctgaaataataaaagatttgcatcctacaactatgtgcattctatttcttctcacatctaaccttgggagtcttacctaaaaagccttttgtgggccacgaatacttcctcttgaggctgcaatgcttcccatgctcgtcagtgctgccaggctcatcactttcaagggacagacataagtgttacggaaggatgtatgaaatattacaatctaccacctcaaaaaacattgtttatggagttcagagcttagagattcaagtattgattgcagttttattttgaaaagaatgctacaacttaacgtggtttttctttctcatgtttatattaaaagctaataaattctattttaattaaaatatggcgagtgtgtttgtactacttgtctgtccacagggcattatctctagaacttgtgtttaccttggtcgtgaaagctttcacatactcaccaatctgttctgattcctgtcatctgattcctgtcactagttcaggagtaattgtgctcctcggccttcctaatgctgagacccttaatacagttccttgtgttgtgccgatccctgaacactaggttatttgtgttgctacttcatgactaaatttgcaaacgtatgaattgtaatgaaaatatctgagaacccctgtgaaaggttgttccaccccaacccctaccccaaaagggatcacaacccacaggctgggaaccactggcttaggaatgtgttctgcctgaagatagtgtattatactaggagtctgtctagcc

SEQ ID NO: 17752 - DNA, 4914 bp, Mus musculus
gcatcgtggtggcctgctacctgtatgagcagcactaccgggagagctgggaggcagccctcacctgcgcgtgtccgggaccggacgctggccagccacgcgccaaacccgagtactgggtgctcatgctcaagtacttcatgtgcctggtggtgggcatcacgtcgggagtctggatctggtccggcaagactctggagtcttggcggcggttcaccagccgctgctgctgcagctctcggcggggccacaagagcggtggcgctatggccgcaggagactatgcggaggccagcgccgcgctcaccggcaggaccgggccgcctggccccaccgccgcataccacaagcaagtgtccctgtcgcacgtataggaaggcctggaggccgaggcccagggacagtgctggaagttgaagggggcagttgtttcgcttggtagctttgtgaaggtcacttccgtttaccttcttggtgctgatgccccctcccagagtggcttggagaggaaaagggggcggtttcaagagattacctgtccccagtcttctacagggggctcggctcgcagggcagtgggttaagtgtattctagtttgcatttcttactgctttctttagaagtaccttgtttttaatttatatgtattttaagttttaactttgttgcattttggcaacaaaatttacctttgctttgggggctacataatcctcaaattggcattgtaatgaggttactgttggttcaggtttttttggactgtgtggtctaaattaggaaaatatatttcctatacgtgtcttttttttttttttttataaatgtgaacagtgaaaggctgctgtgagtgggaaggtgtggagtgtgtgtgtgtgtgtgtgtgtgtgtgtgtgttttaaggtagtttcttcttacagtgcttaaaatgtccaggacacttagaggccagaggccatctgctctttctgtgtctagccccctcaagtcctctgtgaaagtagaccatgatgtggttaggaccatccctcacatgataaggttagagttttgtgagcctccttaaccttgctcagcaagcgttgggctcttggcagccgagctgccatctttctcatccccgatagagccagccgcccttgtcgtgtcttgaataagttagaggaggcattatagagcggacctaaacatttgccttggagcctgagggatggggattggctgaatgtgaattctgaactagtgaggtggtgagccttctgctggagagggtggctcttaagatgctccagagagccccacccccaccccccacccccgagcttttgagaataaaaaattaggctacaaatttcagtaaaaataaattcactccctttttctggaagtagttaggactctttgctaaagggggctctcttttagattaaaggacaaaaaacggatatgcttccagtaattaaagtaaattcccattgcttcgaatctgcggctccggcccacctcctttatcatgttaaacagtcctccttgcttttcttattcctcctggtggagagtggtgattagaaaccacacccacccaccaatgaagtgctcagactgggggagggaggttagttacctgggaacaaaccttggctcagggggaaaacaaatggccctgaactcaaggtttaaagccagatagatatattccccaaagcagctacaccatgccctagtagcctgaaaaccaacaagactcctaacttaagctttgtaatatgggggctactgtaagtgtaaagccactgctggagagaccaggtttctttccccccccttttgagagagcctgtatagtgatggacacccccttacccagtttccctgctattagaagagtctgtttgctttcctaatctatttaactattcattcactaagagtgtggggccattactgggaaggaaatggcagggcgtaccagtgaccaaggcagagcggggactgaatttagggatctaaaatggccaagccactgaaatgtcaccaagctttcctagagaaacagctggagtctaggcatcccgattttcttttgcagcagctggggggtgggttgggggtagggagagttaagcctgagccagctttatgccccagggactgagtggaaaaaagcgtagttcccactgggaatgtaagcagtcagagggtgttcacatttgtaaaatactctgccctcgctcactggagtcagaattagaatttcagtggcttccacaagaccttgtacacctagatgcaggactctgtgaaggtcttattccgatgcccttttccttccgggaacctcaacacactcactggctatgcaccacttctgtttttcaaatgaggttcttttcttatcaccttgccctcttgccttgtttagcatggtcttcccagaatctgctgctccctccccacccaccccccctcagtctgctgtgcatagttagggttgttcctctctcacaaagaaaatcgagaattggacatacagtgtatctaaaagttgtggggtggagcggatgaaagtgatttaattcatcttttttagaatgattatttttttccatctaagcaacatgccaaagctgtaaaaaaaaagaatgattaataataccctttgaacaatacagcagttgaagtgggcgcaatgctagagctggaggccgggaatgcctttggatggagcttcagaggcctggagttttctgtcctctgctcccctctcccttacccttagagagacaaagcgcacctgcttccctgaagccaacaggagtttctagccagccctaggggagggaagagggaagctgccttcggatgactaccccctcttcccaccctcttcccaccgcacgttttcctccactttgcatatctgtactgataacaagaagcgaaatgaaaagccttgggggagttcagcaacttgtgcaccgccagccttgtgtagctgagaggactagggttggtctcagatccagggcgcgtgcctttggccacctcactcacctctcaacccctgggatgcttcacagattagagagtgaggatttaggtagtttaaagaaagaagcaggacctcaatgactccgatggccagatattaggaaggctttttgttttttaaatttatataatttccctcctcacattttgaagttgtctgagttggaagaaaatcctttttcttggtgccttattggtttcttcttgcaatcctttttgtcacagtttcctgtgatcattaccagtggccagggccagtgtgtgtgcgcgcgcgcgcacgcttgccttgtgtgcacttgtgcgcatgtacaagcttaaataatgtgcggatggcactggttctaagttggtattcattaggctgttccctcctgggccagggcagcactaatcttgacaccggctgccaggagaaaacatcatggatcatacactgaaccttaataacagcatcagtgacctgcaccggcgagtgtggctgggaaccccagagctaggaagcacggttgtatattttaatgaactgctgcccctgctaaggaagctgctttcacttttgtgctctatctacagaaagacccaggggggtaggagggacaaagctttgaataagtgcgttctaacactggcaaacaggactgagcacatcacaaatccaggcaggtgtgaggtacagcggctaagaattgtctgctgcctctctctgccctttcttgtcgccaaagtccaatcaagtgatcctgggaaagaaacagcctggcttggggagtgcgctcagaagggaaacctaacaagacagtaaagaagggtagggaagatgtagctaacctgcttcagactctcagagccttctggtagtgtggtgacaatcgcaggattgatttcatccaggatagtgtctgtctgtggtacataattttaaaagaatattaattcatgttgttacaaactatgtatagtatgtatgttttgtgggtgtgtatatacgtaatatatattatatatatatatatatgagagagagagatttagtgacttttgatacgggttggtgcaggtgaatttattactgagccaaatgaggcacataccgagtcagcagttggagtccagggcattcagtgctgtgcatggttggcatacatgtacagtgcctatcccgtgcagtaagaatcaccaccggcatgccacatccagtactcagaactcagagccagcaatattttatttgtagacaatcagcttgaatctatagattttatgactggcaaatgattataatcctgaacccataacgctcgcaaaaggagacccagagcgtcttggagagacgtttggtttggttttgtgcctgggagtcagtcagtacaacagcaactgtatgtgcttatgttagtctcaagatccttaacttgttgaccttattattttggaaatttttttgtattatatttgtgggaaggtaaaataatgattttaagatttttatcaaatatggagattagttatttatgaaaaacaaagaaatgtctatttttgtttctttgttcccaattaatgtagataactttttaaaatgcattaaagcaatggtgaagaaaatgtaatggaggcgttgagtctttcttgttacggagaaatgcattggtttccaagagtaactgcgatgcagactccagcatggtcaccacaggtctcagatgtcctgaaagtataagcaactgaattttcatcagtaaaattgaccaaactctaattgcaaaaacaactgcatatgaccattcccccctctgtgcttcctgggtttctcctgtctgtgtggggcttgctttgttcacttgaagtggagggagctccattga

SEQ ID NO: 17753 - DNA, 1225 bp, Mus musculus
acggcctgcccctgccttgctctgcccgaatcatgcagggggccccgaaggaagagaaggcgagtgaccggcccgcgccgcccatggtcgaggggcgccctgctctctgaaacgccctccacctgctgccatgtgtcgccgccacaggtacctagcttgtcgttaaactttcccagctctggcccgattcggagtcgcgcgactgaggagcccggctggtcgcagacatctgccgcccagcaggatcctccgaggtgagagcccgcgtcttcccagttcacccggttcctctgcccccatctcggggactgagctctctggccccaggcacagcctgcagggccgggccagaaaagagaggcgggcgcgggcagtggggtggagggggtgggggcgtctgaagtttggttctaggaggaggggaggaaaggagttaatcttgagattggagctggtttgcggagaccaagtggttggcgctcctctaagaggagtggttgcgatttttcttttcccctaccttctcttttaagagttctgtccttggagtcggagccctaatcatccctccagccctatctggtgtggaactgagtgctgccggcggaggcagcgccttccagaaacagtttatctttggacggatttctttaagagaaaaagaaaccaacaggttgccagcccgggcgtcacactcaagactccggagagggaagccccggccgcagattcgtcggccaacgcagaccctctcaggcagcgggaggcaaagggaagaaggagacgatggctcgacccgacccgtctgcgcctccctctcttctgctgctgttgctggcgcagctggtgggccgggcagcggccgcctccaaggccccggtgtgccaggaaatcacggtgcccatgtgccgaggcatcggctacaacctgacgcacatgcccaaccagttcaaccatgacacgcaggacgaagcaggcctggaggtgcaccaattctggccgcttgtggagatccactgctcaccggacctgcgcttcttcctgtgctctatgtacacgcccatctgtttgcctgactaccacaagccgctaccaccgtgccgttccgtgtgcgagcgcgccaaggccggctgctcgccgctcatgcgccagtacggcttcgcctggcccgagcgcatgagctgcgaccgcctccctgtgctgggcggcgacgccgaggttctgt

SEQ ID NO: 17754 - DNA, 1155 bp, Mus musculus
tgtttgcttgctttcattaaccaaactcaggggaatgtcatgtcaccacagtcaatggggaaagaaagaaaactagctatgcagaagtgaatgacaaagtctgtgaacttagtctttactaggttcagaagtgacatcaacaggaggatttttttcctttattgtataaagattctctttacttgccacctgtgttccacgtagaaggtgggaagcctcggggatgtgtgtggatgacagtgtccctattttcgccggggcagtccaccaagccaccggatcaggccctcattgcagtgagctctgcctctggttacctgtccggctcttactgtaaacagtccttacctgtctccaaggaatgataaagggaggaggacgccaagactgcaggtgaagagcaagagtgtgtgacgtggatggtcctgtatagctcgttctcgggctcctagctcagatccgagtcattccccttccttctgctcatgcggtacagaagcaatcaggatgtgcctttgagctgttccttctctctgttagttattcgcaatagctaatgtgctagtttacgtggtccctgttgtctggatctgattgccttttttggttaatttatccatatttttgtttacattatttttaaagctagtaactgtaatagtataaaattgaagttgtgctgttgacaggacatctctctctctcttttttttttacatttatctgtcacaataatttaagtgcacctgttcctaatgtataaagttctctccctctcaataaatgacaatggaagtactttctctcatatcagctttatttaagaaaaaaatcttcaggaaatggggaagtgagcccttggcaaaatcaagatttgaggtctattgagagtgggctatttacttttgtagaagaagggggattaagacctttttgtttgatgtgtgtgagaggtttgctgtgtgtttgtatactacactcatgcttgttgcccaaggagttcaacagagggcattggattcccctagaactggttttatagatggttgtgagccaccatacgggttctgagatctaaacccaggtcctctggaagagctgcaagcatccttagctgctgagccatctctccagccctgctgtgctttaaatatc

SEQ ID NO: 17755 - DNA, 2679 bp, Mus musculus
gtagtgtactcccactgtgatccccttccttgtaagagcctgcatagttgtcactgtgaccaagatggctgctaggaaggcactgagaccctggcggccagcattccttcttccttaactctttccaaggcaggagaatggactcaccaggaagtacttgtttgtgtctttcacctggagctggtgttgcccactgccgcccatgcttctgtcctttgggattttcactgctgttcagatcaggggaaacactggctcacagagaacgcaggggttcaactccaagttgctcccacaggcaccagctctcgatgcttcagtctagtgggagacattcagctgacttgtgcagttagaggcaagcatttcacctcttggcccacaccatttcctttggccccagaccatgcagttgaacgccacacgtgtgttcatttcctagctacccggaagctatagccaaggcatgaaacttggtaaaaggccagggccctatttaccagacacctcacggtgccttttataaactcttgggaaggcaggttgacctcactggaatgagtggtagggaatgttgcgcataaaggacaaaggtgggaagtctcaaacacttggcaaaacagacaaacagatttgagtctctctcttcctcctcttgttcatgaaatacagtatttatattttccagcctcagagaacagaacatgatctttcactggagaattctagacctgcttattatgaaacagatgtgctcccgtggcacagtgccttctccctccacccccagtccctgtcaccgtagcttactcttgacctttgctgaaactaatgtatctgtgattctgactgtcagagacgccattcccagcacactgagcacagagacttgaagaacagagcccccgaccccaggttggccccatgtcctgccccaactcacaggtgcccaagattagacctaataaaagccgagggtgaaatctggatccctgtttagcacacctgagttgtctgtccccactgccccttagagggccttgctgtgtgtgagcggaccttggacactcctaagacctttccctggacattgcttcgtgtttattttttaaagggaaagataagcatgctgtcactcatgatctggaattggagccatgtcctgctacttctgttttcactatggtccatgcccgctcaggactcacaacagcgttctctgccaccaccaccggaatctgataggacaccgtggagccagatcaggagttggatctgccatgaaaattcaaaattgctattttcagcccagaatgtctcagagtgcatgaaggcccttactgttttcaggtctaacaaatgacttggtgcagtgttaggtagttgttccactgcttagaaaccatcgaaacaaaagcaagcctgtgcatttccacctccttttttttcatctcagtaaataccatacacgtaaagcataatggaaaacggtccattaatctcctggagctgcttgcaaagcccagggaacggcttttcactaaacagccattccctggtgtagcacaagaattccctcctgctagtgccagaaactcatgtgtgacaccatccagcccgggggaagtgttggcacccaaccccaccgttaagaaaccagttcctaaaatagacctgcatttgcaccgcagtaggaaggctgcagggtgctccaaaggcagtcagctctgatgggagaggagttctttccagggctgcctgttcccaaagttggacacagccttatatgaaaaccatgcaaactctgtcttccccctgacttcatgtgctgaataacagccatcttttgggagtttttacatttgatgagctgaaaggttaactgcttcttgattcttctataataggcctctaccaaaaaaaaaaaaaggagtgtgtgattacagtgcctcgggattcgaaggttccaatacagtctgaaatagccccgtgctgtgattcccctcagctgccccaaaacaaaggtgtctgtgtcactctgtcactgtggctgagttgcagcacaccctcggtgaggtctggcctgtctctgcttgtcatgtgtgcacactgcacatgagcactgacagattgctttctgcaactcctccaggaagcttggcttgcagccctgcaagttcattctccatccgtggcccagagatctccagacacaaactacctatgatagcaggagcacagtgatacaggaccacagtaatgccacacaccctgagcaccaagagcaaagcccgctgccagcaaggaagtagagaaaagttctgctgctagttcaggggagctctgccctctcaccctgcagatcagctctgggtcttctcccaagctttgctgaaatagtcagattagaaattaggctttgacccttagttggaatactgcctgttcccaacacagactattttattttgtttgatttggtttttcttatggtaaatagggaagtgtgcaatattgttttgggagttttctacatgacttttcatcttctgaaataatgtggagatgtcaggaatttgagacaaaggggaaagaagctagccctttcttccttggccacttctccctggagcctctggcccttgtcatccattccttggtactgactcagtagtggtg

SEQ ID NO: 17756 - DNA, 1180 bp, Mus musculus
aattacaagtgctgacagttgcttaccagaaagcaaatcacctttacatgcatggaaaggtagcagttgttcagcacattatgtgactgtcagttggcagcatttcctggagcatattaatattaagacagagccaaggatcattctgacctaatggcagggccaagggagtggctactagggcaggcaaaggttctccagctcctaggagatctagggcacaccagctcaactcactcatttcttaaaacttgattccaaatgaatttctgttcatccaaaaggatcttagaaaatgatactcaggctgaggtggtggcacatgtctttcttcccagcaatcgggagcagaggcatgtggatctctgcattcaagtccacttttgtctacagagcaaattccaggacagctagggttacatagtgagaccctggctcaaagaaaaaaaaaaagatattatttagtcttttaaaagactttttaaaaaaatttctgtatacctgtgtatatctctgtgtatatatgtatgtgttgatacccacagaagccagaaaagaatgtcagatcccctgaggctgtagtcacaggcagttggttgtgagccatccaacatcagtgctgggaaccaaactcaggtcctctgcataagcagccagagttcttagccactgagcatccttcctgcccctgctagtgaagttctttgtgggacacttggtcttgtttggggtgctttttgctgtttgtttcttttctttttttccattttatctcatttgttatatatatatatatatatatatatatatatatatatataattattattattatttacttatttattaggtattttcttcatttacatttccaatgctatcccaaaagtcccccataccctccccccctccactctcctaccctcccactcccacttcttggccctggcgttcccctgtactggggcatataaagtttgcaagtccaatgggcctctctttccaatgatgccgactaggccatcttctgatacatatgcagctagagtcaagagctccagggtactagttagttcatagtgttgttccacctatagggctgcagaccccgagctcccatatattggggagaggctttctgttaggaggtgcgaatacacggtgttacacactcaaaagg

SEQ ID NO: 17757 - DNA, 1177 bp, Mus musculus
catgtgcatgcgcgcgcgcgcgcgcgcgcacacacacacacacacacacacacactttaagaaatgatgcacttccatagccctgaaggaaatgtaaacttagatgggagctttccactttgagaagatggtgatcctgaacatgctgattgtgtgtaagtagtagacttttaataagtgcataagagcctcacatctgatagtcacactcccatagtgtatgttgagggacttagtggttttgtcaggctgtggttccctcctcacacttccctggccactctgtccatcagatgagcttccacttataattccagacctagatcagtgtggattgcttccccaggcctgcctggctccttgccccttccccaggaaagctgattcccctcaccgagcttcctgtgagccctctgtgagagcaggctgcatgtggttttgttttgagtcgttatctttcctactaaatagccacatgagggtagggcttgtgttctcctccttggtaagctgttgctgtggggcggaaagcatcgtggctttgcagttttcttctcaatgaacaaatgtttatgttagtgcgggatcccagccttgcttctggagacagttattggggacttgtggagaggcttactttccatcagcggaggctgagccagctctctatgacactggcagattccatctgagactcagcaaacaggcctggagagttcagtcacacacacacacacacacacacacacacacacacacacacacacacacacatacatatatccgtgtttacatatttatacagtttttaaagactatgagggttttcgtttggttggttttggttttggttttttgtgagttgcttgtttgtttgtgtctttttggcatattgcttgaaataattacagagctgtagcaagttgaagagacagggaacatttgagtatctttcaccaagtttccttcttggtcacatccaccttagtccatcacagtaggatatataacagtaagcatgtcagaagcatgatatataacagtaagcatgtcagaagcatgacatatctgtgaggtctgtgccatcgcaggtaaaggcttatttaatcactaacatgaactgtggagttgatgaattccttccacatttgccagttgagcttctagaggtaagaag

SEQ ID NO: 17758 - DNA, 1657 bp, Mus musculus
gggtgatgaattcagctaaaacccaggggggaaatataattctttctacaagcaatgaagtttaacaattttcatggaggctactagtttggaattccagaagtagcaacaggtagttgtggaaacagcagtgtttggaaacccttgggctgttcccagcggtgtaccccatcccggaacaccccatctcagtgcactccaccccagtgcctcccactcagtgcaccccgtctcggtgcaccccatcccggagcaccccgcccccttactgtggcaaaagcactcaaagacttgaagcatcaaaaacaagcaagagaggaagcaaatgctatgcagacttcaaccctgagagagaagaaagccatgagctcagctggggagacctagcagacaccatccagtgtggtctgtagtatgttttctggcaatttgtataagaaaaatggtagaaatgattaaattttctccaacaagaaatcaccttttgctttttccggtttccgcggcagccgcagccatgagcagcaaagtctcacgcgacaccctgtacgaggcggtgcgggaagtcctgcacgggaaccagcgcaagcgccgcaagtttctggagacggtggagctgcagatcagcctgaagaactacgaccctcagaaggacaaacgtttctcgggcaccgtcaggctcaagtccaccccacgccccaagttctcggtgtgcgttctgggggaccagcagcactgtgatgaagccaaggccgtggatatcccccacatggacatcgaggcgctcaagaagcttaacaaaaacaagaagttggtcaagaagctggctaagaagtacgatgcctttttggcctctgagtctctgattaagcagatcccacgtatcctgggcccaggcctaaacaaggctggcaagttcccctccctgctgacacacaatgaaaacatggtggccaaagtggatgaggtgaaatcgacaatcaagttccagatgaagaaggtgctgtgtttggccgtcgctgttggccacgtgaagatgaccgatgatgagctagtctacaacattcatctggctgtcaatttcttggtgtccttgcttaagaaaaactggcaaaacgtgcgggctctgtacatcaagagcaccatgggcaagccccagcgtctgtattaggatgctccaataaacctcactgctgccactcaaaaaaaaaaaaaaaaaaaaaaaaaaaaaaaaaaaaaaaaaaaagaaatcaccttttacaataaaaatgagaagaaaaagaagccactagtcattttcaactgcaaaacacttaagagctgtacacagtgatgaatgaaaaggacccacagtagtataattgttttataaacactgaaactataatacaagtggagaaaggaatatgaaattaggaaagacactagagggcttaaaccagatttgatcagcacttgaagtgtaagtactcaggtgtaaacgctgtaaccataagaagaattttgttttgagaagtatgtgtttataaaggggggcaaggggctaaaaacaaaagtcagagaagaggaagtacccaccatccaagaaggatagatcagtgtgacgggcgatggtacctcactctaggattcctaacgacccagagggcatcagcaa

SEQ ID NO: 17759 - DNA, 1636 bp, Mus musculus
ggtagttcagagccgtacagcagggtctcctgtgaatgtgtgcacatgagaccccactgcaggctaccctgagcacaggcagcaccaggaacctcagtcatggcccacagatttgtagctttttaacattaatgagttctcttctagaagtgtgagtagcattactgtgatttgtttttaattacctcctgccttgtcagagaaaaaactaaatttctttcttttttctcccaccagtgtacaacgttctgactacttgaatacatttgagtttatggacaaacttggagaaaacttgaaggccaaattagctcaggccaaactttaaggtcaaacctgggcttagaatgagtctttgcggtaactaggtccacaggtttacgtattttttttttttttttagtaacactcaagattaaaaacaaaaatcattttgtaatttgtttagaagacaaagttgaacttttatatatgtttacagtcttttttctttttcatacagttattgccaccttaatgaatgtggtggggaaatttttttaattgtattttattgtgtagtagcagtgtaggaattatgttagtacctgttcacaattaactgtcatgttttctcatgctctaatgtaaatgaccaaaatcagaagtgctccaagggtgaacaatagctacagtatggttccccataaggggaaaagagaaactcacttcccctgttgtccatgagtgtgaacactggggcctttgtacgcaaatgttgtactgtgtgtgggagagctatacagtaagctcacataagactggaacagataggatgtgtgtagctaaaatgcatggcagacgtgtttataaagagcatgtatgtgtccaatatactagttatattttaagaccactggagaattccaagtctagaataaatgcagactggaggattctgctctttgatttctcttctcctgtgacccagcctaagtattatcctaccccaagcagtacatttcacccatgggcaataatgggagctgtaccgtttggatttctgctgacctgctgcatttcttttatataaatgtgacttttttttcccagaagttgatattaaacactattccagtctagtccttctaaactgttaattttaattaaaatgaagtactaatgactcttctttgaagtgtttattatgtgtttttatttaaaaagtgtttttcatttcttttcctattactgtaataagatacctagatagaagcattttaaaggagaaagggttagttttggcaacagttcaaggtacactcccagtgtagctgggaggtcagggtagcaggagcttgaagcagctggtcctgaagtagagaacaaggaatgcatgctagtgctcagcctagaaaccaagatggcgcttcccctagcccttaacagaaatcagagaatccctagtgtatatacttagaggccatatcccaggtgattctgggctctgtcaagttgaaaagtaacacagacacagacactagattatatcctagccatgggaatttgatttgaaaatattttttctcttaagaagtctactgtgagacagctgtggtgcgtatctgtgatctcagcacttgggaggcagaggcag

SEQ ID NO: 17760 - DNA, 1147 bp, Mus musculus
gcacttgtcacaggcgttgccaaagccctttgctcagattgcatagacatgtcctgccagctgactggctttcttttcctcagatacatatgtaaaatgaggctgagtagtttatgttatataaagtcagtttctgctctaactttataaagctattattattttaacaaaaaaccttggacacctataagtaatgggaaattttttgtctgctcatatttacgtcttacctgtagattttaaattaactttaattgtaaagagaataagaatggtaatatttgaaatgagctcagccacatacatggttttaagtgttgaggctctttccatttagacagtagtaatttttaagcctcaatttttgaatatttggacataggtctccttattcttttgtgttttgataagaattgtcacgcaggggggctgtttggttatttgcctgttcttgagatggtttctaaggaatctctttccctccctgccctttctttccagactcatgaaatggccacagatgacaagagttccccgacactggactctgctaatgatttgcctcgctctcctgccagtccttctcacctcactcactttaaacccttgactcctgaccaggatgagccccccttcaagtcagcatatagttcttttgtaaacctttttcgttttaacaaaggtaagattacatcttaataaacctcataaaatgcagtttgaattctctgcattccctttagtgtcttgctgtgtggttgtgagaatgtgaaatattaataaggtggtgacttcaatctcaggtcaccaagtctttctgtctaagaaggaaaagatagcatttcattgtaatccgattaattatttgtgtaaattgaatttaaagtggttagggaggtcctttttaatgagaaaacatttgttctacatattttctatcaatgtgctttgacttaagcttacagaatgaaacttgttttgagggaggcattggtaataagattttaaagcaataatattaagcagcagtatatggtttgtatgtttagaaacttacaagctgacagcaagcatgttgggacttatactcattggattgagttgtaaatgacatgaaatgaacagataatttaaaggatgagttctt

SEQ ID NO: 17761 - DNA, 1185 bp, Mus musculus
tgttgttgttgttgtttttgtttttttacccaaatcacttacatcttgtatatgtgaaatggaaatgaattttacaaatcacctacccaactaaatttgcagttttattgacatttagtacacttaaaattatttttttgatatttaatatcctagagatgaaactacacttttttgtttgtttgttttttgagagagggtttttctgtgtagccctagttgccctggagtagaccaggctggccttgaactcacagagatccgcctgcttctgtttcctgagttttgggtttaagggtgtgctacaccactgcccagagaaactgcactttttgcctcaaataaagtaagggtgaaaatgaactgcatataatcttattgttgatgggaaaatattgcttttaaatgttaaagcacttattatagccccaaatgaccccaatattttaattttctttatagcttgattcatccggattcctcaaatagtgctctttcaacaagactcgtatctgttcaagaggatgctgggaagtctcctgctcgaaacaggtaaactgccaataaagaaactactctgtctgattttttatttatgtccattgtaatgagaacaaacaagcaacatggtgagactgtttcaaagttctgttaggttatgctttctttttttggtagttctttcagtgtttagctccttcagatattttctgatgatgtcaggtactggaacctatcttctgtctagtagtttagtatgatggtctgaaggatgtaagaaaatgagccatggaggcattcctgtgagagtgtgcaccaggaaaacaccaggaaaacagaacagcggagtcttaagagggagcacagctggccaggaatggaagaggtcctatgtgctgcagcagtgtcttgcaagaatgaatgcttcagatgctttaatctggtctaagatgaggagccattggaattaaacaattttttttaaatttctttgtaaaacttaacttatattttacctatttattttgacacatcttaatgtacaattaaaaaagaaaaatccttcaattgattgatttcagccccgagtttgattattttctcccatctgcttatcttgtgtttatgtttgcttctttttgttctagagctttcagatttgctttttaaaaagttgctagtttg

SEQ ID NO: 17762 - DNA, 3333 bp, Mus musculus
cacacttgatagcttctagattctgtagttcatttctgagtttagatgtcccatccctcaagagaactcatcttcagaagcattctgcctgcttcagagtgcttggggcagtgtatgtttggtgaagtcagttgcccaactgaattaaaacagctttattcctccctttgtctttcactgtcttaggtaaaatgccaactgtggtctctccagagttgtataggactagattttgtgaagcaatggacaagtatttcttgatggtgccagaccactggacagggttggatctgaattgctgaaatcacacagatgatttgaaaaagactgtgaatgaaagtggatctgaagaagaaacccaaactctatgatgttttgtttctttgtcatatataccactgaacacaaagacctttcagttctgtgactgtctatagattggctttagactgtccatgactgcagggtaaaaaagccccatggatttgcttttgatatttgctattatctgcctgtaaatgggaaattgtaaaagttaaatacaatgttttttttcaaagggctgtgattagagatgactatatagatggagtaagatattgagttgtcatacttactaactcaattgcttgaagaggaaagcgctgtctgatagacactgtcttgtagactgacaggtagactgtctagtagactgtgactgtctagtagactatgactgtcgggcatcacatttgttacttttttccatgagaaggcacttgcagaccttcttggtttggtatacgtttcctgtgtagtgactttatgtttgttcttataatatctaaaacatttaggaaaaatctgatttattccattaatggccagttaaacagattggtgcttgctttattaggaatttgacttaaattaggaatcctgccataatctatattctccaactgttttgatgctttcacattctaccttctatgcaggtgacaagagcctttattccttagcttgagagcctttcttagaacattttaaggagcttgtttaaaacatttgagtaatgtgccaaacagcacttaatctgcatatgtgttcatagtctagatttacctctcattttgggcaagcaaaataagcaggaaatgaaactgtagtcactgaagccctgagtgaagaattaataatgaaagctttttttttaacggcaaagagaaactaattgagaatcaaaaatgtggggttttgttgtttgtttttgtttttcttatatatgtatttgtaaagtatcttttaacactactagcagttaggtgggatttgtaaaatttaaaagttttcagtatggatactctcattttaagtttccatcacactgaccagtgcttctgagaaatgctgagaggtaaagttactcctactgaaggagtagtttactagttagcagtatcatctaaaacatgaccagaaatcctgaactgtgagcagatgctttcaccccataatatgcgagtgtttctcttgccttttctgtaacaaggatatttggaaatttataaagttgtaagatttccattttattcagactttatctaatagcatgttaatattcacaaagggctggatggacgatgctacagagggcagtctgcacccgagtcagcacagtgtggcaggtttgctgtagacagtgaagcagtagctggctattggttacttgttgagtgtgtggctaaacaaggcttatgtatgcttgatgttaggccttggcctcttcagtgccttggaaagatggaccgaacactgaagagtccagctgtgatgttaaagatcagtaaaggaatgtatagatttgaagattgtgtggaacacactttctgtgcttcctgggacaaaggcttttgtgtctggtttgaaatgccagctgatttgtctttgttcattttttctaatcttgattgattaggctataggaccctctcacttcctgtaggactagagagataccttgcctagctggggttgtgttgtttctgtttttctctttggtttcagtccagtgcatatttgagctgagctccaggggggtaactcctgacagtaacatggcgtgtccatcttctcttgtccctgattgaaaagcaactttgctttttaaagtattgtttaaagtaagcaaatattgaggtattttggtgactttctgaagcaagagtttgtactttgaaagcttgatttgtttttttgctttttttttttttgttttgttttgtttttttaaattaatgtctggctggtgttaatgaaggggaaacacataattgaactgttttgcgtggtacaaatgtgtgactcctggctgcttgtgtttagcaactgctgtgtatatgtgtgtatatatagtgttctcagtgctttgaattgaatggctgttgtcctccttgactccctttcatggcctagagaatattaatgctgaaaagctgtgaatacgaaagaaatctcatgctcaaaatatgaattccaaagtagctgatagtaacatgagaaaattatgcctacgtgttgctgtgtataaaaatcttgttcacaaatatgaaactttttgatgacgtaaaattttgtttaaagactagaatttgaatttttcatgtctgcctgagaaaagaaagctggaataagctggagagcccttttgtagtctattgagtgcttatagattctcaagatttcctagggaaggacagagcaggggttttctagctttgacctctatgtatgtatggggtcactcttgagcattggcttgaggtgactgtgtggtggatggcttcttggcacgttagccatggcactgggcttctgtagaagtgccaaggaggtgatctgcctgtggcaagtcatctaagtttcaagtgtgaaaactattgtgagcctgggaccgagtcttcctaggacacccagtttctaaagtgacttacgcagtattcaaaccttctgtgcaatgcctttttttggttgtttttgtaacgggtgcagtgtattataggaaaaaaaaggaaactacaatcacaagcagttttgtttaatgctgctttgtcagttttgtaaaagaaaatgtacataatgtctttcaacaggttttagactagaggaaataacattgtaaatcacagtagcctaatttaatagtaaaagtacttaatgtattataatgtgtatatttctctaactttgtttccagctgttttatatgattgacatgttatttaaagataactaccatagcttcttagagacttgtactgtaaataaagaggaccttcaataaactggaat

SEQ ID NO: 17763 - DNA, 1175 bp, Mus musculus
ttcaccatctgacaaaagtctcttatgccttttaaccagcagactaagatacatcagagcttttagaagatatgcactgttactaaaataatgggccctttggattcaccttggccatcaagaactaggcaactttgtccaagatcacaagtctatacaaccttttctccacctttctttctctctctctctctctctctctctctctctcctcccttccttccttccttccttccttccttccttccttcctttctttctttctttctttctttctttctttctttctttctttctttctaacttcttcacctcccccccacccgaaaaattctttaacctagaaattttaacaaaaatcttcccttttcatttgtagaaagaagggctgaatattactcttatcctattttattcttactctgttcctatgtggtggtctcaccttcacaaaggaggtttgccccagctacaccaaaccccacaatcctagcacaacccaaatatctgttgtttcaacattccaaaccctggctgtcttaactaatttcgagccgaacctgatctagcgacattctcccagtacaaatatctgctagacttctgtcttaggttttattgctgtgaagaggcactatcaccatggcaactcttttaaaggaaaaaaagtaatttggattggcttgcagtgtgtttaggcctttctttttgatttgtgctggtttcttctctccagacttctagctcaagtcttttcttcatagtaagcaacccagctatgtgaagagctttgtgtggtattttaaatagaggacacaaagggatcaagcacacaccagaaagtcatgaaattaccttaaactgcaaatccgtgaagcaaccatagatgaaagccttgtctgactcaaagcagagctgcataagttctgttctcacaaacccctcagagatctccacacagggaaacaactggctgattaacacttagattctaaagggtttgaaaatgagccagatcagaactgtccctacttgccctctaaggccttagctggtatggaaaacctgcaagctcttcaaggagccactccttgaaggctgctcccactcattctttccctggtagtgagctgctgctatcttatgccaatttgcagacccaagagcgctcaaac

SEQ ID NO: 17764 - DNA, 1191 bp, Mus musculus
tttttgtttttttttaatcttagccattctgacagatttaaggtgaaatttcaaagtagttttgatttgcatttttcctggtggctaaggatgttgaacactctttaaatgtttctcagtcatttggatttcttcttctgcgaattgtatctttagacatatatctgatttttaaatttggttatttgatttctacttcctggagtagttcatatactttggatattaggcttgtattggttgtggagttggtaaaaatcctttctcattttgtaggttgctgctttgtctgaatgatggtgcataagattttgcaatttcacggggccctacttattaattgttgatcttggtgcttgtgctaagtgatctgttcagaaagcctttttctgcttttgctgcccgacactgccgaggtcacacgcatgtctcccgcagccgacatagcattagctaagttgcctcctacctgctggccgcccgcggggcaactcctctcctagcgccaaagacatcaagaaaatactagacagtgtgggcatctaggtggacaatgaccggctcaacatgatcatcagtgagctgaatggaaagtacgttgaggatgtcatcgctcagggtgttggcaagctggccagtgtgtctgctggtggggctgtggctgtttctgctgcccctggctctgcagctcctgctgctgcagaggagaagaaagatgagaagaaggaggagtctgaggagtaggatgacgacatgggatttggcttgtttgataaaattcctgctccctgcaaatgaagcctttttatgtagaaagaaagagagagagggagagagagagagagagagagagagagagagagagagagagagagagagagagagagagagagagagagaggaagaaaggaagaaaggaagaaaggaaggaagaaaggaaggaagaaagaaagaaagaaaggaaaaaagaaagaaggaaagtctttttctgtgacaactagttcaaaggtatccccgttttctctttaatcaggttcagtgtatctggttttatgttgacatctttgattcatttgcaactgttgtgggcaataagtactcatctattcacattcttctacatgcagacacctactctgaccagcaccatttgttgaagatgctgtctccccccccccccccccccagtca

SEQ ID NO: 17765 - DNA, 1148 bp, Mus musculus
ccacgaccctttgcccctgtcttcttccaatcagatgacaaagtgtctctgcaggaccccagtgctctagctacttccaaagagagttctaaagatgaggagccactgaaagataaagcagacaaagtggcagatgtttccatctcagaagttaccactttactgggaaatgttcatagtccagttgtggaaggctatgttggggagaacatttcaggagaagtaaaggttaccacagatcaagagaaaaaggagacttctgcacccagtgtacaggaacctacactcactgaaactgaaccacagacaaagcttgatgagaaatcaactgtttctatcgaagaagctgtggcaaaaaaagaggaatcctttaaactaagagatgataaaacaggtgtaattcagacttccaccgagcagtctttctccaaggaagaccagaaaggccaagaacacacgattgatgagttaaaacaagactccttccctataagtctggaacaagcagttacagatgcagccatgacctccaagaccttgggaaaagttacatctgagccagaggcagtaagtgaaaggagagaaatccagggactttttgaagagaaaacagctgacaaaaataagcttgaaggcgctggatctgcgacaatagccgaggttgagatgccgttttatgaagataaatcagggatgtctaagtactttgaaacatctgcattgaaagaagacatgacgagaagcactgagttgggcagtgattactatgagctgagtgactccagaggaagtgcccaggaatctcttgatactatatctcctaagaaccaacatgatgaaaaggaacttcaggcaaaagcatcccagcctagtcctccagcacaggaagcagggtacagcactcttgctcagagttatacacccgatcatccatccgagttacctgaagaaccaagttctcctcaagagagaatgttcactattgaccccaaagtttatggagagaaaagggaccttcatagtaagaataaggacgatctgacacttagtcgaagcttagggcttggtggaaggtctgcaatagaacaaagaagcatgtctatcaacttgcctatgtcttgccttgattccattgcccttgggtttaa

SEQ ID NO: 17766 - DNA, 1338 bp, Mus musculus
ctctttcttctatttcctttttccatttgctaaagttgaaagtaggaaaaaataattttgaatagcttttcttgttctccaaacagtatctgttcattaaattctgtgatagaatatatttggcttccttcccccaaagacctcttgatcaaagatgaaaaatacaacatataaagaagctatatatgtaatacttttgagacacagatatctaaatccatctctccaggattcttcatgaacatggaacatggtattacttattcatgagtaaatgctatttttttcttgctttatatacaatctagacatcacaactcaattactatcatttacaaatcatacttaatgaataagtaatagtcgatggcccaaaataaggcagagcattatcaaaccgagtggactttttttcttaatatttaatttgttcttttgcttgctcgggattggtgggtggaatatgcagagataaatgtgaaaaagctgtctgggtgttttatgtctctgaaataaaccaagccctgtatacaaaggagaaggtgaacatgaacaggataggaagatgtaggagtgtctaagacagaaggcaagaggatgcaaaagtggagagaaacaggtggcagtttagtgacccattgagtattatgaccaatgtgacagtcacatagaaagcttagcatcaaacagagacagtcttattggctagtaggcacacacacactacagtcgtctttgtaaattggttattttttatataactttaaaactactgaatagtggttttcactctggacaacccattccttaccttctcttgaaatgcacagaaaatggaagaaggaatgactgtgtgtggagaagtacagtcttttcttacatgttttgatagacaaggatcaaagttgtctaggaaaaaaaggtaccagatgatccatgtggttttaaactatgcagaaaataatttcaacccagtttattataaaaattaagcctaagtaaacattttctttgtgttaaaattcagtttcttatgatgcgtgttcaaaaaaattatgtaaaccccaatgttaatagatctagcactaaaataatcattttttctaatgtcaaaacaattataatggatataagtccttgttctatgtgaaatgtgtttctctataaagttatcacaagaaggaatttttataggagacagacagagaaatgcacaggctaaaatcatttccttatgggaatgtgggatggagctcaccttacctactctcttaagataatgactcaaattaagctttttggacaccacttttgtggggatacacatacgctgatcta

SEQ ID NO: 17767 - DNA, 2007 bp, Mus musculus
tgcacatgatggtgtctaggccagaacagtgggtaaaaccaatggctgtggcaggtgccaatcaatatacctttcatcttgaggcaactgagaacccaggggctttgattaaagacatccgggagaatgggatgaaggtaagttgataataggagtcttattttatactagtgcctgtcagagctggtaagatgggtgggagaaaatgattgatagggaaaggtctggacatgggcagttggattttaaagaaataaagatagaaaatataaagctgggcggctagggaggacctggaaggagttgagggcatgatcaaatatattgtaagaagaataactgtttaataagaacaaaaaataaggtagcaaaaataaatctaagttaaacagaaacaaaacaaaaaacctgttatactctggatgattttcatattgttttgtaagatgagtttttttgtttttgtttttgttttaactaggccactataatacaataggaaaataatgtgatttagcatttgtttgttacaggttggccttgccatcaaaccaggaactacagttgaatatttggccccatgggctaatcaaatagatatggccttggtaatgaccgtagaacctgggtttggagggcagaaattcatggaagacatgatgcccaaggtaaaagcaagactctgttctggggtgaggtttttgttatagttgtctattcagtagacataactgcaatatatgtcattgagacatgtcctattttgttatagttgtctgttcagtagacatactgcatatatgtcattgagacatttcctattttgttatagttgtctgttcagtagacatactgcatatatgtcattgagacatttcctattttgttatagttgtctattcagtagacatactgcatatatgtcattgagacatttcctattttgttatagttgtctattcagtagacatactgcatatatgtcattgagacatgtcctattttgttatagttgtctgttcagtagacatactgcatatatgtcattgagacatgtcctatttatttgggaagtgaagggacagagatgccttcagatactataatacagcatgataagttttaaacttatttttgtgacctttggtcacttgaaagttttcattgcagtcttcgtaaagctgtcacaaattgaatgtcatttgctgaactgcttttacaagcataatatgcttagtctattgaagtgacccccagtaatgtcttgtgcagtgtgggtggcttagccggttcatggctagtgttagctgcggtgttctgtgtgcttgcttccccctgcatgtccactgtagaagtcactgtttgttcgtgtcgtctaggttcactggttgaggacccagtttccaactttggatatagaggtcgatggcggagtaggtcctgacactgttcagaagtgtgcggaggtgagacgactcctcaactggggccgggacagtttccatagctgatacctgcaggacactctcagcaccaaaggattgctcaaatagatttttttccttgagaaagtattttttgttcaaatgtaggattagaaagtaaaggacaagtgagtcactaactagcataaattgtcaaatagtgaaccctggtctccagaaggaataagttgttaaatagtgaaccctggtctcccgaaggaataagttgcccttagcaaaacctccaagttcttttaaaagataacttctcaactggagaaaagtagatacatttaactggcctaataatgctgtctttagaatttaaaatttattagctacctgcttgtgttttataagaagtgacgagatgtagttctgatgaaaatcaaggccgagctcccatttaccaagcttagtctgttttgcctagggagctaccctagcctggatctgctgctgggtgtcattagatggcagcccttcctgagaacaagtcaaatggttcgtttttattcctatt

SEQ ID NO: 17768 - DNA, 1455 bp, Mus musculus
tatagagatgtcatttagaaatttagcgtgatgaaaatattcatgtttatactgggagaatgatttttgtaaagagtgaaaatatgatttcttaagattacagacagaaatgtgtcttaatggctaaagaggaaaattagatactatgaaaaacatttttctgtatttttacaaagaatgttctgttgattccctggtttattcctaaagcaaatgacatccacattttctctagttcatgtcatttgtgatttgcttatatgcctgagaatatgaatggaatgagactaaaattagaagctttggtggggtggcatgtcatggtctggcattggaattatttttactttttaatcttacacttggtttattaaaaactataaaaaacaatgtatgaagcctagggtttctgaaatgcaagcacagacttatcaaggtatttactttgtcacagcagactactctgtcattccttcctgcccctgggtctcactcaaccacccttctgaggggaatgaaatagccagaggcagaaaggaaccatacagtttctcttggaagtgccactgggttggacaccaatagaacagagtaccctattctagctctttaactttaataaaatcacccaactgttttcactataaacgcttatgtatatcgaatgaaaccataactattgtgcatttgagaattaaaagcataacatgattttggaaggcttatagttgtactcctagactgtagaagatgctcaacacaaaatggcaagcatcatgtctgttttatgagttattaagcacttttctataatcatattaactgctaaattgtcctataattgttagaacaggaatttttttccctattttaagactaaaaaccgtaaagctctccagtagcctggcacatagaaagggtccagtcagaagcagttttctggtgtgtactactgctctgactacaaacagagcccctgaagtggattagaaaaaaaagtttttacttttcttattttcagtgtaactgaatcctctggcagaatcagagtaagttaagaatattctggaagtatagattttgactccaagaatggatagatggatatatatatatataatttctaagaaggaagaagtaggctaagatgatacagtacagacttaatccataaataagtagtaataaaataagaacactgacaaataggcatggaatagagagcttgcttgggctttttcctgccctgtaagataaaagtttattaatacttgtttttattttagcttacgaaaggtttgtgcatttaatcaaatcacacaatacaaggcatatagaaataactttaattaaaaaaaaactatgtagaaggttataatatcagtcatgacaaagatttgaaattatttgttgggacaacttgtatttttctggcttttgttatctttttcttta

SEQ ID NO: 17769 - DNA, 1111 bp, Mus musculus
aactctgctgattcattggcttaagatgtcttcccttctctaatcttccttggtttctttcatcagtttttttcacttttctattatagatcgccatcatttttatagttcgaattgtttcttattgtatttgaagctaatgtgaaaggtttatttccttgatttccttttcagcataattataactgtatattaaaaagtagactatattttatatgttgatttttatatcccactatgtgttgggaatgtttagccaatctaaaagtcttatggaggagtcttttaagtataatatccaaacacttgcacatacggttaattgaatatttcttttatgttgtatgcatatcattttctcatgctttactcttacgatctagataagaattcccatgatgtattatataagaatggggacagtgaatacctttgtcttgcttttgattttagggaaaatgcttttacttttcccctttttgtatacttttggctgtacatttgttaggctgtgtgtgtgtatgtgtatgtgtgtgtatgtgtgtgtgtatgtgtagtataccacacacaagttggtttcatttcagagatttaggaatgatttaacataagaaattaataactataacacatacatatgtaaagagacataaagcacatgattgtctcactgttccaatggataaggggtccttgaccaagttcaacattttttaaataaaatccctgcagttgggaatagaaagaacataatcatagatagatagatagatagatagatagatagatagatagatagatagatagatagatagataacataatcatagatagatagattaaatagatagattagatagatgatagatagatagatagatagatagatagatagatagatagatagatagatagatagatagagaacataatcatagatagatagattaaatagatagatagattagatagatagatagatagatagatagatagatagatagatagatagatagatagatagagaacataatcatagatagatagattaaatagatagatagattagatagatagatagatagatagatagatagatagatagatagat

SEQ ID NO: 17770 - DNA, 1242 bp, Mus musculus
gcatgttatcccatctcctggggagagaggcaggaggatcacaagttcaaggccaacctaggcaacttagtgagacccgttttcaaggtaaagagcaggagagatctggcacgtagctgagtggtagaacactcctagcatggagaagagccctgggccctgccccaacacagatacacacagtgcacacagtgcacacacgagctcagtgcaggtggacacattacatgtgatggctgttgctgggtactgccttccagctcttctgttgagcattctgcctccacagagagtagtagttctgggactgggttctctcaagtggtgagcaaaggggaccaaaaaatgtagcccgtgcttctggaagaaaaactgcaagagttatagactagatttttgggcctaaatgtcatttttttaaattcctagtttctgtctgaactagaaatcccacttcatgagccacacaggccctatctagcagcaacaggatcaaaacttaaatggttgggatgcacattctgatctgaaagtttactcacaaataacagttccttggcttgtgttagatttcagaaatgtttgttttaaaagttgtctgtcctttagtactcagatgagatctagaagtagattgtctgtgtgaatttgctgagacagggtcccacctgacctttggctgaccttgagacgtttggctcagctttgccttgcttttcgctgactgtgcctgagtgagtgccacatgtcatcaccttctgtcaattgacttgaacattgatctcgtcactaactagtacaaactctaactctgcttacaaagagtgtggaaagggagctgctctgaccagtagcttctaagaaaacacggctcttggctggaatgggatgtgactgccttcatgcgtgtaacaaatggcggtttgcatatcccaagagcaagtgtccttcacattccgagaccacctcggagtcaggtttgtttgtacacgaagactcccccgtgtttcgacctctgaacaaacgcctattgactctttagctcctcccttctttcctcgatatcaaaggcctaaccagactctaacctacgtggtaacattttccagctttaaaacaacagggtctaagaatatttaatgtgctatttgtggctcttttggtcattcagtttttattggagatcaaatccccatggagtgtatcctggttgctatgaggagtaatctcctgttattttct

SEQ ID NO: 17771 - DNA, 3171 bp, Mus musculus
ctgcttttaagatatttttgttgttgttcttttttaagggtgggggctataactcaagtcttagggtcttcatcacctatgtgggaggcacaggttccacactaggaacttattttacatgtggcctgtgtttttttttttttttttttttttgattgatcatgtctttcagctttctcaacatctgtcgaagattaataagtgagatagcatcaaactacttgttaaatccacgtggtgtattattaatttagcatcctttagtaaacagaatatcatcatatgatttattctgccctttttataatgataatagagcatttatgtaaatgtgccagtgtaggcaaaaagctctatctggagttatccttttcttatgttgtattttagtttcttgtgttttcttggctttccattgtgttttttttttttatttatttaaaaataatcttgtgtatgcattaggaaatcatgattcgaagcactgaatgttagtggtaaaatcagcggtatgctctcactgtgtacatttgctgtctgcctactgtgcgctgtgcacaccttttttctgtaacttattttagcgtcactgcttagaatgtcttgccagtttagaacactgacaaatgttaactcattagattataagcaatctggttttggtaaatctttctggaaattactaaaataagtccttgaaggttttaatcccttctctcattccctttctccctccttccctccctccctccctccctccctccctccctccctcccttccttccttccttccttttcctctctcctttcctcccttttatttgtgctactgggtatggaagtcaggatcatgtgcatgctaggcaattacctactacataactatatccaactttgagacaatcttgctaagttagccaagctagccctgatctcacccagctttaattttttatacagcctctagattggtgggtaggcaaaagttggagattgcttgatttactacatttttaccatatccgacacaaaccctgtagcaggaaatcaggcagtgggagtgagaagagcttcttcttgttacagaagcagccccagcaggggtgtggggggcactcctgagcctgcgcacactgcagcttactctgcctgttctgtaggtcctcattgtgagtggacagggtctatacttgtaaatggtcttaaagaagaggattcttccatgcatcatcccagaaggtaaagagttggcagcattatggtttgcagaaggaagtcctaagacaaccatcagctctgtttttaggagaagagggcagcttgacaagccctgggtggagttgccccagctcagaacaccaggaagctgggatgccagtcatttcaagatccacttactaggaaagtttgagattctgttgatcatttgaaagtgcaccttgcataaatccttctttgacatactattttttcatgccaataggcatgttgacgtgaacacaatgtttccccatgctggcttcccaggatcaatagttaggacagtctaataaggttttgtctgtgtttgacacacagttccttctgcatctaggggtgggtagaagggtgccatgtggattaagccatttaggcctggggttggggtgtagggatagttttccctttacttcacacacacatgttgagctccttcctgttgcgtgtggcgtctcacccctgcccagggtcacagcctcgttgctgtgaagcctttgaggttcctgttcctatttttttttttatttttaatttattacgtattttcctcaattacatttccaatgctatcccaaaagtctcccataccctccccccccccccacttccctccccacccattcccatttttttggccctggcgttcccctgtactggggcatataaagtttacgttttaatctcttgcctcacctcctctcggtttcccttctttcctactagtattatttttgaatgctctgaatgctggtttttaaaaaaaattgtctgaaacagaaatgtattttcagaataattcacaaaagcgcaggtctcacactgaaacttcaactccttcttcccctttctcctcctcctcttctctgaatgccagggagaatgcagttgaaggagatgcgcagtcacaatgaccaactctaaagacaaaagccctcagcattacgtatccggttatgtgaacagcttgactgagtagggttaagatgttgcagatgtcctgcttctttaaggtggcttttcagggctgctcagggaggtaaggatggagtgcaagtgggagacatctttggcccactccctgagcttaaggctaaagtcacacagttgtgcatccattttagggacagctcatcagtgtcctcatagtggcagtgctgccaggctgtttgcctttgttttcttcagctgctcgctgtctcacgcactacccttcagctccattactgctttcttcccacactgctgcttgctgccgagacttggcatcaagggcttccaagtgctctgtttgctcttctctccatttagggatactccagtctctgatcgcagtagacctgcttctgagatagccgaataactgtttgttggcccattactttcctggtagtattcgccattttccttccatcagcagcatcagcagttggtttatgttagcttttaacacttgaggctgtactttcttttatagaaatgtgtgtaatttttattttttcctaatggatttaaacttataaatcattaaaactatttgtgcttgtatgtgtatcttctgtaaaaatgacttatttcgatattgaagaatgagactcaacctgacctgtgaagaagtcttccagctgtggtttttgtgtggctccgcaaagctacattcatccataaatgtaagcattgttgatatctaagcttaggcctccacactgccctgaggaccttataggggccaggtccatccactttgggcatggtgccacaaaaaggctgtcccagcctaagcaccgggtacatttcacacatccacaaagaagaaaagctaagaggaccttgtttctaaccttagttcatactttgtgagacacgttgggggtgggggtgggggtgcatttacctgctggctacagtaatgtg

SEQ ID NO: 17772 - DNA, 1193 bp, Mus musculus
aggtgctctaccctcaacaggaactgtaaggttaagccttatatacattttaggatagagcactgtcagaagaacagattttctgagtttgttaataataaattatagtacagtatgataccatgaatcatttgaaagtagctgaaaattttgtgtgtgaatactgttttatggtttgtttttctttttttttttaactttctttctttttcaaatgattgatttattttatgtatatgagtacactgttgctgtcttcagacccaccagaagagggcatcagatctcattacagatggttgtgagccaccatggggttgctgggaattgaactcaggacctctggaaaagcagtcagtgctcttaaccactgagccatctctccaggccttatgatgtgttttatgatcttatttttcatgttgatggccaggttaaaaagtactgaatagaagaaacattatactgaatataaaagttatctttgaagtgtcagttaattaaatagaattaacggattatcaaaagtagattattttctttctgttttccttattgctttgtttgtatcttagtaactcatgtcattgttcctgatgaggaagcgcagagtactctgaagtgtatgcttgggattctcagtggatgctggatcctgaagtttgattgtaagtactggatctgggaggattactagaccagttagtatagtcctgtccttggagttagtcaccgttttgaaagattcatgtatcattggtgcctttcagatttcttttttttttaaagatttatttattttatatatatgagtacactgttgctgtcttcagacacactagaagagggcatcagatcctattacagatggttgtgagccaccacgtggttgctggaaattgaactcaggacctctggaagagcagataggttctcttatccactgagccatctctccagccctcagatttttttttaataaatgtgcataaatatgctttgattttaaagtagctttattcaataatatcaagcatattaataaagaataaatgttgtttgatgttaactttgaagtctaaatagtccatattaatgctaaatggttcttttgacaaaatatactcatgttttaaatgcattgctcggtgcatctgtgaagtgaaattaatttattgttttccatttaagat

SEQ ID NO: 17773 - DNA, 1397 bp, Mus musculus
tgcttgtagccggccttatttgtttactgtcttcagtgcactcacccatgtcactaggaagaagtggagtctttacagtatagtccaagtgctgttattgttaggcagggtcatgtgttacattcctgcaaggttgaaaactacttacttattttccacttcctcttccttacttagggtgctttttacctggtggctgtgtttgtaagatgggaggtgaaagaagagacaaagcaaacaatcctaggcatttaggaattggtggtcgagcagtagaggaataaaacgtaacagtccttagagaacagaaagtcgaattcattggtaggtcaaggtggagaaattaatccttatagcatgtttcttttccttttttctatcagattcaaaagacaacacatctagggcaagtttatttggtgatgcagaaaggaagaagaattcaataaaaatgtggtttagtcctcgaagtaagaaggttagatatgttgtgactaaagtgtcagtacaaacacagcctcaaaaggcaaaggacgacaaagcccaggaagcctcaatgtatgaatttgtttccgcaactccccctgtagctgttcctaagagtgctaaaacagcttctagaacatctgcaaaaaagcatccaaagaaatctgtagctaagatcaacagggaggagaatttaaggccagaaacaaaggatagtagatttgattccaaagaggagctgaaggaagagaaggttgtctcctgtagccaaataccagttatggagagaccacgggtaaatggtgaaatagacttattagcaagtggttctgttgtagaacctgaatgttctggaagcttgactgaagtctctttaccattggctgagcatatagtgtctccagacactgtgagcaagaatgaagagactccggagaagaaggtctgtgtaaaagatcttcgttcaggagggagtaatggaaatcgtaaaggctgccacaggcctaccacttctacttctgacagttgtgggagcaacattccgagcaccagcagaggcatcggtgagccagcattgcttgcagaaaacgtagtgttggttgactgctcttcactgccttcaggccagctacaggttgatgtcacactcaggagaaagagtaacgcatcagatgacccccttagcctttcaccgggcacacccccacctctgctgaacaattcaactcacagacaaatgatgtcaagcccctccacagtgaagctgtcttctggtatgccagccaggaaaagaaatcacagaggagagaccttacttcatattgcttctattaaggtaggctgcctactcagaaccaaatcttagaaagagaccagattttttggctcttactgtaacaaatacttgagat

SEQ ID NO: 17774 - DNA, 1231 bp, Mus musculus
aggccgatttctgagtttggagccagcctggtctacagagtgagttccaggacagccagggctacacagagaaaccctgtcttgaaaaaccaaaagaaaaaagaaaatattttataaactacctttgtgtacaaggggaattccgatgagctattttctccttgtttttttttaaggtaaaaattaaggtagtagtgctattcacagttactttatttgaaagaatgttcttcaactgataggaaaatgccaaagaaaaataacatattttgtccttcaaaggtggcgtgacattactgagagctgcagccaaaaaccacgctcgagtgacagtcgtctgtgaaccagaggactatgcgggggtagctgcagagatgcacggctctgatagtaaggacacctccctagagaccaggcgccacttggccttgaaggtgggtacacttctgtcacactgtaaagcagtgtccatgtagtctaagtgtgtcagtctaagcaccactcagttctgctaaatatgtctgtcagcttcccacactctgccttctgtcctttcattgaacacagagaaatcaaatattagaaaaagtgttaattgggatgtgttggggggtggcggctgaggctgtacctaaaggcgttcttgggagacattcctggtatctcacaaaatgcaactttttgtaggcattcactcataccgctcaatacgatgaagcaatttcagattacttcaggaaacagtacagtaagggaatttctcagatgcccttgcggtatgggatgaacccccatcagactcctgcccagttgtatacgctgaagcccaaacttcccatcacaggtaaagtatgagaagtacctgttgtgtagacacctggctttctctgttgtatctgaagttgctctcattcagaatgtaagagtaaattacttaggaggccttagaaccacccagaatggaggtgcatggaaagtgtcagagtggtacagcagcttcactgtctggcaaacgccaggccctgggtggcaggcaaagcccgagttagagatgacaaatcttaaggctgctttggaagacttcagggtgcagctgctgaggtttccagaggaggagcagaacgagcctgtggtgcgtctataataatataacgggaagcagtgaagaaagcagccgaggaagctgttgtgtgtttcagtgggttgagagccaccctctgtttgacagatg

SEQ ID NO: 17775 - DNA, 1336 bp, Mus musculus
gaacttggagagactcgcctgcctcctgactgctgggattaaatggaagcaccaccgtggccagcctgcagcttctaaaggatgaaaacacactgtttctgtccttcctcctgtccatggcacctgagcttgttccacagctgatagggttggtcggcttgttgttttaagttgaggtttatgatttatgacatccggtcactgtcattttcataactatttaagctattcacatggacacagctgatacccggtcttgtcattgttgctgagtcttacagttgtatttctactctgcagggatgggggtgaggtaggaggaggaatttgaagatgacccaagtgttctgatccttttgaagtgtttgtagatatctgttacatcttgattagtttttctttcgggagaggagggtatcggagaatggttcttgaggaactcattatgtagccctggctattctagaactcgatctgtagaccagactggccttgaactcctagagatccacctgcttctgccttcccattgctgggactaaaggtgcacaccacctccagcctttgattacttttgtgacttttgcctaaaatcacattgaagttgtatagcttataggtgtccctttttaagggacatacatatatgtagcctttcttaacctgcgtgttaatgtgtacgtgtgttttcgtgtgtagttctcaatggagccccaggattcataaacttgtgtgacgctttgaacgcctggcagctggtgacagagctgagaggagcagtagacatcccagcggctgcttctttcaagcacgtcagcccggcaggtgaggaatgccttccagagggctctagaatgctccacgagtaaggagctctgaggccagttatacagccctaggcatcctaggccacttggcaagtccagtgatagtgtcagtgtagtcatggcaacctcggtaacataatccatatacacataattatgtgacagtgtcaggagacagagcagttgcaccattggctcttgtggtgtctttctgaaagtttaggaatggaagtgaagtgacataatctcataaaaccagagaactgctgctccgttttggaattgtgccttagtaagcgtgcagagattgttcatgtagcattctgctcctgttgctattgactgagccattcttttgtgtatactctcaagtccttaagtccacacacaattccatgatccataatgtcacaagggctgcctgcagtctcacacaccattgttaatatttattgggcgctaaagtgcagtgagtgagtagaagtgaatggcgtgtgatgccaagccga

SEQ ID NO: 17776 - DNA, 1677 bp, Mus musculus
gcatcggaaagctatgtcggtttgatataagtgagctattttccttccctgtgtgatgtaggcaaaatccaaattctcttgctttgtctggatatttcatcgttagcttatgcttttttaaagatttatttttatatatttttatattttatatacatgcatgtacttatgtatgtattatgtgtaccttcctggtgctcatggaggccagaagagggcgtcagagaccctagactggagttacagatggttgtgagtgctatgttatatgggtgctgagaaccaatcttgaattctttgggaaagcagccagtgctctaaaccattgagtcctctctcccaccgctgcattctagaggggaattttgggtttttctaggtatgcatactataatgccttgaaagtcaccattggttttgggggttttctccgcagagtggtgtggcctacattgtcgctccatctggatctactgctgacaaggttgtgattgaggcgtgcgacgagctggggattgtcttggctcatacggatctccggctcttccaccactgaccttagctgacattgtttcctggtcgtagataatcatgtgtggggtcttggaagtacctctagaagagtcatttgtatcttaatatctgggtgtgtggtttagtaggtgggtcttacttatctgaaaggtagagctttctagcctaagacaccttatgtgaggcttgtttctgcaaaacctgaaagcatctctccctcctggagccagctttcaggaaaagtccctgtgagacacctaagtgcaggtaaccaggagaagccacgctgccttatgatgacatgccacccccaccccaccccaccaccaccaccctgcccagcgctctccccagggctcctttcttcctgcctctcggaagcttaactgtttgcttcccattatcccctgggaactgggtccttaactagatctaaatgctgggactgctctttctttctccagaattgcttaaaacctctgttggctacttagtattcctgtttggtataaacttataaatggactggcgttctgcatagagcttttcacccaaagtgagcagatattaacttgtgggggtcagggggaagtgggggtgggggtggagtgcctccctgtaccaggcaggacataactggatctatgtccctgtggttatagtcctcactgttcacccagaggatccctgtggtcacttagccttaggttagttttgccttctttccaatcctctaaataaattttaaaactttttgggtttgtggttacttttgttttgttttgttttgttttgttttgttttgttttgttttgtttgacataaggtttctctgtagctcctgctgtcctggaacttgtaactgaggctgatctggaactcacagagttccacctgtcccctcggcctcatagtgctggaggtaaaggttagcacaccacacccagcacagaacattttataataaacagtcatcttttgagttgtttctgtgctggctgatctttcaactcttggagtggcccgctgaaacaaagtggacttacataatcagtaaactgtgtggcttcacagggcagagatccctcagccttggtttcttggattgcttgctgctatagcaacattccctgcctctttgag

SEQ ID NO: 17777 - DNA, 2412 bp, Mus musculus
ctaaggctatatagtataggttagggaggttttagaagggactggaaagagaatgtggccaggtacccagttctacctgggacccacggcgtcctttctggttccttccaagtcattcctctccttcaccagaaagtgatggcatttgtccccacactctcaagtcactgtgactgatttcgcagccctaggggtctgtgagaaatcttccacctagagcagaaagcctaccaaggaggaaggtaggaccaaagatgagaagagcaaaagaagtgaggaggatatttcagcggaaaggaaagcatatgtagacagatgaataagccaagatctattgtaagagttacgactgtacacaggcatcattgcagtctcctgattaactgcttgtactgctgatgggcaagagctgaaactcagtcatgataccctcaggttatcctaaaccccatttaacttcgtgtctttcctctcagggctggcgctgtgacaactgccgtagacctggggctgctgaacccagtcccgatggcaccaccggccacacctacaaccagtatacacagagatacaatcagagaacaaacactgtaagtgtacacatatccccacccacccccaccaccgtgactctccctgcatgcagccaggggcaggtggatagatgcttttcttgaatgaaccaaatgagttttatttggagataagtcttttgctcatgagtccagtcctcaggacccatccatgtaaaagagctaggcgctacagcaagtgcttataatctcctcactgaggaggtagaaatagggtgtgggtggtgtccctggggctgtctggccagccactgtagccttgttaatgaacttcaggctcatgaacaaagcagacagcatttgcttgattaaagttaactcttggctccttatacacacaaagtcatgaattaattataactcgttataatttactaaatccctaagcattgtctattgctcagtacattgctagtcttttgaaactatttatccttcctataaaacacctgtgacacaaatctccactcaaccctccccgaaacacacacacttttggttttccgagtatttgctactaatgtttgtcttctattttgacagaacgtaaattgccccattgagtgcttcatgccgctagatgtgcaagctgacagagacgattctcgagagtaatctttccagccccaccctacaagtgtctctctaccaaggtcaatccacaccccagtgatgttagcagaccctccatctttgagtggtcctttcacccttaagccttttgctctggagccatgttctcagcttcagcacaatttacagcttctccaagcatcgccccgtgggatgttttgagacttctctcctcaatggtgacagttggtcaccctgttctgcttcagggtttcagtactgctcagtgttgtttaagagaatcaaaagttcttatggtttggtctgggatcaatagggaaacacaggtagccaactaggaggaaatgtactgaatgctagtacccaagaccttgagcaggaaagtcacccagacacctctgctttcttttgccatctgacctgcagcactgtcaggacatggcctgtggctgtgtgttcaaacacccctcccacaggactcactttgtcccaacaattcagattgcctagaaatacctttctcttacctgtttgttatttatcaatttttcccagtatttttatacggaaaaaattgtattgaagacactttgtatgcagttgataagaggaattcagtataattatggttggtgattatttttataagcacatgccaacgctttactactgtggaaagacaagtgttttaataaaaagatttacattccatgatgtggacgtcatttctttttttttttaacatcatgtgtttggagagaaaaattgtcttcatgcatgtcctttttcttttcgatgctacaagcatgtgaagaggcactgtgttgggctggggtggtttctgcacatgagcgcctgcctggccttacagaagcactgatactttgcgtcattttgtgtcctcacttgtggttctgccttatcagatttaaatggattcaaatgtgggctaagcttgctagctagcacgttaggagtataaaggaaataagattcgtgtgtgtgtgtgtgtgtgtgtgtacatacatacaagtgtgtgtgtagctgctcatgaaaatcaggaggccagaaggggatgctgggtcccttagagctggatacaagtgtttgtgagatagatactgggatttgaactcataacagagcggcaaatgccctcacctctccagccctatagttctgtttaatcatcacaggcctttgcttctttgaatgaacacctatt

SEQ ID NO: 17778 - DNA, 1209 bp, Mus musculus
cttatatgaatcaggtgacaccagctgtttttctctttaatcttcttgtttgtttttgtttgtttgcttttgtcgttgtttcatgagacagggtttctctgtgtgtccctggatgtggtacactcagtctgtagacagggctgtcctcaaactcagagatctgcctgcctctgcctccctaatgctgggagcaaattcgtgcacgacgacgcctgccctctctttaatgtttaattaaactattttgtatctaggatctctgcgaacctaaaatatatattttttaattctccaatcccattttaattttccatatttgtaaaatttaaaaggagctgaatgaatcactggttggtcctctgaaatgatcttggtggtagtgttaagtcttaacactggcctggaagatattaaatgttatgatgaagaaatgcttcatcattagaaatgtgatcttggacttcctgctctgtatggattttcgtcctgttccagtgttctgcccatcctgtgagtcagaacacagagtaactctctgcctgcgatgtccctaccttccagaatggtgccatgacaacggtgtcaactacaagatcggagagaagtgggatcggcagggagaaaatggccagcggatgagctgcacatgcctcgggaatggaaagggagaattcaagtgtgatccccgtacgtcatcctaaaaatgctttctagactttttaagtactcccatgttcctaactgagccgaaacacccatttacaggctgggctggacgtggtgggcttgtcagtctgtggttggtaagtcagtagcttgcttcagaaagtgaatcatgactgaatggcacgtctaagcactttagcactttcacaacttgagcactttggtcatctgcagtgaagtgctatgtagactcagtttttaaaacataacttcaaagccaagcagtggtggcacatgtctttaatcccagcacttgggaggcagaggcaggaggatttctgagttggaggacagcttggtctacacagagagaacctgtctcaaaaaaccaaaaaaaaaaaaagacttcaatcgttccatctggcctagtctaccaaggctttggaacatctccttgtgattcacctaagttgatgagatttggcccgtgctcattcaggtcgagggcagatgcatcaacttgagtgtacctgattgtccttg

SEQ ID NO: 17779 - DNA, 1380 bp, Mus musculus
atggtgggagtaaaacctttctgatttgggtcgatttatttattatttgatttctgaacttcaaacacttcagttcgttgcaaagccttaattggagcagagatggctttctgtggggctcagcggttcaaagctttgtctgtatgagaattcatactaacttttttttttttctgtctgaactataaagaaatctgtgagaaaaaaaaaatcacgatttctttctctaagagtgttttgtgatctgagaaccgctggttgtgtgggagctctgatcgggttgataaacagttgttgcctgggttgacagtgattggttgcttcttcttcgagcttaacttttgcgctttgcttttttggctctaacctctcttggctagatgagcttccccaactggttacccttccacaccccaatcttcatggaccagagatcttggatgttccctccacagttcaaaagacccccttcatcaccaaccctgggtatgacaccgaaaatggtattcagcttcctggcacaacccaccagcaacccagtgttgggcaacaaatgatctttgaggaacatggctttaggcggacaacgccacccactgcggccacccccgtcaggcttaggccaagaccatacctgccgaatgtagatgaggaggtccaaatcggtcatgttcccaggggagacgtagactaccacctctatcctcatgttccgggcctcaatccaaatgcctctacaggacaggaagctctctctcagacaaccatctcttggacgccgttccaggagagttctgagtacatcatttcatgccaaccagttggcaccgacgaagagcccttacaggtacatgacagcccttgcaaagtgtctctctatgtaactgtgtcttcagaaacaaccacagcttcatgtctgatgcccactgtcttagtcagggtttctattcctgcacaaatatcatgaccaagaagcaagttggggaggaaagggtttattcggcttacacttccatactgctgttcatcaccaaaggaagtcaggactgcaattcaagcaggtcaggaagcaggagctgatgcagaagccatggagggatgttccttactggcttgcttcccctggcttgctcagcctgctctcttatagaacccaagtctaccagcccagagatggtcccacccacaaggggcctttgccccttgatcactaattgagaaaataccccatagctggatctcatggaggcatttcccccaactaaagctcctttctttgtgataaccccagcctgtgtcaagttgacacataacaccagccagtatacccaccctcccagggcagaggctacgactctgactggaggttgtttgactcag

SEQ ID NO: 17780 - DNA, 4035 bp, Mus musculus
ttgatcgccctaaaggactggcattcactgatgtggatgtcgattccatcaaaattgcttgggaaagcccacaggggcaagtttccaggtacagggtgacctactcgagccctgaggatggaatccgggagcttttccctgcacctgatggtgaagacgacactgcagagctgcagggcctcaggccggggtctgagtacacagtcagtgtggttgccttgcacgatgatatggagagccagcccctgattggaatccagtccacaggtatatcgttaaccgcacccaccacccgggtgcttctgggaacagtggctttatgccttgctggcgttatactttactgggctattgagtcccatgtaagggagagtagaaaaatgccttcaaactcttagtaaagaaaggccctctttaatgaggaatggttgtgaacaatgaaagtcaggtgatgtttaggtaactaagtctaggaaagagaaatttaaagtagctaagcacagacgtgcaaacatatgaaatatataaatatttaaagattatgaagcaagacatttgaaggtactaaattacggattgtttcctaagtgagacacctcggtggtgaccctccctctccacacatggaggaaagaagtctagaatcatagagcttactctgagaattgaccctcttaagccaggcattttcttgcaacatgatcaaagaatacatgggtaagacctcccctggctagctctcctgtgctgggccttcatttgcttaaaggatgatgatgcagatgcacaggacagcgtcattaggaccagtgcttcttaccagcctcttatgcttttaccgctggagcaagattggaatgctcaaagcatacagaggtgacagtctgtggaactgctctctgcttctctctcctgcctctattgtaaaccaattttcttcttatgctacgccgcagagaatacttcaaatttagcagtgctatctgccgtggggtccaaataaaagagacaaataaaaacaattctatctctaggatggaatagtctgtgaaattgtttcctgtacaaagataatttatatagaaaaaggggccattgctcatctttttcatacaaatggaaaaaaaatcaattctaatgactaataagggaattcaactcttggcttctaaaggcgtagggtagggagataagacccaaagtctctcggaaccctggtgtttatgcagatgtttgcagtggttctgagagttgctggtataaatactcctctcgtttttattatctgtttgtgcagactctcctgggagtctccagggagtccaccagtccctacgaggaccatccattctccttcttcaagtttgctttctttccccgttcctcgttccctataagataaccttttaaccaatgaccatcctgacagccattcctgcgcccaccaatctgaagttcagtcaggtgacacccaccagctttactgcccagtggatagcacccagtgttcagctcactggctaccgggtgcgggtgaacccgaaagagaagacaggaccaatgaaagaaatcaacctttctccagacagctcatcggtgattgtgtcaggactcatggtaagaagtgagcttccctctgcagagtaaggcaggaggtcatttcatagagttcataggtgcaatctcataataaacctagtgttctttgcttctaccatcaaatagggttgtcacaaatgtgtacaatagaattcttttatgtagacctaggattttctagataccctaagatgactattggattagaatggtgtaaatagctttggatttcgtgcaggtctttgacagaagtattccacttatttaaaagaagtggtattcggtagggagcaatttatatacacacacacacacacacacacacacacactctggctgagtttatggcttttatgagtgatgtttccctggcaagacgcattctccagttagtaccagcctaacttgacactacccccattaaaacatttgacaatcagccagctgtgctttaatcttgggaggcagaataagcaggtggatttctgagttcgagcccagcttggtctacaagaatgagttccaggacagccagagatacacaaagagaccctgccgcaaacaagcaagcaagtagtatttaaaactttttctagccatgcagaaattagctaggatcctataagggcttaatgcacatcttaacacaaggccaattcttagagaagtagcagtagaatagaagctttctcttgctttttttgtgatcaggaaaaaagcaaaacctgatttatatctgtcatatcataaaggcaaaaaaaaaaaaaggctaagactgatttctttcttattctttttttgctgctccttgtggattgtggacttaacccctgagaacattttaaaattcacttaatttaaatgtaaatgtattgtcactcataggtaacagtgaagttgctctgggaacctgggggtttggggtttgctgggctatgcagatggtcttttataatcaccgcatttctctaatgctttggtaagaactccgggcatcatgcaacaccattgccaaagtttctggtacctctgcttccaggtggccactaaatacgaagtcagtgtctatgctctcaaggacacactgacaagcagaccagcccagggagtcatcactactctggagagtgagtaatccgatgagtgacatgttttaatcctgacacaccctgagtggaagtcaaaagaaaagatctttacatttaagccactgacttagcaatagaatttggaagttgatagaacagcttgtcgtttcgggaatccatccaggaaatgacctgccgaaacaaaatggaatcacttcactgtgttgtgttggtgctggtgggttaaaactcacagctggcttatgcggtactggtgagggtctgtattcgtagggttcaatgtggggaagatgaactggcttccaccatagggaatgtggggctaaattagatctgtggtctagtctgttgatgtttcatcacctatggaatgattaacacgtgaagccttatagaaatgaccgaagattcgccacccagacagacgttattactaattgtctgtgttataattcctaccatacatccttacatattagtaaagtaatcattgtcacacttgtttgacatagctctagacactagagagtcaaccctgggcaccactgatagtatttagaaagcttttctgtttagtgaacatttccatatttcctcaataccgttaacccatctttctgtaacctccacattactttttagtgtatttcctgaagtggatgtatttgcataatgaggactctttttaaaatatccaaaccttacatgtatgagccaagcgtgctttaatctctggctctgctcctacacagatgttagccctccaagaagggcccgtgtgacggacgctacagagaccaccatcactattagctggagaacaaagacagagacaatcactggcttccaagtcgatgccatcccagccaatggccagaccccagttcagaggagcatcagcccggatgttagaagctacaccattacaggtcagtgtactcgtggtctgcctgtgtgcgcccgcaggagaccctggctcggtagatagtctggtctggtattgagaatgtgggcaccattccacgatctgttggcttcctgatgtttgcttgacctataaatctcattcattgaatttgttgttttataaatgctcattcattattgtctaatgaaaatctgcacactgtagtcataggcaggagtctgaggcaggaggatgtgagtttgagactagacatagtgaaaccctactttttttaaagttaatatagagaacataaagatacaaaatagtaaaattagcatgcctagattttaaaaggcataatgaaatttatgattacaaacagcattatgtataataaaaccggaaactgtaatcaga

SEQ ID NO: 17781 - DNA, 1225 bp, Mus musculus
gtgtggcgtgagtcaagccctagattttggctttaagcacagatagatatattttcagtgacaatgactgggagacctgttatcagaacaatctgtagcttagctgtgaataggggcgtgtgtgaccactatttccaaataacacatagttaagggtgcatggggtgggatctctgtgagttccaggccagcctggtctacaaagcgagttccaggacagacagggctgttataacacacagagaaaccctgtcttcaaaaaccaaaagaaaaaagaaaagtgcatggtgagtgctgctgtagtttttataacttctgtgatttaaattatttcccaaagagactgttgaggaaaaaaggaattcacaattgggatggtctccatagccccttcccttgacctcgccatagaatttaactctgctaattcagtgttgcatttagatttttgtttgaagaggatgtgtgtaatcgttatctgggaaaggacaaagtgaacctgagctttctttggaagttatacatgtgaagttttcctgtgatttttttttttctagtttctgatattccgagagatctggaggtcattgcctccacccccaccagcctgctcatcagttgggaaccccctgccgtctctgtgcgctattacagaatcacctacggagagacaggtctgttcattttgggccatttcacccttagaggatcagggttcgggtgggtaacttggaaatctgacagtgggaacaggattaaatgcaaacaggcccatttagaaaacccccctccctccctccctccctcccctcccctcccctccccctctttctttctttctttctttctttctttctttctttctttctttctttctttctttctttttctgtccaaaaatgcatgggagctacatttaattgattgtaatgaagttcaaaggtggtttatacactacagcaagggtgggaagcagagctgagaaaaaaaagtttatatatttacaaatattaccattggtaattcttactattctttcttttcagtgttctctaaatttaacaaatattctgttaacccttttgtaaagacttcattccattttaggttgagtgagccacattcttgtcccctttttctatttaatttaaacaattaattaaatataattacatgatttcctccttccctttcctcttccaaactatcccacacccctctcgct

SEQ ID NO: 17782 - DNA, 1186 bp, Mus musculus
actcaagcagggcaggaacttggaggcaggagctgatacccggggccatggaggagtgctgcttactgactggcttctaccatgacctgctcagcctggtttcttatagaatccaggaccatgagcccagagaaggcactgtcccgcccacagtgggcagggccctgccctgtcaatcactgataaagagaaagccctacaagcttgcctagatcttacagaggcattttcttaattaacgactccttcctcttagataactttagcttggtcaagtttatgatataaagctacccagaacaacgctgaagccctcagaagtatcagtgtttcggtataatgtagaaatcggctataattttacatattgtttcaattacttttaaaaggaaaaaaagaaagaaatgcttgtgtaagctgattgcggtcagctatcagtcccgtataacagtgtcagttgcgttccccacatcctccatcctcgatgtctaagctcgtggttgttgtcttttgctcccctccttgggtgggaaaaacaggtctcgattccccaactggttttgattcttctgatatcaccgccaactcattcactgtccactgggtggctcctcgggcccccatcaccggctacatcatccgccatcacgccgagcattctgtcggaagacccaggcaggatcgagtgccgccctcgcggaattccatcaccctcaccaaccttaatccgggcaccgagtacgttgtcagcatcattgctgttaatggcagagaggagagcccgccactgattggccagcaagccacaggtaattttgtttttttaatccgcaaagaaatcccttggtgtggactttgtataggtttggtgtagactgtgaaaaagcttcatgttagacacaaagagcagtggtggagccaggcgcagctgtgcgcgctcatgcacgcaggcacgcgcgcacacacgcgcacacacacacacacgcacgcgtacgcacacacacgcacgcacgcctttgatcccagcgcttggaggcaggtggatttctggattggaggtcagcttggtctacagagtgagttccagactagccagagctacacaacaagatcttatctcaataaaaagggaaagaggacagtgatagactgtgtggtaaacatttctccctctaaaaacatattt

SEQ ID NO: 17783 - DNA, 1182 bp, Mus musculus
gtaagtagagttcactgaatggaattatggcaatgcagtagtgtgtagatatctcactccggggaaactgaggaccccttgtcttttttgtcttcgtgcatgtgtttcttcggaaagtactgctatgtgtctttgctgtgtggcaacttaagcctcttcagcctgggagaaacatcttccgtggtatcgatgtactaaaacggcaatagcagccaccaaaaaaaaagcctacctatttgaaaagtagactaaaattcttttaaaatgcattgatcatggcagaaaggttaaaggggcctaacagtgttctctatagtgttttgtttatttttttaacagtagcgtgtcatgatttagattagattagattagactgtttgcatggttgtaactgtttcttttctgcatgaaatactggtttttaccttttcagctattttttttttttagctttgactttaaaatcgcattaactcaatcctccttatttgatatcagctgtccctcctcccacggatctgcgattcaccaatatcggtccagacacgatgcgggtcacttgggccccgcctccgtccatcgagctgaccaacctcttggtgcgctactcacccgtgaagaatgaagaggacgttgcagagctatccatttcaccttcagacaatgccgtggtcctaacaagtaagccctcaaacatagcttgtcccgtagatacgcagatccgtagatctggagcacaaggcatggatcctgagttttcctggaggaccacctaagagaaaggagaactgtgaccgagagacacgctctccaagttcagtaggcggctctgtaaactgtgaaagatgtaatgattctgccggagtggcagacctttgatcgctacaaatcgtagtcgaaggcacggtctgtgaagcaccaaggtgtcagacattctctaatcagtgcacaaaagatacgtgactcccaagtgaattctgtaactaaggcaagagtgagaaacatggagatcagcgcatctggtttattgtcctttcttgtgtgagatctaccaccaccaggggatctatttagcactagaaaacttagaatggcttttgcgtggagacaggcagacgtttagttcatatttcagaaagcacgtgtttgcaccatttccctgaagctgggagagtttagaaa

SEQ ID NO: 17784 - DNA, 1198 bp, Mus musculus
atgccatcatggcttttgaacatggaaaataagtcaattagccagccaatttttttttaaaaaacctttggaagattttattttcttactaaaggttttgtgttctccccactcccaaccccccaccccgccaacattgctagtgtcttttatagatcagttcaggctctgagaatgattttgacattgtaaatgggtttatgattaattttttttaacacttgagaagttaaaactgtaccattcagggacattttctaaatgggaggaagcccctgaaagaatgtggtaacctgcattagtctcccaggggagcaaattactcatgatgcttgggacgtcttttcagataatttgggatacattgcatataccatcattgcttgagcattccgtcaatttcactaccggtcacctgatgtacactgctttattttttcctttgttttttgcctctacttttcttttgcctcctctttgcttcgtaactcaatagaggtgccccagctcactgacctaagctttgttgatataactgattcaagcatcggcctgaggtggaccccgctaaactcttccaccattatcgggtaccgaatcacagtagttgcggcaggagaagggatccctatttttgaagattttgtggactcctcagtaggatactacacagttacagggctggagcctggcattgactatgacatcagcgttatcactctcattaatggcggagagagtgcccctactacactgacacagcaaacgggtgaatcttgaagtcttctgtgtttgagacatggatggtgttgcatgctgctcagtcgctgtggttaaatctggatgtttccaagccagtgattggctacggagatgaagacggggcccgctcagagataagggatacattagtctggttgcatgaaagtatgcgtaaatagtctcaagcactttcagtcaaagcacaaacagatgtgaaggggaagagctctagatctctgatttatgaaatgcaaaggagattacatttgcagatcttgagggtgtttgtttttttttaaagtatgactatcaaactgaacaatgagcactcatttacactaagacaggcctccaaagtgtgccactgcgtgcttcctcttaccttgataagctccttttgtagctaataaaacacctaccaaaaatgagtgtggaa

SEQ ID NO: 17785 - DNA, 1229 bp, Mus musculus
cccccccccccccgttcccatagttcaaacttttacactcttcggagaatgtttaagtggaaagcaacctcagagcattcaaaaaaaaaaatgtagatttcctagctctcccacaggtcgcccattaaggaaaaacaggataaaatagtaaaaagaggctggaatttgtagacaggaaactctcaggtcttctctaagatttccttatctttgttaaaggtcccatgattttactttgtagttaacacatttatatgggttgtaagatcgcccaatggatgcaatgtagaatgatcgagttagcatttccatctaaaacattcatgtctaagtgctggacactctcagactctagttattatgaaattatcataagttgctgtggactagtcacccggcagagtaattcctactttctgactgttggtacattacagccctgccccttggtcccaccttttcctctctaggtccatcattggtgtacagtttaatataccctgagtcacattggttctgtatggtaacttcctctctgcatttactccagatatcactggctacagaataactactacccccacgaacgggcagcaggggacctctctggaagaagtggtccatgctgatcagagttcctgcacttttgagaacctgaatcctggcctggagtacaacgtcagtgtttacactgtcaaagatgacaaggaaagtgcccctatctctgataccgttgtcccaggtaatagaaaaataagctgttatccttagagtggcagttttgagtagcgatggggataagcatcttaatccgagatagctgagtgtgtcagatacagttgggatttaatgccaacctcccagggcgctctccaaaaccacaaagccaaaaagcaactgtttggatgaaggctttcctgtttcctctgcttcactatctgtgcttccctgggatgctgtttgttgccatgggtacctgatgagtgcggccacggcattaactctgtactgtttgctcacacggaaagattactaaacagtgtcgcgtgtctgtacccagtgctgacaggctaaaagtaatgtggtaaatgcatccctttggggcttttgtgcccgggttttacagtccatctccacctccaactgttatctagaaaacagcctttgtctccatatgtgagcactgaaacacacttggttgacaatccaaatctttatcttgcagcttc

SEQ ID NO: 17786 - DNA, 1216 bp, Mus musculus
gaaatagaccgagggtcactctgctttttagtatgcaaatagccatcttgatgagtgggctgctcaggtacagaggggacctttatgaagaccgccacggcacctttttagtttcccttaataatgtcgttcagagttttagaagccacagagaatctgaagggtttctctggagctgagtactgtttgataatgtcacctaagcttttgtagttaggaacacacggacgtcttcgtgggaatgtgtttttcatttccgtgtgtcaaagtggctgcagataacttattaaagagagagcctagagcatttcttccctgtgtactgctggtatgcaccagaagggtttgtgtcaaacagttatactgacatttctctagaacctttctattataaaggaccctagtaccaaaggaagatacctccagctaattgcaagatcactaaagtgagccctcaatgtgttatccacccagtaaatgcagtgtggagttgtaacggacttccccctgtgtaaatctacaacctctcgggatctctggaatattcatccttcatgctgattttgctgtcttccttccagctgggtgtacgaccgagccagggaggtgaggcaccccgagaagtgacttcagactctgggagcattgttgtgtctggcttgactccaggcgtggaatacacttacaccatccaagtcctgcgagatggccaggagagagatgcaccgattgtcaacagagtagtgacacgtgaggagagccttccttcttcttttaacttgtaaactattttaaaagattgccaaagccaggtgtggtagggtgtgcctttaatcctagtgcttgggaaagttaagaatgatgatgggagttcaagaccagccaaaaactggaggcggagctgggttttataatacacacctctagtcccagtacttaggaagcagagagaggcagatattggagaatttatggctagcctggtctacatagtaagttctaggccaaccaacagtgagagcctgtccccccaaaaaagaaacatattcctctaattatttgaatgttagcgtcccagctttcttttgagacagaacaagggaagaacctctctcttatttatatcagcagagtcttcagaactggatgtagtttagctggtgtcatgcaggccacagaattagaagtgttccttccatgtcaaaagtcttccaaa

SEQ ID NO: 17787 - DNA, 2740 bp, Mus musculus
cctaatacctgcatctgcaacctataaggccagccccgctgttcactgcagtgggcagttcccgggctgtacaggtgggtgattcctgcagagctgctgctcactgctgaagagggagctgagtcgccgctctagcttcaccagtgaagttcccaaaggtgcaaacactgctcaggctgattccattcctctgctccgagaagggaaagccgctagtactatgaatgtctcacgtcatggcatcacttactgacattcattaaggatctctgggttcaaggatgctatttgattattaaaagcttcctatcaacttattcttatttctgtgcccgtcaggcattatcagaggaagtggtaacattgaaagacccggaaagaatcttgctgattcttagccatgagaaaggagagttataatttgtctagcctccgcttctgaagaccatgtgtctaaacgctgttctcctaaacctgcagggtatagaattgtctattcaccttcagtagaaggcagtagcacagagctcaacctccctgaaacggccaactccgtcaccctcagcgacctgcagcccggtgttcagtacaacatcactatctatgctgtggaggagaaccaggagagcacacccgttttcatccaacaagagaccactggcaccccaagatctggtaacttaaaaacagcccattccctgatgtctgatctcttaggactagaccagagagccgctctaaccttccaggggaagataaagcccacgtggattagactcattctttagccttcagggaggactgaggtgcaggtcacgtgggtgacagatccctgagagggagctgtttttgtctttgccagctctttctatgtcccccatcacccaaatcaatggctctcacccttcctaatgctgtggtgacccccaactataaaattagtgtcatgctgctctatagccacactgtcgtgaatcataatgtaagtatctgtgtagaattctgatggtcttaggtgacccctgtgaaagggtcatctgccaccaaaggggtctcaactcacaggttgagaactaccgagttaaatgctaaaatgtcagcacttggaaggaatttatttatccaaggcaactattgggttttctggttaaaaactcacagcatctcctctttcttttcctgggaggcttaagaattactgttctcttaactaccattttcttaagaaaatctgttctcttaactaccataaaatgagtcagttaaacaaacacaccagctgtcttgtaaagtgaaaacatttatttttgtatattattttaacttggttttatgttataacatgcctatctatagatactaaatagagattccaatatcagtttgactaaccatgagtatacacacacacacacacacacacacacacacacacacacacacacatttattttttgattaagaggcaaagcccagtattggcctagaatgagtgggtctaagagatggcggaattgttcagggagctaacttctagcatcaaccttcagtgggaattgtgactgactgactcatcgctcttgtctgctagataacgtcccccctccgacggacctacagtttgtggaactgactgatgtgaaagtcaccatcatgtggacccctcctgatagtgtggtgtctggataccgtgtggaggtcctgcctgtcagcctgcccggggaacatgggcagaggctgcctgtcaacagaaatacctttgctgaaatcactgggctgtcccctggggtcacgtacctcttcaaagtctttgctgtgcaccagggcagggaaagcaatcctctgacggcacaacagaccaccagtacgttccaggcctgcctgcctgtcttgtggccccctccttccagctctgaaccctcagctctacctgggataactccatagcatgctgctcactcccaggttcacagctcagcagttagggaacatcgagttgaaaggaatgttgaaggtggaatgaaactagcgttctgagaatgctgactccaacatacatgcttccaacacgcatgtcatgtccaacatgctcactgctggagttagagttttctttgctaatggagatgcaatttcagtgcttttgtctctctgtttcccctcccttcttccctcctccttccctcttttttcttccttccctccctccctttctccctcccttcccttcccttaaccttcctttctttaagctgtgaatcaaaaaatgctctaccactatacaacatccccagcccttaagtgcatttttaaaaaatatatggccgggcgtggtggtgcacgcctttaatcccagcactcgggaggcagaggcaggcggatttctgagttggaggccagcctggtctacaaagtgagttccaggacagccagggctacacagagaaaccctgtctcgaaaaaccaaagggaaaaaaaaatatatgtagttagatatagtagaattcatttgaggctagcagttgccaggcagcagggtgtgtaaatgtatgtctgggatgtgtgaggccctgggttctctctctagcaccacacaacgagttgataccttaagtaattcatcctaaacatttagtggccctgggcagcgaggtatcatctatttagctctttatcagcagaacctggctggctcttaagtctttagctgacatgtgcaaagggaaatgctacttctgtt

SEQ ID NO: 17788 - DNA, 1167 bp, Mus musculus
actggcctgcaggccagtgttgtgcagacagttttctcaatcgagattctctcatctcagatctgtgtagattatgtcaagttggtaaaacccaaccagcgcacactgctctccatcccagaaaggagactaccacatggtggtgtatgctatgtaaatttctctcttcgtcttagggtaacaaccaaaaatttaactaaaatcatcaactaaatgaggatgttagaggaactaaggcatgcctttgttgagaaattagtttctccacaggaaactatattttaccatggcttttagtttaatggactgtaatccctgacaattacaagtctattagtcagaataagaggggagtaaaaattaatattattaagctttgaaaaaaagattattctgtgccagtagaaaatgtattttagcaggtgttaaatccagcagtagaactgactgccttgaaaaaatgcagtttcttttgatttcattagtcaaagcttatcactcacccaactgttccctggacagaccagtgcatcgttgatgacattacttacaatgtgaacgacacgttccacaagcgtcacgaggagggacatatgctgaactgtacctgctttggtcagggccggggcagatggaagtgtgaccccattggtaagtggccgcctctgcttggttggttttcaccgaggacgttggctggttggttggttggttggttggccacttgcagataaggaaagctatttggtatcgccagacttccttctctccaaacctgcctcatccatcagtctgcagagagccttgcaaatgtgttggtaacaagggtggctttactgcagtgagtgagtggggttagctttgttggttctgagtcatgacaaaggaagtttcgttactgactgcagaaaagaaacatgggtataggactcagccagtagatgcctgcctccggccaaaacacttcagcttttgcctctctgtacaataagtagataaatagatagggctgggccatcactgagcgatcaacattaaaaggagcctattccccaaatccaaagtttaagataatcagttcttactcctttactgaaggaggcagactgcttactgagacagcaaattgatcccagcagtttgttcggcctgcgattgtaaagccga

SEQ ID NO: 17789 - DNA, 2055 bp, Mus musculus
tttgaacccacagctaatcccttagcagaggcaggcagtttccatgtcccttagcgccactggggaaatgtcactgagggaaaagccctatggtttgattatttcgacacatggggattatgatgtgattaaagacactcaagtattgaaatcagtggatgatcccacagagccgatgaacacacaggataaatgtcaagggtgccggtacttatcttctgtgtagagtcgaattttacacaaagctatcatttaatcttttttttccccccttggctgggaaaatgagaaaacatgagatttaaatctattttgaaagtgaagatgaaaatccactaagaagcttagggctgtattatcagatatctttttatttgtggataggccctctgggacttaacagccggaacctggctctgtctaagcctgcggtagtctctccttgtcgtacacaacacagctcagctgtaatcttcgggtttgtgtgttgtcttgggcagttttggttcagactcgaggcggaaattccaatggtgctctgtgccacttccccttcctgtacaacaaccggaattacaccgactgtacttctgagggtcgcagggacaacatgaaatggtgcggcaccacccagaactacgatgccgatcagaagtttggattctgcccaatggctggtaagaggaagccctgtgagttatgggtgtggacccgctagcagcctgttgatggtctgggagagtacgatgtgcatctatgtattatatcttacatttgcaaattgagaaaactgtcaatggcaatgtattctggcaaatacagagctgtcctcattttacctggatacagaaagaggaatcagggattgcttattgtttttaagtttcgagagtccggtagaagacatcttttccagttgtagaaccaatagcctgagggtcatggagagtcatgtgctcagacgcaaggaaactacactttttgtttttctcatttcaacagaagatgacattgggtttaagagggacagtcacttttacctgggattttatgctcacagtttccctttgaacttgagtgaaccaggtgaagtcacaaggctatagttaaatccagtcctctagacaacgagaatcaatgagtatatgagattttcctagtctaatcttcttcagcccttttggtatttctctccaatctcctctggaccggttctttcctggagagttcaaaactccaccttcatccagctacatgcatgcaagtcttcttcccaaaggagagagaattgtcaggattatcaaacaagactgctatcttcacataactatccatttgtattccatggctgtttaccaagtgtttctcctccatttccaaccagcccacgaggagatctgcacaaccaatgaaggggtcatgtatcgcattggggatcagtgggataagcagcatgacctgggccacatgatgaggtgcacgtgtgtggggaacggtcgtggagaatgggcctgcatcccctactcccagctccgaggtatgctggtgtgttgaccagagagtttgtgtgaaagcctgtagttgcaaaagcagagagggaagcatgcagtgtgtagctatccactcacccgctgtgctgaagaggtctcttgattccaggagcccgctgagaaaagctggcgagtgagttgaatagttctagggctctggaaatattctcaggatgtaagcatttaggttgagccaaaaggatggctttcccaaagagagatcaatatttgaaatccttttagctcaaggttctgcccgtgtttatgtctagagaagatggtatcatttctccaagccgggggtggggggggtggggggggtgggaggggcgggaatggatggatattttctatttgtcaaatttaaggtgatgaatacatcacatcctcagactaatttctttttttcaaatcagctttttttcccctttggactcagatgtgtgataggaggagctgttaatgtattaaagcaatttcagcttctttgattggaaaagtaaca

SEQ ID NO: 17790 - DNA, 1196 bp, Mus musculus
gctctccagggtgtcctcctgagagccaagttttagagaaggcaggatatcccctgtgggtcttcaggggtctctcaggaagaggaaaggccacacacagagcatatgagagctatgagggaagacaggcaaggcagaccatttcagatgagtggggagccatagggagaaggcaggagcatggtacccaggaatgatgagcagctcagtgggttgaagcttagaacagggcagggaaggctagcagccaggcgggaggggagagtggtagaggggtgtggagctcacagatggatcgcttcctagcgtgactgaaggtttgtgaaagataacctgttgtgttgtgcggcaggataatgttgtcgcttagatgtgctgttcaggtgtggctccgatgaggattatatgaggagtcttgtgaaccacttcttgggctgagtgcggaagttccgggtcaagccaagaagactctggactcattgacttctcccttccagttttataactttttcattctcctgcccttaggatctggctccttcactgatgtccgaacagctatttaccaaccgcagactcacccccagcccgctccctacggccactgtgtcaccgacagtggtgtggtctactctgtgggaatgcagtggctgaagtcgcaaggaaacaagcaaatgctgtgcacgtgcctgggcaatggcgtcagctgccaggagacaggtaggcaccatctgcccacggatgccagaggacctacattcagtgtctgcagtatcttagctgttcgtaaaaaaaaatgtaaaaccataaatccagaaaagtttataatcctgtgataaaaatcatagtagctgacattttcttctctggtctttttttttttttttggttttttgagacagggtttctctgtgtatccctggctgtggccttgaactcagaaatccccctgcctctgcttcctgaatgctgggattaaaggcgtgtgccaccacgcccggctcttctctagtattataacttgtatattttcttcctatcatgaggatcaaactgctttgtagtatctgtatttgccgaaagggatgctgcaagaacaccatttttttcctgtttgtttttgttttttctcaactagccaataatctgtactctgagttcaatttggaattatagatgtcttttagcagcacatg

SEQ ID NO: 17791 - DNA, 2390 bp, Mus musculus
tcgatggtacacttgtgaccctgcgtacaattcagccattggatttcacagcctaagaaagtatcagggtttccaaccctcatgagtgtgtctgcttgctttctgccagagtgctatttccaccctggagtagaatgcaggctctccgtcctccaggagatcggaatgctatgcccaagtagctcaccttgctgtctaggaggacagttcccccagctcttctctgtctagggaacagattgcctgtgatgtctccggggaaccacaatttatgacttcttgccattcagagttctccatggctttcctttttgtgctttaacgattgacccaaagtgggctgatatggtgttagccttctttctgcttttttttttttttttggcaggagagctgcctgccaaaaaaatccctcaggattagggattgcattttggccaacatacatacttatttatctcaggcagaacatgagatgagcaccccctgaattctctcaatcccctaacgtttgcctttgatctgtaacagatcgctgccatgaagggggtcagtcctacaagattggcgacaagtggaggaggccacatgagactggtggctacatgttagagtgtctgtgtctgggaaatggaaaaggggaatggacctgcaaacctataggtaagtggctcgtgtgtgtgatcgaggggaacggagccacaagcagatagcctaagcaaaccagtggccgggatagctgaatcacagcataaaaaccagtgaaatgtgctgcgagtcaccagccttaaggaaatcagatcctgaactatggaacataaaggaatcttaattttgtttgaaaagcacaaggtggagttaaaatctttaggaagaagtgatttcttttgtttatatactatgctgtccccttggtgaagaagacatgttatttaaaggaggaaaaattacactattgacacatttcttgttggaacacagtttgttaaagcacaaaatgccacgtggctccggtcacaccttggcaatttccttaaaaacaaacattaaaggttgtgggggatttttgttggtttgttttatttattttttctgtttttttgtcttagccttggttgtactctgaagcccaaagttttgggttctctttcttagatctccaagtcagacgtgtgttttttcaaatttgttttgtttttgttttttacattagtctaaaatttaaagagcgctcctctcattctttgtaagtcgttcatattttatagtggtttagtttagggacacacagatcagtggtagagagcacttgctgaggctaacataaggttctgggttcaattcccaggactgaattaatgagttaaaagagaaaggttgggattttgcatagggtcgtctcccacagggtaaagacttgcatttctttccacttgaaatgttagtgggaagcttgggacaggcagaaaaatccggtctgtgtactcattaggacaacagaatttacttgcagcaaggctggggcttcctcttgctccggcttcttgctccgtgcttagctgcagggcgtgcctgctcatctgaacagagtgccactttaagaaatgtggctggggttttgattccatgctacactgtaaattatagggagacgctatcattttaaatcgctcttcctcctttctttttgctttcccatttcttctccagctgagaagtgttttgatcatgctgctgggacgtcctacgtcgtgggggagacctgggaaaagccctaccaaggctggatgatggtggactgtacttgtctaggcgaaggcaatggacgcatcacctgtacctccagaagtaggtttagctcttttctgttgacaatgcagcccactgttgcttctggatccctagagagagttgtgatgccttggtgactctgtggtatcataagatgtccagaaaaactgtataaccatcaccttctgcttcttcagaggacactcaataactaggaaaggcagttctcagttcaaccctgccttaggcagtcagctagtaaaaatgaaaagagccttagtggtattcgcttgctggatgggtcttccttgatctgggaattatctcagagatacctttctggtaccgaggacaattaaatccctaaagtagcatgtaaatgaatcctttgacctgggggagcgattggaaataaaaggctctaccccatgttcggatttccttctatgtttgaagtttaaataaggtttactgactctaaacaagaacctagtggaaatgagtccgtgcccagtattatccttcaaataggaaagtggaatgaatttctgtgtgttgtttgttcatcgattgggcagagagactgttaaattataacc

SEQ ID NO: 17792 - DNA, 2576 bp, Mus musculus
cctgaacacacacacacctgaacacacacacacacacacacacacacacacacacacacacacacagaggctcacctgaacacattccccccccccacctcctgcacatacgtatgctcacattacaaaatattggtggaaatgtcttggataatgtaaataaaggggtaaggcaagtctctaagacttgaagtttgtaatgagtgttttacttgcctccacatcaggctttatcctgacttggcaagcttgcttttctcttttcttcttacactgcaggaccggctcattgctctcgatgctgctgaggacttctttaagattgctagccaaatgtaccccaagaaacctggggtcccatgcctggtggacggccagagaaaactgcactgccttccatttccaagcccctgaagggaggcccagaagagcggagttcttttaccacgacacaggaatttaccaaagttggacggctgcctacggtttcgagcgagccaggagagggccttctccagtcaaacactatcgtgaatcctacaaatataaggtcttcttcctcaggaccttggcctaaggatgctctggttacattaaaacacccggctgccaccatgcatcgagaaaggaaggctaaagattagttggtgggtgggtagttcttcctggatagtcaggttccaagaacctgtggcctcattggctatataagctacagttgttcattctgtgcaggactggtgttttctaatcaacacaatggcatgactaatagagaagggtgtaaccgagccctcacctacatcaccaacttcaaggtagtcattattaggtgtaatactagacaaggagccccagacttcataaaaccctaggcctcgcgtgacctgtttgattcggaaacacctgcagcagctgagatgctgtttggggcgtccctctgagcatcagggggtgttatttacaagtataggtgagccagacagtagaagtgtgcagacgtgcagctaagtgtcttcacctgtgccacgaacaccccgaaccctcatcttaacccccagcactgacgttacccagttgcctcgacttttttttttttttttaacatgttgcccatttctgatacaaaagcccttggcatttttatgaagaatagcatctgtaaactggagtgtttggcctctacttcctatcttgaatctgtgtcctgagggttgcagctgcctagggaccttttggtgcagacttgcaggtatgcaggcagtggtgtatgctgacagaggtcgctgctgggtcttcacgctgaaggtgattttcagactggagctctgctagcagtgcagcttgcccacagaatgccaagccccacttccaagatcgtaaggagcttgccaagaggaccggggctcgttctgttgaaaagcctttcaagatttgtgggatttatctgtagacttctgagaacagtagaaatatttttattttttaatgattttgcacttctgaattcaggtggaaaataaatttgtattagtttgttcaggggattgtgacttgaaaaatttcatatcctgagggttttttttttttttttttgcttgtatactccatgtttaaaatatttactaggaaatacatgtcccctgttcattaatatattgtagactaatttaacaggtgcatttcagggaaattcttcctagtttaataagtaagctaaaagttttattttatttttttagtatttagtgcatattctctacttcatgctgtttaaaattagcctgcaaatattttcagtcacttctgtgggctattagaagataaagaataaaataaacaaaagacatcctagaatgttgtactgttttaatctcagaatttgttttggcttttgttttctttgatgtcaaaatagatgaaattgtctgtgtctgtgaattgtaaaccattcaccatagtttttattctttggtaacaaacaagtaaggataaaattatctctgcagtaacgaaaatacgtgcaattacccaaggaattaaaagactttgctgtgtgcctttaagttgagtgtgtgttatatttctgataaatgagaagaaactctgggttccttccatcatccctttaagttagagggagaagaggctgagaggcagatgggtttaaggaccttctgcctccctaaatccagtcaaggagcagacaaatgctcaaatgagtagacactgcagtgtgagaggctcggcctgactgaagtgggcccttcaggaaccacaggcttctcagaaggaccaggggctgcagatgggctgaggccacagggctcacctactttaatcagcatctccttgtggaccacttcagtacttccctgattcatctgtgtgctgggtggttctcagtggcatatgggaacatatttcttattctactggacatcgtggggaaagaaaatccctgtaactagcaggtcaaatacctgcgttcatatttcctggatgttattggacaggacagtaaaatatttcttcgggaaaacatttaccacggtgatgaggaatgtgttcgtagg

SEQ ID NO: 17793 - DNA, 1197 bp, Mus musculus
tgtgtgtgtgtgtgtgtgtgtgtgtgtgaaggggtggggcaggagagagcaattcagtccctaagagatgattgccctgccttagggctaggggcatccagttactgtcattgagtaattgatcccacttaggggatgagctcaccatgaggcagtctgtctgtgagtgaggcttctgtgttcctggaacccatgtgactataagtcgagagaatattagaaatgtctaggctggagtccaggagatccagagcaggatattgtaaaagctgacagctggatgttgctccagtctggaaagcaccttacttatcttatcttcatgcttttggtcttgagggatgagataggttaggtaaattcagtgctaatcaactttgtattgccggtttttcaacagacaccccttaaatgattaacatgcccatgtgcagactagaacgagaatctgaagttgtaagacaaaggagacaaaggaaaacagaagacgggcacaccaagctctatcccgctcttggctgcccatggggcctccaagagaagggtcagcactaatgagcaaaaccggtctctcaactcctgctgtgacatggctgctcagtgactcccagacaagaacctcacctgggaagattgtcagcctttcctcggagacgtttagttcttagctaacaagtgggatagtgaccctcacccttcctgtcccaggcggctgtataacaggaggggtggaatggaagaacccttgatacaagtgtggagtctaaggtgccacggcttacaggctgcaagagctagtaggcaaaagggaccccccgctcagccgccatgcttctcaccgtcatgctgatgttggacgaagcccctgaagctgtgaacaagcccccaattaaatgttttgtaagagttgcctttgtcatggtgtctcttcacagcagtagaactgtgactaaggcacacagtcctcctcatgtgacagttgattgtgacactgcccccaactatgcaatttccttattcctccttgagagttattgctctaccaccctttgatctgacctgtcacagctcaatgggacagaagcctggactagcactgtcctcagcctgacatcaaatcaccctgcgtcttcactgtctcactgtagtgtgggcgcaagagcttgaatttccccagcctgtgggtgcctggggcct

SEQ ID NO: 17794 - DNA, 1208 bp, Mus musculus
gaaagaagactcccgagcagtttgggtctcatgccctgaggtaaggtgaggatgaaatgcaagacctctcccctttgggagtgagagtggcttctgcacggggtgcaacatctgagcagcttctcaagtgccccaggttcattaaatatttattatcagcagatggtggccaggggcgaagcgactgctctcactttctttagaccctttcagacttggtttataggagggaggaagagagagggggaagctgctggctggctggaagtccccttccttcttcctcccaagactcctagggctcctgccctaccccccggcccccaacacacacacagttcagttcacacgcctgccctgcgcacttcatgggcagggccttacagaggtcccggagctgtgtttcctcaggtgatttgctttattcgtttcagtctggcctctcctggctgctttcagagtgaggtaaattgatagagttgctggagtcatcccggagcctgtggtgatcaagactgaggactcaggagctggccagacaagacctgtctaaagagctcgcagccatggctctctctgaagtatgtgtgtgtatgtgtgtatgcacgcacatgcacttgtgtgggtgtatttggagaccaaagaacggccttggtgtcattcttcaggagctgtccatcttccttttgggacagggttcccttgccaactcagaactcaccagtagtctgggctgggattacagccttaccttaccatacatacctgtgctgcagaggcagccagtttccacactgagtgagctattcttccagccccttgactgcccttttggaaatcattgctcgaataatcagttatttagtggcaggagtccaccttccctctgattctaaagaagacttagtagtactgaagaacatggccacttgggccctggtggggagatgtcggggtggggtggggtgaggtggatgtggctgtccagagacgggtgggctcagatgggggcatctgatgaaggagggcgtgaccctggagaggtttactcagggcagcccccggtgggtcttttcctcctttctattgtctcctgagtttcagtgactaggcagagcttgagcctctccatgggctaacttcaaaaccgtacccttaattagaactctgtagaccctcctgcctctgcctctgcctctggagtgcta

SEQ ID NO: 17795 - DNA, 1234 bp, Mus musculus
aggtcttttaagatgtggtgacacatgcttttaatcccagcattccataccagaggtgggtgtatctctgtggatctgaggcccacctgatctacatagagagttccaggtcagccaggatgacacagtggcacacacacacacacacacacacacacacacacacacacacaccaaattcaagccaacctcggttatatagtgagttcaaggtcaggttgggatataccagaccctacttgaataagaaagaagatgtgactccttgtctgtctggttaaaacctgtctgtagggggccaggagtggtggctcagctgttaaagggcgtgccttgcaggcatgaggtttgatgagcagcacccgtggaaacaaaagtcaggcatgatagtgtgtgcttgcagtcccagaattggagcctcctgttagctgtggaggtgtgggaatatgtcctccctccttccctttgttcctccctttcttcccccctccttctctctctcccttcctctttccccctctccttttctttttttctctttcttttctcctccagggctgtgaggttggaactcaatgccttgttcatacgagccaagtgctctcctacggccccagcccctgaagtagacattgctaacacaagacagtttaagaacagacataggcctggagaaaggactcggccagatcttagcacagtttatagtctgaaagaaagcacaggtttctttggatcatatactcactgttcactgcccgtgggatggaagtcttataagtactaatcacagtaacatgaccatatcaaccatccatgtaaggtttaagttctgagtgccattgttcccacattgaccacattcccaaaatagggtaaaaagtgattggattagcatccacaaaccattgcattgaggaaagagccacagtgcagatggcttgctctgagatggctaaatcattggccacccatcatctctcaagtactgaatgccttcatgttggttgggtcaacattttaagttgttaattataagaaacatgtgaggtatggatcaaggctgtcacaataacaaagtggtggcttacggccacagaaatgtgttccttcatggttctttgattctctcctaagccacttgaatggacacggaagcttccagatatcacgctccctgcttgtttcaggcacccacctgcagcttcaggatgctcacactggtgggcaaggg

SEQ ID NO: 17796 - DNA, 1264 bp, Mus musculus
atccctgcaccgccctctcgacttggaagctgtctctccgcgggccggagaagctcgtctgtcagctcacgtaagcgcaaactaggaacagtgggtgtgctcttttctgccaccatgcgccactgcgtctcccctggagcatctcccaccacaatgccgtatcctttttccttggaggccgtagcaggagcgttctcagcggttctaaaacccgcgcgcaggcaggcagaggagtttcagtgcagtggtggcggggcatgcaaatcatactcggcgtgcgcgctcgagaacgccgggagagccggggtcgtggacgttgtagctgaagctgtgggtgctggagtgggagtgaggcgtggaggatgcaagacgcgcacgggaggaggaaggagccgcggggaaggcaggaagtgagggttgcgagcggtcaccacgaagttaatgtgtctcgcggacgcagagcacggctgcatggtgtgtgctgggtatcgcttctcggccttttggctaagatcaagtgtagtatctgttcttatcagtttaatatctgatacgtcctctatccgaggacaatatattaaatggatttttggaactaggagttggaataggagcttgctccgtccactccacgcatcgacctggtattgcagtacctccaggaacggtgcaccccctctggggaataatattggttaaatataagacatttggaacatactataactcttatgtatgtgctgcagttactttttctctctttttctaccttttagttacccgggtcttgttgattctttattgctttacttttaccgttattattcaggcttcatatttccactacccgactttttaggcagagcagctcgcttctttaccttttcagacactggtcaataattgtgattaggtgggaagactctaaggttttcatcttttttttttttttttttttttacgtaaatggatttgggtaatgtgtatatgtggttgcttttttggtgattcatgtgttgaagcaaaacttcatgttgtacagaagtctggttgtttccctttttgttgctgcatcttcaggctaagttgctatgaaatgcaatctaacaagttacatttctttgcactgtcagagaagtaatgcctagccggtgctttctgttacagctttttctctggttttggatatttacataactaaaattagacattagaggactgtgctacttaaagggccacttaaaaaaaaaaagtcttcactatt

SEQ ID NO: 17797 - DNA, 1299 bp, Mus musculus
gaagattgtcttaagacaacgcgaactaggagcagtaggtccacccttcagccaccgtcctgcctcagagtttatccagtgcatctggccgtggacatgcccccttcaggtctttctatttccggtggattccaaaccgcaatagtctgtgagtcggcctgtgaatcgcggaggccgcggggaagagctgatttgcacgtcctgcctccacgcgaggggcgtggcgacgtgcacaggcctaatttgggcttgtgttgtcacgcccttcgcgagggggcggggcatgcaaatcatactcggcgtgcgcgctcgggaacgccgggagagcccgggtcgtggacgttgaatctgaagccgtgggtgctggagtgggagtgaggtgtggagggcgcagacgcggatcggaggaggaaggaaccgcgggggaggcaggaagtgagggttgcgagcggtcaccacaaaggtaatgtgtctcacggacgcagagcatggctgcgtggtctgtatttggtatcgcttctcggccttttggctaagatcaagtgtagtatctgttcttatcagtttaatatctgatacgtcctctatccgaggacaatatattaaatggatttttggaactaggagttggaataggagcttgctccgtccactccacgcatcgacctggtattgcagtacctccaggaacggtgcaacccctctggggaacaatgttggttaaatgtaagacatttaggactattatagctcgtaaatacaggctgcagttactttttctgtcttcttttctactttgtagttacccgggtctcgttaacccctctttgatagaccaggctggcctctaactcggaagtccgcctgcttgccgccagttgatctttttctattgctttacttttcttattattattcaggtttcatatttccactaccaggcttttcaggcagagcagctcgcttctttacttttttacacagtctttccatccactggtcaataactgtgattaggtgggaaagactctaaggtttttatctctttttttcccctctggggaataatgctggtttaataagagacctagaaattaggccaacgtggatttcttaccaacctgttagttttactgcacatcactctacattgctgcataatattctacataatgtctagcttttgatctggaaagagctgtgaggctgtaaggttactaagatggacaagttattttcagcttactgtcacaaaacacttgctagttatgtaagtctggtggcattaaaaactcttag

SEQ ID NO: 17798 - DNA, 1288 bp, Mus musculus
ttgtgcatcttgggacaccccgcccccccaccccaaatactgacataagtgacataaacgtcaactttaaaagctcgtcttccggataatgcgaactagacaagtaggtcggccctttgaccaccatccctgtactgtacttctcaggtacagccggctgcaaaccctcctctagcgctcttgttctcagtggagtgggagaataaaccggaagtgtccgggagcccatgtgtgctccttgcagaagcaccagggaagaggctccagtctcggccgccacaccctccacgagggggcggggcatgcaaattatactcggcgtgcgcgctccggaacgccgggagagctggggtcgtggacgttgtagctgaagctgtgggtgctggagtgggagtgacgcatgcaggatgcaagacgcggacgggagaaggaaggagctgcggggaaggcaggaagtgagggttgcgagcggtcaccacgaagttaatgtgtctcgcggacgcagagcacggctgcatggtgtgtgctaggtatcgcttctcggccttttggctaagatcaagtgtagtatctgttcttatcagtttaatatctgatacgccctctatctgaggacaatatattaaatggatttttggaactaggagttggaataggagcttgctccgtccactccacgcatcgacctggtattgcagtacctccaggaacggtgcaccccctctggggaataacactggttaaacaatagacattacagcatgtttgttagccaactgggtggtagtcgtttttgtgcacttcagttaatcccaccataggtggcacgggagggtactgcttgcatatgcatggggctaaggttcaaagtatcagtttaaaatagaggcccagttgtgggccgtggcgagtggtattctttgtgaaaataccacaaaggtggtagagaaaacagtaatgtagagtcaccattgatactcaggcccttgccagtggagaggaggcataggttccagtcacatctcccacatggtcaggcacaggcagctctctgggcatgtagatcacggtggtcctcacaacagctgggttgttgggttcccccagctcagtcacccttactcctctttgattgtcccatagcttggaggaagtccggcattgggcaagaaagcttggaaattgtggctcatggtattgactctgaaacatcctgtctggaggatggctgctgctacctaggttctgtaggcctgcccgttctctcctctcttcagttttaagatct

SEQ ID NO: 17799 - DNA, 1151 bp, Mus musculus
cctacctgctgggacttattctggcacccggtttcccgaggaaggcagctaagggccatggagtcagcgaccagggccaaagctgcttgctttatctctggcagttctgtctttaactttaactctgctattaagatattccctttatttacatttcaagttttatcccctttcctgtttcccctccgaaaaccccccataccctcccctctccccctgcttaccaacccacccactccaattcctggccctggcattcccctatactgtggcatagaaccttcacaggaccaaggcctctcctcccattgatgaccaactaggccatcctctgctacatatgcagctagagccatgagtcccaccatgtgtgttctgtggttggtggtttagtcccagggagctctgggggttactggttagttcatattgttgctcctcctatagggctgcaaaccctttcagctccttgggtactttctctagctccttcattggggaccctgtgctccatatccaatggatggctgtgagcatccacttctgtatttgtcaggcactggcagagaactctgctattctatggctgaaagccacctacttttggcaattcttctaactttaactctttgctgttgtgtggccaagagctgcttgcttttggtaatgtttctcttcctataactctttgctattctcaggtcaaaagccactgatttctgataatttgattccaactgatagcagcaggagaattagaaaaaaggtttggtatctccctggctcaagggcctctggcaggccaggcaagaggcttggagtttgttaactttttgtgagcccgagagagaagagaggaagaaagcgagaaatcaagcacacacacagacacacacagacgcactttggccgggcctgaccacctgtctcaacaattccaccagtgttaatgcatacttatatacatacatacatttggtggaagggactgactccaaatgccacactttatttcttttctctggcagtttataccttcttagacataagttctttatagaattatctcatagatagaatgttacgcaacaggggagttacaaaaggatgttgacagttcaaagcagtgtttcattctgtgagctcatcat

SEQ ID NO: 17800 - DNA, 1164 bp, Mus musculus
tctgaaattcatattacctggaggccctgtatcttttctgccaagtaactgagatattacaaatctagctgtcactgtgggaaatagcttctttgttaaattagaaaattaaatagatctggactcatttagatatcagaaactctgagtttctgaaacacacacagaattcctgaggaattgtagttctaactagtaacaagttgacttcctctatggaaattttaataacattctagcttcatgtattatctaggattccttcagctgtggagagtatcggttactctttgtctctctaaccacaattcctggcagagaaggcttagtgggggaagggtttgtttgggctcctggtttcagaggacttgcatccatcacagtgagccaggaagcagagatcagaagatgctggtactcagccagctgctcctttgtcctttatcctcacctcttgggatgacactgcccaccttcaaggcagataggtctccccacccccctccccttctcacagtgaaccctagtgaattctctcaggaaacatcttcacagacacactcaagaggtatgccttaagaaatgtggcactctccatctcttgcaaagctctacgtagtcctgtggcattcacaccatgtgtggtgcagacggcagagtgcagctcttcacgcaggcactgggagatgcccatgtggaggtcatgaaggaagggttacattgaaagtcctttgtgctgggccttggggtagggagcagagctgctgtggctaagggcctgagcgcctgagactgtcccagctcaccctgacaggcaacttagcacaccacgagaatgaaatctggggagaccaagctagaacttacagaggctgtgtgacctgggtaccatgtgccgtgatgtttgattgccagtttttaactgccagtatgtcagttgcgcatttgacacattttcaggggttccgcacgcctgcttgtatgcgcggaccagtcttgtatgcttctgggttttttcatattgctgagaactttttttttaatgtatttttttctaggatatttaaattagctatccaataatatgctccagataaggtaaggatcaggttatgaacaaacctatttaaagcgatcaggtatactaaccacttagtaccaaga

SEQ ID NO: 17801 - DNA, 1189 bp, Mus musculus
caccacgcccggcagagaatgacttcttaatgtgttcattctgtcttttagagggaagaagtttgggaagaagcatattgaagtgttcactgacctcagcagcccgttcagccaggaccaactggacgttataatttgtaacttgaagaagtctggcatctctctgcagttcttgtaagatcctgagagtaaagcataggggatctcggcatccctcatgcagggggcagggcctacatagatggctcccagggggcttctgtctcagctgaacagggggagctgctaggtgggattggccaccttgcatgtatcggccattcctgtgttcatggaactgttctgagctgaggtaagaaagagaaggaaaatagtgatattgggctcaatagcagatcactgcttttagaaccaaagaatcaaggaatttaaaaaacaaacaatcagactccatcttttgaggatgtttagtttgtctcctgtctgcatagatggcatcaacaccctgatagttccttttttgtgtggctcagagagtgatatctacaaacagcagtagattgagggtagacagaactgttatgttgggaatcatcttatagcacatagagtatgtatgtttaaccctttctcaggatgcagacacataataaaatgtaatatgtatattataaaattttgggagaaaacgtgtattttataatgtaaaaggaagagggtccctcctctcctagtaacttgaatttctcctctagcctttactttctgtgtcttacatccccactaaaacttactgtcatactaatccttcctgctgcatttaaaacccattttttctcgtcctatttttggccgaagcagagtgatgatacagggtgttgaattattaatctgatcagggacgttcacttttcaaattgagaactgcactaagaagccttcagttcagagtggtaagcctgcggcctcttagactgcctgccatgggggagtatgaacccctctagcatgcacgtgtgtcccccttaagactgctgagggacaccttcccaggggactatagagaagacttcagaagagcccaccacatcggcactcgttaagatggtacttcagagaaattaagtgctttttaagtggcacttgtcaccgagctggggtttctcagtgctgcggaaggccagcttag

SEQ ID NO: 17802 - DNA, 1186 bp, Mus musculus
caacatgagcttccttgtccccccctttatgctgaaagtataactaaatctgagaaataaatatacagatatttttgaatgtttaagaacttaattcccaagtacatgatgagaaccatagaggtaattttgagttattttggtttctgtcaaggccaaaagagcatgcctagggatgaaaatatactctcacagtttcctttgttggcttcttcctctctttgatgatggcaaaatgtattctccctctttattagtcaatttgagagttttctatagaaagtatatgtgtattcagaaatcagtttgtgcctatagcctaccaaaggagaaaaggggaatgtagaaacagctataaggcattcccatttgaaataaaccaaaatttaataaaaggagagaagaggcttaatactgtaggtagaatagttgttcagagagtctgtcagatttccattttctttggtcagtatcttgtctctcctcattttctatctatcttttgataatagattgtacaggagaaatttaagaagagttgggtagttgtggacgcaagaacgctaaagaaggaagatatacaaaaagagactgtttattgcctaaatgacgatgatgaaactgaagtttccaaagaggacactattcaaggtatgaagcaagtgtctgcactttcacccaagagagattttctctaaggtggtgggaggcagcgtagattggtcaccaagagacacttctttgagatacaggggtgcagcagaaacactgggtcctgtaggccagtggggactccagcaagatggctctgggggaaggacctgtgtatttgatccttccaaatttaaatgtgtcaagtgacaggacttgtccttggctttcttccctctcgcagattcactcgctaggagtgtgcttatcaagcgctgaagcagctctcgcccttcctcttcaagcgccaatgtcaggtcttagagcctactggctatgcttccttaggggaaaatattatctgtggttgttgtcgtggcttaaacacactaggctctttaaagctgggctaaatatacccaacccatgtggcctaaatagtatgtttagacgacatctttatccagaggacttggaaactagctgagaatatctgaatattcaagagctcaaatcgtcagatgccagatgatgc

SEQ ID NO: 17803 - DNA, 1186 bp, Mus musculus
aactttggaggggtgtttgagagggccacttttattcaggaaacacttgggtgggtgttgagagcagaaagtgaatccttgtccctaggcttggtcatcagtcattgtaaggcttcagaagaagggaaatgcatagctgcttagaaagtagaaatcctgtggctagagtgggttcagtggttaagagcactgactgctcttccagaggtcctgagttcaattcccagcaacatggtggctcacaaccatctgtaatgggattccatgccctcttctggtgtgtctgaagacagctacagtgtactcacatatatgaaataaatatataatcaaataaacaaataaataaaaggattaaaaaaagaaggtagcaatcccagagctggacctagagaggaggggtgaggagggctgagaggaggtgagagggggtgagaggaagggaaagtgagtgaattaaccatgggcatgtttgtggttttcaccccgggttcccatatgataaccacaaaaccaagatggtcgaaactatagctggcattgcccagtttatgtgctgtactgggtgacaatggtgaaggggaagttgatgtctggaattacttccacccaggcacaggtgttctcagagtacagaagaccaaagtttgatgagaacatgagaaagaaccttccagagaatctcttccatcttaggaaaacatggttcctttgagccacagcaataggggtttgaatcagtcttaggcattaacaaggcaaacagaccacatggcatataggttataagaggtatggttatattcattttgctgatgaaaaacaatgttacattggaagagatggacctaaaaatcacacaggggtttgaacataagcctcattcacatactggatttccctattttgccagattgtttccctacatttaatttgtgcgtgtgcacgtatgcacgtatgcgttcatgcatgcgtgtgtgtgtgtgtgtgtgtgtgtgtgtgcgtgcgcgcgccagaagacaacctgcagcagttggttttctccttctgtcacgtgggtctccagaatccacctgaggtcatcaggcttggcatcgagcagctttacccactacactattttggtggcccctttccctacttcgtacataatatcacatatctaaagccacgagtctgtggtggg

SEQ ID NO: 17804 - DNA, 2261 bp, Mus musculus
agtgcgatctgggattggtaaagggtaggccgtgctagctcgttacttttcattgcctggtgctgtttgacagttacttaccctaagtctcagagttgggggaggaactggaggattcatttctgatgaatattttaagcaaggtagttttgaattgttcaaactaaaacaacaacaacaacaacaacaacaaaacatcaccaccaccaccaaaccaccaaccctccccccccaagatttataatgaaacaagcaaataaaaacataaaacaaaccatcctactacaacctgcagaaggaaaacttaggtataattttaggcacttaatttctaggcactaaaattctagaaatttaattttatttcttgacaaatagtgttaccaaatttctttattcaaaagatttactatttttaattatatgtgtgtgtatgtgtctgtgtaagtgtatatgcatgtgactgcagtgcccacaggagccagaagagggcatcagctatcctagatctagattaagagactgttgtgagctgcccgatgtgggtgttgggaacagaactctcagcctctagaagaacagtacatcacgtgctcgtaactactgaactgtttctctacctctttaccaaatctctttccttttccttttccttttccttttccttttccttttccttttccttttccttttccttttcctttttctccttgcctcgcctctctgcctcgcctctcccctctgcctctcccctctgcctctcccctctgcctctcctctcctctgcctctcctctcctctcctctcctctcctctcctctcctctcctctcctctcctctcctctcccctcccctcccctcccctcccctcccctcccctcccctcccctcccctcccctcccctcccctcccctcccctcccctcttcttcttttctttcctttcctttcctttcctttcctttcctttccttttcttttcttttcttttcttttctttctgtgtttgtttggttggttttgctctgttttgtttcgtgagatagggttcctttgtgtagccctggctgtcctgcccgtgctttgtagaccaggctggcctcaaacttaaatagatctgcctgtctttgtctcctgaatactgggactaaaggcgttcaccaccatgtcttgcaccaaagttcttaaatacctacttttaagataggattttgcatcatctccctccctaaagaaacttggcaagtatgcatgcagattccgagactcttgaccaagagttcacccttacagctgtgttccaagaattgtactatgttctcacaaacatccccatgcctgagagaataaatctattatcttatattctagcgagtctccagttaataagtcacatcgaacaatttttggataccaatgaaacactgtattttatgaaaagtatggactgcatcaaagctttccgggaggaggccattcaggtgagtgtgctcacccgtctcccagcagctgacggcaggggcacgcagcgtcccacaggtaagcctagcttgtggaaagcatcgttctcacggtcaattgtgcagtatgccaagtggaaatgaccaaacgtgcctgtcatcgtcatctctcgggaggagtggaggtcgtggtgtggtaggtggggataaactaactcatctaggaaaattgatgaaaggtatatatgagtgtgagtgctgagagggatttatagagatgggataggtgtatgaatgccaggagaaacaaagaaccctacacacagcagtagtttcccagtgctgtaagtgagttttcttcattttgttagggacttacagaaaacacttataaacctctatcagattatttgtgggcctttttccctctaagcaagaagtgagccagtttgaaatggaaggtgtgttttaaagttggcacagtggttgagtgtgtctttgtgcaggtgctgatgaaatatctgctgaataaataaatatttgattaattcaggtgcttatggagaatgacaggaaaattagaaaatggctgaaattagaataaaagactcggaagtagatgatacagacacgccacagattaaaaacaatgaaattttggaaaagcagaaccaagaaaaggctaagggtggtccagacgagtgccctgttcccaccacgagtcaggttaggacttgggtgggaaaacagaaggaaggctaggactgttcctctcagcagcctgtgtggacgggccctgt

SEQ ID NO: 17805 - DNA, 1147 bp, Mus musculus
tatacataaaaactttccttttaagtttttcattttcgtgtgtggtatgcatgtatgtgagtatgcatgtttgtatgtttggggcacttacatgcgtgcgtgtgtgtgtgtgtgtgtgtgtgtgtgtgtgtgtgtgcacatgcatgtggaagcccatggttgattctggaaagcatctccattgttttccaccttactttgtagatggagttactctgatcaccaaagacgaaggcccaggaagctctatcacagctgaggaagccacaaaggtatcgagagccaatgccctccctgtctttagacgagttaccccatgagggagctccttacacagtgaacacattccttaccagccaggtcaacagcctcagctgcagctgcactcccagaacaggcacgcagcctgttcttgttcccatggttgtgtctctagaagccacctgtagtcctggcttcagtaactacagaactgttaaacgtcatagcccatttcctttgtagcccagatcctaatacaagctgtgacagaccactctcccacccctctctttcccaccttaaatttttgtttaaatgacattgggtgggtgggtgggtgtgggtgtggtggagtgtgtgacatgcagtggttcatgacgcatgcatgaatgtctgaaacaagtgcgggcattggtcggctcctaccgtcgtgtgggttccaggggttaaattagtttgtcagacttgatggcaaacacacttacccactgagccatgggctgcaccctcccagtctctcttaaatactggttaaacagcaaaggctgcgcggcgatccacggtagagttattggctaaaatagcatgcctgaggtactggatttgttcccttgcactaaaaacaaaacaaagagagagactccaaagattctgctggtttgaggcaggtctgaggagtgatttgtttgtggttttaaagctattcttgtgaatatgttgtggagctggtagagaaagactcccattctagcactggactagccaggtgttttcaatgaatgacctccacatatacagaacccacagcttttgattggcacatttgttaggctaaggcctccttgtttgatgttttgaatattaaatctgactcagctgtcagtca

SEQ ID NO: 17806 - DNA, 1197 bp, Mus musculus
cattacaaatctaatcatataggtaatctcataatgggaattcctatgttctgtggtttcaattatagtgttcattcagactaatcctcccctctgaagagctagaaaagagccggggaagccattcccttagaagaaaaatgttataatttactgaaattgttcttaaccagaaataagcagtgtatcgtgcagtttgtgtgggttgacaaatacaaacatccttttaaaagcccacttcctaaatgttctcaattagctaaatagaaacaaagcagactgataggcctttgaaggcagccctcgacacaccatgctgtgggtgctaggaagttgcaaatgtgggcttttgcagccatgtttgggaaaaacatgcactttagtatcacaggaaaactggagtgatgaccacacactatgctgtcagcctttttgtggaaaagtttttagggttgaaatgagaagatatttagtgtttaggtcctaaaatagttggcagagaataccagtacaggtttttgtgtgtagctaactggaactgcagatctgagagtggcctggttcctttctgaatatgttgttcttgtttacagctggacatgatatagatcatggatgtgtggggaatccaagagtgccagctctgtgctgctgagagctctggcagcatccctgaggccgtgcaggggatgtgaagctctggacgtcatcctagcagacaacttgggaatgagtcactccaggtctctacagagtgaccataaggacatatattacaagaaataacttagaccctattcaaatttataaagagccattattttctgattggtatatcatttcttgtgtgaagtctcattcttattggtatattatacgtatgcgtagaagtttctagaaaatagacttcatcctaccctgctgtgatggtgaggaatcagtcaggtgaggttagtggactcttggagccacggcgtggccccgggtatgattcttggcccagttcaggagtcatccaccaggtctgccagtggtaagaacaccacatgcagagggagcagcagtgcctggtttttaccaggtaggcggtggggaaagccataagtaatggctgaccttaaagcattttcgcccccactttagcttgttcaggtgactttgacgggtgggaagggcagtgtcaccctgcacgtcagt

SEQ ID NO: 17807 - DNA, 1152 bp, Mus musculus
atgtttaacccgtgcagccccgagttcttatgctcactgtattagttagggttctctagagtcacagaacttatgggtagtctctatatagtaaaggaatgtattgatgacttacagtctgcagtccagttcccaacaatggttcagtcgcagctgtgaatggaagtccaaggatctagcagttactcagtctcacaccagcaaacaggcaaaggagcaagagcaagactccctttttccaatgtccttatattgtctccagcagaaggtgtagcccagattaaagttgtgttccaccacacctttaatcccggatgaccttgaatttggagatttaatcttctggaatccatagccactgtgcctcaagatctccataccaagttccagatcagaaacttctatctccaagcctccagataagggtcactggtgagccttcgaatctggattgtagttcattccaaatatagtcaagttgacaaccaggaatagccactacactcacttcatgtgatcagatgtttaacccttgcagccctgagctctcacccacacttcatgtggtcagatatttacacttcgacttttgccaggccagtaaatgagctctgattctgttctcgcttccatttgcattgctctgaaaatatttcttttttttttgggggggggggcggttacaagagtcagtttggcttattctatgaggatcctgtttgcacctattttgccctatttttctattggcttgcctttttcttgttgactaaaagaaattctttataaattctggatattaatcagttgtctttttttttacttcattaacttctttttgcataaaagattgattgttttagttacatgtcaagtttattcatgtcttgttttgtagcttatgttttttgttactaatttaaggggtttttcactaagtaaggctatgacagttttctcttggagtttttccctgtgagttgtagcggtggatcttcaaggttacttcttggtttaattcttgcatacaaaatggtttaggaacagactgaaggaactaaatctgtaacctctagaagagcttctgggctttccaggaatccaagacaattacaaaactattacaatgtataataaacagtttagtacaat

SEQ ID NO: 17808 - DNA, 1222 bp, Mus musculus
gggaaaacaggattcagccgagtttgtgctcagcggcgcgttggcgtgcaccgactggctcaatgtctctgctccgttcctttcctctgtcaacaggctaaacgcaccaagaaggtcggcatcgtcggcaagtacgggacccgctatggtgcctccctccggaaaatggtgaagaaaattgaaatcagccagcacgccaagtacacttgctccttctgtggcaaggcaagtcggcctcgggttagggaggagggtgccattgctcccgagctaaggcggtttgggctcgctttttgcggagcattcgttgtttacttgcaactagtgaggaacttaagggtgaatggtttggagaggaaaaagtccgatcttgggaaattgatagcgatgtcagcgcatctgtaccaaccccaaagaggtctgtttagcctgtaaataatactctgcttgggttactagaatttaactgctaatggataagctggcttttccatagtttactctctggaagtctcagggattttttttttatatatatttcataacaagatcttaactacttacagaccaagatgaagagacgagccgtcggcatctggcactgtggttcctgcatgaaaacagtggccggtggggcctggacctacaagtgagtgttttctcctgtggtataggaaaggctatggactgcacagcccgtgttccaggtctggtgcatatcggatttgttttagtttaaagcaaatcatgagtttgggtttaaaagttaatagtttttggtcagggctatacagtgaaaccctgtctcaaaaacaaagttatggttatagataaaagctcagagccgggcgtggtggcgcacgcctttaatcccagcactcgggaggtagaggtaggcggatttctgagttcgagcccagcctggtctacaaagtgagttccaggacagccagggctacacagagaaaccctgtctcgggggaaaaaaaaaaaaagaagaagttcagactttgattctcatattccttttgaattgtacagtcaccatgctctttggaaaattacagttgatctaagtccattggtgtttgtgctggacttgacttaacactacaagttatttctataaaatggtttgaggttaattgactcgggattgtatagaacattggaggctgtttgggcatatttagtgctatgaccttgacagagccagatgttg

SEQ ID NO: 17809 - DNA, 1210 bp, Mus musculus
gctgtggggagtcggtgtgagctccgaaatctttaaggtcaagactgcttttgtgtttccccggcagtcagttcacagccggccacgtgggaagtgagcaaactaagtccttccaaatcgaactaaactaaaagacaggagacaaaagcacaggctctttcccactccacgccgattctacccacgcttgcaagttattcttactctcccggagcggacaaacccaggctgaagggagcaaagtcctaaccagggaagaacagaggggtccgcttgaatcccctaggaacgtagggtgggcgagtgggcgtgtgcacaagcacgtgccctcacgcaagagtgcgggggggggcggtgcgggggggggcggtgcggggggggggggaagggagtggtctccataagggggaggggagaaggcaggggggcggggagaagcaggctttttaggacccggcagaggcgggggaggagaaagaaggcaaggaggcgtctcccgcattcgtctgggccgtgccacctgcccgctagctcgctgcactaccgttgcccacaagccaacatgctgccgagattgggcggccccgcgctgccgctgctcctgccgtcgttgctcttgctgctgctcttgggcgcgggcggctgcggccccggggtgcgcgccgaggtgctgttccgctgcccaccctgcacgcccgagcgtctggccgcttgcgggcccccacccgacgcgccctgcgccgagctggtgcgagagcccggctgcggctgctgctccgtgtgcgcacggcaggagggcgaagcatgcggcgtctacatcccgcgctgcgcccagacgctacgctgctatcccaacccgggctccgagctgcccctgaaggcgcttgtcacaggcgcgggtacctgtgaaaagagacgcgtgggcaccaccccacagcaggttgcaggtaatgcggactgtgagcactagttttgggcttgggagaaactctctcgtagctcagcgggttctcctggctggtgactctcacgtgggaaaagagagtccgacgggaccctgggactgatgtagaggagaaagagcttagaccttaatcagatccagggagactcttgagagcgggaacccgaaagacaaacccgggagggaggctgcgggtggagcaagcgggatttgatggggtaaaggaggagaggaaagataccttgc

SEQ ID NO: 17810 - DNA, 1298 bp, Mus musculus
cagcgcctggcacacagtcagtctcttgggatgtgagggttttcatcttagaccatggctgaagtctggggtctcccacaggagctgagccttcttgaggtctttgtctccagcagcattggtaatgggcacagcctctgggcctaggttatcagcatccttctactgcttgtaggccaggcagaagtttagtgccacctgtctgcattttgacaagctgccaagtgctcgattaaggttgggacaggcccctgttctgcagaaccctgcacctgggaactgcatgcatccagcatccagcatgcatccatgttttcctctttttacccttcagtgcaagatgtctctgaacggacagcgcggggagtgctggtgtgtgaaccccaataccgggaagcccatccagggagctcccaccatccggggagaccccgagtgccatctcttctacaacgagcagcaggagactggtggggcccatgcccaaagtgtgcagtaaaccccagccagtcggtgcctggcttccccatcccgaacaccagcagaaatggagggcgtcagggtgacgggtgtggaggagttcccagttttgacacatgtatttatatttggaaagagaccaacactgagctcagaagcccccctctgaccccccccagcggctgttaagctgaacctcccttgcttctgttagagaggggaagggtggtatggagggcactgggtacaggcctgggaatggggaaagaaatttttatttttgaatccctgtgtctcttttacttaagattaaaggaaggaaaaataaaaagtgtgtgtcttacttgagtctttggggtgtcccgggaaagagtcttggggggggatggtctgctgagctcatgcccaccttgtccctaatacctggaatggcggggaagtcactgtttccatcttacatggggacaagaaaaaggcttctgaacccagatgccggcctgcggtggaacccagggctctgctgcactaaggaaggtttccacccccctggactgactgaggaagatgggtagtgaggacaagagtgtggacactggacactggacgcacagtccacaatcccagcttttgggaggctgaagcaggtaagactgagagtctagtctagcctgggctacacagcatataaacacccatacaaagcaacatcggtagaaagcttcagatgatattgcagtgggagatgggaaatggggaacattgaaattgggactctcctaccccctgaaataaggagttttcaggtatcttaggggttt

SEQ ID NO: 17811 - DNA, 1229 bp, Mus musculus
acatctgccccacaggatacggaggaggtcagctgtgctcactcctcttctccttccaagaccctcttccgaccatgacttatctccatggtaacatcctcaccatcattctcccactaccaagggttgccatggcaacctcccaaccacctgcccatcccaggcagggcagctgtccttctgctcagaaccctagaggactctaggtgaaattttacagcttaagagaggagtgagccaaggagaagagaccctgtagtcctctggctttcaagagaaagaaggctatgatttaaaacacagtagaagggaaagaggtctcgtcgacctctcccggggagcttaggggttgtactgtctttattttttaaaccactaaagtgcaatgtttcctgcactcttgttaccccgcctctcttccctgttaggttttcatttccttgagcagactttcttggttttttaatggagtatagactttcaccacttcacagactctggcctcctctccaagtctctctggatggggaaaaggaaggtagagggtcagaggggaaggggtccctcgtcaccccgcatccattcacccccacttctctggtccctagtcaccggcttcagcccccatctccgacaccatcactgtcacacagtagcctgtcacacggatagtacagttcagacaagactccttcagattccgagacgcctaccggttgtttttggtttttgttttgttttcttttgtttgtttgtttgttttttacaacagcaataaccacatcacatattactgtagctctctatagtgttacgttcagacaccgtagctctgtcctctcttattttgttggttttgacttaaaaaaaaatacttatgctttttactggtgaaacagattgaaaaaaaaattgaacaacaaaccagtttgtgaaaaaaaaaaaatgggaaaaaaaatcaccccgatgtggaagagctcggctcctctttagcattttgtacttaaggaaataaaaaagaaaaacctggaagatctcacattttattacaaagtgaagatttctgtattctatttattcaacttataatttatgttactccttgatctttgtcttttgtcgtgacaaagcatttatttaataaaagtgtgcattcagctagcttgcatcgccttcctcctggggcagagggctctgtgagcacccaggctgccaacaggaggggaagg

SEQ ID NO: 17812 - DNA, 4139 bp, Mus musculus
aagcagggcagcaccacagacaacgcttgccacctcttcgcagagcttgaccccaaccagcctgcgtctgccatcgtcaacttcgtctccaaggtcatgctgagtgctggccagaagagatgaacgaaatcgggagccctcgcccaaggctagggcatcggggatggggtgtgtggggaggggacctgtgaatcctgaccaccttgaatccagaaccaggactttgggtcgcccgtggagaaggaaagaagaaagtgcaatgttgggagaggaaagtgaatggcggaggggggaggcaagcaagcgggaggaagaggaaggaaggaagaagagaggcactcagaatcccctgtatggatggaagccacacccccaaagcctctccagctagctggggctcctcccccttctgagagacttgcgctcccgcagggaacacacaggcctccttgggggcgggggaccatatttcacagagcaatggaaaagctccctctccccaaccctcctgctctgagagaagaaatcgaactgaggcttcttctctggaggtaaggttgctggtggccagcgtatgacatcaagcagtgacagtttttcacattttgctcacccggggcacccgtggtctgtgcttgctctgactccttgttgcagggcataaatgtgcccccccctccacgcgctgatcgatactctgcctgtgtccactcaactcagattacaaacagctctctctgcttgtctgtgtcccttgtgatacacttaaacacactgtccaaagaaggctagggagggttggttacagggtggcagggtcccaggtcggatgacaagctgtctcctgcggaagtgtagcttgtgggtatagagttctgtctgcacctgccctctagtgaccctgggcctgtcctctgtagagactctggtacagagggcatgggcacctgcagcattatagctgttctgtctcctggagaccaaagctggcttggaggaaaaaatgatgcccacagtcttgggaaaaatacctgctgggaaggatggcatcttttctgcgcggtggggctcccggagaactgggcatgcgcattgtgccgtggggcttaggatgagttggacacgcgcactgacaatgcctaggactgccttactcccttccctcaggccagttcctgggccagcactagccttgaatttgctcatccgcttgaaacctactgggggatggggcccgtgcctttctgacctaccctgtcctatatggtcctcgtgttggcttatcccaggagcctacttcccagagtcctgcctagggcacccggggaagcccgtccccacttccccactctgtaagtgttttggagtctgactattgcagacaccctctggctgggctgctcagggtgacatcatagcacctctgggaatgctgccgaagaaccccatggtcctcccacaataccaaagcttccctgtttccccttctgcctccgtttccccagcaggaccacactgcctgtgggacaaaggacaggatgtatgaatttaggccaaaggtcctatggtccatttgcagggttggaaaggcccttgccatctcttaggcctccatttaagcccatgggggcccctaggggtggcattgtactgataaataaatatatataatatatacatgagacatactgatagaatctgtaagctaataaaaaatataagaaaaaggttaaaaaaaaaagaataggtaaattgacaagaaatatttattgttttcccttattgccttattgtccctggccacaaactgttcatctcttctctaatgtgtaagtggagcctgaactgcaggggctctttatattccaaacaacccagggttagccttggcctcgatcctggccttggcctccctaggctatatctgggactggggggatgacatgctcccactctggctccttgttctctggcaaaccgtagcgtggctgccagcatcctgtagcgcggatagctgcttccatggccacaggcctgaaccggtgtgtatttggggatctggatgtgtatggccacggtgtggcagcttttggatttttttcctccggggagcattgactgtgtggacattgtttgaggagctagaaagaagatcggctggggatcacgagcccctacttcccaaagaataaatgggcttagtgatcaaggttcttcaaggggtctttctccctctgagatattcaaggcaaatgtctggatgtcgcatttcctcaccccccacctcatgaatcctacttctccccaacatagaagtagacatttctcatcccattctttgtaaatgtccacaccctaccgcaaagtctggggagtcttctggctggaatgctgttcacgtctgcatccagccctgggatcggccttcgtgtatggtttcaccttcccatgctgcactctttcctgagccatgtgggagtcgtgtgaatgaccaaggcagatgctagcaagtggtgcttccttctcagcacgtctctaggaagcatggacacccgagtgtggcttttctcaaagaaaggtgaagaaggggcctcagttcttacagtggggaccacactgctgcctgcccccttcccaactgtgattctcacacactcacatgcgtgcacacacacacacacacacagaccacacgtgcacacagcactccatatgcaactctgtattcttgccaaagatttcctttaaacaagagcacttttacccaatggctcttttgtgaatgatctgtttcgttattgtttattgttgagtctgtatatcaacagggagagtgttgtctgctcttaaacaggaatgaaaggggggaggggagacaggagagaacacggagaccagtgatgtccttaacaagacccctcagctacagcccaggtccaaactgcctctggccactcagaagatgaggttggcttggcacttcactgtccctgatatctggaggtgagatggcagagaggggcaccagtggagccaggattggggcctagggaagcccccaatggttctggaggcagggataagtgtgaagggctgggctaggacaggatggacaggaaggctgggagaactaacagttggatactgaagttgctactgcggacctgtggctcccttggccagccatgttttgggaaagagttcacatcttaggtttgaaagggagcatttgagtcttctcactgacctcttcctagcagcttagatagcctcagacatgactgccaggattcctgatatgccctggctttggagagtccctagggatgcccactcgggggtgtagggaagacactggctgtgcgtccttctaggaaggggctttcaggagagagagttcttgtgctgtctgagaagtgcaggggagacaaatgaatgcagtgtccatccagctctgggttttctttatcctgcctcccgagacttctgacccccctttcccagcttcagatcttggggagatccatccaaggggttcagccctctcctgcctccatgccttgggtccctgaagagcttagaacccaaagctagggccacccctgcacttaggccttggctgaagatcttgagactggtgtttccgtggtcattggtgacaggatgtgtgcgctcgagtgtgtaagtgtgggtgtgtgggtgtgtgtgtgtggtctgctcatctctttagggaactttgaggtgggcggtggcatatggaggggtgtcaggttctatgtgacccagtaatgagaagagcttgaaggtgaggcctgaggggccacagatgagtcatgttttagtgctgatgacagaggggccggtcgcatgggatgaggctcggtgggcctcttgcttgttgtctcctgtctcctcaaatggctgaaaacttggagggtctcggttgttttccatgcctggcccctcacagcagcgaggccactgaagagcaacacacccagtgtgtgtcagtgttctcagcccagccctccctgagaacccacatttggctcgtatgtatgtgagcacgttggggtgcgcataagctatcaccatcttcttctcttctatcatccaaatcaaatgtaagaagtccctca

SEQ ID NO: 17813 - DNA, 1213 bp, Mus musculus
ggtgtgccacagctgggcactgacctggtccagtctggtcagtcttatgccctaccttgcttgaggctgaatgcacgtgaagagttcccccagaaacctggctggggtgctggtgtactcccctttgccatccacagggtagtgagaagaggtttggggttcaggggatgggggtcttttagctccttttgggggattatgattgatgagtgcacctggctgacctgtgctgcctgctgtctcgcttgctgtccctgcagaagtggtgggacacacccaagggccgctggatgggagcctgtacgccaaggtgaagaagaaggattccctgaatggcagttcggggcctgtcactactgcacggcctgccctgtcagccactcccaaccacgtggaacacaccctgtctgtgagcagcgactctggcaactccacagcctccactaagacagacaagaccgatgagccagtctctggggctaccactgcccctgctgccctgagtcctcaggagaagaaagagctggaccgcctactaagtggctttggtgtggatagagaaaagcaaggcgccatgtaccgggctcagcaactcagatcccatccaggcgggggcccgactgtgccctcccctggccgccacattgtcccagcccaggttcacgtcaatggtggggccctggcatctgagcgggagacagacattctagatgatgagctgcccatccaggacgggcagagtgggggcagcatgggaacgctgtcctccctggatggggtcaccaacaccagtgaaagtggctacccagagaccctgtccccactgaccaatggcctggacaaaccctattccacagaacctgtgctcaacggcggaggctacccctatgaggctgccaaccgggtgattcctgtccacagcagtcactcggcccccattcgaccctcctactctgctcaggagggtttagctggctaccagcgtgagggaccccacccagcctggtcacagcaagtgaccagtgcccactgtggctgtgaccccagtggtctattcagatcccagtcctttccagatgtggagccccagctgccccaagctccaacccgtgggggtagtagccgagaggctgtgcagaggggtctgaattcatggcaacagcagcagccccacccacctccccgccagcaggagagatccccactgcagagt

SEQ ID NO: 17814 - DNA, 1217 bp, Mus musculus
cttgcagcccttacagtgaaagcttaattctgaaggcacacagcttctcgggcccctggtatgtcagggatgccaagaggctgtgtcattttgcatgaagcattgagattggcccactcatgaagctgggtccttatgtgactgtgggctgcccagagttagtgctatgtggtttttgtcaagctcatagccctcctggggatgcatgcagttcccagggagccccttcaaggcacctcaatactggcctagtcactggtgtatgggtgggtggttctgagatgtcacatggtctcatccgtcttcttcacttgccattggtgcctctgagccctgtctgcgtgcctccctgtctgctttctgctgcttctttgtcttggagagcagaaagagcatgtggccaaggccatcttgagctagtgcctagctgttacattgggctggcagtatggaggccattgaaagacacctggtcaggcacagacccttggtgaatggctacaggcattgattcagtctcctttgcaccccgaactcatctgtccttctctgccgtctccttcccggatgaggaggcttctggagcacatctgtgctgagagccgtgaggtgaggagaggcaggagggctacgaacagatgtccctctaccccttatccgtccgatgcatatatctactgggagctgacagtccccctcctgcataatcttatcctattcccagggaacatatccccagactggctctgcctgctgccttcctggaataggtatggagacccccaaaaggctgactctccaaagcctgtcctacccctgtagccctgagctgcacttcttcaggtcttttgggctactgtgggggggggggtagggtcctagggcattctgagagtatgtttctatcacacacacacacacacacacatacacacacacacacacacacacacacacacacacacacacacacacagagcctcggtgcgcagtcagctcaggcagcaagccctcctcctttctttctcagtgtccttccctctcccccttcccttctccccctgcaccttcagcaccttgctgccatgtctgtcatggggtggggggtgcttcttcctgcccccacccttctgactatgcctgctgcctccttgatgatcctgggttcgctctagaacaagacattttagagctccaagctttcctctgtgtatttt

SEQ ID NO: 17815 - DNA, 1215 bp, Mus musculus
accttccacagagcactcagatttttggagtgtggggcagcaacctcagtcagtggggcattgggcttggtggcagggcctggggttgtctataaggggcctcagtggacatcagggtgaagtgcctggtgttcagagcttgcggatgggactggagcacccactcaatccttgcctgtacgtttgcaccatagacatcccagcacagtggctggcacaggagcctactgggaccccaaagacttcaaagaatgcctgtgcatggggaagatggtgtggctttgttagaaaggatggatctagaagcagcagggtctaactcctgcctgccaggggaaagccagtgggtctcatcttgacccatgtatacaagctcacttaccttagctcttccttctgtgtgtccttgcaccctgctgagcctggggccagctgaccttcctggagctgtgtcgtcaatgtcagctcctgaatgagaagtgaagaggacagataacagtcaccataacacaggagcatgactgctgttcctgggtgactaactgttaagctccaggggcaacacaacaaatcgctatccctaggagaggaggactcagatgcctgggctccactgactcatgtcctagctgtgtgactccagcaagttgctcaacctctcggtgcctcagtttctttaaaatgaggcttggtaggatggctggttggttagtgtcaatctttccccggtaaggggcaagtggcagagtctgacgggcagaaggaatgtggagatctatagctgagtgttccagccctctgcactctcttctgtcttagagagaggctgtgggtgtccaactcagggtaaagagaatgcattgcaggggaagagcagagggcgacctttggccatgtgaagactgcagagcaaggcacttaggagaaactcaggagaacctgggaagtctggggtctcggagtcagaggaccatgaactatgctccgaatgagactcctgggagatcacgagctgccctgcccttgaccacattgcagctagttatctgctcaaaagggcccgaggggaggtgagaagtgtcccaaaggtcagatcattttgacagataagtaatttgcctttccaaattaaacaaacaaacaaacaaacaaaaaacaaacatagctaacactttaaaatgtgcatttttccatatttttaaatcaatttttaca

SEQ ID NO: 17816 - DNA, 1233 bp, Mus musculus
cttttaagagattttaagaatatttcttaaaagtcagatgtggtatctcatgtctgccatcccaggttgtgattctagcacttgggagggctgggcaggaaaatcagaagcccagatcatcctcagctacgtattgagtttgaggccagtgggttgcatgggactctgtttcaaaaatgaaaataaagctgtgtgtttggggtggggagggaggaccaggggttgggggggaggaacatgccttaatcccagcacttggaaggcagaggcaggggttgaacttgagtcctcaggcttggtagcagtgcctttactcactgagtctgaagctcgagcagatggtaagcagtaaatgtttcatcttcttagtctattacatggactatcactatgattttattttaaaccataaagcagaacaagctagctgtagtgtatccctgtgacctagcatgtaggaggtggaggcagctcaaaacaagcctcagctacaaaataggtttgaggaagcctaggctacatgagattctgtctcaaaaataaaccaattaaaatacagtaataatggaggcagaggcaggcagatctcaattcaggacaagcagagaaaccttgtcttgaaaagtagaactaacggggctggcgagatggcttagtgggtaagagcactgactgctcttccgtaggtcctgagttcaaaagccagcaagcacatggtggctcacaactgtccgtaaggagatctgatgccttcttctggtgcttctgaagacagctacagtgtgtacttatatacataatgtatatgtataataaataaatctttgggccagagtgagcagggactgagtaagaggagttggccagagacagcggggctgaccagagcgagcagaagtcctaaagttcaattcccaacaaccacatgaaggctcacaaacaaccatctgtacagctacagtatgctcatctacattaaataaataaatcttttttttaaaaaagaaaagtagaattagcttgctcgagctctctcgctcctcccatctctgccccccctccacacacacacacacacacacacacacacacacacacacacacacacacacacagaagcagaggaggtgggaagggcactcctgtgcttggggctaagcaatgattgtcacagtgttttacattcagcattttccttgttggggcacagagcttacagatctccagctccag

SEQ ID NO: 17817 - DNA, 1105 bp, Mus musculus
tctgtggtcctcctatgttaggggcttccttcactggttcttctgcagtttgcatgggcatagttgaatcagctccctggctttgggagaagggtctgagaagcaagtgcagattcaggcaggggctgatggtagaggcgatgctggagccactatatcaggacccctgggagtgggcttgcactgggcctcagcttcctctgtcctttgacccctgtgttctgtctacagagatgcttccctggtggtgaccacatcaggagaccacaaagcaaaagtattttgtgtccagagacctgaccgttaacagctgtagcctctggcatggtgtctggtgttaagggggataaagggacgcccctgcccccagcagagttgcggggtgcagagggaagaggaggggagaccactggactgctttctgaccccttcagctgacctgcttactccttgtccttttcctccctggagacccgccttgccaggccctccctcccctgcccagccctggggccttgtaggaggccgtgtctctttgactttgattcgctggtgtgagccatggggtgcgtctttgtatgttggggttaggtctttgaggttcccgttctttcccttcccaactctctgggaaaggaaaggaggaagagagactagttacagattttaaaaatgtaaataaaatatacttcccattggcagtgtctgtgtgcattttgtggggggtgggtgagtggagtcttcctgtggtgcttagtgtgtctctgggtccttctagggcagtctactggcccctcccacttctggagatatggaaggaataatctgccctgatggccagagatttatttggtctgggtgaggtctcatggagtgagggttccaatccaaagaagtggggcactgtgagatagaagagtgttctgggaggcagcagtagctgctgcttccctaattcaagtccaggtcaatgctgcattggctactggtgtggtaggcagtgctggggcctggattgtccctcttggctcttcctcgaagcactcgtagacacctttgggcagctgtcctccagggggctgtgtagcgctgatcacccagcccc

SEQ ID NO: 17818 - DNA, 1099 bp, Mus musculus
acggagatgaagagatcattgaggtggtagagctggatccaggcccgccggacccgggtgagaactgacgctcctgaggccacgggacaagaggcgctcacccctggcctctgacccctgcttctccccagtcccccctccccccttccctaccggtcgttcctaccgacatttctctcccagacctcctcccctaccccccacctttagtttctaggcctggctgggtgggggttccctgacgcctcccctagcccttcccctcacacacccccttcccatcatgccctctgtcctctcttcccacacggtcgctggccaacaccagatcttcagacctagcctctctccccctccccgccccccaagtgctctcttcctgctcggtacgtgtgagacaacatcttaacctttggccacacgacccaccctagcttcacctttttcattctttaacccttaccccattccttgtattatctttggagctccatcttttaacgcttctctcaaagcagatgatctggcccaggagatggaagacgtggactttgaggaagaggaagaagaagaagagggcaatgacgagggctgggtcttggaaccccaggaaggggtggtcggtagcatggagggcccggatgatagtgaggtcacctttgcattgcactcaggtaggcctttgaacatctcagatcagtgcagatgggcttttgagtatggcctgttggtcctaggcagctattataagagaccaaagtgaaagccacctactttggcctgcaggatattcaaaggaagggccatagggcactggggttaagtgtgacccctgggttcaaatcctacctctgctgtttagcagtctgtcagctttgttagctttctggatcttggtattctttaaaatatatatatatatatatatatatataaaatcttgtatgaaagtgaatggaagtaacctaagtggaaattaaaggtagtttacattccagaaggggcattaataataatctcggatgccagcctcatgaaactctcataacttaattcatacctagcctggtatggcctgtcctgtcagctgtgcacctca

SEQ ID NO: 17819 - DNA, 1181 bp, Mus musculus
gtgagagccatgatgctgggatcactggcacctcttagcccttggtgggcttggtaagaactagtctgaaggtgtatctccttccctttacccatgacgagtatgcaccaaactctgtgtgtgtgtgtgggtgggtgtgtgtgggtgtgtgtaggggagtagggagcctgtgaacacaggagctctgaggggaagaggctcccctcccacctcggccacagggttctaggctaggagctggagctgtctccctcctggatccaataaagccagatgctttgcctccagctccagtgctcataggccacttatgctgtctgaactctttaggcttggcatctcttagctttagaagctagaagagatctgtgccctggggtctctctgttccaaccccatcttccagtaacatgtatcagttatttatctggctaggggaaaaaagacagtgagcagagtttcatcagtatgggggctaaaccagaatggcatccaccctgcctggcgcccagcctggctaccatccagacccaaagtgccttggggccttctgaggcttttaaaatcggacctagagggacctcctattttgctctgacacacagaggtggattgtgggattctgggtgtggctgggaagcagtctgggtgagagataagtggggacagggaaagcgccttgggtgccctctctggtctgagaaacactgaagtctactctggtacacaagttcaatctgttctgtattcccattgggagatttcagactaaaaccccctcttcaagccagctgctgctttctatgtaatccaagtgcctcctccggctggtaccaggatgggaacagaagccggtttatcaggtggggtagaaaccttactagcccaaggacatagttagagctattctgtccagtacttgattctgaatatatcacagagggacacaactagaaatgtaataaagttttatgtttggcaggaagacccttgagttgctgtggctttcttaactctaaggtgggaacccagtatttggaagaaagactttcctgaacagttcttggtggtgggtgagacaggctgctgcaatggtaaaagctgcctgaggaacggagctcaagtctgcagcactggctccaggagcactggctccagaaggggcttctcagccaccccgc

SEQ ID NO: 17820 - DNA, 1184 bp, Mus musculus
cagattctcagaggggaaggacctaaggagagggcactttaggcaaagaccctatggggcacgaatttccactgggtgggacctgtttccctaagacagtgactgggaagaagagagcatgggaagtggaggattcttaagtgagaagaaagtaaccctgggtggattcccagagagccgccaaggctaaggctgtcttggagaaaggagcatgtctgcccaccaagtctggaccacaggagctcagcctggagactcggcagccttgccctgcactcgggcactgtgtgtgtctgtgtctgtgtgtgtgtgtgtgtgtgtgtgtgtgtgtgtgtctgtgtgtgtgtctgtgtgtgtgtgtgtgtgtgtgtgtgtgtgtgtgtgtctgtgtctgtgtctgtgtctgtgtgtgtgtgtcggggggtggggtggggaagggggatcacaccagctctgccagagagtaactgggctgagctcccatgaagagggagtaggaaagctgccctatctggttcttaaccctgcctttgtgtaccttataccatactgtgtcctccttgatgatcccacatgatcccaatgtaggacggaccttcgaaggcacagcggagaccatgctgagctcactggacactgtgttagacctgggggatgacaccctgctgtggcctggtgaggtgcccctcctcctcctctcaggcccttgttttgcctggtacctgaaccctcccagtccctcactttcctagagactggcaagctcagctcatggcctaaaggtcacgcagccgatccacggggcagtgttgggggagcagacactgacctccctcctgggacgttagactggctgtgtgatgtccatgcctcacacactactgtcccattccccagacagaccttggctgcttgtgacccctgagcacccagagtcctggagagatatctaattgttcagataactatggtcagctccccaaacagaaagtagcatttgcttatcggagaaaactgtaaatctggtccacatgtactgattggcctgaatttgatacagaatatgcacacaccccatatctcccccaaatccatctcccctcccctaaccatccaacttctttttttttctttctttcttttattttttttttctgacgtgttattgtcttctccgtttgcta

SEQ ID NO: 17821 - DNA, 1650 bp, Mus musculus
ggaccaatcgccagatcatgaaggctgcatttggctcctgctccagaggccacaccaccactagagccctagaacccaggagaagagagtcctgaccaggctagtctatcttccaccttcccccatgcagggttgtaggggaagctcaccccaaaaatgatctaacgtgtggtgcctgggaaagtggtcatcaaccagggcagccagactctgggtgactgagactctaagtcccaccctacctaccttgctaagacattgccaggcagagccattcctaagaacacctaaggactggaagcctggttctggcccatccctgcctcagtggatgtcctgaaggccagagagagaggttcctggttgccaaggaatcttctgcttcaggccagggagtcaaaggatgatggcacacagagccacacaccacgcacatctgttctgggtctgccattgtcccgggtcataagggcctgcctgccttcccaggggagagtgaactgtggtctgcctcagagacctgcttctcctttccgcccttgttcttaggaattcctgcctgcctgctgtctcacttaacctctcttgctctatcttcaccccctttcctctctgagtcattaaaggctgactttcttccagcctggtactcatccggctctttgcagtttgccaaaaaccttcattcccacgtcatttcccactggatcccagggccctcttgttgtcagtgtgcagatagcagaggtctgggaataggaagctccagtgagtggcagcttccaggacctcaggcctggccataccccactgctcatccccctccagatctgcttgtcctctggtctcaggtcaagggccctttgtggccacaggagcactatggtcgttttgcaagcacaccttaggtgagttagccaggagccacatctttctgtgtcagagccttccactgggctgtgcagtgccctctgttgttcctctgagatgcccctgcctcagtttcccctctcatttggcttcggctgccctctccaggcacagcctttggaactcactctagcaataccaccggactagttagccttcccggccccaagacactcgcagtttcatgcctttgtgcctttcgctcatgcggtttcttcagctggaatgccttcccgctcctgccgcctcctctgcctggcaaacacctgttagcctctcccaggcccctcccccaggaaggcacccttcacccctctcttccaggctacctctgcacctgtaaatgcttctctcgtggcacctatcacaccgtactttacttgtttacatgtttgtctccccttctagactgtgaatccttaagggcatggactgtatcttatgcatctctgtatttctgcgcctagcacggtgcctggcacacagtaggcgctcaataaatgttgaatgaatgatttaaccaaggtctgagctctcaatggcttatctatgctgcccatgggtaacaacagcagagaatctgctcactgtttcctgactccattccgggtcccacaactcagggtacttcgtgggaaaagctctggacaggaaaggctccaagggcaccagaacaacccagaaaaaatgcctccacatgctccttccacagcccctgtg

SEQ ID NO: 17822 - DNA, 1282 bp, Mus musculus
ggtcttctgtctgtcccaaccctttttactcttcattcaaaagacatttattgagtaccttcagtgcccagcagtgagctagtcccaccagcttagtgggagggggttgtctctgcttcatttttaggtgcctctaaaccccagatgtcacgtgccttcagagtatcaacagggggtggaaccttcttgtggggttagggagtctccaaaccttaaccaagctggctcctcctgtgccaactcctccttccctgttccgtgcagcctcctccatggccccccgctggctgggggcagctcctgggtttctgccttctgtttttaaagcccctccccatacctgcagagtctgcagttcaagcccttaggctctctccccagattatgagggttaagtgaacccacaaacaagtgccaagggggttggtgaagggagagaagatggccggaatcagatgaccttcccaattaagtgccttctctgtgacctgagcacctcagagtgataactaaagagaaagctagaccccctcctattccgcctctgtggtttttggggaagggacctgaagtgcgagaatgtctcacatctgtgactgcagttttgactatttttcataaccctgctggacaggaggaagttagccaagagggactgcctgggcactcgatctgagttcgattgctagagcccacgtgatggaaagagaaaacgaactcccacaagttgtcctctgacctcctcacatgcaccatggcacgagctctacccaccccccacccccagatacacgcactctaaacaaataaaaaatacacaaaaagcacggtgcccccacctctggaatgcggggcggggcggggcgggagacggaaggctgggcagattaaggcggccctcggccgacagccttccgggcaatggggccagcaaggaggagactgggtggggcgggcgccaagaggcctcctgcccgcatttgccctggccacgcctcgcggcctctggccagcgttagccacgccccttcggccaaattcgtcttccgtgaaccccgcctgggcggggcaggaagtgcggggccaagctgttgcttgccgctaggggcctccctgcccttgtggaccaacactgggctccgaagcttggcgctcccagggagctgataccgtccaccttcctctgaaagcgtggagcttcagacatcgtccacacacagtggagaaggggtggtgtacacctcccaaatactggtccctatcctctaactcaacctcctca

SEQ ID NO: 17823 - DNA, 2813 bp, Mus musculus
cacctcttctaaagctctgaactgctgacgtgtgcctcggggctttgactgctgagaaactctgactccaccatctgccagcacacattgttatagtgaatgttccacagtggcacggggagggtatgcagcagtttacaacagagaaaaacatttgtttttaaagctaactttaaattgtgttgtttcacctcgagcaggagtctccttttgtcttgtttttcttgaaagtgactggttgtcttgagcacccagggtgatgatggtgtgctttagtgagttctcttgtctctactggagaacttcgagcagttgaaatgatgaggaagtttatttaatttaaaaaaaaaaaaaggctctgcatcatggcatgaggacgcagacatgatgccctcagtctggactgcctcctgggcatctggaccactctcatacctgcttgtgtccctgttgacttagaaggccgtggctcgccacagagcctgattccttttgactcccatgtcttgggcaggacttgtgttagttataaatagttactccttgcaaatttaggatttgaattttatgtccagtccatatgatgacctgtcagcttccctgctcccttctttcctttaactgactgcttgactccaaatggcaatctcacctagactgtattgatagggtactggttgttctaagctgcctgtgtctattttaaaattatgagtaaatatagtctctttttttaatactgtgatcaaagaattgggggatagaacagttaacatgttaggctaagaaggggcagattattagataggaacagagggtgttggttcccttcagtcagcataataactttcctgtataaaatgccaaatgtatggttatgttactttaaatgactgaactggaattttatagcaactagtactctatgcagtcttctcatcttagccaaaactgggaaagagaataaactaaaaagttgattttccacccccacccgccatgttatgcagagttaaaaagctgcatgtgaatgttgtttattttaatagccaagaccgtcacttaaatctatagggaggcagtgctcttgtttcgtagggatagtgtgtgtacacacactcataagctttgtcccagcaggaagaataagtaaatacatgaattgtttattttctgattccaaattggtttcttactttctatgatcaggtttaacctaaacagctcagcagtagcagacatagcaaatgtagatgtatgtacattttaaggtgtagtgcttacaaatcggttaactctgagtgcaaatattggacttcacttttttttatcttctagacgaagtataaaacttaggggaaagctctaatagttcaaacctcagcatagtgactgagtttttccctccatccctcagttgctgtggtgtggtgtagacccatatgcagatctcataactagatcgaagttcatgtggaccttgtacatacaccgacactttcagaaacttcagcccagcacataaaagttgcataaaactgtccactcttctgcctgctttatagtaacatccccctgcaaatacagctttctgccctctaacacccttgtagtgcattacttaaaactctgtctatattgtcttaccatctggagaactattttattgaaaaactctatagtttgttggccgttttataacaggggtactctgtatgtcgccacagtagactccttggtggcttgctttagttactagatctgagcagtctcatttatacacaattaggaaactgtactttccatgagtgccgcgtgtctaaggtctggaggttttaattataggtgttcccatatgaataaacattttaatgacagtagacttaaaacttagagataggagatagtcctcaggcctgagagaaagctggatgacagtcaagatccaggtgtatcaagccagaccaagaacaaagggcagttgtctgaactagtcagtcagaataggagagggcaagagggaggccattgtagcgtgtgcacctgtgcccttgctgccttcctcttcacacttcctcctcgccctccctggcctcttggtagaggttcttcatgcctgggggagggaacaagtgaggttcctgcactttgctgattgagccactcccaggtttgctggcagctttggccacgttatttgtgaggtggctttttttcctttgtgttcagagtgacttgggttctgattattgacgtttgtgtggaacggcgctttatctgtgttttagcagaactgttcctcttttcctttaagggttttccctggttttgttttctttttaaattatacagatttggtttttttgttttgttttgttttaatgtgtgagagacattaaagcctttattaacctcatattagtttgatttatttgtttaaagggacatgttcctggggacactggataaccagttttaagagaaaatcacctattggcttctgattggacttcacgtagcaaacccatgttcctggtgttgtcatttgaggagtctgtggagctttgcaaaggctctgggttagagctgtaagcccagctttggccttagccctcccttttgagtgtgaggagggtaagatcaggataagatcctgagtgagtgacggtgccagagaaacccccagacgctaatgtctcctggagtacttagctgtccatctaagaaaagaaaactctacaagatttccatgggtctgtggcatgcgtctgaaggaatgggcaaattactattataaacaaaaggaattgtca

SEQ ID NO: 17824 - DNA, 1285 bp, Mus musculus
atgtgcaacgctccatgctgttttatggaaaccttggtcgcatctatagctgattatcctctttttcttctacaagagtgccgcttccttttgtcttaggaatgaatacatactgtaaatatatatgtacatacccacacgcatatactgaatgaatggagccttaaagagctaggatgagccaacagaagtagtgctcttgctcacagtgaatgctgcagctgtttggccgagaaatcaaagtgtccaagcacattcatttgaggcagtgtgggggtgcgcatagcgtttggctcttaactttggggctttttgggttggtttttttttttttttttttttttttttgtcttttgaatggcttcactcaagtccaacattttatgtttgttgtaagtaaagctctctgggaagctagttacactaaaaacagtttattttccttgcaagaggtatttctgtagcctgatttgagttttatttttcttttgattttatgactctcatgctgtttacatgcagtttccaaacaatggattgttggtgcttcggagtgttccagccccacacttgctgtttatcatgcccttggcattttctctcagatgcctccacacggtgtgttcatcatcgtcttctgtggcgtgctgatggtaaagctagaagcttatattttcttctgtatcattttcccatggaacaggcatgacccaatggattacagcctcggttataaaaggttcaaagacagcttcaactgggactgacagggatgcttagggcagggaggaacactagtctctgtcctgcaggcagagaaagcaggggcatgccactttttacagtgcagattctgggccactaaagctaaaagctaaacactgtgttgctagggtgaaaataagtagtgggaggggattccaggagctatcaatcaaaggtgcctagtacatatcttacttgttagtgctccgagtgagaccaagtgtcagtgcagcggcaagtactgcatgagtcactctgcccacgtgacctgcctgggtaagcagctaacgaaaccatgatgagcctggggaatctgtcagcacaagtgtcattaggattgcacagaccttagcaacatgaagtctgcatttgttttgttccctattttttcttctattattaatgggagggttgctgtgagttctgagttagatatgaaaccatgttagattttcagaagatgttaaaacccatcactgaagatgcagcatcttttctggaagagtgtattcagagagct

SEQ ID NO: 17825 - DNA, 1203 bp, Mus musculus
cacgaattgcgcatgctcaagcggttgcgcgtgaggaaaatggtaggagggccaaagttggtaaagtggacggtgcgcatgtgtattacagtgtcgtcacggcgggggcggggccgcccgggttaggggctgggcatggtgaggggcagagcgaatgcttgaggggcgggacttgcgcgcttacgcgcacgcgcctggactggttgcgtcgagagtgcgtgcgtccgtacgtgtttgcgtgtagtcatagttcccgccatcagcgggtttaggtgtgctaggagagagaccggcctcgctctctggggctagtagagccccttccttccgagcctttcggctccaccccctccgcgggaactttgtgcttccggcaagcttgtccggagctgggaccctctagcgcaggtaagacgagccgggacagcttctgaattgagccgttttccccggcacccccaccccacccctgcggtccgcccactcggcgtccacttcagagttctcccggctgctgcttagcccgccccgggtccttggatacccaatgccttacaggtgccccgttcgagtgttgccccctttacttctcctttaacgcgtccgtgttgtcacttgctttctgcattctaaatctggcctctcttcaccaaggttcaggtggtctcagcgtacctccctgcaaggcctgctgtctttacaggtgactttgttgccacatatccattaaaaccttgactgcgatattcacacgcccgcttgaccattctttactttcctactcctcttagacattactcgctgaaagggagtgtaatttttgtcgtgcctttggttgctacccatatctagccaggacactgacggtgtctattgaaccaattttaaatcaaaatctggagaaaaataaaaaggtaataaagttccgtgtcgttggagagttgtactgtagtgtttttcagatattcctttggcgagttaacagtacctgatgagtctatagttgaaagaactaatctaagagggaatgttaagggggcattttggtttattgtgttaagtattagaggaggcttctgggccagacagataggctctagtgtgtttgtatgatgtttgtcatttgtcatgttaatatttgggtgaatattcaaaagaatagtgttgcatactggcaaaaggaaaaggagggactgaagaccc

SEQ ID NO: 17826 - DNA, 1201 bp, Mus musculus
atgctgtggggatacgagggccagtagtttgcagacgtcattttgatcccgaatctgaaggttcaaagaacatactttgagattatttgctaggccgaggtccgggaggcgggaaagggctgggtgggcggagggtcagaggtgagaggtcaaaggcccgcgaagggggcggagcgaggcggaggcggatggcggcacttcatcttgggcatcagagccgctgaagctgggacgcgggtccggtgcgtccggcgggaggaggagtgcggcggccgctccaaacatgcacagcctggcaacggcagcggtgagtggttgctcccgctcggatgtccgtctcagcctgttttctagctcccagatccgggccctgagtccagctgctcctgcccctagtcgcaaggtctgggggtctccacacgccgaccgtggcggagccggacccccgctgttccctctcatcccctcccgccccctctcctggcctggcgcgcggcctctcgcgttgtttgccagcgccaaggcctggtcccgcgccccgcgctgccccagcaggccattcattgattcctttgcgcctggcgtcagtttatctggacgcgggttgtgaatgctgggcgtcggcggggatgaggatactgccacggccattcgctctggtcccgtgatcctagacttcctcgcctaggcacatctcagtggttcggaaatgggcttctagctcaagccacttgctttttgcatgaggaaagacttcctcacgcctcgcgttttatcttttaacaagaaaagcaaatcatgtattatacctccctagagtcgtactatggctttcggttaaatttagagaaagtagactccttccctggcctacaagccctgtatgatgtggtccttagtcacgtttatgggcttggtttttgtcacttgctccctaagctccgaccaagaagtatatgaacttttctgttacatattctctacctggaatgtctttcttaggactctgcctccatacatacacacaagtttacctcagagtgactttttccgaccatattcatagtagcttgtaaccccaacattttctcatatagagcaccgatcccacggtttaattactagacttttatattttattttacttttacttgtgggttgtctgtactctgtaagtcaggggcaagtatttggtgaggcc

SEQ ID NO: 17827 - DNA, 2285 bp, Mus musculus
cacaactggtgaagaacctgcaagagggccaggtcaccgatccccgggggattcccctgccccctcagtgatcctcgttccctctcactgctcccctttgctggggagtgagggtggaacctatgaggaaaacagctcaggttttattgctgggaatagacaacctcagtgctgaactgtactggagaaaaggggcaaggtacccgctgaggtgtgtgggctgactggaggtcctggatccccctactgctcccaggaattgggctcctgacagcagtctgctaccacaaccccaggcgggtgtcaacaccagcaaatgctgtgtttgcagcatgcccaagatgaccctgctcctgaacctctacctagccactggtagagagaggagagaacgtggtaatggcagcaacactctaggcatgagagcaccggggaccaagccatgtggctttttttttttttttttaaactttgccttcctggacaacttaaggtgtgtctcttaattctctcttacagtatttgtttactttggatttttgtttttaatctcaaaagagagagatgtgtttaatggacacaagctgtagttctcagcaaaactttgtcagttggcactgtttacaagtctgttagctgcataagctcaataaaaagttggtctgggcattgcatcccctctgacagaccgatagctgcatcaggctgttgggtggaatgggaggcaagggaataggaaagccaaaggccaagcaggaactctgtgcctgctctctgctcctgttctttccctcccatacctggctgctgtgaggacactcaccttgttctggcttcagctgctagcctacccacatctcagcgctttccccttttttaccacttagacttaaagcaggtgtcttaatttactcaaccttccctaaaagagaattgtattggggcaggagggatcgcagttcttcaaattcaggtcttcgaagataatttccaggtgtcttctcaaacggagtaagcgcctggatccaaatggtagactacttgaccccgttctctagcgtgagttttcatagtgccatctcctcatgattgtagaagcagctgaatgagtttcttcagatttaaaatgaatagctggactctgctggctcagtctcctctcctttttaacacactttcttaggtctatggaaactacagggttgccactgaaatgtttttttacttgttgatagtgtcagggccccccttccatccccatgggcttgactctcaacctgttactgtaaactgcgatccttcccaccgtcagcctttgtttctcatcctcacctccaaagatgggattattaatccaactctagaaagagtccaaatcttcagcccgtgtctcatacacttgaagatgtctatattgagtttgaagaggttataaagggacagatggtcatagaaacctttgcagaggcagttgtgccaacccaagggctctttcattgttcgttggcttctgtctttaaagccaagaaagtagtaattaagtagcctagatttaaggagggtagaataagcatttattcccctgccttccaaattgaagaggaggacttggcctcaagcctgaagaacaaaagtctcagaaagcaaagaacagcatcaccttgataaatgtcttgactcagtctgcggcttgtgatctgaaaagttctctagggtaccctggtttttgaaatatgccttcctgctgagctgaagtctttcattccacttcactgggggagcagctgaggcttggggccttgctccctgggacattctctccatcttttggtgcattggccatattactgtgccaatagtgtcttaactcatgtcccatctatcctcagctggccttggacctacataggagttgaatggggaggggctacaatgggtcttcctgtggttggtcctgatgttgtatgtactatataaagagacccctccccttatattgtgttttccatccctcaccctcaacaggattaaaataaaacatgctgggtttttttgttttgttttgttttgtttttaaattcttttaattggagagtttattctgtcagcatagaaatgtctaggcactttaatctgatgatcattgttagacctgcctctaccctgactgcttacacacagactgtcctgcctagaggaccgtggtggttcctttgtggctagacttttaggcagttaaaaggctacagcttctagctgtctcggatagtggcccttacctgata

SEQ ID NO: 17828 - DNA, 1214 bp, Mus musculus
ctactcaagattacgtttctataggaagtagtttaggaattctggtagaacactttactagcatgcacaaagccctgactgagtccaatccccagcaccttgtcggggttgggagtatgagcagtatagagactagagaggcccagctctgaagctaggctgtctttgtccatcccttcttttgcaacctttcggctggctcttaacttctgtgccttggcctcacctataaagtagaaatacctatttcacgggatggtggagggctggtgaaatcagctggttcacctgcagcacagagtgcagacccagcccaaagtattttgtcagtgactgttgactgttatgatttattgttgtgattgactcttctctgcccttctccccagataccaatgcaaccagtgctcctaccgctgccatcgagctgatcagctgagcagccacaaactacggcaccagggcaagtccctcatgtgtgaggtgtgtgcctttgcctgcaagcggaagtatgagctacagaagcacatggcttcccagcaccaccctggcacacctgccccactctacccctgccgctattgtagctatcagagccgccacaagcaggccctcctgagccatgagaactgcaagcacacccatctccgtgagtttcactgcgccctctgtgactaccgtacctttagcaataccacactcttcttccacaagcgtaaggtccatggctacatgccaggggaccaggtttggcagttctgcaatgctagccaagagttggagggggctaggcagtgcctggcacctccttcagactcaggaccttcaagccagctgtctgcccagcctgagagagaagaccgtgaacatgaaattgtggctaactccaatatggaccaggccctgccagagacaaatgaggaggccagccccaaaagacaagatggcattgaggctccccaagaggatgatcaggttgacagccccagcctgggggaggtggaagagggtggctgcacactacacttggaggccctgagagtagagctagaacctgagactgagccactaccccttgaggagctcaccgaaacagccactgtggagttcaggcctctggatccctcaggaccattgggaacagaaagaccaggtggactagaagagccagcactgtccagctttgacagtattgagacgcctgccttggttgc

SEQ ID NO: 17829 - DNA, 1241 bp, Mus musculus
taatacagcttgccagcttgacaccatctgggataaaactacccttagactttaaggggatgggattttatccttaggctctttcttccttagttgcattaaaagacaagccatctggctgtagtggtacatgcctttaatcctagatcttgggaagctaaggcagacagatgtctgagggctagaggttgtcctggtctacataatgagtttcagaattgccaaagctgtatagtgagaccccatcaaaaaaaaaaaaaaacaaagagcaaaccagcgggtgtctgggtgtcaggccactgtgttctgtgctcctggctcacgtgattacctggtaggatgcagagaggaaattgcgcagtggttctgtctgacagctgtggaggaaggtgggactatctgtggtattaataaggaatgtatggaatggttttgatgtttcattcatgaaggcttggactagaacttagaaagcatagagatgaatgtgaagtcattagtgaggttgctttttagggcgtattggccttaggttttatttccttagctcctgtgtcctattgctttggtgtatctattgtgttgcattggtagggtaagatgtgggttcctgaaagaggactgaattaaattgttagtcttttgagtgtatccagcattcattcatgcatgtgggaagtcttacaaagtcattggtaaggcgtggttccttcagtgctagtcttctctattgtatgtatacaaggtgattgtccctcatatacagtttccatgtttggacttggtagaggtgcatttttgtcttttctttttgaggacattgatctcaatactgtttttagcattcacagtgttttttcgctcagcctcgtagttttgttgtgttgtacctgtttgtattcttgaaagaacttcctgtgggtcagcatttgtagggaaggagggtaatgtcacatgtcttctttaggttctttgttggtattttcctcctagtagttgtagactagaatcttggttcttggacagtactctgatctgaattctgtctgttgcctggtaaatagacagatgtgagttatttccctgtgggtgtggtcatgtagggagacacctttccctacaactttgaaaactagataatgttttgtgagtttatttagagattgaccatactgaagaaattgctgtgaaacaaggcaggttccctgctccagagagcagccaactagagtctggggcct

SEQ ID NO: 17830 - DNA, 1204 bp, Mus musculus
gtcccttctgcagctaaaccacttcccaggctccttccagattgggaggaaggaccggctgtggcggaacctgtctcgcatgcaaagccgttttggcaagaaggagttcagtttctttcctcagtcctttatcctgccccaggattccaagctcttgcgcaaagcctgggagagcagcagccgccagaagtggattgtgaagccagtaagtgaggcagagggagaagtagatggtgggatgagggtggagagacagcagatctcatctcttgccctttgacttgtagccagcatctgctcgaggcattggcattcaggtcattcacaaatggagtcagctccccaagcgcaggcccctcctggtacagaggtgagcccatagctcacagtcctctctccatcttcctgtcttgttggtctctgagttaccttcttagagtgttgtacctcgtgttctcccagccaaaggccttcctttgttatctgtttagggtcatctggctggcaataaggttagcctttccttttataggtatctacacaagccctacctcattagtggcagcaaatttgatcttcggatctatgtttacgtgacttcttatgatcctctacggatttacctcttttcggatggactcgtccgttttgccagttgcaagtatgtgctggtgatgaggcattcccctgacacgggggattttctgtccttgggaggacactgagcagaaaactaacaagaggtcatggttgcttccgtcagtaaggaggagggtgggaggctgggaaatgaggaaagttttcctgcaggcctgaggttgccaaggagattagttgttgtttttctataactttggcctttcaggaactgaacaggtctgtgcactagtcctttatcgccttcctggggaaacgcttggcctgacgtttctttgttcttaccatcttgttctgccactcttctcactcgcaggtattccccttccatgaagagtcttagcaacaagttcatgcacctgaccaactacagtgtcaataaaaagaacacagaataccaggctaatgctgatgagactgcatgccaagggcacaaatggtactgagagcagtgttcgtcttgaacctgggaaggaagggttttgcctttgggaggtttgcgacagtcgctgagtattagtgcagagtctggaggttatgcaagtgc

SEQ ID NO: 17831 - DNA, 1094 bp, Mus musculus
ttagaagcctgtatacatcatcaggtgtcgtttgtagtcccacgggagtcctggagacgtagagcgccagagcttccttgcctgccccagctgcttgcttcagtgccagtgtctcactgtccgtcacattgcccttctccctattccctggggcacaggacttctatgcgtccgtgctggacgtcttgacaccagatgatgttcgggttttggtggagatggaagatgagttttctcgtcgtggtcaatttgaaagaatttttccttcccgaatctcttctcgatatcttcggttttttgagcagccacgatatttcaacattctcaccacccagtgggaacagaagtaccatggaaacaagctcaaaggtgatatgcctgtcttgcccacaggaggccatagttagtagattaaatcccaatcggtttctctggacaggaggtagggaattgattgttccccattaagtcccggcctctgctcatctcgtccaggagtagatctgcttcggaattggtgctacaaaggcttccacacggggattgtctctgactcagccccactggtaagtgatgccacgcaggaacacagctttttctcagctcctgagtgtgttatggttggcctatgggttaccctcctttcctctctcccagtcccacctctttggctcgctttcaaggatacagttactcacagaatgtcctaggtgcctatctttgaaggatcaaaaagtgatgagtagccttaactttctggttctttgggaatgagccaagagttgctcatgactccatgatgtggtgtagggcaggtgagaaccctgtgtgtaaaggtgagagcggcagagctgagcacgagtcccaagaccctgagtgttccttcctgaactcagcctgctcccttaaacttactgcttcctttgttatagtggtctctgccaacatcgctcatgactacctcaaagggtgatgggacaccaaattccgccagcaagtcacggtgagtactagttcagcaagagaaggtttatggagttggggagtctctttcctctttccccagatcatgacagtaagaggaactctccacc

SEQ ID NO: 17832 - DNA, 2952 bp, Mus musculus
ttgaccagttggcatggagccctggaaagatgacctaactgggttcaaggtcacagaatgggtgaacatgacagtcagtcctaatgctgtgttgacagttgtgaagaaagctggatagcaaagtcctaagccgtgcttcctgcttaatgataaaggcttcaaagtcagacagtggagagtccaagctgtactggaaaatctgttctgatatcaacagccaacaccctcttgtcctggttacagtatcctagtgcacatgtgacaaagaggcctgttttagctgattcactccttcaaagtagactcttaattcctcagcctgcctctgagagtctcccatcatagtttccaactctgtagctgcagaaacaggccaacactgaccagcccactagttgcctggagtccaccagacttggggaccccttgatgagacacagcagtatactggcagttctgttttgtgttctggggtgatccagccttgcctgggacttgtaatctttgcctcaaaaatgccagattgtctgggtgtgttgcgcccagctaaatacacagtattcagtcttcgttacatttgaaggctggtgaatctgtttgctagttggagaaaaagatagggcttgtatatcacatttcattttcaagagtgtaatcttaagttatttcacatgcatgttttagcactggctagtcaacaatagatagcattcggctgaatgaggacttttaaagtaaaagcttttgaaagttttaaatttgtaagtgtacttgaatacaatttatcagtacatcagatgtttttccaagttggtaagttacccagcctctggaggaaggctcctgagacaaggaataaagtcgtcttttcctttataatggaacgtgagacctaccctgcagggttgtttagtaagctaagccaaagtattggggattgcagtttccgtttgttggtttattgtccaaacattgttctgtgaaagaaatgtaaaaaaatctttccttgaaactgagtatgatagctcatacccttaatcctagcactctgggaaggcaggagtgggttgataaaacctctcctttaaagaaaagaacagctacagaagtctcagaagaggccagagcagtgtctatacctatcacccttcactcagagcttgccgaagcacaattttcataattccctctaatctttatcgttccagcgggagtctcttgtctggcttcatctttatagcatcccaggaaagggaacattaaacataaatgtgtgtgaagtgatagtttggttctcccaagagccttgattggcaaagaataacaagagtgtctaggacagaaactcacagaatacagaccatgaggactgctgtgtggacctagcaactaccaggggattgtgtcatttctggcccatcgtcagggtggcagctcttttgctgaaagcgaccatagccaaagaactttcttgggctaatccacacagtgatttccacttctcctgggatacgacaatggttaaggctgctagggaacttgccctgttggcttcttgttagctctgaagaacccctccgattactgctccaacaaatgtctagtttgctctgggcctggaaacaatggtttctagagagctgcatcttatcgtttggaattttggttcaagcctcttcagcatgcttagccttgaacattaatctgtagtccctggggaccagcgtgtattcaccagcttcaggtcagtgggagcagcaagcagtcagtagaatttcctatgtgagtgaatgatcacagcagcatcggcaggcatgtgacattctcagacctgtttctgcttttgtcattagaatggactaagatttggtacatcagggattaccacagaagtcaacaaatttcagtttagtaaccagggatatcagtttcttagctgtagtaacggggattaaattgtgtttaaaaagtgcctcataactcagataattcctaaaatatcaaatgattcccccaaaaccatttcctcagagcagcaggagtgcggcgccaggaattgcagtactcttagcttagcagttctgtggcggagctgtcacagctcagctagtgtgctcaggcctgtggtcaccgtttgataggatcaggcttgttttgttagtgttcctaaactgtgcaactatttgcatagcatttccgatgtgttgggtatagagttaatctagactccatttgaagtccacaggaggatgtgtgcaggttaaacttgagcagcaaatgcagctccatgttgcctaagggattgaacccctgtgtgctttggtatctgagaagttgtagaagcagtccccacagaggctgcagaactgctgtggtcctgtctgtgggagattattagagctgaagatttgatcaagataattaccttaagagtttagacccctctctgcttcccgagaggcacaagtaaaacttaacactaagtggtccagctggaatgccagtgtctggaaatggagagccattggtagggatgcgtgtattgctggcaaggtgcacaggtccactgatggtttggtagtttctttaaaagtagaacagcccatgtggacagcagtcaatgaaagaacaaattatttagtagatactgtctaaacatctgcaaggaaaaaccaatgccacatctgggatgatctctacagtattgtgctgagtgaaagaagccagaagcaagcctatatgcagattccagtctagaaaatgaaacaaagcttacaaaacacagggattccttggggactacatctggaggggacatgggattgactgtaaagaggcacatgggaatattctttgtcttaattgtggttgtggtaacaactgtatatagttggccgacctcaaaattgtcctgttgaaatgagtattatacataaattttataaataaagt

SEQ ID NO: 17833 - DNA, 1180 bp, Mus musculus
ttcgaaatgcccgtaagccacttcaacgtccccagatcccaaactctgcggttgcaatactagactatctacattttactaattgcatacaactatgaccgtttaagagcgcggctaaggctccttccatggccacttaaggggcctgggtgaaggagagtccagaaagccagtcacctgcaaccctgcaggggctccgcgggagctccgtaggcagacgcccaaccccacgcccgggcctccgcaggcccagctcccctccagcagccgagccagacttccgcggaccagcgaagaacacggctagccagcttaaaaggcaccgactccggggagctggagctcgcctctcacttccgcactgggaaccggagatctcgcgagatctcgctacagctagcgttctagccccggcggggtcaacccgggtcagcaccccggcctccccctccatcactgcccactgcttgttctgtttcctgggctcccagtttttccaaggaccggtttgcattagcacgaacaagggtactaaagcctttggttctttacatgctgtagctagtcgcattggtggttcagtggtagaattctcgcctgccacgcgggaggcccgggtttgattcccggccaatgcattgcttacttttcttaaatggctgtctcaaatcagaaaacagcgctaaagattcggaccaggaggcggtgacacccttgcaccgctttgggtgcatcacataggtctctatccgtgtgatctagtcctcatagtaacttctacagagatgcatgctttttcctcccctactcttcttatggaactgggtaaatcatggctccaggagcagccgtcgatcgctgacaacagttaaaacgtggtcctacctcagctctaagacctcctttctgtagtacagcaattgtcaacagatctctccacctcttggcttcccagggaatgccgttgcctagatttagatccaccacagcctcaaaggaacatgaaaatccatatattttttttaaagatttgtttatttatgtaaaagtacactgtagctgtcttcagacacaccagaagagggcatcagatctcactacagatggtcgtgagccaccatgtggttgctgggaattgaactcaggaccttcggaagagcagttggtgctcttaactact

SEQ ID NO: 17834 - DNA, 1125 bp, Mus musculus
ctatctatctacaggtcatctttggtctgaagttctgttcatagcctcatttcctatcagagtccatcttacttcaaacactttacccttgccttaggccctggatttgctgtgttcctggtaaccacagggcctttgcatctgctgtttacctagaacactctgactcctgccttctatccaactagctgcccctctctccatctcttacatctcgtctcacttcttcaagagtatttctcctagtcgggtgtggtgattcacccctgtaattacaacacttgctaggtacaggcaggaggacctggagtttaaagccatccttgactacattgcaagttcaagaccgaccaaggctatgtgagatcctgtctcaaaataaagggggaggaggaataagagctgggagaagtctatggatagaacatgaccactgcactcatgaactctcagcagctgtggccacatgcacaggacccatacaaggtcaaggcaatcaccactccagcactgaagcatgagtggagtaaaggctcgtgaggcttcacccctagctgaggagctatgctaggtgatggctgctagggaaggacagccattttccttcagagaaggtgcttcccgtgttcttcattccccaccccatgcacatgtgggcagcactgattggactccgtgaataatttttttaaaggccatgaaaagggagtgggaagctgggcgtggtggcgcacgcctttgatcccagcactcgggaggcagaggcaggcagatttctgagttcgaggccagcctggtctacaaagtgagttccaggacagtcagggctacatagagaaaccctgtcttgaacaaaaccaaaaaccaaaaacaaacaaacaaacaaacaaaaaaaaacaaaaaacaaaaaaaagaaaaggaagtggggatgtgctggtggggagtgggaggaggagcaagatgcattgtatatgtgtatgggacatatcaaaaaacaaaattactcttaaaaagagcacttctaaaaataaatcatctaaattttaaaaaataaaaccaattctttcaacctctctaatagtatcattattgctcattattttctctcaccataaagcctagttg

SEQ ID NO: 17835 - DNA, 1157 bp, Mus musculus
tagtggatgtgatgaaggctaggggcatccttccgtagcctgcagttgcttccctgcctcatcccttgtcattctactgtgtcctaagccctggtggtcgaccttttctttttcttcctatcctcagggacctgtgctgctccaccctcgtgtcccacttggttgtttagttgaggcactttataattttctctactgtcccacactcccgttggctttatttccctgctgtctcctgtcctttgcagcgtgacccccactctttgccaactcctccttcccacaggcactggccaagctttagggcaggttctcttctgagggaactgggtggtgtcaggccagcagtgctgtgcttgggtcactgtcgccttgaacctacactgtacccttgtccagctcagcactcatgatgcaggacagcagggtcccctagcactttgccagcactgaggatggcatgttctcttctcttttggaggcgagggacttcccttctgtattaggggagaagaacagaacctactcgtctggaccacagttgagactccctgctagggtgtaaagtggatagtaagatctgtgtaggtgttaactggaaaaataaactgttgattggctagaactgctgcctgtctgcctgcttgtctccctgtgagccacctcccatactgcactctgtcccctcctcacccagcactgcctctcttggctattttccttgtaaacagccagaggcagggattatcctgacaaccctacctgcttctcggtcatacaaagtgagatttagcatgtgtgaatacattacatgcaggaggaaattgccctgtcttcccagtcagtgggacatggagtcatgataaccgtgcctttaatactgtttctgtaagtcatgtatctacatgctcacaactcaatcttaattgtctgtagtaggacaactaaccagcagtggttatataagttggttaaatatttatataaactggttaaaggccaagagactagtatccaagattttttaaaagtatatgttcttggcactgttcttatttatttatttatttatttatttatttatttatttatttatttcagagacaggatctctccgtgtagttctgactggcctgaaacacagatctgcctgcctc

SEQ ID NO: 17836 - DNA, 1176 bp, Mus musculus
gccataccaatggcagtaattctgataaataccatgttgactatagaaagtaaagatggaggtcacactctaaagtactcagtaccatgataagctcttcctttccagttctcaggaggaagacgacttggcgttagcacaggcactgtcagccagtgaggcagaataccaacagcagcaggtaagaggactgtgtgggctgggtcctgtgttggtcctgcccagctgtgggtagtattgctgtggggtggggatcgtccctttgcttccttccagtgactccagctcaccctgagccctgaaaggaagcctgtcccctctggtctttgacatcacaccatctcctccttctcctctccttgctccaggcgcagagtcgtagcttgaagccgtccaactgcagcctgtgctagggccctgggcttggggagagaggctcacccaaggactgtgaccctcacatctccagggtccacagggaaaggaagcacagagaagcctggacagcagtgccaagcaggagtgacgtggaggacgctccatggagcccggagaggaaggacactcatgcagctaagctagctctgctgctgcagaagagggtggccgggaagtgctctctggttggggccttggtaggtgctaaccagactcaatccctacagcctttttcatcatgttactcccttttccctggggctgccacatgtagcagacagggagagggccgggaagagtaaagactggcaatcagtaagatgtatgagtgctgtttctttttcgggaatgttcattcagctcaaggggagagaccccttgcagtaccccacacaaccaaaccacagccgtccttgcgcaggccatttatttcctcacgatgctttctggaaggtcccttttccttacaatagctagcaccaaactcctacaccaggatgaaatgaaggcaagagaggggacatatctttttctcctgagttcgcctttggaaggaaagaggtcccttttattactatgccgtgtcctgaggtttagattcttcagggacagtttcttgtccttgctgctgcagctgccacatctcggcataaacgccacctcgggacagcagggcttcgtgcctgggatgataaagcaaggttaagtcccactcattggtttcacttcaatctcaag

SEQ ID NO: 17837 - DNA, 1183 bp, Mus musculus
tttcctttcctccacaggtataggcaaggcggtagctggttcccatgctccaggatggaggtggcagctgccctgccatcccttctgtctgccatgagagggactctctgagtgtcgcctggccccacgtgtggtgttttgtgtgttcctgcctggccaagggaggtgccaatgctgggcttaccatagtccaggaagaatatgaggactaggggcacacaagagtctagcttcgtctccaggactcccttggctcagagtgtggtgctagaaactggtccccagcccagtcccagtactgccatctttgcatccacccctgcaagtctccagagggcttcctgccacagaagtgctgccaagcagaagaacctgtgccaactgtggagtggggaggcagggcctgaaccctcaatccctgcagcctagcctccccaccctccagaacctggaatagctgagcagctcaggctgtggcccttacctccagtcctcacctcaacctgcgctgcagcctccctcccccctgcacatcactggcatgtgtgctgcttgaccacccccccttctgttcacctgccccccttctgtttggctttggctttttgttggggtgagagccctagctcccagctcccctcactatcttttgacactaagatggaaggttactaagttgcaggaacaggatgaaaattctttattaccctcttcaacttttaggacgagcacttgggagtgtgaggccttcctggctgcttctatgtagtcctaccacctgcacagaggggctggcagggcagaagtgtgacctcagttatatatacatcccagctctgcccagtatccctcacttaccaagaggagaatggagggataatggactcaccctagcctagggcttcgacattgcatgctgggatccagctcctacccttcctgcactcccttccccagttctgctcagctcagctgtgggaggtaaacttaagctgaaggtggcggactctactgtcgcaggccacagcagacagggtgggagccctgtacagcttgataacccttaataaagaagggactttgatctggttgtggcatctttttttttcccccacgcagcagtttgggggggggggggggggtcttaggactgtaaaagagtcctggccgggaggcttgggaa

SEQ ID NO: 17838 - DNA, 1159 bp, Mus musculus
gatttggccaatttggaatcttagcagttctaggtggccttcagtcctctgccttccccctcccacaggcattcttcagcattgcgacagctattgtcttctatgatgactgtggacccccagcagaggcctcacatccctgtcctcctcagtcagttggaggcattgcagccaccagctcctggccagcacaccacccaaatctgatcaaatcagtggacatattgggaagatgaccttgaagtggctttcatccctcattggaactccttccattcttccaggatggctctcacagctagtggcaaggatagtgggtccttgtatattctgccttcttaccccaatacctgggcaaggaacctagggtgagttgggggaaaatgaaacagaaaatatggctcaaagctaggctgctgggtgcacatctcattctgtctccagatctgggagcaggagaatacataaaaaggagaataaagtaaaaacagaccgtgtatattttaggtcaatgtgtctggagggaaagaatgaactctctgcttgctatttccaagggaagctcctggcaagaagtactggtatgatgtcttgaggtagatctacttcttgagttctggcagcaggcaggtcttttaagctggcttagtcaaaaccagagagcttcaagcttgagctggtttctgtctgtgccaagaagtgggaccagggtctccttgaaagcacactcaaccagttctgtcattcattcccagggtgggtagcttagaacagcccagctccgcaggtttgccaagtccatgtgacctctgggtggaagcacaccgggtcttttcccttcttcagcagaggacaaagggagtggagctggcagccatttttttccagtttccctgactattctagctcacacatggttaataattgatgaggctggtggcctgtggcagtacccagcagccacttcctgccctatttgctgagtaaacaggcacctgccttagttgggtttcaaactttcctcagggaagggcactgcttccctgagtcaccagggaggggagacaagggcagggatggtgctcctgttctggagattccacccctacatgctgacgtcaacatgagtcctagggtgcctattagtgaagtataattt

SEQ ID NO: 17839 - DNA, 3315 bp, Mus musculus
ggttgagacacctctttgcccacaggaaagaaggggagagggttgtgagaattttcaaggcaaagattaaccagggaggaagctgctggctataaactataaaacatatttctagacgctgcacgatctggaagcaactggaaagtcttctgtctctcggtgtctatccctctctgtgtctttctctccctgcacccttattataattgctgaagccctgcctgtcaggtgtgcatgtcctctctgtcctgtgtatcctgtggatgtaacaggattatacagctctcacttggtaaattctctactgagaagtaggctaaggggttggtctgccctgctggctacctccagtctggggagccctgtgctgaggagactggagaggctgccagctgcttctgaccaccatgagtcccaaccttaccatacttttaccaactgagtaatctcagccaataggcaaaagggtgagaaagaaccgaatgaagtgggtagttgtgggtaaggacttatgctgtgaccttctctgtatccctcagcgcgagtgcatttcagtccatgtggggcaggcaggtgtccagatgggcaatgcctgctgggagctctactgtctggaacatgggattcagcctgatgggcagatgcccagcgataagaccattggtggaggggacgactccttcaccaccttcttctgtgaaactggagctggaaaacatgtgcctcgggcagtctttgtggacctggagcctactgtaatcggtgagcaagggggggaggggtccccttttgaggaaagtggagtgtctcttgaagaatgtcttggctgggtttttgtgatctttgaagcctcttggtttatttgaagctgaagatggatgctggcagaaggatgagctagctcttttatctatctggcttcagctgccactcagtgggtggggagggggaaggagcagagtcaggtggtttttgcaatgtgatatatggtttttcagatgagatccgaaatggcccataccgtcagctcttccacccagagcagcttatcactgggaaagaagatgcagccaacaactatgcccgtggtcattacaccattggcaaggagatcatcgacccagtgctggaccggatccgcaagctggtgagactacatacagcctggcagggaggagggagctttggactctgtgctcaggaaaagtatttttttcggatccatttctaggatgatcactagttgtgtctcagaaattgatgctgttaggggatattcagactttgtcctaacatctgagatactttagaccttacaaaactagaaaattcctcaggcctttcccctacctatattgctctttcttccttgcctttcagtctgatcagtgcacaggacttcagggcttcctagtattccacagctttggagggggcaccggctctggcttcacctctctgctgatggagcggctttctgttgactatggcaaaaagtccaagctggaattctccatctacccagccccccaagtgtccacggctgtagtggagccctacaactccatcctgaccacccataccaccctggaacactcagactgtgccttcatggtggacaacgaagccatttatgatatctgccgccgtaacctagatattgagcgtccaacctataccaacctcaaccgcctcatcagccaaattgtctcctccatcacagcttccttgcgctttgatggggccctcaatgtggacctgacagagttccagaccaacctggtgccctaccctcgcatccacttccccttggctacctatgcaccagtcatttctgcagagaaggcctaccatgagcagctgtcagtggcagagatcaccaatgcctgttttgagcctgccaaccagatggtgaaatgtgaccctcggcacggcaagtacatggcctgctgcctgctgtaccgtggagatgtggtgcccaaagatgtgaatgctgccatagctgccatcaagacgaagcgcagcatccagtttgtggactggtgccccacaggcttcaaggttggcatcaactaccaaccacccactgtggtgcctgggggtgacctggccaaggtgcagcgtgctgtgtgcatgctgagcaacacaaccgccattgctgaagcctgggcccgtctggaccacaagtttgacttgatgtatgccaagagggcttttgtacactggtatgtgggtgagggaatggaggagggggagttctctgaggctcgagaggatatggctgccctggaaaaagattatgaggaagtaggcatcgactcctatgaggacgaggatgagggagaagagtagaccgctacttggagcctgttcactgtgtttattgcaaaatcctttcgaaataaacagtctccttgcatggtttcttgtcccctttgtaactgcttgagcctctgcttgtccccctttctgctttggctgctacctcccgctattggccgcttgtgaccttttaattttaccttcacatggctgacagtgagacttgccaagggggccccatattgagccccagaaagcaggaacccaaggacttcaatgtaaggtcctaaggactcgcagaataggaaagaaacaaggaccaaaccctggacctgtctgtctagctacaagctattgcaagatacaagtcttcactttctgaaatatctgatagtctgtgttggatgattggactactttattcttcttgctgctgcttcactcaacagctctagaaggcttggcccaggcgtcattgaacactgaggatttgggaatgggggctgggcgggcccaaagttcccgggcatacagccacctcacaaacttgggggatgggcaggaacaagggcaatctagttgtttgtgccacagcacctctggcagctttgcatagcttgctgtctatcttgctttctggggctggagccatgctattaaaagtcaggtcgtctcccctctgtttgtgctttcttttggcttcagcctctgctcggggtggaagcctcctgcctggaccctagggataaattatacttcactaataggcaccctaggactcatgttgacgtcagcatgtaggggtggaatctccagaacaggagcaccatccctgcccttgtctcccctccctggtgactcagggaagcagtgcccttccctgaggaaagtttgaaacccaactaaggcaggtgcctgtttactcagcaaatagggcaggaagtggctgctgggtactgccacaggccaccagcctcatcaattattaaccat

SEQ ID NO: 17840 - DNA, 2243 bp, Mus musculus
gagtatcactgcctgcccacagagtctctagttgtatactggctctgtgaccccgtactttgctcatggcccctttttcccctgcccagtgggagatccagaataccagccgactggctgctgatggggagagagcctctgcctggccagtgggcatcccagcaccgtctcgccctgcctcacgctttgaggttctgcgctgggactacttcacagaacaatacgcgttctcctgcgccgatggctctccccgctgcccgttgcgtggggccgaccaggctgatgtggctgacgtcctggggacagccttagaggagctcaaccgccgttaccagccagcgctgcagctccagaagcaacagctggtgaacggctaccggcgttttgatccagcccgaggcatggagtacacactagacctgcagctggaagcgctgacaccccagggtggccgctggcccctcacccgcagggtgcagctccttcggcccttgagccgagtggagatcttgcctgtaccctatgtcaccgaggcttctcggctcactgtgctactgccgctggctgcagcggaacgagacctggcttctggcttcttagaagcctttgccactgcagccctggaacctggtgatgcagcagccttgaccctgctgctgctgtatgagccacgccaggcccagcgggcagcccactcagacgtcttcgcacctgtcaaggcccacgtggcagagctagagcggcgtttccctggtgcccgggtgccctggctcagtgtgcagacagcagcgccctctccactgcgtctcatggatctgctgtccaagaagcacccactagacactctgttcctgctggccgggccagacacggtactcacacctgatttcctgaaccgctgccgcatgcatgccatctctggctggcaggccttcttccccatgcacttccaggccttccaccctgctgtggctccacctcagggccctgggccaccagagctgggccgtgacaccggtcactttgatcgccaggctgccagtgaggcatgcttctacaactccgactatgtggcggcccgtggccggctggtggcggcctcggagcaggaggaggagctgctggagagcctggatgtgtacgagttgtttctgcgcttctccaacttgcacgtgctgagagcagtagagccagccttgctgcagcgctaccgggcccagccgtgcagtgcacggctcagtgaagacctttaccaccgctgtcgccagagcgtacttgagggccttggctcccgcacccagcttgccatgctgctctttgagcaggaacaggggaacagcacctaagcccctgcacctgtccctgctcttccccaggaacctggagccacgtgccagcctcgctggacagggctggctgtagcctcagtccctagggcagcccactggtcccttgtctcttgctttgttggacccatgggctcaggacaagccctgagacagatgccctagagccatcctttcttgtccagtccccctgcccccttgacgctgctgattcaggctgtggcctctgtttatgcctgacgccagccttgcctcctgggctcctgtcctgggagctgggctgtagatggattgttggaggaggtgaagctgagaaaggaggggtacgttatctactgccttctcccttctggatccacgataaagctctggctttaataaactggttaagtgtagaataatgagtggaaactggtaatttagtgttggcaaggtaggcatgggaggaccgacccctaaggatggaggaaccctgggtctggagccttcttttcctgttacagggatcaagtcagatagatgcccagcctccagcaagttcatgtggatgctctccctctccctctctctgtccctctccctctccccccacctctctctcacacacacacagagaaacagacacagaattctttgtgcctctttattcccaatttcaccagcactttataaaaccaatctctagggagcaaggcctgagaaggccgctccccctccccctccccctatgctcagccaaggtctgaaaggtctttccacccactccccatgaagggaacttgtggtggggctggtacagggggaactgggagctgggccaggcctgctgggccgcccactccccctgccaagagggagctgggcctggaaagagggaaagagaaccagcccagcatg

SEQ ID NO: 17841 - DNA, 1187 bp, Mus musculus
cctgtgtgaaatccatgatgagtcggcttccttcaccatcaccgtcacaggtgtgggcctatcccagcccccagagtcaccagaggacaaccctgagcctcaggaatgttgagtgaatatttctccacatgcaagcttgttgtgtctgggagggagagtgtgggttgagggtgcatgcaccagggtccctgctggaaagagcctggaatcccaatcagaaacagcaagcccttctctggtgtcaacaaggccaggtctagctgtggtccaccagctcactgactgaatgccatccaggctgggtgcctggctggtggtcagttagctgccagactagctgggaaggcagttgctatccaggggtcacaaatggggagacccccttggactctgactctatgcagcccacagatgtgttttgtttggcctgcagagtcataccaaagtcaggacagtccaaataacaacccggagttttacgtcctcttgaaaaagccgaagacccggcggttctggtctcatttccccccatggcgacgaacggctggcactgagtagcagctgccccatagtatggggcccccatttctctgtcccaccctccctgccatttctcctgcctctccccagactccctgagccattaacttaacctatctggccctcacatttgcaacccctgtgttaaaccaataaacgcaccaataaacattccaagaaacctcatggtaaataagttcaattagggtccagggctccacagaacagccaggcagggagggcctgggcggaggtctcacagggtcactgtagtatgggctgggctccatgcattcgacagcatatgaacacacatgtatttcctcctcaaagaacacagcctagtaagaaagccagacacatgtcagggcataggctgtcaaggacagcataggaaaccctgggctcgtggctgctaacctggtcagggtaatgaggatgtttacctacttgtaatggagttaggctgagttaaggggtgggctgagaatagtccgggtaccggggagtcaaggacagctagaaatatggtggtgatttgtgccggccacctcaggactacagcccacggcaccattcccagggtgcatggtcgtaggggcatttagtcagttctggacatcacagaagaaccccagtggcagcac

SEQ ID NO: 17842 - DNA, 1111 bp, Mus musculus
ctgggcttgcgtggtctctttatggcactgtgggtaactcggtagactagcaacagcaaggccttgtccttgttaggacttggcatttttttggtaagttaggtaagtggccatggatggccaggctggcttttgtagatctccatctctatccaaaccagagccgagtccgtgtgaggcgggctagcatctctgagcccagtgacacagacccagagctccgaactctggacccctccccagctggtaagttgaccctccctgctcactcccttcccacctccttccagacctctctaatctcgatgttgccttacattttggcatcggaggagaaacttgattttggggtggtgtggattattgcggagggcccctcagtctgttgtctttttagtttagcccaaagagagatctgcttccaggcagcgttctcctaaggaacatggattttaaagggtgctaaagattctgtaataaagagatttatggccacagccatttggggagcacgggctgcagcaatgtgaagcaggtttcttcctacagctcgtcttagacctgagatgtgtggccgtggttgggaagcgccacacatttagttttgtgtgtggtccagactggcttgtgggcacagtattccataggacgctcctgaggacattctgcggaggggaggcctattgaagaggagccagagaaagaggctggggtcagccagggtctgggtgtggcctcagctctacatcctcctccatctcagggtggtttgtgcaacaacaccgggaactggagctgctggccagcttccgggagcggtttggctgtgactggctgcagtacaggagccacctggagaccatggggagctcccctcttagcaccaccaagactcctgcccttagcacccctcctctggatgtccagaacctggagactgtatgcagccctccagccatagaggacgacactaaggaatcgccagagaaggtgtcagaggaaggcagggtggagccagagccccaggaagaagagagggaagaacaggataaagaagagggatcgagagaggacctggaggaggaggaggagcaggagcagaaggcagtgg

SEQ ID NO: 17843 - DNA, 1145 bp, Mus musculus
gggtgattggctagatatgttccactcatcctgtcaagaggccccgggccattgcttggctggtgtgctggctcccttagtatagcactgcagggcttttggctgttagtggtccctggagtttgtggaaatacagtgctgatctgtggccaactctttttttttttttttaaatgtctcaaaatgtttaataaatatttcctctcagtagcaatgttacatgagttttatatagatatagacagccttacttacaatgctttgtgttttttttttctttttctttttttttttaattaggtattttcctcatttacattttcaatgctatcccaaaggtcccccatacccacacccctgtggccaactcttaagtgtggctcacacctcttctccaggacagcactgggacactagtcctggggatctaggtccagcatagcctttcactgtaggcatcatcttgtctctctctctctgcaggctcctctacctgtcctgtgtccctgttgctgacgttgtccaccctgtacctattagatgaagaccctggagggtcccatgcagagtctcctctcccagtggtgtctgatgaaacctcagagcagcctgcttctctggggccaggtccttccctgcaggtcagggagcagcaaccactcagctgtctgagttctgtgcagctgtatcgcacaagccctttggacctgcggctgatcttctatgatgaggtgtgtgtgtgtgtgtgtgtgtgtgtgtgtgtgtgtacacagtgtacagtgcatctccgaaggatggggatagattgggatggtgctaaggaaggcgcaggtgtatagtggggacagagtcctgatgtgaggacgtgggtttggataagcagcaggtgtagaaagcagcagtcaactgtggcagtgtcctggccttggagcccggtactgaaatacctagctggtgtgagttggtgtgatcagcctacccacactgtatgccaactggttgaccttcacaactccaacatgaggaggaggtgctgttgttgatcctgtcttacagatgatggaactaaggctcagagacatgaaacttgtgcaggtcacaagagtagagtcaggagttgaacctgcacagttcttggaattgac

SEQ ID NO: 17844 - DNA, 1148 bp, Mus musculus
atggtaagtaccacatatgcatatgctgtcccttttattacttttttccttttcttttgttaggctaccaaaacaataacagtaataacacccaatagtacaaaaatatttttgaggtactaaatactgtgctaggtttatatattctatcatttggtcctgaaatccctggaatgtggctaccacagtgtttcctattttatagctgtggatatttaattccagtagtttaatgtgcacatctaaagttctaactattaaggagcacagccaagattagaagtacctgtgcagcctgacactctgtctgccatcatagtaattctccttacactgttctatggtctttaaaacattgtttacaatcataccatttatcctccaccacaacaaggtagaagatatcttcatttttaagaatgcaattgagtcattgatctagttgagacttttattatacacatgcatcttacgttctggtctatcctctttctatgatacagcttattttttctcttctctctctctctctctctctctctctctctctctctctctctctcttattttaactcctctgaattttctcctccctacctctctatccctaaatctggatttgtagcatgtgaacaaaacagtaaataatttattgggataaaacaaaacaaaacaaaacaaaacaaaaattcaaagtaaagaatgcatttttgtaccttactatcttagtcccaaataaatgaatgcaaatgctattgaacataaatttaataacctttatttattacctctatgtgttaaatgtgcttgaggcaattaaaatatgtatcacacacagagagacacagacagagacaaggagacatagagcgagagtgtaatcaagaacgagagagagagagagagagagagagagagagagagagagaacaggagcaaaaaggatgtagactgtacaaacctcatcaggtaagccacttctcttctggtgtttgtttgttttccaaaacatctcctttatctcctgcagtggtctgaatatgcttggcccatgggaagtggcactattaggaggtgtggccttgctgaagtaggtgtggcttgctggtggaagttcattgttgtagctgtgggctttgagagtctat

SEQ ID NO: 17845 - DNA, 2470 bp, Mus musculus
tccatatttcattcctgtacggccccgctgcatccgtgtggcagcaagtgaccatatgttacaggttttactatggacgccaggtcaggcgccaccacgcagaacaaagccagttccgcaagctgcctccgatacgcaatgctaaagtgacattttacccagggtgtgccattgcagtgatataaatatatttttttcctagactaaaatatgacctgaatatctcttttgatgtgtgtacatagagtgtgtgtgtgtgtgtgtgtgtgtgtgtgtatgtgagtgtgtatggggtgtgtgtgtgtgtgtgtgtgtgtgtgtgtaacctcatgcttagaactgcctgtgaatgttgtggaatgctatacctggagagttctggtttattaccagttcaaagataaggaaagagtcacatgatatacaagacccggagaccatgtccgtccccttgggaagacagcttggaaacgctacatgttctttatctgtaagtgtaatgtgtctgtcacattcatcctaagaagcagttctttggacagatgttttcaccttgatggtggaatgatttttagatataagcctgactcgccgatttcacaatggagagagaaggggatggaatccaatttgtgaccccagatggagtataagtcgcctttgtttccctgcataaatgaacttgttgaatgcgaacaaatatatgcaattcatatacttttggaagatgaacttaagatatgtgtgtcagccttgagatgatgtgtctggagtaatactttgtgtcccagtgtcacagaaaaatacatacatgccagtggctcttgaggttaatgtagttgggatgaaatggcctctagcaattccaggttccccaattacatgtggaaagttctggtaattaatatgcagctaactacttatgcccttgaaagtataccagtcttctagaatcggagttctggtgtatgaagattcagtatcgacaggatatgtataccaaactccagccagcatactgccattttacttaacctgagaggctgccttgcttattctgagctatggtcacagaaactgtggccatttatataagctataacatcaaatcagggaattagaaaaaaaaaaaacggggaaaagattctgaaccatatattgttgaataagtaaagaaaatcaccaataaatatttattgcattctgacagggtgtatggcattgtattctcataactatgccagagtgacaaagttatttcaccccttttgaggggaccttaatatatttttaaagggatgtgcctatgcattgatgcctgaaaaataggtgtaaaaaaaaaaaaaaagatgaacctctgagtgcatcatctttcccagaggtcaggtgggaggaggtcaacttctgggtctgtgtccagcccaggagcaagcgctggccttgggagctggaaggctaaaatctagtcaaatctactaaacagctttgagctgttccctgcaccaaatcaagccgtttcaccacgtgtctgcaggctctgaggtttttattttttggcgatcttctaaatgaaatgttctggtgtgttttaaagactagaggaaaggttgtgttcacaacatgattactgtgtgtgttctgagacctcttgtattcatctgtgaaggggacgtgtattaatccatacactcctatagcctcgactatttgtctgaagacacttaaattttgaccagtaaaggaaagttctagaagcaatattttcactcctttagcattgtccaaataacatcaagtattaataaacgctgaagagtgtatttattttgtattactccaagtctgttggaatatgcaaggactgtggttataattagaatgtataaggcatattataatttagttcattctgaaaaagaagttagctgaacatctcttggttcatacatgttccaaattttgaacaatcttttgagttagccatagatttttctattttgtttttatttgtcaaggtatttttttcttcccttcatgaactttaggtacacataacttatgtcatttatttatggtcttttatacctagtttgtaaagttgtaaaatagcaaactaaatgcaaagagtttgcatttgaaagtaataaagtagttgccgtatacaaacctgaaatctggttgtctttgttctgtttcattttcttcagtgttggggacaccttttggacaaatgtttcaccaaagagctaagcccagcctcttgttccatcaagacaagctcttggtaggttgctgagcatggcctgatactcgtgttaacgcccattcctaccgtgaactgcaaatcatttggcttctgcctcactagtagctgggattataagcttataccactcttctttggttggctatggttatatcttttcaatatgttcaatttatatgctattgctatataatttgtcatttg

SEQ ID NO: 17846 - DNA, 1462 bp, Mus musculus
ctgcagcgacctggcgagaattggcatcaccgccatcacgcaccagaataagattttgagcagcgtccaggcgatgcgaacccagatgcagcagatgcatggcaggatggttcctgtctgagccagtaccgaatagactcaaaactctcgaatagtttacctcatccatgcactttaattgaagaactgcactttttttactttgtcttcgccctctgaaattaaaggaaaacaaacaaacaaaaaacaaaaacaaaaatatctgcagcgttgcttggtgtaagagattgctgaaaccatggggcttataatgaatgaccttgatcatcagaattaaacctggagccagtaatttctcagaagaactctgtccatcgctggtgtgtaaaatacatgtacttatataaataaaactctgcctctgagtttcgatgctgtatttcccgtcagaggcttttcaagtcaccctaatcctttctctgtctggaatttcaagggaaggatttcatctgtggcattaataacagtcatcactccttaccagaaagaagacctgctgtgcccaggagcactgttaaaggactcaatggtggctttcagggctcggtttataccacagaagaaaatccaggtgaaagccacttggcccattcatgctgcctcttcaatggccaggacacctggtggatttttatgacatagggggggttagaaagaaaagaaaatggatttttaaaacatgcgaactcccaagacctattaaccctaactggacaaatgaggtctctttggggctgaggctgtgccatataaagtcttctttgagaatgctacaaacttctcataactaccttatggatagtgggctgagacaatcctgaatggagaattttcacacacacacacacacaccccttcaaagaggcaactcccaaatttacaaggtaagttgaaagaatgagcaatgactttctggcaaatctctctctctctctctttctctctctcactctctctgtctctctctctctctctatctgtctctctcttagcttgtttcctattgaaacactcatgtcaggtgccaggttgtgtgagattccaattctctttgcatagtagaagacaccaagactaatatggctcccctgttattcttcaagaaggatcattccttgaagtgaggtcaaggtcatgtggccggatcctatactcaccactggctgtctttctctcaagaagggtccctttgccctttaatgccattcactgaggccaggcctgttggttaatacctggatctcagatgtagtgttaggagcctaagtactgaactgtgctctctatcttttgggggagtcccttaaataaggaaccgtttataactctcttatcctggtaacccctagaccagaccagtttagccctggaggatttatcgagtcaatggtgtgactggaaa

SEQ ID NO: 17847 - DNA, 1224 bp, Mus musculus
ggtaaataagtgaatgcactttcattttgttacattttatctcttgggcatgcgcatgtgtgtagaggtcagaggacaacttgcaggggtctgtctcctcctccttctcctccccctccccttcccccctccccctcctcttcctcctctttcttccatcatgaagggtctggggaatgaacccaggtcttcaggcttggcagcagatgcctttaaccaatgaactgtcccaacagtctctaatttacattttatggtattatagatctgtgcttaggttatcatttcaggaggatatctgctttccagagcacccaactgcccttgctatagatgtgacactggagtactgtcatgagaatttttatcccaactatatacatattctcttaaagagcaaatcaccgtttcccctgtttatatatatgtgtgtgtgtgtgtgtgtgtgtgtgtgtgtgtgtgtgtgtgtgtgtgtatggtctcaagtttaaccaccttctttactgctttttaaacatctctttcaaaggactgttaatagttatataattaaacgcaacttgaaacccaggacctcccagactgacagactgcattaaatttctctgataacccttcccctgttttagcaatgatttcagattatttatttatttatttagcatgtgtgtatgtgcactcatgtatgccatagcatgcatgtgcaggtcaaaggacaacgttcagggattgagttttttcttctaccaccggagtcccaaagatcaaacctagatccgcgggcttggcagcaagtacctttacccactgagccatcctgccggccctcaacagcatgttattgttcaaacatgggaaacaatgttaagaacatgactaaaatatgggaagagcccttgggtgttcttaaaggactcttcggttaaaggatagcaggatctgatggtccaagaacatgcgctgacttcaagatggtccagttgtgatagccagtgctcctgggtttccatttgcacaaggattataacatggccctttccccagattacaaagaaccaaattgattttaaggaaaacagtgtaacatccatggaaaaatttagatgtttatcagggcctgtaatctttgaatagatgacattgaatgtatgaaacaaattcagaattaatttgtctcataccggaggctcacattctgcactttggagctgacagacagctcaa

SEQ ID NO: 17848 - DNA, 1220 bp, Mus musculus
gtggctatcatcatcttcaggtcatacaatggtcagtgtaccattgacatccacccattcagggttctaaactttgaagggctgtttttgctcttccttacccatagggaggagctggtttatttcctgccttattcgccactgccccaaaccctaattgagccaggaatgtacagcagttgggttatttgagctgtttcctttccccctttaaatccacaccccaacagttttcattcatagcccacgattctcactggatacaagaaagcagtggactacagcccaggagttgagtagtacatctttccctgggtcttttctccttgtctccttttctcttcctcatctcatctgggtatctcaagcaccaaactgaggcagtaaaatgacttgtaggtgtttaatggcaagtcattgaggaagtgaataaaagaaaattgcagtattcacatcagtagggagcaaggagaactgctgagctttgaaccaaagaaagttaaatttaccacattcttaaagggagccacctctgtttgacatcaaagcgtcccctgtaattctttctcccggtgaaatgtgccaccgttagtcacgatggagccctctaatctatgcggtttctgtttatccaaaacacacacggagataaaaccgcatgtgccttctgaatgcttttgtggtcttttcacaaaccagatacaaccttaggtacagagcgaatggagagtctaaattctcattttctcagggatatgttgaatttggaatgtcagataatgggggttggcggtagttggagatgtgtgaaatttatcttggttttctattagaaagctcagttcattcaacttccaaacctgggtgaatcttccccttttgtcttctctagcttttgctttattttacaaataactttacttgtttccgctggtgtgtggaaaggcagtctgttccgattgttaaatcttggtgttccaagtctgactgcagagggccctcgattcctcttatgtggcatgatggatattcccagggatatacagggatgtctcccgctgcagctgtttgtctgcagtggtccatacagtcttgtataataaaaggaatgttggggaccttctgagtttcaggaaatgacctagaaacctcaactatgtccttcctcacaattaagatgtcaggaaaactattcgcatccatcctagaggtacagatga

SEQ ID NO: 17849 - DNA, 1214 bp, Mus musculus
acccaccactaattaactgataactgtcttcctttggcaagttcaactcttcctgcccttaatttgcaggtttcttctttagtggttgaaacaaatacacatacaggtttttttcacttatgagtaaatgttgccacttgtagctggagctcttgtaataggcgaatttgaagttgctggactacagcaagaactgctgagaacacacaagcagtaaatccactgtggctgcctttctgtttcaggcggaaaagtgaagcaatgtgggagggggaggaagaggagggtcacagtgaggtgcgggaagctgggggagggctttcttaataaaatagcaaaatagtccataagatactcccgcccgtggatggggggggggtggggggcgcacagtaattttcttcttcactcttgaaaggataactgtcctcagagtgtgaaatagattggatgaatctctgatgagacgttctcattgataacgttttcctctggatctttgcagtgggaggaagtgagcattatggatgagaaaaatacaccgatccgaacctaccaggtgtgcaacgtgatggaagccagccagaacaactggctgcgaactgactggatcacccgcgaaggggcgcagagggtgtacattgaaattaagttcactctaagggactgcaacagtcttccgggcgtcatggggacttgcaaggagacgtttaacctctactactatgagtcggacaacgacaaggagcgcttcatcagagagagccagtttggcaagatcgacaccatcgcagctgatgagagcttcacgcaggtggacattggtgaccgaatcatgaaactcaacactgagatccgggatgtagggccactgagcaagaaagggttttacctggcttttcaggatgtgggtgcttgcatcgccctggtgtctgtccgtgtgttctacaagaagtgtccactcaccgttcgaaatctagcccagtttcctgataccattactggggctgatacctcttccctggtggaagttcgaggctcctgtgtcaacaactcagaagagaaggatgtgccaaaaatgtactgtggggcagatggtgaatggctggtacccattggcaactgcctatgcaacgctgggcacgaggagcagaatggtgaatgccaaggtaagaacagccatactgtacttttcattagggcttagtgcacgt

SEQ ID NO: 17850 - DNA, 1197 bp, Mus musculus
ctaacaaccaaccgaattaaaaaaacaaaacaaaacaaaaagctgggcatggtggctcacacctttaatcccagcacttgggaggcagaggcaggcggatttctgaattcgaggccagcctggtctacagagtgagttccaggacagccagggctacacagagaaaccctgtcttgaaaaacaaaacaaaacaaaacaaataagattcacagaggctctgaagtagtgttcacaccatagccaagagggtctaaaatgctgagctgaggctcttctagacactgggaattctacagcagattcacaaatacagtatgcactgtacaggactagtctgcagctcttcttgcctctatgttcagaagttttgggtgtttttgtttttgttttttctatatttccttttaacaagctgtattctaaaagcctttataactacttttactctgattttttttttttaatgcataaccaaccatttaatgcacttaacagcagcaaatgcacaaggctcgcatgagaacttaggaggaaaacagaaaacacaaaaaggaaaccaggatcatctcgaagggcaactttcataggacagacggccgtaggtaaatgcccctggttactaggcaaatgatatgctgtggaagcagtggggttgatcacagactcctcctgtcgcatgtgttcatgtgccatgaacagaaactgtgtccaggtcattcaggagatactcacagaaggattgtatgagggttccagtgtcaccggcaacgacattttcccttgaagattcaactttgttaaataaaaaatctttcctttcttcatgcgatggacaccgtatagtctaaacctaactgcatagtttccagtcatctcggattcaacgtggttacatttgaatgtttctgtgaagacagggcatggtcctctctggatgctggttttggctctctgtttttttataggtagaagaacaaggtgtacctgccacgttttactctgatttttaaaaatgttattaattcataatctgctttctttaaaaattagaaatattttattgtgaatttgggtcaatggttcatcttttgttttgatttttcttttacttatgtactactacatttgggaaactaaagaaacacagtaaaaaataaacaagaattattcggcaaactatcatatgtgaacgtaatg

SEQ ID NO: 17851 - DNA, 1182 bp, Mus musculus
aagtgttcgctcgtgtccattaaggagagctttcccagaatgcctccccactgcctccacactgctctgagaagtgactgtactacactcatcccacctaggtttctacgtctcgattggaaataatgtagtacgtgttctgcagaaagctcttttggtatttaatagtatttgggtggtatcatgaatatagaatctgaatcatcagctggtacctgtgtttacagcacattttacaagcaggttctgtagtgaagccttttgacttcaggccagcccagaaagctagccactcctcccccatagtaaacacctttgaaaacttggtgactaaaaagtttggtcttttcatgaaagtctgaggctggatgcttctcttgatgtcaaatagtctgttaatctctttttgttaactttgttcaggttgcttaaataatggctaatgtgacccgatgaccaagtcttttttgatttcctagatgtaggtgcgaaaaactacaggcatctctgtgctgtttattacaacaagactcccgggtttgagatcatccatggcttgctggacagaattatgcagctgctcgatgtgcctcctggtgaggaaagcgggggctacatgatcaaagcgtctgcaggtaagataccagggttggcaagcctgatgaaaggccacatcctggttttgataaagtccactttcctttcattttgcttttgatttagagagcgtgagcagcaaagggcagagaactttatttcaattgttagtattttctaggaaatactgttccctctccctccagaacctcaaggggtttgctcttcaaacttgctaggaactgctgctctgtgttgcttttgtaagtagctgagttgtggtagtctctgtggcaccattgcgccaccagcactggtgagcccgagcgtgcaggctgcaggttcagtacaccgaagtgcagcctgcactcactacctgtgtgcctgcactgtgaaaactgcacttattaatcaaggagcaaggtggagtccactgccaaaagcccagtccagtctctggctttaatttaggccgatagatgccacgtgtgtgtgtgctgcggcctaatatgctggtttctccttgtctgaggcattctgaagcttttgctctttgttctcctgtggcttgagtctaagtttatt

SEQ ID NO: 17852 - DNA, 1224 bp, Mus musculus
cctcaagcttagcatgcaggaagtgttaactggtgaaaaccgttctttctctgtgtctattcagtcaggagttactgagaagataatcttcataaattaaaatactattgatggacacagattccagatttaaaaaaaaataatttatttcagtgacttaaaaaattttaagaatcataaaaacttgggagaagtaaaacatctgtttttttgtactaaaaatgtttcaagaatgcacgtctttgactgtattaaacaactatatggcaaggcatgcatttattcttatactgttaacctcctaaatcctttatggtgcaccgtagggcagtggagagagaatgcggtttagtcagtcctgagcacgacctgatttgtaacttcatagctgtgggattgataatgattaacctgagctcgactttgggcaacttcccttcattgccttgatttggctctccatctgcttcatagacgcagtaatccttgctgtgtagtgtctagagtgtagtggtgacattgatggctgcctggtagatactcagtccctggtcagagcttaccggcagcctgactgcctcggtatctggctattgggacgataaaaggccatctgtgccagcatggctagtagcttttacctgtggaaaagctgtgctgagcttttgttcagcccatgtgaacagaggtagctcgctgtgttcatgtcatttcccaagacaggtgttgtcattcttcttttttcttaatttaaaaagcaaaatgaggccaaatgcattcgcatttgtatttagagctatatgtctcgtgtctctagtttaagggtcatggtttttacctaagttgtaggctagtttaaatttaaatcctgctgttgactttaaatgttcctttatgtgctatgtcccttttaaaccatccccctgagatcctgaacaccgtcaccctggaaatcctccatgttttcccagtttagtcacatttcccctacattttactttatacaactaccatctagtctcagttgcttgaaaaatgcttttccacccctgacatgaatggatcatgtgtcctgtggccttctgtggctgactcctttcattcactactgtgcctctgagaacctccaccgcttaggtccattgacagttgctgaagttggatctgtgagtagtgtctcactgtttatacgctggtccattatccagttatccattggggttc

SEQ ID NO: 17853 - DNA, 1175 bp, Mus musculus
tgttagcaggcactgcacccagaaggaagcttgaaactgaagaagacgagtagctgacatactgcacacagcagagacatgatgagaatcaggcctttgcatgactactgcttgaccctggtctcgtttcctgtacactgagcttaagagtcccatgtcgtccatatgcagatgttttgtttccattgtgagcagtcactattttatacacattgaaatataaaatttagcattgagaaatgcatgttttaaagttcataagtgacagcaggaatcagcacactctcaccctggagattttaactttataaaacaaagcaagcactcaccttcctctctctacttgggactctggtttccttccccaaactaactgcagttaccacttaggctgtactcctcactgcctctgttggtgctttttgattctgtaacttagtcccatgtacataagctgccttctgctagaggctgctgtccaggagggtttactctgcactgatactgtgtgcacgtggtaccaattcttctcggagggttcctgtcctccacagcagttagagtaacttctctcagtccctccattccccatacagccataggcatgtgtccaagattccagcgcagacccgttaggagccagagcttgtgactgaattgtagcactagagtaactgagcagtgagctcggctgtccaggtactcagttatgttcattgtctgggagaagaggcgtgaggagctagaatgttagaggtcacaaagttttctattcagagttttagcaggggcaggagagatggcttggagggttagagcactggctactcttgcagagaacccaggttcaagctctagcacccacagtgtctgtaactccagtctcagggcatccgatggcctcttctggctttggtaggcaccgtacagtcctgcagacaaaaatacctgtatgcataaaataaacaaatcattaaaatttgtataaagttgtgatttttataaacttagaacttaacattgctggtctgtattgccacatccagtgtgcataggagtgacaatcagtcttccaaagctgctcctgacttcttaataagcagccactttggaacacggcatgctagttactgtcttctaccaagtgactcaattttagaacaaaatgcctactt

SEQ ID NO: 17854 - DNA, 1114 bp, Mus musculus
gccagatacggtggtacatatcttaatcctagcacgtaggagacagttgcagggagtttgttataagtttaaggccagcctagttgaaagccagccaggactataggtagaacttgtctaaaacaacagcaaagaaaactacatatttattaatggtgagaaaccctacttttagatactttgtgtggatctagaaacaagttaatttgttcaaaagataatattgatggtgacattttatattcttaaatagaagagaaaactgatatatgatataaaagcaaattatttcttaataattgaagcttgtcaaaatgcactgatttggaggtgtgtgagtgtgtgtgtatatgtgtgtgtgagtgtgtgtatgtgtgtgagtgtgtgtatgtgtgtgtgagtgtatgtgtgtgtgtgagtgtgtgtgtatgtgtgagtgtgtgtgtgtgtgtgaatgtatgtgtgtgtgagtgtgtgtgagtgtatctgtgtgttatgtgtgtgtgagtgtgtgtgtgtatgtgtgtgtgtgagtgtgtgtgtgtatgtgtgtgtgtgtgtttgtatctgtggtatataagggatgggctagggacagtttagaggagaattctagatattttcttcagtggtgaaaaatgcttaaaattacgagtcagacttggcagctagtgttcccttcataacggatctttgctcagatagtgcacacatgtccctagggctttaagtacattctcagtctcattatattaaaatctatgtattagcttgctgacatatgtcattactaagcaaaataataaacgaactatgaatttattttgaagaaagaagtttattgtacattgtaagagtgtagtgggcaagggtggtaaaatgggaacaacttgcctgagcaaagtagaatatggttttaaaggaataaggtcaaggtctcacaggcagtgagagctaggagatgagtggcagactattgttttagacatagttattaaacattcttccctccctccctcctccttcccctggcctcttcctctctctccctccctttttccctccctttttctcaccctcttttcctccttccctccctccctccttcccttct

SEQ ID NO: 17855 - DNA, 1102 bp, Mus musculus
tgcaccgcggcctcctccgcgggcgcgggcacgtgggtggggtcgtcccgctccacgcggccgcgcggcgtccgtgggaggtaccagcgcccagagggtccctgaaaactgcgggtgtgggacaggaaatgcgggtgcgggcggtgggaatggcgtggggaacctctggtgtctcctcctaagtgcgttttagtctcggacgagtcagtcatgagatgcatacataggcagccccgggggtcacttgtgatccccgtgatgggatttcacagatgaagatccaactgtatggtccgttctggttctagaacaggtattccgatcacttgtacatagagcccctcaacttagaaagggcaggacagtttttgggaatccagtggaaactagagaggggggattgataactgcctagaatgacagagctggcatttactgagctttttttaaaggccacacaccaagaactttgtgcatggctatgtttacattgttagtccaccgggacggtcgcacattctcagttttacagcgagagagcctgcactgtggacacgttaacttagcccagatctgagctactaggagaagcttgagccccaggagggcctgtctgaatctagaacaaatctctgatggctttagtagcaacagccctctgttggtgtttgaatggtttccgtggctttgggtttctaggttcttttgggtcttaggggttctgcagagctgtagtttggtgtttttgtttttcctgtttgttttaggctgttttgtatgcgcactttggctctgagtgttgttgaagggtgctgctgagttgcccctagaagtgcatgcaaagcttattacagagagggaagtgttgggacttgagagtgcgttttctggtgtctccctgagcacccctcacatgtagagttgaaggctgattgtattttctaacttaggctctgattcttctgtcataaagtgccttgactccagtgtggccacaggagagggtcacctggtatctttggagtccagttactggatttgtaggacatttgggccgagtgactggtaccctgtgagtcccaagatgtcctccttggagaaa

SEQ ID NO: 17856 - DNA, 1177 bp, Mus musculus
ctctgctgcccagctctcccctctcccaacagaggttttgatcttatgtttttaatgttgaaggaggctttgtggagagggtattggaataggagtgagtgagcaagggttacttacctgactaagttgctgggcatgggaaggcttggtgcttgggcttttataatcagtacagattctggtagatgctttcccatgaaggctcttttttagcaatctttattttaattaacatagctttattttctttgtttctagttttcaaattctttagtattttacatatcttaattatttcacaaaggactgtagggaaactcacaaacactctttgccttgagtggtttctttgtaagtactagtcatcattttgccaattctgtgcattagttctagcttcctgtaagaattgttgtgagattttaaataagtgtctgcagtattgtcaataaacatgaaccaaaaaccactttatttgtttttagagaatgtaggtttttcatattttactgcccccccccccctgtttttcaagacagggtctctctgtatagtcctgaatgttctagaacgtgcgctgtagaccatgctggcctcaaactcaacagagatctatctgcctttctctgcctcctgagtgcttgggattaaaggtgtgcatcaccgttgcctaactttgccttctttcatgaaatagtatcattaagcttctatatatagtcccaccttaaggaagtatcttatgtattaggaacctttttagtagagttggagatgtatgtaaatagaaaactgtaacttgggaccattaactggattttgttctattatttaaaaaattacaagtgcatgtatatgaatgtctgcatgtgtgtgtacgtatgtctgagtgtctgtgtgtgtgtgcacattcattggagcccttgagagtccatctgagtgcatgcacaatacacaggtgaaggtcagagaacagcattggagttggttctttctctcctttatgtgggttctgggtactgaactcagttcactaggcttcagtggcaagcctttacttgctgagccgtctcactgactgcatcctttaggtttgttctcttttagttaatatcagttaactgtgacgtgggctttaggtttcctgggaaaataaatttctacatgttagcacatt

SEQ ID NO: 17857 - DNA, 1177 bp, Mus musculus; identical to SEQ ID NO: 17856

SEQ ID NO: 17858 - DNA, 1145 bp, Mus musculus
cctgggatatatagcaagaggagaagatgagggtcttttcacttgttacatacaggaagtgtattgagaagtgcgtcttgagttgcttgccatgatgttactaagacttgtgatatggcattgtccacaaccatttgggcttcctattgcacttaatttcctgtccgatctcttgtatctttatcatgattcattcttttcatttcccttttctttgctttggcttgaggtttttgttacctgtgttaaaattttcaggtgacagacagatagacagacagacacagatacggagacggagacttctgtagcctaggctggccttgtacatcaccatcctggttgacttgtacattttatgtgttgactacattgaaattactggggtatttatctgggtcttttcttctttagacatctcaataaataaggttctcagaaaacatctatgtcagagacagtgggcagtaaatagatgaagccaaagatgagaccagatccttcttcaagagctaacaggccctgtgagaagaaggaggctgctaccatgaacatggccaggaatgtgacagaccttctggctttgagccagcaggaagaactagtggatttgccagaaaactatccactgagtacgagtgaagatgagggggacagtgatggagaaggaaaacgtcaaaaacttctggaagcagtcagttcccttggtagaaagaataaatggaagttggcagagagatctgaggctagtcggatggtttcagagttcaatgtcacttctgaaggatcaggtgaaaagctggtcctttccgatttgcttgggtctgctacagcattatcttcggtggctgctgtgaaaaaacagctgcatagagtcaagtcaaagacgctcaccccaccccttaacaaagaagaggctgaccgagccctcagggaagcagcattcagcaaaacctcacaaatgctctccaggtgggatccggtggttctgaagaaccggcaggcagagcagttgatttttcccatggagaaggagccgccagcggttgcacccattgaacatgtttttactgactggaaagtaagaacccctctggaacgagaagtttttaaccttcttcataagaacaagcagccagtaacag

SEQ ID NO: 17859 - DNA, 1246 bp, Mus musculus
agagacccccttccctcagcattcactgccagacctggatcctgctgacccaccagttctgaacttcacttcatccattcctgcctggtgtgtaaagaagaatgggaccgcagacctcgcttcagcccatccttccctgcctggcatactgtggaattcagctctgctccatccttccttccccttggtgtccagcagtcctggacattccaagggaagacgcagaataacggaagcacaaagtgacagaatctgggctactgaaaaataagttatggagggccttaaatgttttgcagagtaatttacacttgatcttagccaaaaggccgagaagcgatttgcagagtaatttaaactatacttttcatctcttctcttaggcaaagtagaggaattaagacttagataggggaccattgtgacatttgtgttaaaggagtgagtgccaagctggcagcatgcatgtaggatgtattgtattaatgggggtaagagttgaaaatgtcagctgtagaagttagagtgagcatgggcaggagggctggatgacaggaagtcatcacctggcaagagtgctgtagagaataagagaggaaagggattttattggatacctggaagtttgagcagggttttggacctgggaggatttagctttccatttttacttatttttggaaagatggaaggatatattgaagtgggatggagaattcaggttttagaaaattcttgtatatttttgaaatgtaaaggtatgaatggcaggcatccctgcagtcccagcacttgggagcaggcagaggcagaaggatagctgaaagttaaaggccaggaagggtctacataattccagttcagaggaggagggctcttgaggtaggtgatggctggatggtggatcaagggagtggtaaagttgacttcttgaatatgggatcagacgcttatgttttataataattggtgctcaagacttttatcaagaatgtgattgccagagaatccatctgtgaatccttgggaccagaccacccatggggtgaggggtcatgtctagagtataggtcagagagagcagatcaatacatgaaggactttgaggtgcttagaggccattataactgttcatttttaaaatgttgaattttctattgataggaattgttctagggatccacacatcaaacttttttgtatttcgtcttgtttagtttgggtcattttagtgaggcacttttgg

SEQ ID NO: 17860 - DNA, 1131 bp, Mus musculus
aggaagcaaaggagacacatccgtgctgaagccaacactgatggcagctgttccggtaagaactgcccattcaggaagtgctgtcagccacaggccatggggtggtaatagcactttcaaacaaattatgattttacctaagatttttagttctgataaaatatatctttaaaatgaattcatatcttgccagtgaggtcactgaatggatgaggtgcttgctgtgcaagtctgaggactgagttagttccaagaatccacgtaaaggtggaaggagacactcaagtccatgtaattgtcctctagccgccatgtatgcaccacggcacaggctgcatgcattgtcctatatcacatagacaacagttggaagtattaatcatatgggtgtgatttaaatatgaaggttgctcatagagttaatgaactcatttatgcatctaggaaatcatggatcggatctacaaaaatgtcatgaataaagtgaatgaaatgagtgcttttcaacgaaacttgtttattttggcatataattataagatggaacagatttcaaaagggtgtagtactccactgtgtgaccggtaagtaaagccagttctctgtgtcaatgacagagttcaaatcaacagcccagggacgtgaggcacttataagtagtacaattactttaagatgggtgtggtggcacaggtttgtaatctctgaagtaaggggaggaggatccagagttcaaagctggaggctggaaagttgtgtcattgttagagcaaaaggatgggtggagggagagcaatagtcggacaccagtgacttccttatgcgctcattctctctctctcaagacagtttccctggctagaactcagaggttcacatgcctctgccttctgagtgctaggattaagagtctggatagcttagttggcaaagtgtcagattgaaggggcacacactgccacatcagcctcaatacagcttctaaaatggttgccattgagtcttactccctttcaaaaggcttaccagtttttaattcccatggttccgggcattaaacctaggctgagctggtaagcaagcactaccactaagctgtgttcctagccttactccttgcttttgagttat

SEQ ID NO: 17861 - DNA, 1145 bp, Mus musculus
ttctaagaaacctttaatagctgctaggggttgtgttcagggagcctctatcacccagctgccattcacctcccacctcttgaattgtttccttcctctttatgcttcagtgtttgagttgacacagctccggtcaataaaagtcacttcaggccccacttgcaaggattccttcccagcccacaagttggctgtgttgtgtgggtgctgtgtttctgttcctctttcctggtgtgcctttgcccattgcagtgcaaagctgctttccctctgcactagtgagtgtcaggagcgcagcagctcagcagaatatattcaagccataaggatgatgtcccttaagtacaatattttccacaagagaatttacttaattgtaaaagattagggtctgactttattgtataatctcaactttagggcagccatccatgcttagttgagaaaagttttaaatgacttggtgagagtattcctatgtgcttaaggtgttaatgactgttctcaatatttctgcctttgccctttgcagaccgtaaaaaggaccttgtgaaactacaggcaggagagtacgtttctctcgggaaagtagaggcagctttgaagaacctcccactgatagataacatttgtgcgtatgcaaacaggtgagctcctggagtctgggctgcggtctagaagttggcaggtgtgccgtgagcagttgcagccgtgtgctgcggtataaaagttggtgggtgtgctgggtgtgccgtgagcagtcgaagcccctgtggggccaccacctcctctgcatagctagtgagccggaacttcctgggatgctctcctctgtaagtgtcctgagtgacagagttggggaaataagttcttatgctgcctcagtacctctgcacagggaggctttgcagacccagtcagctgcaagggcataagtagtagctccctacagtcctctcttctgtcctgacctgcagcttggccatgcttcctgctggcctggctcaccacaacctcacagcccaggatatcataggcagcagggaatggaagtgtaaatttagaagcctagaggtgtattgggaactgatggaatctgagattagacctgactgcatttctgtaatagtaagtgaagtaactta

SEQ ID NO: 17862 - DNA, 2140 bp, Mus musculus
ttgtagcttgatcatgggttggatccccatgtaaatgagttgttttaatggcagaactgctttctgtatatcttacacctatatcatttatttaatttattctcctatggataaataatttgttaaatgttttttgctattatagttctcatatttcaaaaacatatctttgaatatcaagagtgggcctgatgctattggggttgcttgttctgttgggtacttggtgggcgggcctcaaagagcacccgtttgctgagaactttgacttcatctcttgtgggtgtgggtttttagtgttgtgttttcttcatttcagcaagtctggaaaagtttgaaattccactaaaaatacgtttgagccctgacccatggactcccgaaactggtctggtgacagatgccttcaagttgaaacgtaaagagcttaaaacacactaccaggcagacattgagcggatgtatggaagaaaataattagttttggcattggtttgctacagcgagctcagatcaaataggaaaatacttgaaatgtatgtctcgggccgaggcaaactccattcctcatattaaatcccggctgttacttctcactacgtcaccatttttaactgacaggattagtaaagtattaagacagcaaactcgtgtctgtctgttccttcccctgctccagtttgcttctggcatctgtgactgtgcttgtcaacaggagactttttcagaatcgtactggggaagcagcgattttacagcctcaagtttttaaacatgatttatatgttctgtacagttgttcagtttgtaactttttaaagtttggatgtatagaaggataaataggaaatataaaaattggttatttggggggcttttttacttattgtatttaaaaataaaagggtatcaatgtgaaattatgtacattttaaatgcttatgaatcaagtcattgttgaacaaaagatttgttgctgtgtaattattgtcttgtatgcatttgagagaaataaatatactcagacttatgttttaagaaatttcgaatatatgcctgacactgttgggtttatatacttgctttttctgttggggaaaacagtttgcttggcactgcattgaagtgaaagagcaagtaggggtacataacagttcactcacagagcagctcaccacagagcagcggtggccatgggtgtggtggtgggtgaggggaaccagggctctggagtttcgctcacatcacaaagtacttgtttagagacatcctaggacagtgttctctgtgttctcgtatgttgtgtgttggacagttttgtccttgttgaaatttaactcttacctttggagaaactttgtaaaggaggggaagtgtgttaatactaggagccgaaaatttaccatggttgctggagagcatttgtgtctgcctgatggcttgccttcagaatgattgtgttaaaatatttttataaaaatgatttaagtcacgtgtgtatgtgtgcatgcagtgattaaagatgtcagaagggggcgtctgatcctctgaaatgagttaaaagctgtggtgaaccaaattctactttctgtaagactggagcatgctcttaaatgctgagctgtcgttccagcactctttcaaaggatttgtttttcttttttaaaaaatagaatgtaagtaagcttcaatgcttttggaaagatactaacaattgtgacttgaaatgtcagcttaaaaggcagtgtctcaccagtacagtaatggctgattgaacagcaaataaagctggttagtccgcatcagagcctcttcagagtcttgtataatttacgtttagaactgcgtttagtctaaggcgttagagggcagggcttttttttttttttttttaagatttattttatttctttcatatatatgagtacattgtcgctgtcttcagaaacaccagaaggagatattggatcccattacagatggttatgagccaccatgtggttgctgggaattgaactcaggacctctggaagagcagtcaacactgttagacactccagctccataagtcatgactttgcttgcttgctttccccctcccctcccctcctctccctcccttccttctttccttcctctg

SEQ ID NO: 17863 - DNA, 1180 bp, Mus musculus
tctggagatgaaatgttacagcatctcctgcttttaccataatcctgagaggaagagctatggcaacatttatatagcaataattgtgaacatgagatacaaatgatattagatactttattttcagatatctcattccttgtgagcctttaaaacatattttaatgtaagatgaatctttaaggcttccttaagttatgtgtatttcattgtactcttcatgggaggtgactccctcccttccttccttccttccttccttccttccttccttccttccttccttcctccctccctccctccctccctccctccctccctctctctctctctctctctctctctctctctctctctctctctctcctctttcccagaaaaatatttttgctgactgtaattgctgtgaccatgttaccttcacgcttccaaaacagaagttctgcatagctgggtactgagtctgctcagacatgaagtaggaagctgcctgtattgtagcatttcttcgaggtgtctctggctgcagttttgtatatgtgttctccatgtaagtgttgaggtttggtggccgttgtacctgagtgctaggacttctgtggttaagacaatagggagatctcatacagtggacccttagagaatgtggttgtcatctttggttcatctcatcagacatacttaagggaagatggcaagaccagagaagaacagacagacagatggacccattccttagaataaccatttatttaaaagcaataattcagattgcatatgagctaataactgggcttttaatagctgatttatcttcaaattaatataattttggtggcttgttctttctgaacatctttgtttcagcagtcttcagttttgtgcattaacttttttaaaaagtttggtaaaggtctttgtttttcaagcatctttgtaaaactgaactttctgtaacttcggaggaaagtgtcttttgggcttcactaaatgtactacttacattctgttttttttttttttttccattttttattaggtatttagctcatttacatttccaatgctataccaaaagtcccccttacccacccacccccactcccctacccacccactccccccctttggccctggcgttcccctgtaccggggcacacaaagtctgcgtgtccaatgg

SEQ ID NO: 17864 - DNA, 3084 bp, Mus musculus
gcctaaaaaaacaaatcaatattttttaaaagaaaaaaatctatataaaggtgtgtttgggggtatttgtggaaattgtctaaaaggtctgtccacaacggactcctaaggagtagaatttcctcagcaaaactgcctcatgaacattgaaccagtgggtaaggagggaacaatgaagggtttagaaggaaaaatttttaaatgaaaaaggttagtgcttagaacttcttaaatgcaaacccatgagcacacatggagtctcccgagagggtccttgaggcccctgagagtactcagatacacaaccaggggctgggggagagctttctgtctttcttcaggggaggtggccagatgtgagaaacctatgcttgccatacaaatgtcctctacaccgagttactgataaacctcatcaaggtacctgttctgtcaggtggtgtcctaatctgctcttgggtttggctcactctagttgtttctgtcccagccagtgtcccctgggtgaacctttacagctgtcatataacaagacagagcacattcatctccttctcccaaacctgccctgtggacaaagctttcttttatggtgctgatgtacaagcctcctgacattttttttctttgtagctagtcatgacccatggcaaactcagctaccaccatggtggtgatgcgtgccagcagcctactccatggaacagcccagtcttgctaactgatacatttgtttgtagtcccaagaccaagcccttgttatatggtagcaagttatgcccctcagaagtactctggcgcttctgtattatgttgtagctgtgaccagtgttagtcatgtgtcatagaaagaaattggtggcccattgctaaaattatcagtcaggtcttgtacagtaatccctaacctgcaaatcacttacatagcatttagaaaagctgttgtatgaaatgtgttgtccaatttttggccagattaccaagagatgtttgtgtgtgtttgtgtaaacagaaagtagcacatgaactattccagtagaaccgtgggagcctgctgcttgccggtaggaaaggcctactgctttaacggatgaataatgactacctacagcatccgtgtgactcttgctaatgggtatggatttaaaatctcactgtagcactgtgttgggttacatcaagatcaaggccattctgccagagaggactaaggctttatcactttaccaacatggctaacaaggaggtggcgcacgcctttaatcccagcactcgggaggcagaggcaggcagttttatgagttcgaggccagcctggtctacaaactgagttccaggacagccagggctacacagagaaaccctgtctcaaaaaaacaaaaaacaaaaaaaaaaaaaaaaaaaaaaacaggcagaaaagctatggggtcacaatggataaaacacaaacaatgaggaaaggaaaggcagccaggcataatgggctctgtatttacagagagctcttgacttgagaaataagaccaaaggatgttttgccccctttatgttttatgtagcgtcacttttaactgctggtttttcattggattccccttacactatacaagatgtggattgctccagtgctttggacaagagagtgggtgacgtcgtgaaaccacaatgtagaatgctctcctcgctgcttggtttagctcagcctgtggttctgcccacgcaagggaaacagaccatggcggagtcattgccctgtggaatagtgctgagccaggcgtgggtttattttcttaaaagcatctgtaaaatgtgacttttggatatctgtggtagatcaaactgaatattccctctcctttttaaagcctcctgatagaaaaccccgtgcctcatagagagcatgtagtggttggtttgagccttttaagaggctattagaaatcaaggaggaaaaattatatttaaagaagaattagagggagggaccttaggagggaatgcaggctgaatgcacttcgctcctcacttgagcctgtggtcacatctcctttcaaaaacgtgcttgccaggctcccctatgtgtcaggtagcaaagggggccatattttttatagagggtgaagattatattctcaagtttactgactgaagggacaataaggctcaggctttttgccttatttggattctgttgctaaacacatcacttaagagagttcctcaagtaacaactatgtcctttccatcccagaattctcaagctaatttgtacagacaaggatcaagaagtagagggtgttagacaagagtcttgaacttagatctagtatgtaataaagtgatgccgagtctttattctcaatgtgttctttactggtcctttattagttggtcctagtgatagcaataggcctgtatgttggtagaaaccacttcttattcactagactgtaattgtttactatgtcccagttttaacttgctgcctagtgggcagcaatagacactgttgctgtagactatgctttgttctcccgcaccagtgattcagtttgttaacatctatatttattaaacttgtcaaaattgataaatagagtagcagctcagacccaagaagatatttttgaaaatcagggtttcattaaaagtactttctaatatctcctaaatgacaagcatcaagttactgttaatgacagtgatctgctcattctacatgggaggcttaacaaataagtaatatatgctgacttctgcaagtgtctgttgcttaattgttaattgtgagcagattattgaatgcctcatctattttctgcagtttactacacaataactctttgaataagttgaagtttaatcgtgcaacaaatttctatcagagaacaatgtaaagtattttactctgtagcctttttttgttttttgacttgggaagcaaaaggtgacattaagtaagtcaatgtgtccttgtacaactgtgtttccatagagtaggatgccttgtgtatccgagagacgctgcaaatttttgttctttctacttgtgggttccatttttgtgggcttttttattttatt

SEQ ID NO: 17865 - DNA, 1192 bp, Mus musculus
gtatagttccttattcttttatctcatgtttgatatgtcttcattatgtatcagagctgatcaatccaacactgaagcttctagccacttgtggctacttaacctaaactctattaaaatgacacataattaaaatgacagcgtcttagactgtcctcaactcagctcctcatttgagtagttcttgtggcgtcgcttgcgcagtgaaggcggagactattcctgcctttggagaaagttctatggaatggcacagctgagcaacaggatagccatggctccttctctccccagcatgcagcactctccgtcttgcaccgaagattcattttatgatgccagacattatttctctttaaccctctaggtgccatcttgttcctgggccaggtgaacaagccctgaaggacagacaaaggaaagccacgcaaagccaagacgacttggctctgaagagagactccctccccacatctttcatagttctgttaaatatttttatatactgctttcttttttgaaactggttcatagcagcagttaagtgacgcaagtgtttctggtcggggctgtgtcagaagaaagggctggatgcctgggatgctggatgcctgggatgctggatgcctgggatgctggatgcctgggatgctggatgcctgggatgctggatgcctgggatgctgtagtgaaggatgagcaggccggtttcacgatgtctagaagatttctttaaactactgatcagttatctaggttaacaaccctctcgagtatttgctgtctgtcaagttcagcatctttgtttcattcctgttgatatgtgtgactttccaggagaggattaatcagtgtggcaggagaggttaaaaaaaaaaaagacattttatagtagtttttatgtttttatggaaaacaatatcatttgcctttttaattctttttcctctcacttccacccaaaggcttgagggtggcaagggatggagctagcaaaagccgtagcctcttcgtgtgttgtttctgttgctgttgctcttgttgttttatatactgcatgtgttcactaaaataaagttggaaaactaacgtctcgctggacaccatttgctgtcaagccgcgtacctgtcactactggtctgtactctttggattggcatttttgtattttgtataaagtaaaaaaaaaaa

SEQ ID NO: 17866 - DNA, 1199 bp, Mus musculus
ttgtgtcattacgtggcctacttgagaacatctcaatttcactgatgccagccctccttgctcatcatcctaggggaagaaaggttgcattagtggtccactccaaaagatcaactgccagcaaaagatggcctgacaataagttggtaagaaaacaacctcttagaagctgtctagagcccagagccccggagtcaaagccggttgtcaacccagccctgtcccgcactcgcctgcctcttctttttttgctttcaacatgacagatgccgctgtgtccttccccaaggacttcttggccggtggagtggccgcagccatctccaagatggcggtagcacccatcgagagggtcaagctgctgctgcaggtgcagcatgccagcaagcaaatcatgtcagataagcaatacaagggcatcatagactgcgtggttcgtatccccaaggaacagggagtcctgtacttctggcgtgggaacctggccaatgacatcagatacttccccacccaggctctcaactttgccttcaaagataaatacaagcagatctttctgggtggtgtggacaagaggacccagttctggcgctactttgcagggaacctggcatcaggtggtggtgccgctggggctacatccttgtgctttgtgtaccctcttgattttgcccatacccgtctagcagctgatgtgggcaaagctggatctgaaaaaggccttggtgactgcctggttaagatctacaaatctgatgggattaagggcctgtaccaaggctttaatgtgtcagtacagggcattatcatctacggagctgcctactttggtatctatgacactgcaaagggaatgctcccagatcccaagaatactcacatcttcatcagctggatgattgcacagtttgtcactgctgtcgctagcctgacttcctatccttttgacacggttcgccgtcgtatgatgatgcagtctggacgcaaaggaactgatatcatgtacacaggcacgcttgactgctggtggaagatggcgcgcgatgaagggagcaaggcttttttcaagggcacatggttcaacgttctcagaggcatgggtggcgcctttgtgcttgtcttgtacgatgagatcaagaaatacacataattatgtcctacgtgttctccccaagaacaggcatgttgtacaatatacc

SEQ ID NO: 17867 - DNA, 1877 bp, Mus musculus
tttatttggacatcaatacataccctgacttgtttttctctattgtaatctgaggttttccaaattaagttctaagattattaggttttgctctgagttatttctagagaaagaaaatattttagtatgtataaattgtacaataatttttttgctgttgtacttactgctaacagtggattgtatagggtggtgtttttatttcatttattgtagacaaaataaataaatttagtattcacatacacactaactcaagtatgtcagagcacaaaggtggcagctggttctatttaatttagttcctttgaaaagcacatccatccattctaccatttgtttataaatatatcccccatccccccacacacagtttaaatatatattttggtgaagctgtggtacaccattaattgtttcaaaatgcaatctaaagatgcaataaatagagtaccttgatagtttgaaggaattcttcagttcttgcagctgtgttttagaaagtgattaagcaatatttttcaaacgtggatatttagctatccattgtcctctgaagagtccttttcatgttttcaaagatgtgctttgtgctgaagatttgtgtgtccgttcctctgtgcttccaactatcactgaagtcttctacctgattgatctgccaaggattatagtttgctttaacttcagagtatttttatcttccattttatttaattttgttcctttttcttttctttcaagataatgttttagatatgtaattggggaaaaccactagatttctgtcaaaaaaatgaaatgttactgaattcaagtaaccaactctccattgaatatcaatactgttgatatacttattagaatgtatgtctcagaagatggtttctgttaaatatatgaagttacaattactgaattctaatatggattaaaagctccacataaatattttccccatgcgtcttggattataattttccttttagacttgcttttattgcatttaaatttgcttttatatgtactgttaattttaagtcttaggatcttaatctctacatgttctccacctttccatgagacagtaaaggtgtgggcagtacggacaggttctcggtgcaccttgctgtgcttgcacaggtacggtgggacactgatggattgctttctggtgtaaatagaatttttacgaaggaagctacttttaacagtttggaagtgaagacagctcagctgtacagattaggtctaatgtatatgtagggacataaaggtttgctaattgttctggtagatgcttgcttctgagttaaagtaaatgtatttgttgggcaatgctggctctgctaccttacaaaattcatgtgatgcatttggtatttctcagcaataggtcattgacatttttatcctctaaatgttttaaaagaataatgtgatgagattcttttttgtgacttgaattttaggaaagatggataatttttccagctataaaaaatgatgtcattaattgttaagttattctttgctgtcattctttgtgggacagcatttttttatttgtcatttaaatattgaaaatttattccaattaggaaacagcttcacaaaataaaaaatatggttgtaattccaaggattctttatgtcagtgaactacaaatggaattaaagggatgcatgtgtggggcattgtgagcacagggcaggaaggcactggttcaagatctggaagatactaatacgcctttgcagtgagattctcaagaacagtgaagtagcgctgacgtttgtttcctcagtatgcaggacaaacagaaaggcttaggtaagagccaatgctctaaagataatgtgtacatttccagaaa

SEQ ID NO: 17868 - DNA, 2270 bp, Mus musculus
gaagtcaggacagtcattttttttttctcctttgatgtgggccccagggttccaacaagtacgtttacatgcagagccatcccttggaccctgttgtatttctgatatacgtgtgaaagaatccttacatttcattactaacatttgagcatatatacaaactggaaaataatcatctgtaaaattaattctgaacacataattaccaacaatgttaaggtaaggctagatcataagtattttacttacaagagcatttttataatgtttcctaaattgttttttatttggtagggcttattggatctaaagagtaggtttgatcgcttcctccaagaatccttcaataatgaccggctctttaaacagactattgctggggacttcgagtatttcttaaacctcaactctaggtctcctgaatacctctcattatttattgatgataaactgaaaaagggagtcaaaggggtaagtagtaatccatctaaagtgcgttagattgtcctcctcagtgaactgaagtttggaaatgaagttaagagattttacagataaacatgtttaaaacggtagggctctttactacacttacaggaaggttttgagacagttcttttttttaaagtcttagacatacttaaaagttgtttgacattcatatatacatccttatgtaattgttattttaaaaattactcccccccccccaaaaaggcataaacatcacacctacaggttttaaaatgattgcccttgtagctgaaaattagtgtgaaaatgacagcactggagaacttgccagcagttgcagattgttgctgcttttatatggttctgggtctagagtattaagcagggcttggttttgaggaatgtgaaaggtgtactgagttctgaaacttacatcctgaagtttcaatttttttcatcctcaggaccttgggtgctcacttggaaccacagaaaaatcaaattaagctattttgatcatgtgtggtcttttaaaacctcatcttagagattttgagacaaaggagaaaagcagcaaaaagcttgggggttacagaggcaatagctgagtgagaaccaaatcactgactgcaaagaaatcttgtctagtttaatctctctcatttctaaaatcacaagcatactacggcctactatgctattttctttcctttatttaagagatgaggtataaagactttatactttggatataacaaaaacttacccacttgtttgccaattttgagttttcaagtgaaattttttgaaaaaaattcttagctctgtaagtttctacagaaagttttactctatcccttgtcaatacatttttctgttcttgattatcccttacttagcccagtcctataataatgtatgtcccatctgagtggtagcagtctactctttaaatgcagtagagaggataggagtgtgtgaagtggggcacagttccagattaccttcattcctttagccaattattgtgtttttaaaactaaactgtctttggttaatttttcagctaacagaacaagaagtagaaacaatattggataaggcaatggtcctttttaggtttatgcaagaaaaagatgtatttgaacgttattataaacaacacctggcaagaagactgctcacaaataaaagtgtttctgatgactctgagaaaaatatgatttctaaattaaaggtaagctttatttaagatgagtgcaatattctcaacttacattgatttatgatactagtgttcatccaaaaattatggtggtgattttgggcaggacacagccttttcttctgtgtgttaaaggtgcagagcatcaaagttgtctaccactgtcacatgactagtttctaacctaatctgtgcccatagtaacctgagatgtctggaggacacttcaatatactctactttccctggagtatattgggatctggacgagcctagaaattatgttttaaactaaaatcttatattataaaatcttatattaaagtattagagcagctactagaaagacttttagaagaataattagggacggcaatatcatgaaagactttgtttctatactttctcatgggaaagttcactgttcgtacatatttgtgatctttttgcatagactgagtgtggatgtcaattcacatcgaaactggaaggaatgtttagggatatgagcatctcaaacacaactatggatgagttcaggcaacatctacaggcaacgggggtaagcgtc

SEQ ID NO: 17869 - DNA, 1244 bp, Mus musculus
taaattttaaaaggtgagagttttattaagggctaaatttgtgtattggagagtggaatattctggcagataatcttcttgtggcctaatattagccgacttgtccatctacaggaactcttggatatagagattcaagaaccgagaattggatattctgtctcctgtcctgtcaggtcccattcttctgagtgccaggagcttcattgacttaagaatatatgtattatagcttgaacttagttttattactgaaaaataaaagatttccttttgattcaataattctactttaatcttcgctcaagttcaaatttttaaaaatgtaagaaaaagctgtattcacgtaaataaatagtatacaaacctagtttgttacactattagtttaatatgttaaagttatgtaataattccagcattttacattttttacatttacattttacaatgcttgtttaactgtagtttttgacaaggtccaacttgaaaattttattaccaattttttaatgaatatatacaaattggcttttattttcatgtatagttctttatgagttttagcatgtatatagattgatgcagctgccactaccttcaatgtggaacagctcctttacccccacaaaactctgaatactccttcatagctatgtactccttgtcttctcatctctgtaactactgaccagttctcttttctctataatcttgatttggaaggatgttttgtgactgacaccacaatttacgaccagcttctttgagcataattatttctaccaattcagttggttccttttgttaatgactaactcatactctgttgtctcagagtattaccatttgttcatccagctacctgtgtttagtgaaagatgattcttgtatacagtttttgagattttaataatgcttataaatatgtgtgcaaactttatgtggataaattttaattcctctgggataaatacttagaatgagattgctagggcatatgataagtgtgtatgtatgtaacttcataaaaatgcctagctccatatatggctgtactaatttgctttcatttggtccttctctttgtcagcacttgatactgtcagattactttagaattctagcatggttaatagtttcttcttgaaaaattgccttctgcttttcctctttcatgaagtgtctgttcaagactttaaagagtcctttgacttctttattgagttgtatgtctgatttat

SEQ ID NO: 17870 - DNA, 1144 bp, Mus musculus
ataaagagggtagccatataaaacgggatgttgtataccaaaacaaaaatggtgatcacttccatcttttagaactcaaaatgttgatgacttaccaaccacaaagaatttttaaggatgctccaataaaatcactttcaggtaacttgaaaaatcattttgagacaaggctaactatgtagcccttggctagttaggcacttgctgtattaatcaggttagacttgaacaccatatgggcattctcttgcctttccttcgcaagtgctggaattcccagtgtgctcaccataccacctgttttaaataacattttgtttatgcatactaactatatatcagcattctaggcctagggttaatagacttgagtttagcaactaagctgtcactaaatgttgttctgggaaattgttctcacgcctttatttccctacacagaaaggaagtttattaatgtttcagccttaattcattccatgtgaattccatttaaacagctttatgaatagagtacccttctttgttgatgagtaaatttcaaaatatttcctgtggctttacattggaataatactggaaagaaatctgatatgacaaataaaaattcctgaatgaacaaaggtgagaattgtgttgcataggcgccatatcgccaaggtctgaagttgcttaatccaagagtataaagcttggactatgtcttcgatccctgtgaacaaaggctgaactctggaggaagtgggacagctgttgttcagctatgctgtgagaaaagaaaaatctctactgatttcacagggatgcacagtccacccttctcaggttatcagcaattcactcattccttaatgcctacctcagagcccattgttctcatcacgacagctgttgaggcaccctcaagttatttagtttatgccttctgtatgcagtcatcatgggtattttatcatgtaatttcatatgtaatacgctcccaggttgtttttctttgttttgttttgtttttaatgtcctagctttctgtaaattcttgcaaccaaatactcaaggataacaaattgggctaatcagcttgaaaccctcattttgggaggcactcactgcttattttttcccataatttatgtttttattcaca

SEQ ID NO: 17871 - DNA, 1116 bp, Mus musculus
tcccagggcgttccgttctctttcacgcaggctcctccgggtgctcaggctaccaagtctgcctgatgttcacatctcctgccttattccacatgtagaatgtctaacaggaggggaataagaaagatctaaggtaggaaaagaacccaactcactcattagatatcatgtggcaccagcaatttgggttcagagccaccccctccaggagtgggcgacttaactgctccacagagcggcaacaggtgccacacacacacagagcaaagccaacgtgttgactggggttctcacagggaatcccccttgcagcaagtatttttttttccttcatgaaagtgccttctcattggctactctggctgtagttggtcataaacaagtgtgtgaaaaatgccccagggaagtgctgtgtccgagtcacttaaggcatttctgtttcttgtgttctgagaataaaaaggcaaagacaggatgttgccacctcctcagagtcagggaggatttagatcaaagggagttaggagcaacaaatggtgttcctccgactcttatgcaccctccctgcatagtttccaatgagaatgggtgtagacaggctttcctatgcacaacgcacacacctaggatggaatactaagtggcgatacccatcagctctgggggacaggcacataggacctgactttctttgtttacagttttatattctatttttttaaagcgtgtgtgcaagtgtctgctgctttcagaagattactttatacaatgaatcaagaaacatgtagtcagtaaaacaaaccctaagctaagtactctttgtccattaagaaaaatcatagactgggcatggtggcacacatttctaatcccagcactcaggattcagaggaaggaggatctatgagttcaaagccagcctggtctacatatggagttctaagccagccagaacacacacacacccttatacaccaaaaccctgtctcaaaaaagagggaggaagagtgggggggggagaaggaagatgatgaaggaaggaaagaaatcacagtatttaaataaaggtacaactgctcatttttaaaaggcactggtgcccaaggccaacatttc

SEQ ID NO: 17872 - DNA, 1733 bp, Mus musculus
gtattgccatgtggagaaggcatgcttagtattctgattatgtgtaccaaacatatagcaatgtgtctgagtggcatatcagagggcccactatcgtaggtaatatggggctctcgggtatcagagtggactgagatcacaagttgtgcaggtccaaggatgcacaactgaggctcatggaggaggcccaaagaggagcaggcatcctgtgctccttcttctgtgatagacccatcagacacaggtcctgtttcccaccagaaaagcctagtgcaacagtgtccttacacacactccctaattcagacttacagagtggaaatgaagaagtgtatttaaatcagtttaagccattgtgggtagtattttgttttcttttataattttgttcattttgatccagaatggaactttatatgtaatgatttctttgacaagtttatatacgacttttttaaaaatctgattgctgtatgcatgcaatagtaccattttgtattttgtatttgtctttcacttagataatcaaattaaatagacgtctccaacttctggaagaggagaataaagagcgtgctaaaagagaaatggtcatgtattcaatcactgtagcgttctggctgcttaacagctggctctggtttcgacgctagaggtaacctcagcattcacatatattgtctcaacacctggaaatataaaggatttgcaaacttcattgtttctgtctttgcatcatcgtatgacggccctgaaaatgtatttctccagagtgcagggaaggccctgtatctgtagagtgaaggcctgtggtgctgctgatgggcgttcagccagttgtgcagtggcacctatacactctccttttgcatgtcttgtaaataggctctaggtttgttttgtttttaaagaaaataatttttgtggcctcaccagtctgtacagctaattctctaaacagaaatggcagtcataaagagtgagtttagaaaactgtctgtgaaagaaaagtgttttgtcctgttttcagatgatgaagcgatttctttgatagatgctttttgtatctacatctcaactgtaatgctttctaagtcacagtgctgtgcaggactgaagtcaaaccacctgactctgcttcatcgcctacctgcacaggcggggctaaaaactcctaacagttcagcagtctgtctgtgtgcaatgctgttttgactttcatcttagttttctatcaagtatgtttttaccaagtccatgtgtgaatgatttaaaaacctaaaaaataaggtataaatgtagtgtatttaataaactgtcaaccaaagcaatgtctatggaaagatttatttcatcctatggggctgtggactgaatatcttatccaagtctcctgtcccaggggcaagtagtgaattagtgacttgtgggtcacaagagccacctgggtttctcagatctccaccccagcacagggcttgctagcactgtaaatggtttgctcatttattgtatctatgagaatgattcaggtttatttttaaaaaagcaaaaacaaaacctttataagcctatgtaccttttttctattgtaatacttccttgctaatatcgagcctttagtattcaaaagtgtatttttttcaagaacagttagacttcagctacaatattctttgcacatcatcagtttcctttttactaagagggtgaggaaagttccaaggcttagt

SEQ ID NO: 17873 - DNA, 1120 bp, Mus musculus
acgtgaacatgacggtcggctcgttcgtgtgcacctcctgctccggcagcctgtgagtgcggacgggggtcgtgggtaccgggccgtggcggcggggcccgttggggatgcggccagcctaggccttgggggccggagatgctcttgctctttggccgggcgagggtccagccttggggtggccggcgtgggtggggcgtgggtggggtcggggtcagccagcggccggcccggcggagcatcccggcttcccgccgctcagcgggcgtggccgcgcctcggggggcgcaggcggggagcatccccgggagggcggtgcggggcctttgtgcgacccgcagctccgtggttggggggcccggcctctgctcggtgccgcggagctggtggggagggtgagagcagggacgcagaaagctggggatcttcctccggtccacagcactcaggtagctggggcgtgttgggggcgggcggggggcgttaataggtcttgatggctgaggtgtgaatcccaggagaaaagttctccctagaggattaattacgtgaggcggggaggcagcaaaagcacgagggttgtggctgcatggctccaagtgtcctcagttggggaaagttttactggaaaagggtaatcaggagttgtgcgcttcaaaataaggatggagctcgatgagatttctgtatcagaacccaagtgtcctatctgtctggagaaatggggactgggaagacaatattgagaaaggagatggaggtgaccgcctgaaattactcagatggcatgtctaggcctctctgtttaagctgtgttgtgatgggaatttttgttcttgtgaaatttcacttggaaaggttgcaggtgactctggaactgattagatgcaattattttctggttatcttgaattcaatgcatttttaatgatctggtagttaatattccttgggtcttaaaaaatattaccgtgcatgtcgcagtgtggggacacgtgtgcatgttttgtatacctgggttcacttttacaggctgaaccttttcctgggccctcccaaaattttttattatattaatagcaatgtacataacacgtaggaaattttgtaaaaagttgaa

SEQ ID NO: 17874 - DNA, 1200 bp, Mus musculus
ctgtggaaacaggaagctcaggctcagtgaagagccctgcctcaaaagagaggaggaagagagcagccagggaatacacttgagtcagcttctgccctctgttgatctatacacaagtagatacaattaaaaatttaaaaattggggctagcctggtctacagagcaagttccaggacaggcaaggctacacagagaaactctgtcgcaaagagacagagcagagcagagcgagagtgagagcgagagaatatatgagaatatttgtggatgacatccacagttttgtttactaagaggaatatatttagggctctgaattagctttcttttgttactagagtcttttagaatagtgttgtaactgtgacaattcaaggatactatgaatagattatccctttacaaaaactttgggagatttctgggtatttagtatatattactaattgggctaatactggtagcatttaaatgaattctttctaaagtgagttgtactgcattgacattttcatgaaattcttaaattcatttgtcatgtcttttcagttgtagttttcatattcattaacatatgttgtccttgccatttacagctcagaattctgcaaatgcagattttgcaaactttgatgcatttggacagtctagtggttcgagtaattttggaggtttccccacagcaagtcactcttcttttcagccccagactacaggtagagcctctccagccttgtgcttaaatgtttactttcaaaaactaaattttccaagtgtagttttgaaaaactaaattctttcatgacctaattttaaagtagctctatcttacaacgctctggggaaacctgaagtctgtttctctgaactctgtctgctgtgcgttacctcctgtcctccttttcctgcacatgctctcctgcgagtctccatccgccgaggttggaaacaccacacgttgttagtacatgagacaccgtgactaaggctcatgctgtgtcttaggctaagggaagctagttggtggcttccatagaaatagaaatgttattttatgggtcagcaaattgttgtatttgtttagtcaagtataaattattaatggccgctttaaatgtggaagtagttctgtgcaggaattggtttcaaacattgaaaattcttctgtaaaagtgtactgttttcagaaatctgttga

SEQ ID NO: 17875 - DNA, 1570 bp, Mus musculus
taatattcaaatgaactgtttaaatatttatatgtagtaatgcctcgttcatcccaggataatctggccctttcatcaaaaccaaatacaactaagaattgaaatgattaaaaagaaatctttgaacaatacccctaagttatgaattttgtatgtagagtatatgcatttctttgaatgtgtttaatagtttggtaacttgatttattggtccatagcatattaatgttaacgaaaggaagggtccagaacaaggatggaaagcacgtcctgccaaaggctccgtagggacagccagcccagttgagaagtagtaactctgtgccatcaaaaaagctgaaattgcatacacagtatgtaatgcctgttagaaagtaacttaaaaaaattttaaagcattggtttaagtgatataagcatcacttttctcacatgttgtatttatagtggatgtatttttgcagtgatggctgtctattctcatactctaaagtcgcggtgtttactttaagcactgcagttgggtgccatccttactgggaagttgtgctttgtatgtacttgacaggtgacgtgcctgagacttagtcccctctgaccaacctgccactgagaatctagctggtgttgttgaggcttgcctgcattttgggcatagtcttgaactctttgtacattttggggatctcatctgttttcatggagggaaaacttaaatctttaaactttggtttgagattgtgtcagatccaaatcaattcatatgtacaagttaaactatataattataggccattacccagatgacccaccaggctttccatctattgagtaaattaaacagttatcaaaataactttaaagactattttttcaaaaagctctgaggtgtataatgaagtgggggtggagggactgttctgacttccagtgagtgcctatagtaaaaatagaagttcttaggttcagagcagttccagtgtcacagtgggtcttcgcatggtttttgtcttttaaaattccccatcttttaggcttaaatttggggttgcttctagttttcggcactgtgttgagcattgaaagggtagtgctcagagtgatggctgagggtcttcacagtgtgggctcagtgctcacagcacacttcctgctctgtctctcatcagaagtgaagttctgtgttgataaatttaaaatcatcttggtctttatgatttaaggaatgttttattttagacttttttttttttaaatagaggttagtttgtcatctcccataagatcatttgttctgtaaattaaatacccgttctatggggggtacttggtaactcttcccgtcagttgcaaagtggagagagtggctggctgtgtacagacagtcactgtgctggcatttatgaaacaagctgtttcacagtcatagttcttataactgttgatggtcccggcaggagctttagtttatgagacttgacgctttcataaggttagtatattacaaataaatacagagggatttctaaagcacaccttttagatttgactgtaatagccctattacttg

SEQ ID NO: 17876 - DNA, 1105 bp, Mus musculus
ggcttacctttatttatgtagtctgttccccctacagtttcaaaatttgcttttttaaaggtaattaaaagtttgtataaattagcttattgtattgaatttatcagttagttgaaccttgtgtattttaaagcggtgttattactttgctttttgtatggttgtgtttgaacaaatgaagatgtgagcgtaaccaggcctgtgtggtgggtgtttcacagccatctctgaagaaaagatgaaggaaccagctttgtagtagcaggcttatttttactagtggtctggggtcttgaaatgctgccattgaaacgaacaggagtggatctgctgagcctgcgctagacagctgcagcatagccctggtgtgtgaccccagaactgactaggtttactgctcctttcatgactacatccgggctttgaaaaccttcagtttatatttttaatgatgcattctataagcttatttctgaaagttcactataatttggaaatgtccaagtgctgggaaagattggggcagatgctagtcttccccggtgtggggctgtacaggtgcttgctgtctgcagatgtgccggtagagaactcctagaactgggttcagatcccacaggagcagagcatgcgcttgcaaagggctcctgactccatgtccttcctcgggcagctttgcttccttccgttttaggagtttgggttagtgtttccagtgaagacttctgccgagaaggtctatctgatatcttacccattctgcatggtttatgcctgtagttgagcccattgttgtgaaatctgtccttgtccagtacctagatctgtggaggtcaatgaaaacggaatgtttgattcagaatttcataaaaagaaaatcctagacagaacattttaattgcctatagacatgcccattagttaatttttaaattgttttgttctccagagtcttgagcacttgttgtctgagtcacaatcttaaacaagtagccttctgattataacacttgaggtagggaaggttataaactactgttccacagtgttcctagaaagtggtgaatagagccagatttttacagacttagaagtctttatatgt

SEQ ID NO: 17877 - DNA, 1129 bp, Mus musculus
gtgttgaggaatgctttctattatgtctgtctacacatctgtgcatgcctttcatggttctgccttttaaaaatgcagacttttcagctttctcctttgttttaacgtggacacctttccatttgccatgtgcagcactatctcattgtgtgaatggcatcaggatccaggagtggatgtcctttgcaggaacatttttgcacgtatatgcatatacatatatacatgtttatatgcatatgtatacacacatatattacatacatgtgcatgcttacatggaaattcttgattttggcagatagggaactttcaacaaaacagataattctattttgaggctcatcagctatttatatatggtattttatttcttcctgagaaaaatttcaggtctttcaaatagttgtaaaatgccagcatttacattaaactgtgtgggcagtcagtgcactcactgagagactatggaatctcatgtcttattttatatcttactctttctgtcacccctacctgtgaccctaaagtttctaaaagaacagcttgaaagcttcctcttccagtttgtcagtattgtgaatctcctcattcccacgagcttggaatgaatgaaccctatatttatgaaagaaagtacaagtctattttttcacaactagagtcttcagaattagcttttgctttgggaaacaactcataaaagttttgggttttggcttcttaccgaaatatgcatttagtactagttgtacatagaacttgcttcctagaaaagtttgtttttcatgaggaacacttacctactaactgacttgaaaacccctctgcatgtggagggtaggagtgagggaagttcaaagggcagtagtcaggggctggcttctgtgggctgtgtttggaaaatgttgacatgctgaggtctttgaggctcagttttggtgcaggaagtggttttagatactgattttgataattgtttcttttctcttttggagatgctgaggattgaaccctcagtgttgcacatgaatgctctacaactaagtccagctaatttcttgttcattgtaaaatattgttgaaataattttttaaaataaagatatgactttgtgtaccctttggg

SEQ ID NO: 17878 - DNA, 1184 bp, Mus musculus
atcacaaaggcttcttcggccatccacttgtccatcatagcccacgtccatatgtaatgagatgggcagctggctcagtagtgattacattccagcatttggctggtgatctgcttgagatttcatataggaagtatcctatatgataacgtatatcaaataagccccatgggactttgtgttgtcataatgatagaaactaaccaccttttccatcttaggtatgagtaggagaagggagcaatgataaaaatggcaatagcagtaaaggggccaggaaactatccaaagtctaatttaaaaagagcctgctatctttgttgcttttttggttgagtgatctgaccctaccaagggtttagttgtcttcattatatttcctaaggatgcttttccttcaccagaaagaatgaacaggtttggtagtctcttaaaatacgtgatgatgtctagccatctccctctggttatcaaccttggttcatacaggacctactgctttcgtggctctgcaggtatttgtggtacagtgactaatattgactattgaaccccttaaatatggactcaaatcccagctgtgcacctcaggaagctcaagcctttgatgcctttgtaagatgtggatcatgatgctaatcttttattgctatcaaaattaattgagatggatggatgttctccactagtgataactacaatctatgaactgttatttagccacttaactagtttaatgatgaacatggattttatcttcaagtttccctcaggaagaataggttggaatcttattttaagagtaaggtatgagtctgtatgtttttattcactattaaaattctagcatcttctgcttggctcttcatgaagaacctagatttcactgaaatcacacattagttcatcaaattagtaaaaacacaatcgtcaaaccaaatgaaaactcacttttgttctcaggcaagctggtagtccccttaatgagagtgcacattagggaccacattgttttgttcaaatggatctgtggatcattgaactcactgtggaatttaaaagctaagtgggtttgtcctttggaaaaacaatgacctgggaagacccaggcttatggcattctaaggaccatttatgaacagatgtctgcctactgttctcaacacaccttatggacccgtccc

SEQ ID NO: 17879 - DNA, 1191 bp, Mus musculus
tgggtggtcctgggttctataagaaagcaggaggaccgcatgtgtttctctataatcccggctgtagctgtggctgcttctgaggattctcttctgtcatggccttgggaataagatgccttcgcctgctgcaccctgcttttcgcagttaccatgctgctttgaccagacctgtttcagaagtttccatgaagacagtgagtggaagacaacatgaccataggcagtactcagcctacccagcagtaccagttcgccattttgcaatcaagaaagccaaagctaaagggaaaggacagccccaggccagggtgaacattaatagagcctttgttgaggatataatcagcttggaagaggtggatgaagacatgaaatctgtgatggaagcacttaaggataatttcaataggactctcaacataaggactgcatcaggatcccttgatcatattactgtggtaactgctgatgggaaggttgctctaagtcagattggccagatctccatgaagtcgccacaggtgattctggtgaatatggccatcttcccagagtgcacagctgcagctatcaaggctataagaggaagtagaatgaatctgaacccagaagtggaaggaacactaattcgggtacccattcctaaattaaccagggaacacagagaaatgctggtaaaattggccaaacagaacaccaacaaggccaaagaaaatttacggaaggtttgcactaatgcaatgaataaactgaagaagtcaaaggacaaaacctcggaggacaccattagactcatggagaagcagatcagccaaattgcagacgacacggtggcagagttggaccagcatctggcagcaagaccaaagaactccttggatgaaagtcagcagtcacagccggacacccaagtcccgtgtctgctcatgccgtgggtggcaagctcgtgtctgcactgccctgaccatgcactcgaggctgacactgctgtgcctccatcagccattcagtctcctgttgcaatgctcagatttatggaatctcttccttgtttccgtgcacaggcttgttctgctctgaatctccccttgtgaatgtctctgttggcagaggacttttactctgacagtgaccttgactatggtgtcattacagcactagggccactgtcaggcttagcagctcctc

SEQ ID NO: 17880 - DNA, 1153 bp, Mus musculus
tccccctcaccattcactctatctctgtttcaaggtcaggctgtgcatggatattagccaagcatggcatatcaaatgacagtaagtctaggtacctcctctcttattaatgctagatgaggtgacccagtaagaggaaaaggtccccaaatcagatagaagagtcccttcctcttactattaggagtcccacaaaaagaccaagctacacgactgtagtttatgcagaggatctaggtcctatgtaggctacctggttgtggttcagtatctgtgagtcactgttagcccagattagttgaatctgtggcttttcttgctgtgtccctgatccctctagcttctataatccttctgccttctcttctgcacaattccccaagctctacctaatgtttgggtgtgggtctctgcatatcaatctataagtataacagaatatcattaagcatcatgtcattgactttttgctagtcacagcaaatcctaggtctctgggctatccagcctctaggtaggacaaattattaattaggggctgcagagatgcctcagtggtaaagagcacttgctattcttgcagaggctatgagttgtttccagtacctgcttgggtcagctaacaatctgtctatagtttcaattccagaggatccaacaccctattctgtcctccacagggcctatactacacacaaacatacacatacatataatttttaaaagtcgaaaatgtctttaaaaacttttaaaagattaatttgagagagaagggagggagggaggaacagagagagagagagagagagagagagagagagagagagagagagagaatgaggatacagcaagggttcaaattgagtttagacaattatttgggagaaagttgtatttgcaattaataaatagtccaagtatggggtatatggacaggcctgtcaatgtccagttaggagagttagatctgtctatagagctgcagacacggaacttgaaaactgtcgaggtttgaataaaaatggctgccataggttcatatagagtggcactattagaaggtgtggcctttgttggaggaagtctgtcattggtgataggctttgaggtatcaaaagctcaatctaggcctggtggctgactgtctcttctt

SEQ ID NO: 17881 - DNA, 1198 bp, Mus musculus
ataatgagctttactatgctaaaataaacttttagatgtattcataaaaaaaaatatgaaaaggtgggctggtgaattgcttagcaggtagaaatgctggctgtgaagcctgatgacctgagttaaatcgtccgaacttacctgtcagagggaggaaactgagaccccagggctcccctctgatgccatccattccaagaaatatatatgttaagttctatagctttatttaaacatcacatattgtatatagtataatagcattcaaggcagaaataaagggtatcatctaattgtatcttaaacaacaaatgatagtaactttactgtgagaagttcttaattgctttgataaagcatctctatttctttcaattgtttctacagagagactgtctcaaacaatagaactgaaacaaaatccaaaatattctatatttccaatgcttgctttaaattgaaaatatagttgtgaatatttgtaatctctactagcactcatgggaaatagttgatattttagactttgtgtaaccttgttgaatttactgcttacaacaaaggggaaaatatataaggaaaggacataaggaattcccagaatggagagggtctgcaacctccccagtgagaggctccttgaggacaatcagcttgctcacaacatctggctcagattcttcatgaataaaaacagaagcacaggacagaagtaacagaaaggaggagtgagagagtgagatgtgcataatcatatatatatgccaagatatctaactagaggaaacatcatctgataaaacaacaaccaagataattccatgggagaaagaagaatcttgtgagaccacaaggaaagaaataaaacgactagttataatttaaaaaaataaataaataaagcaaagcaaaatattgaggctgtgtgtgcagttgaagaaccccattcagtcaaaataccagttattgatgccttctctgaggaccatttatgatgctaatcacagaaattccatgtgtcatccatatgccttaacaaccactgctgtgttcttgtttgtgtgatcagatttctgccatctcctcttcactgtcagtatggaagaagattcaccatggaaacaacagcaacatcacactggtacatgggctagtggaacaactccttcatagaaacagcatttccaatgatcacgct

SEQ ID NO: 17882 - DNA, 1145 bp, Mus musculus
gatgttttcctgggccatgctccctgctttgagcactgaacataaatgaggaagcagatgacgttctccctgttttctttccttctcacttgcctacttcccattcaggatgtgactctgtcttctctctgaagattgtatgtcacttttcttgaggttctttgaattcaagtggaacagcagtacccccttagaattctggaaggatgtgtgtcttaggctctctatggcgggcataaagcaccatggcctaaaacaacttggtgaggaaagggcttattttatcttatatttccagatagtagcttaccactgagggaagtcagggcaggaactcaagcagggcagaaacctggaggcaggggcggaagcagaggccatggaggggtgttgctttattggcttgctcagcctgctttcttagaccatccaggaccacccacccaggactagcactggccacagtgagcggggccctcctgcatcaatcactatttaaggaaatgccctacagacttgcctagaaccccatctcctcaaaggcattttcttacttccgattcccttttctcaaatgattttagcttgggacaacttgacatgaaactagccagcacaatgtggttgatttatagtttcatgggactgaacagagacatttctgagctggaggttttactggccctatcatgtagtagttaattatataaaacggccagtccaagaagcgaaatccaacaactaaacttgtgagaaaagctcccaacttggacttaaacacacttaaaatcagcaccatatgtatctgtttcctacacttgagtttttgtgtttatgtgaccgggtgtgtatttaattaggatagtcatgctctggcatgttttttttctcattttaaacaaaagctaattttttttttttttttttttttacccattacctcccattcacatacatgaatccagtgatttctaatttacgtagattttccttttcaaaataagcttctttgaatatcaagacagaattcaagtagaacaaagaagaacataccagtcacttttgtgtcattgtagatgaatacctgacaccagcaacttaagcaaaggaaaggtttatttctttcatgatggcttaggctcatg

SEQ ID NO: 17883 - DNA, 1200 bp, Mus musculus
ttgcttattggttcactagagagcagggtctgttagtgttcaggtggccaacctgtgtggagttggatccaacctctagctttctgtgacttctccttctgtgaagaagaaaaacggtgtttgtgagtcaaggagtccccaagcattcccgtgtctgagactctctcctggttaactgatacacaagacacccagtcctgtgcctcagttaactctgtataaaatgggttttggcatcacagagtttgaatgcaattctatatagattgctgaaaactgcatacatgccgcatgtttattatcattgtcctttgtcatatgctcattatttatggcactcatctctgttctatcatcacttcctagtctagccacctgtctgcctatcatttatctatcatctgtcaattatccatctattatctatctatctatctatctatctatctatctatctatctatctataatctgtctacctatctaaccaccatacatctatctcatctatatattcatctatacacctatttaagtatctattgacctatgtagctactatgtatctacccatgtgtctacctgtgtgtctatttatcacatatctgtctgtctgtctgtctatcatttgcctatctacttatttacttaggaaacaaacatggagatgtttttgttcaagtgcaaggattttataaaagcatctataaaaatctgtgtcatggtctttgtcctcattgatataggactgtttagtaccagcacctgctatactctagccactgtttcagacctcctctttggaccactggaaatgagttagtacttccttgggggagaactataatcatcatttagtgaaaacaaagagctgttgtagacaggatagatttgggagggggggtgtatgggagtgatgacccgcagttgtttgcagtgaggccagatatggtagggcatccttagcagagcaaatagcatagtaaagagctttgtggagaggaagacatgcttcgagaatgggctggtttcatggggctgggagtgcatgataagaagggatgatacccctgcacaagaacaaggaccatgcccacaacgaccttgcagtgctgtgttgagcagactttctttaaaaacaaattatttgtaattatgtgcttctctgtgggtgtgttgtgggggtgtatgcacctgagtg

SEQ ID NO: 17884 - DNA, 1223 bp, Mus musculus
gtttcacagtctctactagaagtaaatttgaatgttactgaatagataaccttcttactgaattcctactgaattccaagtttgtcggcttcaaggattttctgggacattggaacactgatgaaggcttagctatgtcagaattaaatcttaaaaggcacttataataaaaataatactaaaagagagcatgtggatccatacaccagaccaattcggggatagggtattgaaagtataacaacgtaaaaacagaattctaggcctttaggcccaggcttgggaatgtggcctttgtaaaggtatgctaatcataaaagagatagcgacattcctctacccacccgcttcctgggttcaaagagtgctcattcaaagaaagtcaccctggccattaccagaacctgcaatgcaaatgtgctattgttagaggctcttagaagctgtcttgagagttaacaattaccaggtattccttgtgactcttgtaactttacacttccttgtgactcttaactggtatctttggtatcttccaacaacgccctccccacttccttgagtttcggtttcttcctttaaatacccccttacccagctactcggcgcgccacggtcctctacccctgcgtggtgtatgaccatgggcccgagagcgctcttgaataaaaatcctcttgcaatttgcagcaagacccgtttcttgtgggtgattttggggtgtcgcctctcctgagtcagaacgtgggggagccctcacattgtgggtctttcagtatgagtattcgggttatgagaatgccaaggttccaggaggtaagtttctctgaaactctttgcctcgtgagtgcttccaggcatctcggcctgtcaagcagactacactggagtgtgcatagcaaagggtctagagttatgtctctgtcaacatgtgtattagggattctttaaaaaaaaaaaaagtcagccgggcatggtggcgcacgactttaatcccagcactcgggaggcagaggcaggcggatttctgagttcacgaccagcctggtctacaaagtgagatccaggacagccagggctatacagagaaaccctgtctcaaaaaaacaaaaaaacaagactgaaaacaaacaaacaaacaaaaactaaaaaaaaaaaatcaacaaaaaacaaaaagaaaaaaagtcaatagatttcaattctacagttccttcctttctctg

SEQ ID NO: 17885 - DNA, 5652 bp, Mus musculus
gttggtgatattctgggcactaaatgaaggtgtttgtcgacagtttgactcattcagagatggatttgaatcggtcttcccgctctgccatcttcagtacttctacccagaagaggtgagcagcacatctaaaaaacacaggggccattgttgtctgtgtggtcaccacagcagaatagttaccctgttgcttaaaaaaccaccagtctataggactttggagtaagggcttggagttttggaaaagctagggaaataggaaagttagttaaatgagggagcagttctatagaggggaggtaggtagtcttgtgtgaagtaaagtacagagcagcattctagcccaaactgtaggccatgctgttcagtgtgaagggtcttggtagcgttgcacactggaagccatgttcttagagagacagctactgtcacccaagcatggagacttatttctgtactaattctttacccttatttcatctcatagctggaccagctcctgtgtggcagtaaagcagacacttgggatgcaaagacattgatggaatgctgcaggcctgatcatggctatactcatgacaggtaagtatagactgctagttcttcagttaatagctaggaattttgtgggaattctaaaattgtgtattattgaagttgttccctttagatttcagctattacaaaaagtgtgttgtaatgagagttcatatgtaatgatacctgaaaatggatgtcatcatgattataagtgaggtttggtatatttacagttccatcttaacgcaaagtaattttgttctacttttttgttttagtcgggctgtgaagttcttgtttgagattctcagtagttttgataatgagcagcagaggttgtttctccagtttgtgactggtagcccacgattgccagttggaggtgggtagtgtctgcttggcctttactctgtctctggaggcggtctattacttggtgcacactgtctgttatcccatcaccattgtgtctgagctgccagtctatctgcataggaatatgtaaagaaataatattgacacggaaaatcagactgccttaataactgtcaataaacacttgctaatggtcaggaatgttggttgcttagataaaattctagagtctttgcatgttttaaaatcatggttaaattacagtagctaaaaataagttgaattagtcttctttgggtgttttttaaatttgtattttgtgtatgagtgcttagcttgccatgcatgtctgaggccagaagaaggtgttgaatccttctttggactagagttatagatagctgtcagctgtcacatgggtgatgggaattgagcctgggtcctctggaagaatagcaatgatcttaaccaatgggccatcattaggcagaagagaggaatacttgggcaatttttaacaagtgctatatcttgtgataatggcatctaaaaaaaccttaattttctggaactttttctcttaattaggatttcggagtttaaatccacctctgacaattgtgcggaagacatttgaatcaacagaaaacccagatgacttcttaccatcagtaatgacttgtgtgaactatcttaaattgccggactactcgagcattgacataatgcgggacaaactcttgatagcagcaagagaaggccaacagtcgttccatctttcctgatcacaacaagaaatcagtgtctgcctgttacagcaaaagaaaaaaatcatgatttcttttctgtgtcacctgagtcaaggaaacatgttcctccctcttgttgtaggaaaacggcttgcagattataattcgtaatggccctgtggacttaagtgatcaggccctaaagcattgttgtgatgaggtttctttagcaagttcttgtttaaattatcatttatttgatgagtgaagtttttaacttgctttgctgtgtgaaatttcaaagggatgttttttcaggctggaacaataaatgtcgctgtgcagtttaattctgggctgtgtgtatccatctagctaagtctgcagtttgtttcttccaaagacaactcttgtacataagtacagacattaaattcatgtgtatttgacaactctagtatagtaaatgggttctgcgtgccttccacctaattttcttttccgagttcattgctgcctctgcagttcatacaggtttggtgtttggtttttgtttgtttgttttactttttaaatacaacacgtacagtttcattagccccaggccttgtcatcctgtgttcattcaaattgagatacaatctaaaattcattgaattgaaatatactctcaatataatacagcctttgtatctaggcaggtaggctttacttatagtttagtttaaaatagttacagagcacgcttggcttcttgccaggtgatacactaggtctgtttacatggtatttcccttgtcctctggaaaggaggaaggaaagctcactcatttttctgtataggttaaaaggtccacagtgtgggctgcccagtatttattctatggccaaaccattttgaattggtgtaaagttttaaatgaattaggtccgcccccccacccccttattggagttacaaaagatatttcccccactcctttgttcctgtttgtttctgttctcagtctttatttcattctcgtcttctcccagcgtgaattgcagacaagctgttcagcccttgtctacacatagatcaaagcacctgtaagcaatgctgtccatttgtttgtgtgctcatttctcagatctgcaataatccatcaggttaatgtttttacctaaaaataaaacagatttgcttcaccatttttgtttatagttctgtgctgtcacacacacacacacacacacctgtcttaatcacttacagtacaagtaagtcgtcctgtggtcagaagtcaagcaaggtcttgctgctgtttacagcttcttgaagaacattaaatgtggaaaggaagtggaagcagagctttcttcctgaggctcaaatgaagactaataaatttgaactctgacttcatctccttcaatatgagatgcattatttaaaaacaaacaaacaaacaaacctgaactttgaagaaactaattgtactgacatagagctgccttctttattccatcacccaaaaggaaggtagtgggttagtttactcctgtaactgtcattctacactgaccttgccttatgtggaaacatcccttgctgacagaaatctcttgacagtttgcccagtcagtggggaggagttggggccaggaagtctctgctcacagaggcttgcaaatgagcagtgttatctggagggagttgggttctgcagcttcaccttgatggctatgggatctgggcccctttgtctcctgttctcctgttttacaaactgagcacaaagatttttgtgtgaaaatagcattgtttcacctcactttttaaagatctgttaaaatgtagacatctgtataaaacaaagtgatgtttcatattaaaataatatgtatttgcattttacacctgtggtgctgacagatttgacttcattgattccttgtatccaatggttgttatggttctgactggaatatttcagagtccacggtcatcagcttttgatcatcaactaagtttgctcaatacctgggacctgtggttaattcggggtcaggaagagcacactttaagcactctctgagcagaggccttattgcacactaggggtgtgtacacttggtttgctgtgttccagtggtttgattcagggacctaccaacaggcatggttggtatgctttcaacactcagttactccagttgtcaggatgttaacagaacctcttcctggtcccagaagagtaagttacattctaggtctaggtggctgtggatgtctcggctcagttcagcaaaagcatttttcatatagccaccaacaataggaaagcagtaaggagttttgtgtctggttgtgaaactgagcacacctcttgagtcatgtagccaacgggtgccttctgcttctagagtgacttccttgggcatcttatgtatgaagggcaaggaccgagcaccagcttctgcatctcacagacagattgtctccatcccttcccctgcctagcaggggccctccatgcctttatcctccccctcctgccccgacactgtgcagccacacctatatttgtgtgtgtggggggggtggttgtttgttttttgttttttcaaatgtggctggtgatgacccaatatgtcctcatgcttgtggctcaagcatcaaccccactaagccatcttcccagccatcacttgggcagatttgagtttgtggtgttttctcaagtttattgtgtcttgagattcctttttcatttcttatcaattagtacaaggttaggaaataggaaggttggcattcttccaaaaacgattgccaagaacaatttgttggaaggaaatacatcaaagtgcattgatatgcctaccctttcctttgcattctgggtgttctactaatagaaatgccttccatttcttgtatgctttggttttctgaccaattttgttttctccattgtaatgagaatattgtctgatctgttttgctttgtttgattcttttgaaaggtgttacataggggttaggtttgatgctgcagtagatccacaataaagagtgacctagtaacaggccactggaaagtcgcggttacccagacaagtagtagctctggcacaactcagctttcactgggtcaaaaagctggcatatgctaagaagttcaaatgaacagttattaatgcaaagaagacatttcttaatgcttacagacttgttctgtatcaaggagacattcttcagtaatggaagagggagttttattttttaatacaagtggactcatgaccaaactgataagcagctggtctctataaaatgttttctttctcttttgatctgaaacatttatataaactgctggaataatggaacttcagactaccaagtgtgtatgtaaaattgcatcgatgccctgacttcctgactatatttttaataaacagcattatccttcgtggttagttttgttactttatgtacaaccagagggtgtttcctgaagtgtgtggatggtattttgagaagctacttctaaggagcagggatgatgttaacaatattgggggcaggttttctcgaacacagagcacttaatctctggagcaaggtgttcaccattaagagctcttgtgcattggtgaagccttcgtgtctttggagttgttgaaagacatgaatgtacagagacaatagatggggaattctttgagatcactgtccttgcctgtcatggctgattgttctacccacaacaatgggtcttatttctgaaacagtaatctggatgtgtgggggaggggtaggctgacatcacattagagaggtgctgctaaataaaagtttagcagtgaaaactgtgaaactctgtttctggctctgttggggactgggaagcagcaccttggggttgaagtagttcttggaattggtattggcatgttaatggacttttcaggtgttttagttttaatttttcattatgtg

SEQ ID NO: 17886 - DNA, 1085 bp, Mus musculus
acacctctagtgtgtgctttctatttgagccttgtaggggacggggaaaagtttattaccattactaggtagtacattatctgtattgttgtctacatattttactcttgagtatatacttagtttatattggcctagaatttagaaaaaaaatttttattttgctaaagtttaacaaagacatttaaggactttattatgtgatttgagtatgcttacagggagcaataactactccatatggaaatcttgtttcccttcacaaatgtaattggatcctgaggttaagattatttcctttgtgattccagtgacttacgttgaatgtgaccaaaatttgtaactaggcactaaaggaaccatcaattgttaaaggattatgttttataaatacagtataattttgcatgtatttttgtgcttccctccccattgttatcccccccattaaagaccaaagagagtctacaatatgcattggaaactcttacgatgaatggctgttcagtggaagatctgggattggattttacgctgcctgggtttcccaacattgaattgaagaaaggagggaaggatattccagttactatccacaatttggaagagtacctgagagtacgtattgtcccgtgggcacacctgccctcccccccccccccccattttgatctcagctgtgaaggagtttttatgttgtgctctttgcatgccattgggaccactcttgggaggtccttttagcctttgtaagcttctgtgtgctttgttgagaacacacagatattttatactaaagcaacagaacaccctaagaagttactgctctccgcactttgtcttccttccagatgagaagagctctatcaaacatgtttgtgtaaagagcttaccagttatttctccatatgaatatgatcttatattgacccatttttaaactttattgagtacagtgctttataccacaattttctcctctaagaagaaataccagcagaaaggagtcatcacttgtttgaaggcagctaactggcagattgcttttaaaaacaccagtatatgtactcaccctaaagtgtatt

SEQ ID NO: 17887 - DNA, 1898 bp, Mus musculus
caagaggttatagctccagttctagaggatccagcaccctcacacagacatacatgtagatgaaacaccagtcagtgcacataaataaaatagaaaaagaagaagaaaatgaacaagggacttggaatcgctgtcataatgaagtctgtcataagagaaaagaaagttgggctggagagatggctcagtggttaagaacactgacgtttttccagaggtcctgagttcaattcccagcaaccacatggtggcccacaaccatctgagatggaatctgatgtactcttctggtgtgtctgaatctaaagatagctacagtatactcataaacataaaataaatcttttttaaaaaagagagagataagaaagttaattgataaatctccacttgtgaaactgcttattaaaatgttttgttgtggagtgttgacttcagacggctgtgtttaatggtttttgttttgttaaatacataactctagcttcctggagaagagcctgttggaagagtagaaccagtgggccatgcacctttgctggcattggttcacaagatgaacaactgtctcagccaaatggagcaatttccagtcaaagtacatgatttccctagtgggaacggagctggaggaaggtaaggaccattacctgggtatgtccacttgccaccagaattgtgaaggaaaacgtggtgagaggtctggtaaggtgttggtcttttttaggaacagtgttctgtaatgacttaagtaatttgtgtcaattaattaaatgcatttttttatttaagatcatgcactgtatttgatctatttatttatttatttatttatttatttatttatttatttatttatttatttatttatttattgtgtgtgtgtgtgtgtgtgtgtgtgtgtgtgagacaaggtttctttgtgtacctctggctgtcctggaactcagatcagcctgcatctgcctcccaagtgctaggtgtgacaccatgctcagcctataccatgtattttaacaactgattttttgtttgttaattttgtttttgttttgttaatattttgtccttggctgttctagaaggctgttctatagaagctttctctatagctcaggctgtctttaaacttacagagatcaacctgcctctgcctcccaagtgctgggattaaagacatgtaccacaactgcctggcttacaactattattttttaaaatcagtaaatcagtgactggaaagacaaacattcaaaatttctggtttttgtttttcgagacaggatttctctttatagccctggctgtcctggaactcactttttagaccaggctggcctcgaacttagaaatccacctgcctctgcctccggagtgctgggattaaaggtgtgcatcaccatgcccaacacattaaaaatttctaagtagatatgttttaatatgtaatgattctcttaattttgcttttgtatattggcaataaaatattctgactcttttgatcagttctattttgatgggtatgtaagtatccattttcaagattgatttccaataaaaatttgttattcttactggttttaaggacttgtaagatactagagacaggtaaaattaatttgttagggaattctgtaagctttctggagtatttttattgaaaatataatgtaaattagtccacattctcacttttacaattttgaataaaaacagtatctatattccttcacagtatgactgaagttgttttctactatcttagaatagttttatgaaacaaagggacatcacaaaatatggtggaatacctgtaatccaaggaagttcccaaggaggggggaatattgtttttttgttttgttttgtttttttactttagattttacttacaa

SEQ ID NO: 17888 - DNA, 2351 bp, Mus musculus
tgtgtatacctcatttttacctcatttctttagggaacagtgatggacagtattagatatatttgtcctttatccagttattatgcaaatctgtgtttgggtatgaacaggaagttagaacacttgttactcttcacctgatgacaaaatacattccaagtacctaagcaattctttagctacatcttagtccattttgagagtgaagctgaatttgctttttttgagtcataataatgatagtaggccagtaagagttttaagtgtagctgttttatttctctcatatatgtatatgtattaagtacttgtagaggtcacaaaacaacttgcagaagttggttctcccaggcattgaactcagcaccgtaaccttctgaaatatcttacatttctaatctgactttggtgtagggtgttttttttttttttttttttttcccacctatccagagacatatctcctttttccttcttgtagagaaaaaattaaaggctggattaaggagcaggcacataaatttgttgagcgttattttagttctgagaatatggatggaagcaaccctgccttgaatgtccttcagagactttgtgctgcaactgaacaactcaacctccaggtactgtctgtgtccagtgcattgctgggacatcagttgggtggtgtttgcagaaactttgctttctacaatttcttccgacccttgtccattgccatgatttatcatctacagtacatactggaaaccttgccatttctttttgttctttgagttgcctatttcttgacaaaagacaaaatttcagaaatgtccccttttctaaatacttataaccacctctatctgcagactcgttgtatttacttgactgaaagattgaaaggcttgaggctttattgtgcaacccccccaccccccgtttttcccccacttaattttttgttcttgttttctaagttatttcatagacattttatgcttattaacttaaagccacatcacaatttatcatttttaatgtggctttctaaaaaaaccttattctaattttaaaaagttattaaagtatcaggtgtacaaagtcatggcctaatatgttcatacatgtatattttgtgcattgattctattctaattttctacccattgccccctcttgttcccctctctcctggttctcaagtagtagctgttctacttctgtgtttctgtttttaaatgtgttatatacatactagaggtagcatgccctaatttgcttaacatagtgacccttccagataatgacacaattatggaggagatattttgacaccatttaacaaaatagtagtaggttccttcttaggacctttgacctccattgccttttaaccaggtttacactatcaggaataaatttcctcttgtggagtgggcttcagatctaagcccagtagtgctctagccactgttgtaccagtgggcacaacttgcctggcaggttggtattgtagctcatagggttcatagctggctagtggtttttgtttgttttgattttaaggtattgagaaaaatttctttttgggaaatgtgaattgtagtgtttaaatcattacagactcttcttctccactcttttaggtggatggtggagctgagtgccttgtagaaatccgtagcatagtctcagagtcagatgtttcttcatttgaaatccaacatagtgggtttgtgaaacaactgttgctgtatttgacatctaagaatgaaaaggatgctgtcggcagagagatccggttaaaacgtttccttcatgtatttttttcttctccagtaagttgatagtgctcatgggtactaagagtcagagctagcaagtggatgtatttgtgtcccaatagaagtatactttgtgttgcttattcagttagattcctttgacagttattgacaaagtcttactatgtagatgaggctgggttgcaattcattcacagagatgtgcttgcctctgagtctcaggtgctggggttaaagataggaatctgctgtatctggctcttccaaaaatttttttgtgtcataaaataagtagtaaaatgaagctagacacgaagcccatgattagatctcagcacttggagggcaaggtaagatgatcagatacacagagagttttagaccctttcttaaatacaaaatagaaatcccctcctccccacttctagaaacctaaaggtgttacctatttttcttactttgcaagataagcattaatattagtctcatttatcaatatttgttggccgtttgataggcagttaaagtattactgcttaacataatctataatgtagatta

SEQ ID NO: 17889 - DNA, 1178 bp, Mus musculus
ttgcaagttattcagtgtattgatgtggcagagcaggccttgactgccttggagatgttgtcacggcgacacagtaaagccattttacaagcggtaagtgttatcgataaagtgtggggttgtttttgttttttttttgtttgtttttttgttttctctgtagccctggctgtcttggaactcactctctatagaccaggctgtcctcaaactcagtgatccgcctgcttctgcctctcaaattctgggattaaaggtgtgcgccatcactgcctggcttaaggtgtgttttctttattgttgaactacattgtgctaattccttgactgtagctctgtaagatgcacatgctgctctgaagtactgtgctagacattttagtagttgctttttataaaggatattattttctccactttaaaacagttttctatatttcagggtggtttggcagattgcttgttgtatctagaattcttcagcatcaatgcccaaagaaatgcactagcaattgcagccaattgctgccagagtatcacaccagatgagtttcattttgtggcagattccctaccattgcttacccaaaggctaactcatcaggtaaaatacgaatgtttcctgtgacatgaaaatttcaaattttgagttcttctaattggatatgtttaacacaaagcaatctgacttatgtttctattgaaatgtgttgtccagtcatataattgtcatttttataaggttttggcatattaacctaaatggtttataatttatatatttaataacttaattgatattaactaatgactttattattgcactaattaagatgttactttgtgagatcagtatttacttttagaaatattcctctaaaaggcatttggaacaaagggcttaggtaatgactaaaagggagagattgtccagaaatagaaatgaaaagtatagatttcacctgtactggggctggaggagagccagtagacatgtaaaggataaaacatcagtgatactgtttgaatagcagaattcatatcagatttgaatagaggagagtgagtgctatgtctggaggccagagagaagcaggtttttgttttttgtttttgttttttttattcttagactttacaagtgctgtatgagtagaagcaccttttaaggaatctcc

SEQ ID NO: 17890 - DNA, 1200 bp, Mus musculus
tactccatgtatgaattaggtgggtttgtacttatatctcagatgatagattttaatacactcccaatgtaaggggttgcaagagacattatgtgaaagtttcacattacttgaaagtttctgagataaatagcaattatttataaaagcttccccatgataccacttatgaacatagcttttctttacaactggtaaaagtggtttatgattttcatgcttctggacagggtgaccaaaatctttctgggaagtaatgttaataggaaaatgaggcaaggcttcttagtccatgacttacctaaaatactttgattttcttcaatagttgtaatctgtatacgttttaacttctctccaaaacttcatttttagaaatggcatggaggtgttttaacgtataataactaattaaatttgtgtatgtataatgttttagaaatctaatgtaatttctcgtaaaattcatagtgcaaagtaacgttgtgctaattgtgtgagatgaatcagttccttgacattttttaggagaagatcaattactttaaatcaactcaattattgcccttttttttttttcctttagctctgttagaggccaggggtcttcctcctcacctatttggtcctctcgggcctcggatgtcacaacttttccatagaacaattggaagcggagctagtaagtgaatattttacaatttttatttctcttagtaattagttatgtgttattcttattggttatttgttggcatataatttagtatcttttaggtttccttctatacttttatttttgactacccaactgaaattataaaaatccatattaaatattttaaaagttacttagaatttagatttatagttagatcatctgactgtacctttttttgttcaaagctttttatggtgtcacaaatttcatcccataagatagtgttaacataaacctgataggaagatttctcagcagcattacttctcaccagactatcagattaattataacccagagccattcatggttgacctaacactgactaatacatatagtcttgatttataactgaaatattgtcctataagtccagttaatgttttccttggcttgcatttagtaatttttctataactttggtcagcttggtagctgactgatgcatctcatcaagcattgatggtatttgtgtgtgt

SEQ ID NO: 17891 - DNA, 1485 bp, Mus musculus
aagtctaaagtacatttaaaaatcatagtactttccttccatttccaactatgaaaacgtttatagtagtagacttccgaggctttgtctcccaccacctttttcccctaaaggtccagagatataagggagttgggaacctaattgttagaagacaggtttactcatgacaggctacggctaacacttctcttatctaacttcttagaagctgcagttcatcatctgctgtcatagttccacaaccagaggatccagacagagccaatacttcagaaaggcagaaaacggggcaggtgcctaaaaaagacaattctcgaggagtgaaacgcagtgctagtccagactacaacaggaccaattctcctagctctgcgaaaaagcccagagcatttcagcatattgagtctttctcagaaaccaataagccacatagtaagtcaaagaagagacatttagaccaggagcaacaactgaaatctgcacaattgccgtcaacaagcaaggctcacaccagaaagagtgtggctgctggtagttcacggaatcagaaaagaaagaggacagagagttcttgtgttaaaagtggttctgggtccgaatcaactggtgccgaagagagatctgcaaaacccatcaagctggcttcaaaatcagccacctcagccaaagctgggtgtagcaccatcaccgattcttcttctgctgcctctacttcctcatcatcttcagctatagcctcggcctcttctactgtaccagcaggtgccagggtgaaacaaggaaaagaccagaacaaggccaggcgttcccgttcagcatccagccctagtcccagaagaagtagcagggaaaaggaacagagtaaaactggtggctcttcaaaatttgattgggctgctcgcttcagccccaaagttagcctacctaaaacaaaactgtctcttccagggtcttctaagtcagagacatcaaaacctggaccttctggattacaggccaaattagcaagtaagtttatgggaagatctttgtttactcaaagaacatgtcttggttggtcaggagtgattttgttttcaaatcagtttcattttatctccatataacaatgcatgttagttaaaattcaagttaaatttgtagagacagttaaggaatgtctttattactgctgagtaattacatttgtgtctgtttgtctttttagaatctgctattcaatgattttctagtgtcaacaccagcagagttatttattctgtactagatttaaaaaattatttttttcctgtattagattttaaaagcaatattttatgacttaagagtgcttcataagatggctgcttcatatattccacatatttaatttattgaaaattgtaggagagtagaaataatacatctaagcaaagtaacaggtggaataatcatagcgctgtatgttttccttttcaaaatagccttggagatggagattta

SEQ ID NO: 17892 - DNA, 1195 bp, Mus musculus
cagttataataaatgtttaaaaactatagtcatattgccttttattttaatgtaaaaaacccatacatttatgggttaatagtaaaagtattttgatacctgtatatattatgtaataatgttaaacttttatcaagttaaatatacctatgttatttgtcatttttttctccaaaacattcaaagttctcagtttttggaatatatattacattgtcatttagtcaacctatgccatgttattaaaagaagtgtgtgtgtggtatggtgagaaaatactagaatttctgtaatgaaatctgaaaaatattacttaataagcacaatgtacattttggtaactgatatttaggaatcttatcctttgggtatagaggtggttgattctaagacaaaattacttttctcagattatctgataggatcacaatttaattaatacttggaagacttgtaggtcaactgatttgggaggctttttaatgtaaaaatatttcactttcgatactgcatttgcatctcagtgtcctgatagatttctgttttgattttctgctgacaggtcacacttagggcaggcaaaacgtaagggatatatccctcctgagagtagaaaatctaattttaaggcacccaaagtgcaatctaatactacttctgaactgtcaaggggacacctttctaaaaggtaaattttcatattgcttatacagtttcaaggaagaattaggatttgaattatttcataatattaaagcttatgaggttatctcaaatgttagtacagttttttctctgtattttattcacttcagtggtcttgctgataactaccgtaggcgatgaagttttttccttgtttaggagtgatgaggttcctcatttgcttaacaaaaccatggtaggaatttaaaaaacagagaggggggagagagagcgagagtgagagtgagagagagagagagtgagtgtgtgtgtgtgtgtgtgtgtgtgtgtgtgtgtgtatgtatgtgtacgtggacgtgtacgtgtacacatgaacgccactgcccacggaggccagaagagagggcattggattccctgaagctgaagttagaggtagttgtaagctacctagtataggttttgggaactgaactcaagttctatggaagagcaacaactgctcttacttaaatgctttcccccagtt

SEQ ID NO: 17893 - DNA, 1189 bp, Mus musculus
taggtatatgagaagcatgagcatgctttgcatatctatatctgccagtacaattgctttctttaaatgtcactatacttttccattataataagaatccctttaaaaaatatatctatttatctgtgtgtcttatatacatgcatgttggagataaatcggaggaaaactttctgaagttggttctcctttccactgtgtgagtcctgaatcttagaaatagattgtcatatttggtggcaggtgattttactcatcaagccatcttgcaggccccagatttccattttaatgtagtctattctctctgccaatgttagcaatcctgcagaaatctcagagcacattgaatttctcctaacacatttattacaataacattttgggatccccaggatctgcaggcaaactcattaatctatcggccttttttgcttgttcatttgtcattatgttccttatactctcaaccatgttgtcctaagccagtaactcactgttatgatagcattcacttttttccctgtatccttttgtaggcttaacattattttcaagtagaccagatcctctttgctttagagtttttaaaagcattataccactagacttggtatcatatgcttgtaattcatatacttcagaaagagacgacaaggaggattatgggttacaggcatgcctgggctttgtaggaggctacttgaaaaactagctgggtgagggtggtggaagtctttatcccagtaggtgggttttctgtgagtgccaggccaacctggactttggagttttgaaagagaaaagaattacaccctctttacagaagataaatggaataactatggtggttttatcaaacatctcctagttacagcagcccttctgttcaatgtttcccattcatcttgaatggttgttacttctgttaactagattccttctatccattgcctagcctttaagagaaagcacaagacttttgttggcattcctgctcagatgggaaggtgtcctggggactcggattcccaggaaccacacaactctgggggaaaaaggtattgggtgttctgaaacacaggagctcaggaaccactcaggtcttagaggaagtctctgctgagatgaagcctcttcaggtgttgcagctcctcagctaagcagaggaatttaggagccttagccc

SEQ ID NO: 17894 - DNA, 1235 bp, Mus musculus
gtatttcatggtaatctgaaaaggagttgggaatcaaaacaagacaaaacaaacaaacctcctcattatgaggaccaaaacatggttactttcctaatttctgaacaaagtagctcaaaattggaatttaaagtgatttttaaatttttttctgaaatcgtagaccccactaaaattagttcccaatcactgacatgaagccctaatttaaggttgttagtatatatgtatatcatgttttgttctttgtatttgcttagtacattttgtaacatgtctttcaaccatttgcgacccttttttgttgttgttgttggtttttggagacagggtttctctgtatagccctggctctcctagaactcactctgtagaccaggctggccttgaactcagaaatccgcctgcctctgcctcctgagtgctgggattaaaggcgtgcgccaccacgcccagcggcaatccttaaatgtgcctctacttcgtgattttattgagagaccatttcatttattttaagcacttaggttttgacactcagtctggtgctggtggtgtgaggactagctagttgtacctatatccattatgagggtgtgagatgctttttagctctcagttttggtctgctgttgatctttttaattggaattgttttatataagacagcatgaagagtaacacagtcttttgaaagtaaaattatgggtttgaactagtgatggactgtcagtgtcagtgtttataaagtactcagaactagtcaagcatagttctctaatctagtgataccagtgattagcttgaagtgggtcaatgaattctagttattttagagtgattatctaaattaacattttagggcagtcatatatattggtaaattattaaaaagaaattggaaagttaaatgtaaataatgaataactagttgtgttcactgtaactacccatgagttatgagtaaggtctttgaaccaggataactgtgagttatgcctctgccatagaatttgcaatcctttggattaaggttgcagggagcattaattccttagtccttaggtgggtctgtttgtttcttagagttgcttataatcttaagtattgtaatgtgcatacttagtagagttcttaatgtttctacattcagtttataaaaagacatacttacttttatgctgatggtttaaaaatagcactaaattaatttgaataacattactttttgaaaa

SEQ ID NO: 17895 - DNA, 1132 bp, Mus musculus
tgggacggggggcccggaaacagggaaagggaggcgctgagctgtggacggcccggaaatggaaactagggagcagctcgagtgacaactgttgtgaggcgagggtctgaggagggagaggcgggagtgactttgggccgcggtaagggtcttcctgcttggggcggggggcggttgggggcgggcgagccgggccgagccgggccgaaccggcgcggggcggcttttccagccggggaagtcgaggctgagggaggacgaagacgcgccgagcttgcaggggccgcggtagaggccgaggaacttggctgagggaaagcaggctcctctaagaggactagcaggggaataggacggagaggtgaactgggacttggggggagggaggtgggacaattgtcaccccaatcgtattaacattcaaagcgactcaggcgatttaatatgtgtggattacataaaacctattacactgtttggccgtcagttcaactcttgggcctgtcgggtgggttgcatgcagagaagtttttacagggatgttcagaaaacgaaggttttaagacccagtcttctgtctaggacttccatggaataacagccttcattagttagaatgcagagacattactagaattaaaaaaaaatgcaggtggtggtggtggttgctaaattacatcttgtaactattttagggggacgtgagggaattgatccgcggtgagaggaaaatgggaaggggcggcttcccacccagatttgtttctgttaacgcgttttagcgtgtctcgtctcggagaggttttagttttagcttctgggctgggctttagtttgctggctccgttaattgggggcggggatgttactaggtaaacggggagtgggggtggggtgggggttggggtggggggcggttgatagcgcagtgactctgttctgagtggtctaaccgctctcctgtctccctagcctgagctcgcgatctggcctggctgccaaatcaccagatctccaggcattcttcggtttgtaggccacagtggtgtctaactttttcttgctttcgaatcttatttttggcatctaattttttttttttaaagactcagcaagttgaggcttagaatct

SEQ ID NO: 17896 - DNA, 1201 bp, Mus musculus
aggaagtgcatagagggtgcacatgtttagtgtcctgtaacgtttcctgtgggttccctcctcgtgcctacctcacctggctcctagaggaacactctgtgtgatgaccggtggtgtcacttatgaatggcattgtcatcgcttcatctgtaagcagtgtggcctctctgcagaggtggcagacgtgattagaactgtgtgtgtcttagaggtgacagtgtttatagcttattaaatagttgatacagatgcccttatgaaaactttcaagccaggcatgttggcaaatgcctgtaatcccagctttaggtggaggcaagagggtcagaggttcaaggttagcctgggctacatgagaccctgtatcaaaaaacaaaacaaaacaaaacaaacaaaaccacaaaaaagcccccctcctcttttccttcctcccactctctcctcctctcccctcccttcctctttctctctctctctccttcctttcctcccttccttcctctctctcctccctttctctcaccctctccttacctctttccattcactgagactagggttttatatgcaaagactggaaataaaaacactgcaactcacccacttctttgtaaggtaaaacccaagtgtctgtgtttccacagaaggtccagatatgtgggctttgaacacgagagtatgactgagttttgtaaattcttacaaggtggtggtctgctggtatcatgcaaaggcaggttatcatttcaaaagcagtgtagtctgtggactggaggaatggctaagaggttaggaggtgcttgctgctcttgcaaaggaccagaattcagttcccagcacccacatgttggttcacacccacctgtaactccagttccaggggatcaggcaccctcttctggtctatgtggcatgcatacatacactcagacaaaacacccatacacttaaaatttttttaaaaaaatctttaaaaaaggaatacatattagtacaattttgaaaaacagtttatatttttatgaaagattctgtagctaagaattacaatttctaactctcgtaagaaatgaaactggccatcctttctaactcagtaactgtgtcatggaagatgatgtcagccataaactgaactcagcacacatccttcccatgtggtctatgagtgatatccttagtctcaggagtgtttcttagt

SEQ ID NO: 17897 - DNA, 1180 bp, Mus musculus
gaagaggtattggaaatggtagcaagtcctaggaagagcccctgatggccagtgcctcacagctggaaccaagttccctgagccatcaaactcaggagctacttccacgggtctgcagccagtgtcacacagaggcatctgagaaagcaaagaacactcagcaccttctgcccaaagaagtggaggaccaagccgctccttcacttctgcattcgtgtccctctgatgatgcgcatggtctcagtctcctttccaggctcccgacacacactgtggtctataaagaggactaagacaggtatctctggagaaagcagaaatgacttccccacactagtacaggggaaatataacagagatgatgtaacaggggcacaagagaggcagttctgagcttctgtaaagcttggccagtacttcccgtttgccaccacctctacttgaaacccacaagcatttgttaccagctttcgctcagagccatagcctttctctttgaagttgttcaagtaacaggctgttgtccaaaaagaaaatgtaaaatacagatgataagtattttttaaagaaaagaatttctggccgggcggtggtggcgcacgcctttaatcccagcacttggggggcagaggcaggtggatttctgagtttgaggccagcctggtctacaaagtgagttccaggacagccagggctacacagagaaaccctgtctcaaaaaaaaaaaaaaaaaaaaaaacaaaagaaaaaaaaaaaaaggatttccccttagagtccccatttgtcaatgagcactgaggacaagtgagataacatcctgtggtacttgctctctctctctctctctctctctctctctttctctctctctttctctctctctctctctctctctctctcagataagcaaataagagtctcagcatcctttgcatcctaccccatcaggaatcttgctataattttcccatccccatccccagtaaaggatacagtaaagaaatgttgtttgtttgggggaccagaatgcactagacctaagccaatctataaatgatgttaaaacacacatgattaaccagctacagtcatgtaatcgataatcctaggagtctgagcaataatgtaaggaatcatggaactggcctggtctagtccacttgaggtacaagcgtcataa

SEQ ID NO: 17898 - DNA, 2088 bp, Mus musculus
gaggataaagttggtgtgcaaataaattgatactgaagcttagcaacttgtcaagtgtggagcttcataaggtcataagaaagtgtatatatgctttttcacagctttctagaactttgtgacatttgattttcttgaaacttgtaaacctggataggttgaagggtgttttaattttacttttgaaggtgttttaaaacagtagagctagcagcaacaccttatgtttcatttcaacactgcttacaggtttcttttgtatataattcttagaatgctcatttcttttaaatcgtttaatttgtacagcagaggaatgttattgtagtagtatgtaactattacctgagttttgcaacaaacaaaaaacaaaaaaaagaatgctcatatgtaattgaaatacttgagattacatgaaaatgctgattttaacatttaaggatcacagcattaaaagaaaaagaaccaatcccttgtattcagttacccaatggggcgccgttggcaggcagaactacatacctggaactctgtctgctacatattcttgcagaatattggccttattcatttaaaatgagtcctaaggttgccatatctatgaatgatacagattatgctaaataatgctggtttttttgttttgttttgttttgtttgtgagggacctcctatagagcaccgtttctttcttagagtaatatccagtacagtagccgagtaactgaataattctaactttggcttctctaagggaaagaagagccctggtcctgatgtcctgggagagatggatgggtttaatgtccttttccttaatgctgcagatgatcagtatttataaagtaaccgattttgcaccactttttgtgactgtgaccacagcagaacaatgtctcctagactgtatctacataaagttactagaatggtgtctgtctgtcttagtgacacacggatcacaactaacaacttaaaatcagagtttgcccgatccaattcagcatggctgtagctgactaaaaaaatttacataattattctttgttagcctctcttactaactgaattattcattggccagtaaaaggagcctcctagctgacgttttagcaggttttaaggtttccttcaaggaatacaagtcagaaaaaccactccagaaaatataggtctgttctatttcatctaaatggcagtctacagtaaagggtttccaaggctctctttacccatgtgcgtgcgtgtatagttgatggtctctagtagagatagagaaagcattcaggcttctggacaaggacattctcagctgggtagtgtgcagactcagctgtgctaagtgacccagtccttgccaccgcgttgtgagtcaggatttggtgacagagtggccatttcaccaagtggaaggagtgtctctttgccaagctagctcttagaacttgagacaacagaacagtttccacttgggctaacacagagagcggtgctagagtcttgctgtggaagatgggatgcagtgtgtcagggaactgtcactcacacattggaagctgagggctgagaaggctttctggattgtttttaaacagaacaatgtgaaaacattcaagattgaaaagttgcatttaaagtgtgatcactttctaggttcctattaccagaacgattatcctgggtgtggtttctttggtgttataaagggttaattttacttaaggcagttacttaatgtgatttttttttttttaacccttaaaaaaagtgggagatgtatacaattgttaatgacatgaaagtgtttcctttctcctgaggaaaagtgaatttcttatcagaatatctggctggccctgtaatttaaattaaaataaaattttggagaaactgtcttgtgatgtcctttagacagtcatatgtcactgtggagaattccatcaagagacaaaagcacgtgatttgtcagtgggtaggaaatagttaacacttttttccgtactcaaggtttagtgcgcctgcagttttacccttatcttgcccctgtgtgaggtgattattgtgtcacatagcccattcttgtctcca

SEQ ID NO: 17899 - DNA, 1833 bp, Mus musculus
gtctacccggaggcgtgagtgacagaccccagccagcctttgacagtatctggcctgacctcagcagcagctaataacctgactatagtgaatgtcgaccaagaactaagacctgccaggcattgccttacttagtgttgtcatcactatcgtcatatgtatttctgtgcgatttaagggaaactgaggcacagagaggctaaagtagcatcctgaaggttttattgtagggacatgacaggcacagtatgagactgacctaggcgctccctctacctaataatgctatttctgggtgccacctcctgggtctacctcacttgcctcgctgggtcccttttttcctctcaggcggaggctggagacatgcctgaccaggacttttcttttctttttccccagggatcaacaaacgtgggggcaagaactgcaacgccatccgccacttcgagaatacatttgtggtggagacgctcatctgtggggtggtgtgaggccttccctccaggctcacccctgccctgttctttctccttctggcctctctctggccctcctcctccctttgcttagcttgtaccttgggcacttttccatagatgtgacatgtctcacctatccttcccagaccgccctcctccctgtaccagggctgtgatctctcggggcctctgcctctgctgatctttcaggtgggaggtgggaggggacagtcgcccaagatggtttctctaactcattattttaagtcatctccccagtggctgggccaaggggaaggactaaagggaggggctggacatatggaagcctggggcaggggcaggggcgtggtgggatttggcatgaggctcacaaacagcccccacacttggggaagccctgaaagacttttttccttgcatagcacacttcccctgtcctcctggttcttaggcctgggtgtggactaaggatagggaaatgtgtcctgggttggacccatcagagcacaagagaaggtggctatcctggggtcttcccaggactcctgtcagtgccttcagcccaccagcaggagcctggagttagagggtgggatgagtctgccaagcacaattgtcctctgagtggaaccaaagaaatgaagagccgggccgccctggcctggcgcctgggaacacaggggcaggtgggtatagaagtcaccggctgtgagctgcaggccctgggcagtggatagaacccatgccttcctacacatctgggctactgtgaatgatggaagcgggagggagagccacctggtactttcgtccctgcctcctcttccgttctggatctttcccctctgtccaggggcgtgtgatgttttttcctgcatgtttttactgatgttcgtgctggctgccctcagccctgagtctgggagaggctttggtgcctcgggtcagacttgggtgctccatggtagtggagcccttaaatgctttgtatattttctctattagatctcttttcagaagtgtctgtagaaaattaaaaaaaaacaacaaaaaaaacccaaaacctcttctgactttggccctggtgttgtggctaaatagtggcatcttggggtggggtgggggggatgtgctctgaggacaaagtggtgggggtggtgggcagggagaagctaacacacggccttccctgggtcaccaagggagtgtggggtgtcccctccattgtcttctctgatcccctggactgagccaattagtgttcccattctgtctccggaagaacccacagagctttaggaaactgcccaaggtcaagctgcttttaagttcgggtaaagcaccctgc

SEQ ID NO: 17900 - DNA, 1180 bp, Mus musculus
ttgcatcacaaaactaacttctaaacagggttactttttttttttttagtttttgttttgtttgttttatttttaagtttaaatcatagccaggtagtgatggtgcatgcctttaatcccagtacttgggaagcaaaggcaggcaaatttctgggttcagggcagcttgaactacactgagaaaccctgtctggaaaaacttaaaaaacaaagggggccaggcgtggtggcgcacacctttaatcccagcactcaggaggcagaggcaggcggatttctgagtttgaggccaacctggtctacaaagtgagctccaggatagccagagctatacagagaaaccctgtcttgaaaaatcaaaaccaaacaaacaaagggggaaggggaattaaaagaatttggttctaaatatacataactacatatgtaactacataactacatatgtaactagataacgatatgtctttaaattgtgtctttcagaatgatgtcccaggaatgctagcttacagcctcaaactctgcatgtctttaatgcagaataaacagtttcggaataaagtattgagagtcttggttaaaatctacatgaacttggaaaagcctgatttcatcaatgtttgtcaggtactcactctgatttcctcactctgttacaccactgcatgttactgcataggctgagttgctgtggtcgctttgcacaggtaagctcagttgctctctccacatcctgtgaggataggatacgtggaacatgttccttttactgataaatggaatctcacaacacttaaaaataattgcgtttgttcttaattcagtttgatataatctatgggttcattacttaaaatgtaagtgaacactgggtacattttatctcttttgattttgataccacttaaaattttcaagtagcatagaaaatgtatgaaagcctgatttttttccccccctttctgtagtcctttccctaaaataatggtagatgtttttcccagttcatttcacattttgatctactacactcttctcagtgtctgtagcttccactgcctggagctatgcatgattgacttttacacaattaatatactatatatgcttttgtacactgcttaagaacatagcgtttttcatattcattgtagtgtgtaaatgtgtaatgtgtctt

SEQ ID NO: 17901 - DNA, 1884 bp, Mus musculus
caacggccagcttgggtgtaatccataaggtaatagattttattcattatgactggccagtgcagaggaatccattttggggggggctaaggaacataaatttattgcaattaatcaacacgtatatgttgtcagatcaggtcagtcctgggacagggaagagtgaagtaaagaaggcactaaataagtgtctgtttctttttagtaaaaggtagaattcctcttcctgtgagaactaagccattttctaacagtttattaaaatgctgtgtagtcaaagttatttggggaaacatttgtaaaacaaagtaaaaaatggatccagttagaatattttctaaccaggcctctctgggtctctacagtctcacgtttgaatggtggagctggtggatgagagcaagttctgtcccagccatcaagtgggcgctctggagaagtcgctgcagctgctttcctctgtttttcttacctctttgtgactcaaattcgcagggccatgagaaggaagcactacagttaatggcaacataccttcctaaggacacttctccaggatcagcctatcaggaagggggcggtctctatgcattgggtctcattcatgccaatcatggtggtgacataattgactatctccttaatcagctcaagaatgccagcaatgatgtaagtattagggtgaaaaaccaaatctccattgtttgagaatctaggacagtggttcttaacctgtgagtctcgacccctttgggagtcaaatgactctttcgcaggagttgtatatcagatatcctgtatatctgatatttacattataattcataacagctaaattatagttatgaggtagctatgaaactaattttatagttggaggtcaccacaacatgaggatctgtattagtgggttgcaggattagggagattaagaaccactgatcaaggaaattatgtatttgctcagtatttcagtgaatagatttcttaggatttgggaaaccaaaaacagtcctttcaatagtaattttggggtttgtgttgatgctgcttttgtttgagttttggttttcttgaaatagcgtcttgctatttagctcaagctgccttccagctcagacattctctacctcggcctcctgagcgctggaatcacagctctgagccatcagacttactaggcatttcccctcttaaaattgtgcttcttcaccctttcctgtgcccttttaaggttgatactgtactttaagaggctaacacagaagggtaaaggaactctccatcaaacccagagaagaggctccccacttcctctctggatcctgtctggagtcacagctggaaaaaaaaaaaagtgtgcttcttagtcctttaagaccagctgaaacaaggcagttttaagtgtctgaaacacagtggtctcagctgtgtggtactgatggcgaatacctttaacctcagcacctacgaggcagaggctgggggatctctgagtttcaggccagagtactggactgtagagtgagttctaggatatccagggctactcacagaaaccctgtcgtgagtgaatgaatgaatgaatgaatgaatgaatgaatgaatgaatgagtaaattaaaaagaccatgcagtggccttacttaaagatcatggaatgttatcactgtattgaccttactttacacctggttaactataccattttaaaggaaattcagggcatccagagtagcatgaaccattactggatggtttatggacacacacacacaaagcaaacaacaaaagacttagtaatagacgcctcttctcagtgaagcaaggacttcatcaaaagtatcttatataattagtgaagatgttaaacgaaccagctttt

SEQ ID NO: 17902 - DNA, 1235 bp, Mus musculus
aattcccagcatacacattaggcagctcaaaaccacttgtaataccagctccagggtatccaactccctctgacctttttaaacatgcatgtgtacagacacacacacacatacatacattaaataaataaataatagtaaaaagtacttttattaagggtggcaagggccgtggacatagttcagtagttaaaaacacttgttgctcttacagaagacctgggattggttcccaacacccgtgtggtggcttccaactactcataactctagttctaagaaatttaccatcctcttttggctttgctagcaccaggcatatctgtgattacacatacacacatgtaggcaaagcactcacacataaaataaatcttaaaaaaaaaatgttagttcttctcagaaggctaatagttattttgataactgatgcaaataggtgccactttcaattggatatctttactctacacattgctgttgttcattattttactctttactacaggggaggcagctggcctagccttaggtttggttatgttaggttctaaaaatgcccaggcgattgaggatatggttggctatgcacaagagactcaacacgagaagattctgcgcggtctggcagttggcattgcgttagtgatgtacgggaggatggaggaggctgatgctctcattgagtctctctgtcgtgacaaggtgagattctacttgctttctctcccaccccccccaccccccgcatcctacattttataatatttttgaatgcttaaatagttgtctgcttcaccctgcactccccaagttagggttggttggttgttttccagattttgagacaagttttctctgtaacagacctggctgtcctggtacttgctatgtagacctgtctctgcctcccagttgctaggattaaaggtgtgccttaagcatgagtcagggtttttctgtgtatccctggcttctggcaatttgctctgtagactaggttagtctcaaactcacagagatctgattgcctctaactgtgctgggaataaaggtatgtaccaccactgcctggcttaatactcctttaataaggtataatgtttgtcttactgggtttttttcttttttaatcataaaacattggcattctctgtacttacttgagtaaaggttttctgataccttttatttttgtgatggtgttgcatgcagcaggtagccagagtcactct

SEQ ID NO: 17903 - DNA, 1166 bp, Mus musculus
tagaggattcattttttgtgctgtcctagaaacatctaaaagactctgtaaatgccttgtcttctgtaacaaaatgcgtagtgcccagaaagtagggcagtgcatccagaggagtgtgccccgtgtgactgctgagtctccactttgagggcactaggaaatggccagcatgcagtaagcttgcttgaggagcctgctagggtccgctttctctgcgttttctaaatgtctactatcaatagaattctgtggaagatcaccacttgtgtcttccagtggctttgactttcctgtgtagtgctgtgctaaagtgatgaccaccctgcatctgtttcactagtgcttggggttataggtctgtgctaatgcgtctctcggtgggagatttttagttctacgacttacttgctaagtattatgttgtttcctgtatcgcagcaataaaaacttgtttaaaattcctccattttggtttataacatgttactcataacactcccttctttttctttacttcctatcaggacgcctgaacagtgtccaagtgtggtttctttgttgtcagagagttataaccctcacgtgcgctatggagctgcaatggccctgggaatctgctgtgctggtacaggaaacaaggtacagcccaaccagtggagccttctttcctgacactaggcttttcgcttgcagaaaagtgtgtgaaacaactgaaagtgggggtgcagtgtgatccctaagactgcggtgctcagggcttcacagtactcccccacttacttccctgaggactcctaagaacaacctgatatacacggctaaccattgtgaactgctctgtcattacatggttattcttactgtttaattagtaccatagacatgaagatagctgtctaaaaacacccaaaatcaactcattttttaaattatttttagttatatgtatatgtgtatgcctgtttgtggatgtttgcctgtggaagccataggtgtcagatctctcagaagctatagttacagatggttgtgtacatgcccttaaccactgagctctctagcccctaaaaatgttctagcagtgtgtgcgtgtgcgtgtctgtgtgcgtgtgcatgtgtaattagttctctccctccattaacaggttgtgggaatcaaactcagg

SEQ ID NO: 17904 - DNA, 1197 bp, Mus musculus
gcatacattgattaacagttaaagaccagccctgccattgattacatcatgtaatccttcctcggagagtggatctggagagtggaaggtgtgtctgagtgctctgccttgtacagccgtgatctctcagcctcagctttgcctgcagcaggcttgtgctgtgatctctcatctgtacattatttctgactcacggtagctcttccggcctcgcctactgcctcactgcgaccaacctggtcgtggagttcaagaaagagtgactgcaatgtgcacagctaaagctggattcttggaagttttttaaaggatgagattgaaatacttgatttgttaggaaatcagagattaacaatagtaacaaattggcataacaggcctgcagatgccaagcaggaactgggtttagattttgtgtagtaatttaaatttaaaaaaaagtttgtgagtaaaggacaatgccagcttctgccacttcgctttcccaggatcccgcctgcccagctgaagaagactgtcctggcgcacactgaaatgtcgtgagggaacccatgctgagacctgctcaatccacacaccattgcctacgctgacataaagaacctgtgtcccaagtctttggttaagaagatatacgactgttcagtgttctctttcacaaaatttggttttcaaataaatatattaaaatctccacattgaccagactttagttgatttgtttttcttgttttttggttcagttttttatggatatgacactaccaccatacgctaataggcctaacatcaccttcctataaccccagcacgtagggctctgaagcaggagagctttgctatagaggaactctttgtggcagtactggaggttgaatccagggttttctgcatgctgggcaagtgctataccactgagctatgagctactccccagcccaaaagacatgctcgaatctggagggaagtgaataaataaacaattctagagagatcagccctaatgcactcatcttgtccagtctaaagattactgattccctaggacggttccacacagctaatttcattgtataccctcctttgtaaactcctgtttcctcaatatcagatgattctataaaagaaatgatctaatttcctagcctctcattagctatgctcttcctggttaagctcttaatgttgcttgcattt

SEQ ID NO: 17905 - DNA, 1133 bp, Mus musculus
ctgaatccttatgtcttcttccgcagagggatttggtggcagcgtttgacagtggagaccagaaggcgttctttgacttgtgggaggggcacattcccagctccgtcagagacactgactccctggcccagaagctggagttctaccttcacatccactttgccatctaccttctcaagtactgcagaggcaggccggtaggctgcttagggtttgggttagtctgagctagctaacaggctaaccgagttcaaggaagcatgggtgtaggtgtgtgaccattttatcatgttgcattttgtgccccgagaaatgatttttggcttcattctcagaagattatttcctaatttatatggagattttgtaatttctgccatcagagttaaattgttttccttttaaatacctcaggtgtttgagtcttggagacttcatccgagtaagttggctttatcgggtaacttggtgtgtctgagagaagacctagaccatacatttcgatgcaaatattggagaagtagtgtgcctgtgtgtagagaaggcccgtgggcttgaatttagcatttgctacctttccctaggttggctggaggtatggatagcgaggcagacgactggagtgctgagcccacgcggtggatgagcctccagttacagagggcagagctggcattagatcactcactcataggaacactgccctgtagcagtgaattagttaaacagctttggctcctggtgggggctctggattcacgaatgaaagacatacacacatgccagttaaatttgatatgccttgattggctcaatggttgggcacttttaaacctccctgcagctagcaaacactcccctccagtatacctgaattaacaccctcctaatctacactttatctttgttgccctgttaccttctgggcagccccccactcctcccacccccacagggctgcttttcctctatactacatttcggcctctcaccctcctctccttcacggtgtagtctgtcctacgcccctctcatggtgctcctctcctcccccaaccccctctctgtcccaagctgggaatcctaaagtccctcctctgtctgccctgcccagccattggctgctggcatct

SEQ ID NO: 17906 - DNA, 2914 bp, Mus musculus
aaaaccagagctcaggggatggacagtggtctcttttcctggcaaaatgacagcatttcactgggttcatgcctggtactttatcctgtgttctgtcccattttgggggaacttaaggggttaaatggcccccttcccaaaattgttgttgggtttgggaccccagtagctgaatacacagtgcttcttgagttgggcagttagcatgagaaaagcagcaggttcctctgaccttccaggaagtagagtccactggcccatctatgggcccctaatcctcaggaggagtatgagtgccagctcaccttcctctctgctgctcccctttaggaagaaaaccctctacaagagtgtatgcctggctctggccctccttgtggctgtcaccgttttccagcgcagtgtgacccctggtcaattccttcaggatcctttaccgcccacgccggggccagccaaaactggaaatctggtcaaccccaacagcttctggaagagttcaaaggatgtagcggctcccactcccacagttcctcggggaccccaggtctgggatgtgatcaccactaactgctctatcaacatcaacctgacccatcagccctggttccagagtctggagccacacttccgacagtttctagcctatcggcattgccggtatttccccatgttgctgaaccacccagagaagtgtgctggcgatgtctatatgctggtggttgtcaagtcggtcatcacacagcatgaccgccgagaggtcattcgtcagacctggggccacgaatgggagtcagcgggtttgggcaggggtgcagtgcggactctcttcctgctcggcacggcctccaagcaagaggagcgaacccactatcagcagctgctggcctacgaggaccgtctctatgctgacatcctacagtgggatttccttgacagcttcttcaacctgaccctcaaggagatccacttcctcaagtggctcgacatttactgtcccaacgtccccttcgttttcaaaggtgatgatgatgtctttgtcaaccccaccaacctgctcgagtttctgtctgaccggcagccccaggaaaacctatttgtaggtgatgttctgaaacatgctcggcccatccgcaaaaaagataacaaatactacatcccagccgtcatgtatggtaaggccacctacccgccctatgctggtggagggggtttcctcatgtctggcagcttagctcggcaactccaccatgcctgtgacacactggaactcttccctattgatgatgtcttcctgggcatgtgcttggaggtgctgggagtgaagcccacaggccacgagggcttcaagacctttggcatctctcgggtccgaagcagccggatgaacaaggaaccgtgcttctaccgggccatgcttgtggtacacaagttgctccctgccgagctgctggccatgtgggatctggtgcatagcaatcttacctgttctgtcaagttccaggtgctctaatgttgctgagccaccagtgcgtttgtcctcgggggatacatggcattgtctttggtcccctgcaggaggtgaagggtttgggccctctgtgcccctaggtgtggtgaggtacagagatccagagagggactcccagaaattcccagaaagaggtccaggaatagccagaacttccctgactggaggtcatccgagaacctggatctctcctatcttgggcctctagcctgacctctctagcctggtaggaggccctggtggactctaaaggaacatttgctcaggtacctgagctagacctggccccaatgggtctgtggctgcttcttgtcctcacagggaagcccccttcctgtgaaatgcctctggctccctgagggtcaagcagcctttgtgggagctcaggcctgtgcaggtccacaggtgtcccctggcccacattgctggacctcctaagataggagctctctctccataggccctcagcacagccccaggcttgcctggagtcagctgccgaggcatggctcctggctctgacttctcttgtccagaagcctgactggccgctctgactacctcagcactcctctaaacctcagtgtgggctagtgccccaccttatgcccctgacacagagcaaaatagcagtgctcctgcaccctgcccaccccacccccacccccacaaggcacagtgatccttgagcatagtccaagccaagtctcacctttggcacctcaccaatactgactccctggccagaaactggccggatgggccctagatgtagacattcttctattactgtgaaattttatttatgaagaattggaaggaggccttgggaggtgtacctctttcctgtacactttccttcagcagctagcatctttaccactcaccccctgcctttcaagccctcccccactgacacccctacttttctggggcctgcccagatattttcccctgtgaaagaataccacctcccacctctggctggggtcacctggaaaagatggaggcatcttctctattttctcaataaaacaactggttgttgaaggtgtctgaattagctgcttccttggtcttggctaatgggcgtgaaagacctctagaggggccttagaggaagtggggagctgtggtggtgcaagaagcctgcgaggctctaacactcaggtgaccacatggccagctgaagccttagcctaagtatcaattagcaaaaggcaagagttcaggcccaaggctagtgttccagtgggtgcccttaggctcacaggctccctgatgtccttcggaaagcattgaagtagacttggctggaaggagagcccaacacatgcaggacttttgccaaagctgctgcttccggagaaaggagagcggtta

SEQ ID NO: 17907 - DNA, 1194 bp, Mus musculus
tctaatgctggatttggttgggcaggcagtcctataatctcaactacttagcaggctgagacaggagaatcatgaattaaaggcctatctgagatacagagtgggctgaaagccagtctgaacaacttagtgaagctcaagaaaaaaaatttaaaggttagggacatagcttaccaacgaagtcctagggtcaattcccagtacctgtttttaggggaagtctcatgccagaactgggtaaaaaccaggatgcaaaacccccatgggttattggggttccaggactcttcaatgatttgaacagctaatatgttgaaaacatctccagttccttgtcacttttactgactttttcagccaggggagggggcagtgagaacagtaatatatttctgcacatgaacttcagctgctgcagaatgccataccccatgtagaatttaggtttctcagcctccacaatcacacaagccaataacttgcaaaaaaccatgatataatatatacagtctaagggcggtgggtatattttagtggaggagtacttgcctagcatgctcaaggccctaccacaaacacaagattcagtgagacagaaaagggctagggttctcttgttaaagccttcaaggaaagagcatgagcatgccccaccactcttctttagcaaggctcctcctcttaaaggttccaccacggtcccttacagtaccaggaactggggaaccaagcctttcccatgtgagcttgtggaacattctagatgcaaagcccaaacataactcagtcctcattatccatagacttcatatttgcaaatttttctatttattaaaatttgtgactcctcttgtgagactaggccggagcctagcaaacacataagtggatgctcacagtcagctattggatggatcacagggcccccaatggaggagctagagaaagtatccaaggagctaaagagatctgcaaccctgtaggttcaacagcattatgaactaaccagtatcccggagctcttgactctagctgcatatgtatcaaaagatggcctagtcggccatcactggaaagagaggcccattggacacgcaaactttatatgccccagtacaggggaacgccagggtcaaaaagtggtaatgggtgggtaggggagttggggggagggtatgggggacttttgggata

SEQ ID NO: 17908 - DNA, 2566 bp, Mus musculus
tagctctccctaaacgaggcagacattttagaaaagcagcaaacctttctggaaatggttgtttgctttcttttctcattcttccagcaggtggcaacatgagaactgaagaaagggtggagggaaggcagttaatctgccttcacctaatagataaacacaaagctcttattctggtggtagagtagcttgtagaggtcttttaaagagcaacaaagctttctcatttgaaagattcacttcagctgggcgtggtggcgcacgcctttagtcccagcacttgggaggcagaggcaagtgattttctgagtgagttcgaggccagcctaggtctacagagtgagttctaggacagccagggctacacagagaaaccctgcctcaaaaaacaaaaagattcactcctgaccatttatcacctgcttttgactatacactaccccttcagtgtggcttttttcctacggatgctagtgataggagttacctaatgtagttttcagttcaatctgcctgaaccttttcaactcttaaggaacataggcagatgctaagggtgtaggtcttgaccctatactgaggtagaaaggaaggggaaatggaagaggagcatgtactctttacttctaagctggatctatagccttaggattaccatctataacaggctaatttcattcagttagtggtaaaaccctttgccatagaataaaagggctctcaaggttctagtagtaaaacaagttttggttgctgtcctccattaagtgcctactaaatgataagtgatggagaggatggaactgattccaagaaatactcaacagtgaggacttataggccacttaacctgtgtgtgcttgtgggatatttctaccttttgaagcagggtctcttattttcttactcactacaagctttcaagtacttctggcaatacgaatgggattagcaatgcatgccatttcagtggccttatctgggtttcaggggtcctggtcatcaggttctcgctggtaaatcttaaagaccaccgtcttttttttttttttttttttgagacagggtctttagctctgtggccatcatggaactcaataggtagactaggctgacctcaagatgtctgcctcttgagtgttgcattaaaggcctgtgccaccatgtcaggctccattatagaaacacactactatcagaaggatgataggctgaggcccattttttaaccctttgaaaaaaattctggctgggcagtggtgacactgcctttaatcccagcacttgggagacaggcaggtggatttctgagttcaaggccagctgggtctatagagtaagttccaggacagccagagctatacagagaaacaaaaaaaaaacaagggtttattggggagggaagggaagtacttattttgaataaggttttattgtgtatccctgattgtctttgaaattaatttgcttcaactcgaagtgctgagactgcaagtatgtacaaccacagtactcttaggttctaactgaattctcacccattatttttcaaatacggcctttcagttttattctctactggactcttagataaccagatactggcattgaaactagtttttttctctttgaatattaatttggatacattctattgttttggattctagttcactgattcttctgttaggccctttagtgaagctttcaggtgtctttagtttttttttaatttgtgtgtgtgggtatagtgtctgtatttctccatgtgcatgcaatgccacaggaggccagaagagggtggatcttccaaccttttttttttttttaaagatttttattttatgtatatgagtacactgtagctgtcttcagacacaccagaagagggcatagaatcccattacagattattgagagccaccatgtgattactggggattgaactcatgacctctgaaagagcagtcagtgctctgaactactgagccatctcaccagccgccttcaagttcttgtgaaccaccatgtgggtactgtgaatcaaacttgtgttttctggactcttaacagctgagtcatctctctagcccttcaagtgtttcctttctcttctaggtttccagtttatgaagcccccattttgtcatttaaattcttttcctgcaaattcctatacatctacaatcattgaagtcatttgtaaatttttttatgtgcattagtatttggtctttatgtgtgtgaggagtcagacccaccatgttacaaacagttgtgagctgctatgtgggtgctgggaattgaacttgggtcccctggaagagtgaccagtgcccttaagtcgccccttatttgtagttttaacaggagttatggttgagtacttgttaggattatgaagagttgtttctctttcattgcatgtctaaactggacattgacccatatttagaggccagccatgtgctaattcaagtacattttgtactggcattcttaagtagctagcaaaatctgagtttctgtttttcatagaatatgatgagatttactttaaagccag

SEQ ID NO: 17909 - DNA, 1816 bp, Mus musculus
tactttggtcactctacttgggtgacttggtacttattgtgttactttaaaatgtgtttacttaatgggtgaggtttttttgtttttcttttctgttttaggtttggttttgtagactttaatagtgaggaagatgccaaagctgccaaggaggccatggaagatggagaaattgacggaaacaaagttaccttggactgggccaaacctaagggtgaaggtggctttggtggtcgaggtggaggcagaggaggtttcggaggcagaggtggaggcagaggtggaagaggtggatttggaggaagaggccggggaggctttggaggtaaggaagggaaaggaactggaaacggattcctaaacctgtgtcctaaccaaccaccttaaatgggaaggtcagtcctaattgtatcaccctttgatgtttttccttcctataggtagaggaggcttccgaggcggcagaggaggagggggagacttcaagccacaaggaaagaagacgaagtttgaatagttccttccatcccattctttccctcttcattttaaagaaaggactctggggtttttactctgttacctgttcaatgacagagccttctaaggacattccaagacagtaaagatcctaaactctgttgccagacttaatacttcctagaggttacatttggattgttgcttaagagcttggcaagaccaactctgcccagtgggaatttcagttgtgttcctactgctttcaagaattcccagctacaaatgtggaaattggtggggaacagcttcatcatgattctgatctggaagatttaatttgtatcttagaagggtgtgtactggaaaagtggttgatagagcacatggatcagtgctggaaataccatacaagagcttgtgtggtatgtaattctattcccagcataataagaacaaacagtacagtgcaatctgaaatgacctggacaaggaatggtaccccattgggttgaaaaattcacatagccaggatggttgcacatgcctttaaccccagcacttgggagggagaggctggtagatctgagtttgatctggtgtacagagagttccagaacagccagggctgtttattagagaaaaaaccctgtcttgaaaaaacaagaaaaaaaaacctcacagacaaccaaatacagagttttagccactgagtaccaagtctcagcagcaagctgggagtgacgtaatccaatcccatgggaggctaaagcagtctatgacttcaatgccagttgggtctgcagaactgagttgctggatagtgagggatacttagaaactttgtcttgaaaaaaaaaacaagacctgtcaaatttgagagaagctttgggaaacaaggtttgtaagttccaacagagggaacagtggcctttttgacttaaaggttgtcagaggtccagtttaactagggataatacagtggcccttggcctgtgtacttaatgaatttttcagtgatctatcaaggatgtttggtttttttgttttttgtttgttttgtataaggcatgggtgcctagataaccttaatagaaactttcctgtaggtgtttttccaagtcccactcccaacaaactgattttcaagaaagaccagtcagctattctcaaccaaagaccctctgtagggttgcgcttagcacctgtctggtggcttgagtatgtggtatgaccattgcagtcgcagtcctgtctaaaagtgaggatggcgtgggcattagatttgtgtagcagggaacagtttggtgggttcttttgctgtggggagtggagc

SEQ ID NO: 17910 - DNA, 2251 bp, Mus musculus
ggatgggaaaagtaaagggtatgttttgtgtctttgagtgttaaagttttattaagtttagtgtcttcttcccctctccttgtccttgacagtctctagtctgctgcttcaaacttaacttcataaccagaaaattgaatatctggtcctctggcctctacctcccaagttctgacattaaaaatgctcaactgatgggttttgaagctgtgatcaattttacaggctcaatccaaattggcatcttttgccacaagtactatccttccctattttatgagagaaatgtgattctaggcagttcagtctattgtgttggctctttttcctcctcaccagtttaaaggatgaagatgagctaatacatagtaaaagaacagtaaaagcacatgtgactaagtccttcatgactgatgcttgagtaatattttctctaacgtagtaactgaattgtcttgtactctttcaggattgcttatattgaatttaagtctgaagctgatgcagagaaaaatttggaagaaaagcagggggcagaaattgatggacgatctgtttcactctactatactggagagaaaggtcaaaggcaagagagaactggaaagaccagcacttggagtggtaagttaaagggtttattgtgtagtgggaacaggaatcatttgtatctttgtattttaagtaattggttacctacaattagttcacctttgttcatatagctgatgtttagtcttcatgagtgaaagctatttgaaatcatttcctttggagtatagtaggcaaataaagctttttgttgggtatgttttctactttaaatggcttaaactattttagaaaatagtgtaagacaacaaagaacagttatctaattagaatgaaaatgaaaggagcaaagaaggcattactgtatataatggatatacactggtggttctagaattatggtatatggtacatggttgaagtgccattgtttcagttaacattccagtaaccttgtggattaggttggagacatgctttataggtgacccacttactgagtgtttaaatatacacagacatactctaacataccttgctaatgtgttatctttgtatttgcaggtgaatcaaagactttggttttaagtaacctttcctacagtgcaacaaaagaaactcttgaggaagtatttgagaaagcaacttttatcaaagtgccccagaacccacatggcaaacctaaagggtaaaataatttttacgttagatgtgggctggacatacatactcttacgtataagagtaagactgtcctgttagcttaaaaaaaaactaaagttttagctatacaaagggcagtaaatattgatagtaaattacatgctgatgccaagtgtttctaagctttattctgagaactgactttcaaccttcaggtatgcatttatagaatttgcttcatttgaagatgctaaagaagctttaaattcctgtaataaaatggaaattgagggcagaacaatcaggctggagttgcaaggatccaattcgagaagtcgtaagtcctttgacatgatatgacttggttgggtgatatttttttttatttttatgtgcctatatgctcatttggggctgtctttatgttgttgctgagaaaatgacaactggatatgatgactgattacctgagaaataattgatgaaatctcaagaaaattcctctagatagtcaagttctgatccagctatgtcaactcaaagcagcaaccttgattgccctctgagtacgctttttttttgatccagtgtagtctttttttttttaaccttaatttcttgtgttaattgctttttctggtaaaagggggaaaaaaagacataacaaaatcagtgtaagggaaggctcagtggttgagcactgagaggacctgggttcaaatcccagcactcacatggcacctatcgagacaggatttctctgtgtagtcctgcctgccgtggaactcactctgtagaccaggctggcctcaaactcagaaatctgcctgcctctgcctcctaggtgctgggattaaaggtgtgcgccaccactgcccaaccctgtctgtaactcttaagctctgacatagattgcagacaaaacactaatgcacataaaaaatttttttttttttaaaaaggaatctacttcagctgaatgtggcagtatggcagtattcaccaagggttcatagtgaaacaggaatttttctct

SEQ ID NO: 17911 - DNA, 1162 bp, Mus musculus
tactgctgttagttacaatatactgaatgaagaaatcgaggtgaatttgttgtaatgtcttggtacatggacttgttttgttttttgtttttttttctttaagatttgtttatgtatatgagcacactgtagctgtccagatggttttgagccttcatgtggttgttgggaattgaatttttaggatctcagctcgctctgctctcagtccttgcttgctctggcccaaagatttatttgttgttatacataagtacactgtagctgacttaagatgcatcagaagagggcattaggtctcattatgggtggtggtgagccaccatgtggttgctgggatttgaactcaggaccttcagaagagcagtcaatgtgcttacccgctgagccatctctccagcctttggacttggttttatggaagataagggtgatctagttttatttttgttagtgctgtagatgctctgtgtgtgtgccacatggtataagtgcagatcaccttctcatacctgtaatcttgttttttccatcttcaaggaaatttggttatgtggactttgagtctgctgaagacctagaaaaggccttggagctcactggtttaaaagtgtttggcaatgaaattaaactagaaaaaccaaaaggaagagatagtaagaaaggtatgtaagggggtctgggtgactggatactaacagacttaggcagtctggtgcctcttccttagtttcatcctcattgtgaaccaatgagatgtcataggtcatgtgcttgttgacaggtttgattcctgggatatataatgtcagggctgacaggaggaatagcttagtgagtaaagatgcttgctgcaaaatgtttgatctctagaagccacatgaagagagaagaacctttaatcccagcatttgggagacagaggcaggcagatttcagagttcgaggccagcctggtctacagagtgagttccaggacatccagggctacacagagaaaccctgtctcggaaaaaaagttttagcttatcctctgaccacatgtgtatcgtgacatgcttgaagcttacgtatctcttaaatgaattcttgatccctatattttgagtttcagaatttggattttaagtgtttgtttcttagttgtgctgaaaattgaacg

SEQ ID NO: 17912 - DNA, 1216 bp, Mus musculus
ttaatgtttatctttgtgtgtgcgcgcacccattaagcatgcttggtaccctcatactagaatgtacttggatcccctggaactggagttaaagccacatgtgaatgttacatgttacaagagtaacacatgtgcttaacttttgagtcatctctccagttcttggttgtttgtttttttttttttaagcctatctaatgtccattttcttgtgctcaaagttagtctcttaatgtagcattgggtataaaggaatgcttatgatttgtttgctttcaaggttgtcatccctcagaaaaaaggcaaaaaggctaccacaaccccagcaaagaaggtggttgtttcacaaacaaaaaaggctgcagttcccacaccagctaagaaagcagctgtgaccccaggcaaaaaggcagtagccacaccagctaagaaaaacattacaccagccaaagtcattccaacaccgggtaagaagggagctgcacaagcaaaagcgttggtaccaactcctggtaaaaagggagctgccactccagctaagggggctaagaacggtaagaatgccaagaaggaagacagtgatgaggatgaagatgaagaggatgaagatgatagcgatgaggatgaagatgatgaggaagaggatgagtttgagccaccaatagtaaaaggagtgaagccagcaaaagcagctcctgctgctcctgcctcagaggatgaggaagatgatgaggatgaagatgatgaggaagatgatgatgaagaggaggaagatggtgagttagatcttaggatatttagggtactgcatgtacattccctcactgtttcattagattaaaaactcattttgtgctcttagttctttccataacttaataggttttcatttgctaagtagtttttgttttttttaagtatttgtagcatttatcttgtctggattggtaggtagcaaatacatttgcctgatttgccatctttcttccagactctgaggaagaagttatggagatcacaacagccaaaggaaagaaaactcctgcaaaagttgttcctatgaaagccaagagtgtggctgaggaggaggatgatgaggaagaggatgaagatgacgaggatgaggatgatgaggaagaggatgacgaagatgatgatgaggaagaagaggaggaaggtaaccatattaacttttaaagtatgctgacctaagtaa

SEQ ID NO: 17913 - DNA, 2058 bp, Mus musculus
tgtggaggaggcagagaatggaagagatgcacctgccaatgggaacgctgtgagtgtccaagtagctggggcttgtgttcccagtttatacttttttaaattttcagcttagttcaggatgttggaccagacaagggaacttgtctgatttttgtttgggaggtggtgtggtagctgtatggtgtggggaggggcaaggtgcactagatatacaggcctgcttcagagctggctaatggcagatgtgttttctgttaaagcaaaatgaggaaaatggggagcaggaggctgacaatgaggtagatgaagaagaggaagaaggtggggaggaagaggaggaggaggaagaaggtgacggtgagtagtcttgttttctcaggttccttccttggcttttactgccagaagggagaggttgggtttctgggcagttggaccactttgaactgcagtgtactccaccctcctattggggccgttcttgatctgcagctgggaggatagtggtttatgtgggccttgattgattctccaggtgaggaggaggatggagatgaagatgaggaagctgaggctcctacgggcaagcgggtagctgaggatgatgaggtatgtgtgaggttcctttcctggggcactaaaagctttgggggtttctggcaaatggtgaagggttcttagtggaccccatcccagctttgctctctgggagttgtgggccaaggcctagggagcttatgtgtagtcacaggcctgatgttctctacaggatgacgatgtggacaccaagaagcagaagaccgaggaggatgactagacagcaaaaggaaaaataaccttacgcaccgtgacctattcaccctccacttcccgtctcagaatttaaacgtggtcaccttcgagtagagaagcaggccccgcccgcccacagcgggcaatgccacccacagatatgacatgcgctctccaccacccctccaaaactacaacatgaattggcaacatgggaggaaaaaagaaccagaacttcccaggccctactttttttcttaaaaatactttaaaaggaaaatttgtttgtattttttatttacattttatatttttgtacatattgttaggggtcagccatttttaatgataacgggtgaccaaaccagccttcagagcgttttctgtcctacttcagactttacttgtggtgtgaccatgttcattataatctcaaaggagaaaaaaaaaaccttgtaaaaaaaagcaaaaacaacaacaaaaaaacaatcttattccgagcattccagtaacttttgtgtatgtacctagctgtactataagtagttggtttgtatgagatggttaaaaaggccaaagataaaaagattttttttttccttttctttctgtctatgaagttgctgtttatttttttttggcctgtttgatgtatgtgtgaaacaatgtccaacaataaaccggaattttattttgctgagttgttctaacaatggtgtctcaaagcctggtttttctgtgtgtactttgtttgggatggggtcttttctatacccagaacgtcctgagtgagtggttatgtgccacaacacccgtttttctggggagagggtagtcctggaattggatggcatttttaaagttctacggggaaggtcaggacaaagctgcagttaatcatggggcattgggagaggttctttactgttgtgacaccaacatttcttcctgagacttaggccactagtcccaggcataaactggagagatgtgctgtacacagagcccttggtggcacaggccaagtcatcttgttccaagttgtgagtcttctggctgctgtccatgtaattagtatactgtttagtggctcctagtgttagctcgcctgccaagcctgtaggtcctgaagggtctatgcccatgactaacctgggcaagctctagctttacagtgactgttcaagtcccttacaggcactgcaggagggtgggcgacttgttctttagaagagtaagaagagcatcctgtaggggtgctttgct

SEQ ID NO: 17914 - DNA, 1207 bp, Mus musculus
cagttttagcagtgtaaataattgcagtgtatgtgattcactcactatcttttgggctcctccaaagggcctgggtcacttctctggctctactctgcagcacacacagctcgtcttctaggctctggctggctccactccactgctgcagctgttcttggtggtcgtcccgtggtgctggcatctccaaaatactggggtcttctgctgcactttcaccagtagtctctcctaggcttcatagccacgattcaagttctttttgactgcttctaaggctgcactttctccaatggcctctcagtgccaagcttcagcagctcttcatggcctcttcagaccttccaaaccagcatcattcttacacattactaagttcagctgacagtacaaggttcaacatcatagcttgtgtgtgttgaccctgaggcaacaattcccagatttcacctgagtgatgctgaccttaaacacggctagtttctcaacaccagctgaccagcatcagttgtcccagtaaagctaaagtttcacatcagtggtgctggtctcctgttgatcacagccgattcttcatttcccattagtcagaacctagcaaatggcctgttaaagagtctctacgagactctcaaactgccctctgaaactccgcaagccagcccttgttttcatttctctcaacattctttcttccaagctcctacagaacaccccgctgagctcttcaatactcagtgacttttctagcccaattttccaaagtcttccacaaccctcccaaaaacaacatggtcaggtctgtcccaacaatagctcataatcctggcactgatttctggtttcagattactattgctgtgatgaagcaccataaccagaagcaacttgggaaggaaggatttatttagcttacacttccacatgacacacagttctttattgaaagaaggcagagcagggagggcagggaccggaggcaggagctgacacagaggccatgaagaaggaagtgctgcttactagcttgcacttatggcttcagcctttcttatagaacccaggaccactggccagggttgggctgagcccttcccaatcaatcactaattaagaaaatggcctacagccctgtctcatggaggcatcttagttgaggctgttcctctcagatgcctctagcttgttgaaattgacataaaactag

SEQ ID NO: 17915 - DNA, 1114 bp, Mus musculus
gccagagactcattgattttcctttatactgtcttacacctctaaaagcgtctgttcgtcaggctgggacgtagttgtcatgcagtgaaaacagaactgtagaaccatctttcgctttccatttcctatttatttatttatttatttatttatttatttatttatttgaggggcaagatgaggctcccaagtgtggattacaacttgtgagctcagacctcttggttttttatttatttgtttggtatttgtggaacaggagttttttgtgtagtcctggctgtcctggaacttgctctgtagaccagactggccttgaactcacagagagccatctgcctctacttcctatatactgagattaaaggtgtatctcactactgatcagcctttttaccttttttaagggttataatataaggaaattgatgcccttctcagaactatagctctttttttttttaagttaggtaaagttcaagaatcactggatatagattttggtgacattcaagaacacaattctttgccttcaaataaggtgaaagaattaatctttggggaacatgcccctgaaagggggcatatgttatctcttctatctggaagtgctgggatacaagcaaggcaaagctagtcggtaagagtctttcagatgtgtctcttctggcttgtctgatgccagtttcaggtgcttaactgtaggtcagtacagtcgttgactctagaaaaagaaatgtttgtttcattgtctgacttggctaatgagaagactgtgttatgtttcaagtggtgatctctttctcattactaagttacttgcctgcactgttcccaggccagtctggatttagattgtctcttttccaagcacagcagcattgccaaagcaagagtattatttcacagtgataccaccatttgttacagcatattaagttccaaggatgctgaggcctgcgttctcagggacacatttatattttctctccatgtctcctataagtgggaacattgctgggaaattattgagtagagaagttggtttcattatatgtcaattagaattggctttcaagaatgtactaaaacagcaagatttcacagtaattta

SEQ ID NO: 17916 - DNA, 1756 bp, Mus musculus
ttctctgggtggtccttatacttagaacaggactcagtgagtttcagggatgaacacaagttttgtttctccctccaggttagcaacattaagaagacactcaaagcaacagcatcctcctcagctcaggaaatggagcagcagctggctgaacgggagtgtcccccccatactgagcagaggcaacccactaagaagatgtccaaagtgaaaggtctggtctccagccgccactagggccggctggggcagctggcactcagcaggcctgggtcaggtcgggaggggacacccagggcctatttccgtccctctctaactgcagtgagttccagatctgcccacccctcaccagtacctccccatccattggtaccattgcggaaaatgattgctcctcccttgcctccttccctagttgttcccttcagactcaggggctcaatggatgccatcgtaacagggtccagcactgcccggcttccctgcaggggtccttgtctctgtgatgggctacctccctcccagttgttctttgctctctgtcattttgtcaggctggtcctaagctggaggcagtttacccagccccaagggatgactgtggaggtggctcctctctgagtgaagagggggccttgcttctccagccccatgtaccacagtatccacaatggtgcaagtgtctctagccaggtagccacatgtcccctctcctgccttacccctgttggcagtgccagttgaggccatggagggatgtggtgctgggctatgtttactaaacctttgggttttcagcctcttaagcccagccaggatctctcatcaagttggggcactgggctgactaacccctggtgtctgacaccagtggagggtgcttgggtctgggggcagcagaaggtgtttctcctagcttggtgtcctctgctggctactcttgctgctgtctctgactgcacagccttgatttggcatttcgacccagctacccactgggattgtctgccaacaattgctctcccaagatctttcatgcctcctggctgcccctggggtaggagtggtggtgcccaagcccctcagactggtgaaggaccattgctgcttctttctccctccttgtctggcgacccagagccctctgatgacatcatactccactcctggccagagaaaaggacttgactagactttctgaacttgaacagtttcaggttatattttaattttttttttttgtacaggttgattctaatacatttcaacatgcttttttctccttttgtgtcaatatttgttatagtccaatcgccggggatgtctcacttggttggagggtgtgtgtgtaggtgtggaggattatatgggggtgggatagggtatgtgtatgtgtggagggcttgggggtatggaggggtgtgtgtgtgtatgtgtgtgtgtattttgtttcctaaggggagatggagaccctgtactgatttaaacctaattaagttttaaaaagtacattttaggaaaaaaaaaaaaagaaaaaagaaaagtgtagatttgacatatgcgactgtggagtatggggttgtacagctggtgggtttggagggcagtaatttgggttgttcagagaaatgtgatgctattttagtggcatggttaaaaagtgggttgatccagtgttaaagtattcctgtgttccttatttgctggtccatatgcccagatagcactatacctaactgtaggttaagtttga

SEQ ID NO: 17917 - DNA, 1162 bp, Mus musculus
tgagaaaatgtctggcacacacatacaaaatatccaccccaaaagtctcttttgaccttaaatataatagaaaggaacttgtatagagggctagagcaatggctcaaagcacgtactgtgaaagtgtaaggacctgagttttaacccccagaacccacataaagccaggttcaatagcacaagtctgtaaccccagtattcctacggtgaaatgtgagaaagagagaagagagtccttgaaggtcagatagcctggtatacagaaagcccctgtgccaaacactgtggaaggtgagaaccacattgaagttatcctctgattccatatttcttcatggcacacactcatgaacatttgcacataaatgtgtgtgtgtcacaccatacatatacaatcatacacgcatgcatggaaataaagcaggtgtaaaagagttggttaagagtaagaagtgtgttaggaaaccagccctccttttcaggccccaccctcctccccacccctccccagtactcgccccttgcctgcttatctgagtcagctgtgactttggccttggttgtggttctgtagccaccgactccccacttactacttctgtagtgatcctgtggctgtgtagttgggaggtggacacagatgcaaagtagtgtagccctgttagaaaatggccccagcataattttaaagtaccttttctctccttcaaagactgattctctgagtgtgtgttgtggtgtggtgtgagacagggacagtggtggtgagtgaggcagaagaaatatgccttgataatgctggtgctggtggtggtagtagtggtgatggtggtggtggggtgatggtggtggtgatgatggtgatggtggcagcagctcacatttgggcacctgctctgcattagactcatgggaaccagtgtgtgccattcctacttaaccctcatcacagcctgaagagtgctttcattactatgcactgcagaagctaaggcctagggaactctgccagctcactctaagtaatttacatacacagtcaactttaacatgtctacagtggaggaagactaggtggaagacagttgttaccactctgggaaaccatcctcaataaccagtagacccagcctagacttgagaacagtgtgttctggtatca

SEQ ID NO: 17918 - DNA, 1219 bp, Mus musculus
ttacaccagctaggtgccagtttttgactgggagtactgccatgggcattggtcctatgtcagatggctctgactccctggagccaccagcactcatttgccatctgtggccctggttgcttgtctcagtagtcatgtgtcagtactgtttttcttagagcaggtctgtcttacactctgctgcaggacagagatagtgtctgccctcctgctaggtttagtctaagctcataaggtctacatctttccctaggattcttgtttgctggattcccatttaacctggttaggaaagggaaaggatagtttccattcactccccactgttctccctttctgatacctggagacagttcatcttgacttgtaaagtcccataaacagatccttccaggacctaggagcctctgggactcctgccctgcagccgtagcaccctcctcaagacccagatgctactttcccttgctccccactctctttcctctcccaatgagctaccttttgcacttccactagaatgccaggcaggctgggcccccaaaggctcctttttcaaaacctctggaagccgcgattgaatgtgccatgaccctctccctctctggatggcaccatcattgaagctggcatcatcggagtctcttgttctgttggcgtgccacctggaagacccttctgtcctggacaagaggaacggaagagcatgttatcctttgagaacaggctgacagcagcaactactacaacagctgagatcacaaataaatggtgctaaaccagcttgtctcatgctcttgctctttatggtgcatcaagatgtggcctctggattgactgtcaccattttcaagggatggcacacagacttctccatgcagggccattcagggaacacaacttcatagccacaagcccattgtgtagtcacatggtactttattccgggactgttgtggtctgacattaaataatgaggtgacgtctaactcaagacccaactgcctggtgctcaagtgtactagtttccatccagttagaccaatggctggcccagagtggcggctgagttcaggtccagcttgaaagtctcttaaggttggaaaggggtatccttggcttttctttgctaacttccatttgcctttagttcatagaagtctcttgcttggaactaagccctgcttctgtctgtctgtggccgcacatacatactttt

SEQ ID NO: 17919 - DNA, 1351 bp, Mus musculus
cactggcccccaacttcacctcagactgctgggattagaggtgtgagccaccatgccagctctcatgcccagcttgtggctcctctgaataaagcagatttgagttttcataggtttgggtccttacatcaaatggctcacagcatcctctacttggggggggggggggggggactcctaccacagacagaattctgggaccactagggtactgctgccacaaaggcagttaacacagacagcactgttgtgagaaaattgcatctggcctgggatggcaaaaggaccctcttcccataatggagcacagtgctggagaagctgatgggagttctctgcagagcgtaaggaagaagggaagagagaggccaaattgtggagtcttccttcacctggtctagctatcattgtatttcaacattgaactttaatatacagatgagggccagctcattcactgccttagttcagtcataacctggtggtcctgggccactttaaacttagagctgtctgaccttgcattgtgtgctatatatacccagactagcaggtggctaaacccctttctagtgagggctggctgagagcaaggcactggtgcctgtaggctttgggtggagattagaaagcagggaattacaaacaaatgagatctggtgagataggatcagtggaccttaaagagtctttcttgctgtcactggaatctcctcagaattctcagtgggctttgttcatctctggtgtgttcgtttctagacactcaaatcataaggcaatttttaggataacttcctctttaaaagaagagcattttgaagttacctgatgtgcttgggctgccgagtggagggacagtgactagacattcacacctggctggcctctgaggacaggagtgggtgcaccattgctcacggccacgtgctttatttccctgaatccatgcaaggaaatttccagacccagaatcttcatgtctaagcatagaaaataggaagtcagtttagtgtgtcgtgtactagaggaacctcttcagccttccgggtcttcacccaatgaaccattgttaggcagagttagtagggactggcccttctggaaacaaagggataaatgagatggacttcaaccctgctgtgtgaccttgttgacctcttagttacttaaagtagaaattaaatcttgctgttaggttcccaggtcattgtccaagtgttggatttttacttgtcttcattgagagtaaagagggaagccgcctcccgcatcccttaggagccagagaacagctcatcactgtgtctccagaaagagctcgggaattgacaagttctggcatacttct

SEQ ID NO: 17920 - DNA, 1876 bp, Mus musculus
ttctctcccaccttcactgaggttggctgttgtgtatcagattgtcaattgatcttggaaatgtctccatataagctccttttttctctttaaggttgcagtataccactatgagaatgtgcatgcattaatatttcacctgcactgggggagttactaaccttttaccttgctaagcaacaggctggaagtttttgcacggacttggaaggcaggctgctgtttggctttagactggcagggaagggctgggtctggagagctggtcaagtcctcccccatatgtgtgtgctcatatctagatggcccatatattgaatactctattttctcccattttctctttcagggacaattcaagctttcgaaatacaaaaatcacattgtgaaagcgcacaagctggcagtaatccttttctctttgtgtgtttgtctgaattggatgcgaggctcaggcagttcttctgtctgttcactgaaggggtgtacctaaaccatgggctccccttctacactcgttcctggaagacggactctgctaaacaccttccagcattgctgaccttataaagtgggaagaatggggaaaatgtgactgtaacagacaaacactttttggtggggttctgtgtgggagtgcagctgtcttattgctgtgtactatccagatgcctcttggcatcctgctgtactcacctgctgagcgaaggacttgatgaccgaccatatgtatgtgtccggtgctgggtctgagctgagcgttatcagtattatgaatgcttgcacatccaggaacagcctctgcttagagttgaagagaatcaaatgtctcttccagctctaccgttaagttattgtgtgttcctctcccctaagcccaccactttgaacaagtgttaagatatgatgacagcctaggattctgtgtcctttgcgccttacacctccaatgggactcttcttcttgggcactgaagcacttaaattgtgatcccaggcagcacaggttttgctgaggagagctaaggcatctgccccctaagacaagctggagaagaatgcagttcagtgagaagccagatcatagtgtaggtcccacgtgtggggttgggctgagggcagtgactgaaaccagcctcccatgtgagcaggacttgtgtggtgagcatgccctgtcgggcttgcatggctgtcatggaggaagcaatggctagttagtgccacattaaaacagtgtgtagaacccacagtgctgaaacaaataactgaagaaatggcagccttgctgagtgctttcatttgatggctgtgtctgtaagctgtggttggaaaagacttttggtccttgacacctggatgtaaacaaattgtccagatccctcgatgcccagaaggctcctccaggtgtgtcttcatcagagaagcagactttgggagcctgaggccagaaaggtcaagagtacccaagaccaaggaagaaatgggcagttgcagcagcttcaagtgctctgaactgggctcttgtgagccaagatggcggtaccttaaattaaggcctctctttaaagcatatctgaagatgaagatgctgttactctgaaggtaacagcatctcctcgtgtccatcacactcttccagctttccagtcactgctggttgggaatgccctcccctgaaagaacaacacggggccaagagggaaggtgtttccgccgcgggtaaagccatctgagaagaaagtccaacagtgattgaagctccaggaatctgaagaatgcattctggggtggttgtgaagggcccggcaataccagagcatcattggctgtcaaggaggcaaaggctgcctctagaggcttgatgaagcaggaggcc

SEQ ID NO: 17921 - DNA, 1197 bp, Mus musculus
ctggagattgaacctagggctctgtgagtgctacttaagcactcttccaattaaggcacatctccggtcctctaattagtattagccattgccacaattcagcttataatttgattactctttgttgaccatgttgaccaagctgactgaccctgaaattaccatgaatcttaggcctctagttcgtaagtgctgtgattagaggtgtgttcaacctcaacctaaatattttttttttttttttaaaagatttatttatttattatatgtaagtacactgtagctgtcttcagacacaccagaagagggagtcagatctcattacggatggttgtgagccaccatgtggttgctgggatttgaacttctgaccttcggaagagcagtcgggtgctcttacccactgagccatctcaccagcccctcaacctaaatatttaacatcacaaaaatgctgttaattatccttaactggggataaggaatattggagtgaagatagaggaaaattcaaagaacctgggaggtgatagatcccaacactaacttcataaaaatggggttgttgacaagtggagactgggaaccctgcatagatctctgcagagcagcatttcagctgacctgcacagcgccagagcatgggttataactgcctgtgcagctgctcatggaaacagcaccctacagggaagggggctttagtttcaggagatctttgtcagcatttgagctgtcaaaatgaacaggctggctggctggccctgggagggcagacggacagaggacataagatcacctattggtggacccaagtggcaatcataagggtagaccagatgcctttttaagcctcatccagctgtggtgtcagaatggacctgccatttgagtgttcagtggtatcttagggttttactgctgtgaatgaacatgaacaaagcaaaaagcaaatctttttttttttttttttttttttggtttttcgagacagggtttctctttatagccctggctgtcctggaactcactttgtagaccaggcttggcctcaaactcagaaatccgcctgcctctgcctcctgagtgctgggattaaaggcgtgcgccaccacacccggctttttttttttttttttttaagattttatttattatatctaagtacactgtagctgtcttcagatacaccagaag

SEQ ID NO: 17922 - DNA, 1160 bp, Mus musculus
aatttacaatcctttctctgcttcttgacctgagtattggaattataggtgtgtactaccatacttggctttaaacttattttgggagacaggtctcatgtaggctggcttcaaatttgttatgcagctgagactggctttgaacttctagtcctcctgactctgttccaaatgctgtggttacagatatgtgccattagagacttcatagttactgatcccttcctgtgtttttttttttttttttttttttaagataagctcgcatggccttgaactactatgtagaattgcccagtggcctggtgctcatgagtgagattcttgcctttgctccataactgctggagttaagaagcatgtgcccagtttatggcaatttttcttagtggaacaattttttctaacgttatatgtttgttgacttacagttttcaattaaaatattttatagctaggtgtagtgatactttgccttaaatcccagcacttgggaggcagaagctgtcagatctcagagattgaggccaacctggtctacaaagtgagttctaggacagctagagctgcacaatgagacactatcgcaaaaacaaacaaatcattatagctcccttccatagatagatatattaaacccttttaacatttagtctgtgtgtatgtgtgtgtactaaaatgagtgtgtgtaggtcagaggaaggaaatacttttcccactatgtttgaagtcaagtttgtgagcatggtaacaggtgcttttatctgctgagccatctctccagttcacatacctaggttttttaaaatgtaaagcctaggaattactaataaaagtagtacattttttttttttcttttttgagacagggtttctctgtatagccctggctgtcctggaactcactttgtagaactcactttgtagaccaggctggccttgaactcagaaattcgcctgcctctgcctcccgagtgctgggattaaaggcgtgcgcaaccacgcccgactaaagtagtacatttatgtaacaatagccacaggttttacttattatacttcttttactggctggagatgttttggtatgtgccatgtacataggtatagattcatttttacatgtgtttatgtgcatgtgaaggtcagaggttgagatt

SEQ ID NO: 17923 - DNA, 1176 bp, Mus musculus
aaaacaaaagaacaaactgaaacaatgtgagactttcttatttgactacggcagataatagcttctgtttttttcaatatacttgtttttaatttattaatgggtagagaatctcatatttaggacagacaaaattgctttgaaatttccttagtatctgctttaagttaaatgtggagatattattccttcgatctgtactttggaataccagattcaatgtcaaatccaaaggaagtagctttatgggaggagagggtaggcggctggagtattttatttttgagatcgggtcttaaaaagatcctgctggccaaaaagtccctgtaggtcaggctgacctaaaagagatctgctttgcctctgcctccctctgctgagcgtaaagacgcatggcactatgcctggctatgactggagtttttaatgtaagtactgcataattaacagaaattaattgtaatcaaataagttcatggttagaaaacagtgccttttcttgagtttatcttcttgcaattggagaaatagcaatctctggccttatgtttatcacacagataccctttgatcttctggagaaagaattcctgcctatcctacaggaggagcccttgccaccattggctctagtaccctttacagaagaagagcaggtttgtacttcgctctgagccagatactacaggatacttagaggaaactataagaaacacaagttggcacaggttggcatctttactgatgcttggcttgtgaaaggctctgacttgtcaaggttttgttttttattctgaagctgttgagtgtaatgcaacgatcaggaaatctttctacactttttaacatatacatgtatatgggtgttttgccttttctatatatctttaccacatgtgtgcctggaccccaaggaggccagaagagtgcatcagagttacagatacttgtgagccaccatgtaggtgctgggaattggacccttttcctctggaagagcagttagtgctctttactgctaacctgtctctgaagctttgtttctagatcttttaagggcattataagaattatcccagctgggcgcggtggcgcatgcctttaatcccagcactggggaggcagaggcaggcggatttctgagttcgaggtcagcctggtctacaaagtgagttc

SEQ ID NO: 17924 - DNA, 1839 bp, Mus musculus
ctcccgcctagtgaccatggtttctcctcattggacacaacatacgttcaccattttctctgtcactctgcaacaaatcacagaaccaatcatctcaggcttttttttttcctagccctttgtgtccaagattactttagatcactgttggtgagcatctcagactgtacctagtggaccagcccttgtctcagggtggcagttggggctgctccccagcagagctaatgttgccagcacacattcactgtgcgttgatttcatctactgtctcctggaagtgtgttggaatctgccaatagcagatcactttctcttatcacttttcttgttctgttttgttctttctccccacccctctattccaccccataccggcaaagggccttaactggtgcagtcatgaagagagttaatggttaatagacattggccagcaacaaatcaccccctggacagtaacttctctattgccacaggcaggcataactctgtctgtaggttgcatgaccattgttaacgtggggattgcatcagaggcctgagaggggtgtagattggcttgtttgatgttgcacaccctcgctgttctttctgaagaaaggatgcgtgtgttcttcattagatagtaactttctaagcaagctgtgttctccctaacatattccaacgttactactggacaaaagaaaccctatggcctgggacagggacttaattttcctttcatataaaaactgatctcccctcctcccataaatatttttacttcaaggactaggaccagtttgttttgggcccttatgtgaaaatttgtctcgtttaagaggcatctttaccatatgtatgaatttgtgtaatttcaactcggatagggataaacttttgcttctgataaaagctgggaatttcatctgttcctcagagcaccgtgtgcatgttttgccatggccctgaaaaggtcttgtgaaaagattctgggatggcaagttgtttgccttttctgaaaagagaacatacaaagcctgaccatctttaagaccttcatccgtggaaaccactatgcaggaggatgcaatggggtatggggatggcaggcacaggagtgggaggcctgctccatagcaaggccaagtgtactcaagctctgtacagacagactctgactgcttctgctcctcgcctagtgaacatcacctgggatagtcgaacacctcggcggcagctgtgggtcagctgggcctgtgcaagaggtgctgtggtgggcagctcggcatctgtgcctggacaaggctggagttgctctcagagcagtttggtattggaagattatatttggtttctatttttattattttgcatcaccattctccctatcctttcttgcctctctccctcctaaatgtgtacaataactatacagagactgctacaaacttgtaaatagtttttggatcaaatagcataaggagataggaaccattaaaatgtgagactcctctcctttgctttgtaaattcaaaagggggggtggggaagagggatagttaaaatgtttacaaaactttaagctccctcggaacttttgccagtgtggaggaaaataaaaaaaaattaaataaaatgtgttgtggtctctctgagtgtcttgtactcgcctctcttgaggctgagcttggcatgaaactctccctcttgatggcatggagcagccgtggcaccacaggctttggagatgagaagcagtttgggccactctgggaggagcggtgactaggcctgtgtttgggaaggtggagtccggctgaaggttgggaagccttcctgcacggctacggc

SEQ ID NO: 17925 - DNA, 1228 bp, Mus musculus
ttagaatctcagaagtgatctgggctggacagactagctgaactggccagctctgggttcatcaagaaaccctacctccataacataaagtgtgatggagaaaggcacctaatgtcaacctcaaacccctacctgcatgtgcacacacatacatccacaccacacacacacacacacacacacacacacaccacacacacacacacacaaataaataagtaaataaataaaatatttagctctccagaccaaatcttggtgaaacccatgcatttgcatttgtgtgtgtcctacaaacactgaaggttaagaagcatgctccttagtaattttatagcagtttgcgtttccagattgaaaacagattctataggctacacagtgctaaatggattatgctcagatacagattgaaaaggatacagattgaaaagggtcggggtctgggccaggatgacgggccaactgatctttgccggggcttgtccttcagggaagggttacaggattcaccactggggtgtggcctatctgctgttaggacctgaattgcctggagtgtttctagttcccactagttgttgaactttaccttgaacctctgctcccagggaagtcatcaggactctgccatccctggagtctctgcagaggttgtttgaccaacagctctccccaggccttcgcccacgacctcaggtaaggggtttggatttggaaagatgcaattgctataggagggactctgaaggcagacagacgcaccgcctcctcacgttggctagtctaatataaacatcgcggtggatggtgaggatagactccatgcccttttgtgaaggcatttcctggcatcagctcctgacttcagacagtttcacccatcagacaaattgcctggtgttggaggaggaggtgagcagggccattcccatcatttctcctcagaaatggaaaggcaaggaaaacatgaggttcttcagacacttaatccctgggactgcaaaatggtggtgcccctcctccacagctgctcacggcggggcaggagatgagggccaaatgaagcatagatctagctattttttttttagtgccttcagtaaatttaaaatcaaataagggaagggacctagatctttatgttatggcattgttaaaagtgagaacttgtagccagggtgtggtggcgcacacctttaatcccagcacttgggaggcagaggca

SEQ ID NO: 17926 - DNA, 1202 bp, Mus musculus
ttgtaatatatgcatgaattaacatataaggcacttaggacagtgtggctctttcacattaattagcctgacctaacttacagcactaggggtcaaatctggcaaggccctgatagccctttctgttctcatcttacagtgagctgctggtgatcggagcctggaggaacagcacaaagcagacctgcgcctctctcaggatgcctctctcaggatgcctcttggaggacctcctgctagctcttcttgcctagcttcaagtcccaggctgtgtattttttttcaggaaacggcctcacttctctgtggtccaagaagtgtgctgctggctgccacactgtgcggcagatgctaaagctggatgacaaacgcacgccatacagacagcagacagcggcactgggtctcagaacttggattcctgggccttcttccagtcgccgttttaaagaaaggaactaacggagctgctcatccgagggtgaagatataaataataatattattaataataataacagtcaggtgccatgtgctgtgttaagtgctttatgaacatttgtcgggctggcctccagtgctgaggtgccagtcagcctgaaccctatgcccaggcccactaatcccaaatggtgggtcctgagatgtttttaaaaagcattaaagaaaaccatcggtctcttagagctaaccggccgggctctactgcagggacccgaacagtctgcatggctaagtggcacaaggagcctggccctgtccagcttcagagatccaagctgctttttgctggggttctgtcacaggcctgatcctcttggtttttatggggtttcaagtctgccagagtcagaaatcagctctaactcgccagtgaagagatctggccttaacttaagccagccacgtcaggcccctgctgagcctatggaccaataaatactccccgtgccactggaggtgggcagctatcaccataccctgagttgggccaagcccaccccacccctaccctgcaacatttctgatgtactgaggaagagtctccaccatagtccccaagggctgagttctccagcctgctatcagggaaggtgagcattggtcccaggctctcaaaatagtgcagcctcttcttcccaagctctggggtgcaccctgtgtccttggttaccaggagactagggttgtgatatcttttc

SEQ ID NO: 17927 - DNA, 1261 bp, Mus musculus
caaccactaagagcctgtgattggaaccaggacacagcattgtacagaaaacattaaatgtagtacctgggaatctcaggtgggttctggcagtgacagttacccttgttcccagttggggtttagaacagaaattggtctaacctgagaaaatggtctgccttgctcaaagccttgaaaacagtggagaagcagagaggcatcgttacttgctgtgcctggagttggttaaggcaggcttaggtgagggagacatgcagctcgagcctgctttcagttagtggaacggctcctgggcactagaacttttggtttaggacattgcaaagcttcattggtagtcagtcgttgtggtgagctgactgaggctgactgactcctgctgtggaggaggagttgggtagagcagagccataccttactgaggtcagtgatgattggtaaaaggtctgattgcactgaatgtcacagccccttccttgccctcgactcccagcagcccatttttttcctagcacattgaagttatgtgcatgggataatggggcagctgataatttaggattctgccagtgtgtgttcccgagagtgaacggttcacagctgactgctatccaacagaacctgtgatgcaggagtcttgatgagtggcggatgggtgtgacagtgcatgatctcaagttttcaatctgagacctcaggacagaatattcttacaaaggagagctgcatgaggtgaaaaagtcaggtcagctaccagatttccagcagttggacatgagcaggaaagtggacagtcacatcaccaaagcattaatatgtcccagtcggttagagaggtgctgcctccctgggctttgctgtacttggagcaaaacgtagacatcagctttgcaagtagttccatatccacttttgtgttggggaatatagtggtaccatctctttcttcccgtcacatgggatgcttttacctggtctcattctgaatgtgggtgttcattcgtgctaatcttagaaatgcccctgtgaaagggctgggcacagtgacacaagcttttaatcccaacactcaggaagcagagacaagagaatatgagtttaagggtcagcttgacctagaaatcaatttccaacctatctcaaaaaaaaaaaaaagatatttcacatgaagaacgtataattctcctaaaatagcacttttattgattttttttcaagtacaatatagattataaattttttttctgataagcaaaat

SEQ ID NO: 17928 - DNA, 1263 bp, Mus musculus
gatctgtctccactgggcatacacacagtaattagtaataattagttcagtagtagtaatagtagttcagtagtagtagtggtagtagtagtagtagtagtagtagtagtagtagtagtagcagcagtagttgtatataaaaatcaaagagctcgaacattaaatgccaacgtggaatgccgaactgctcttgtgaaggactagaattttgtttacaactactgtaacatcagctctgggtgacccagcatctttcagccccctggcaactgcagtggtgtgcacaagtgagtctttaaaaaagaagtaaaaataaaaagtcaggcatgtttgcacatgcctttaatcctagccctcagaaggtggctgtttccttccacataatgagatcttttctcaaaaaaagaaagaaagaaagagagagggagggagggagggagggagggagggagggagggagggagggagggagggacggagggagggaaaaagcctaccttggaaagaggtcagtgatgaatagtaaaaggtctgacttccgaggtcgcctcccagcagcctacatccccagctgcttacctctctcccatcatgctctagtagtgctatcatgggcaaacacagtagctgacatgcagtgatgtctccattctgtcttccctgacaagtccagagaaggcactggttggcatccaacagcttggtcacaagggatttggttgttgggagtgctggcgtccttggctatgatctgacattttaagctgagacctcttattttaaacaccccatagcatctaattgtgtatatggaattctgatgcttccttttgtaaattatgcctgcagtggccctgtcttttctcactttaagtacagactgactttcagtggcatgaataaaagaaagtcctgtctttgttactttgagttagacgtggtgcggtacacctgttaatcccagcactggagagccggaggcaagagcttttaaaacatcctcctcctgcttcctcctctctgcttttttggatttcaaggctttacagaattcagtgctgtttctaaggttgggtttgtatttctctttagtagaagattgccttgaccccttccagtgctggggtctagagccttgtatgtgctagacagtgctccaccactgagctatatcccaaagtcttactgtgttgcccaggctgattttgagtttacagattccaggaattcaagtactgggactgtgtatgtaatacctgcctt

SEQ ID NO: 17929 - DNA, 1300 bp, Mus musculus
tctgctctacggagctgagtgttctctttctgcttccctaagggctactcttggggtgaaccagataaggcctggttgctaatggagatgtcacctgtctagttcagtgctgttactgggacacagtgcagctttcatagcatacgcccctgctgtgggagggtgtgcctgtattttgcacgtgcatgggtctggtgtcttgctgactgaagtctcttctaattggtccttaagctcttctatcaatgcggtggcgtgggccccctcgggcttacatgttgtcagtgtggacaaaggaagcagagctgtgctgtgggcacagccttgatgctgcacccttaggagcaccgtgggaccccacggcccatcttggagaatgatgtgtcctcccagaaaagagctgaagccatgtggtgccgtagctttcttgagaactttgacttaaggtctctaatggctgagaagaaccaacactgaaccaaactgactctgcaagtccctagcagaggttcagatttttgtctgcatttgggtgggaaacactactaactctgaccttccatacctcatggggagtacagggtccctgctgggtctccccactggacacagtgccaaggacaaccccacacaccgggtattgggtcccctgtgctcttcccatctttccaaagtctgttgtagcctgatgctcgccccctttctgtggagtcacttacccagggggctcactgtaggcactgggtcagtggaaaccaaatccgggcctgtcctcctgtgacaaaggatgggtggagctgttttcagggctggtggtatgtctggtctcactgctgaaacctgcatcttcagctggccctcagaaccctgaactcccttcctgccaacacttgcacatagctttgtgtgtgtgtgaggaaaggactgtgccaacctttccctgtctggtagaatttgcagcagaggtgagaaacacatctttaccctgcatcactgcacgtgcacagcaggtggccgagcactcacctggagcagagagtggtgaggccagccactgcctgtgcgtgcagtgcagtgttggtaagagaagcctacctaggagctggtgatgatgaaggctgggctgggaaagcattctctgtcctgctcgcccgtgcacatggtctgagcgccacgtttgtctgtcacacttactttgcactttattttttgcttccacactgttctctggacagcagggacaacatgagtgctggagctcgggaagagggacagcagttctgcctgccctgcccgaaac

SEQ ID NO: 17930 - DNA, 1208 bp, Mus musculus
ttaggagaggcatgtgcactgtatcacctgcaggaaacagggcctcccctgctgagggacctcgctgtcctccctaggtgttctcatggctgctcataagagtctggcaaaactgagatcttcatctctctcggaatagaccccagcaaaggtcttcaaaaggaaggggttcttcccatcagctgtggcgcactgtgggggggaagggggcttttctagagtagacacagtgtaaaccagcatcggaacgaactctgtgccttctctacccaaactgtgattagggtcagcccctctgtatccagctctgtgtcctcaagatgagtcaggcccacagtggacatgtgcatactcttccttcacctttactcagggactcttcatcgcacacacttgctactggccagtgagcagcttgcaactctccttctttcccacagccctcctgtctgttcattttgttgtgactcctctcaactctgctctgctttggacagtgtcaagtgtgttgtcctgttttacagcatccagggccccttgtgagaagctggtgagcaaaggcctgtcactcggcagctctgcctcactccctcctggtacaggaagccgggacagcctgcctgctctgaacaccaagatcctatatccaagtaagtgacccactgcccccccacccccaccccaccccaccgtggggaggtgagtcttagcctggggtgcggtaccagggaggctagaggtgcttgctggaggtgcttagccggggtggggtaccagggaggctagaggtgcttgctggaggtgcttagccggggtggggtaccagggagggtagaggtgcttgctggccctggctgagcttatggcaccgtgggtcttggaaggaataggactgttgctgtcctcgaagagcttgcagttccatggaaacatacacagaactctgtaatttaactcatgtgactgtgtgaaaaatacctttttggtttacaagtgttttttattcctttgcaatttcatacatgtatgcaatgttttttgaccatacctacccccaacacctccctccagaccactgccagggccctccaatgtactctcccttctttatatcactctcttagtttttataatccattgagtctaattagtgtgtataggggtgggctacccactgcaacatgggcaacctagttgcagccaccttt

SEQ ID NO: 17931 - DNA, 1220 bp, Mus musculus
tttgaatgtttatcagttattggtagacagaacgtagtaaggccacataatagattgctttgcataaagataaactggttagaggaaaggagccagagcacattatctcattccatttatttgacaagccctggatgggcacatcccgaggatctgtgcttctagggcctgaacagtgaggcagttgccagtgcaagtgacggtggttctgaaactgatgaaagggctctgaagtgtaccagaaaccgttgagtcatgtacttagatgtggtagtgacttgctatgtgaataacatcttggtagagctcttaccaaaacaaacaaataccccacacaaaccctgaatcaggaccctgggttcaaactctaaacacagggaaaggaaacaaagcaaacctaagtgaaaaaaacaacaaaacacggaaaaagccgtgagttttgttctgcgggaaaaatggcaggacagtcacagaggaacctgtcatgcagagccattgagagactttaaactcacctttgcagagaatactacacagagaagtgtgtcatgaacaactattttggcattggcttggatgcaaagatatctctggacttcaacaacaagcgtgatgagcacccagagaaatgcaggtatgtactctttgttgtcagttttgttgtagaaagaggaaaccaagaagccagctcaaaaggggagggactccacccctggattggccatcttgggcagactggatatcaggaagccagtgatgtgtatgactgaagtgggctgtctcttacccaacatcggagtctatgatgatgtgttggaggaaggtgacatgagtgtgctacaaggtcaccattccagtaccgttcatgggtagagctttgcttgtccacaaactgcctagagcaccccctctccgtgcccccctcccctcaattgtcatcaggacatggagagcagatggcacagtgcatgtatagaggtcagaagaccacctgtcttagtcagggtttctattcctgcacaaacatcatgaccaagatgcaagttggcgaggaaagggtttattcggcttacacttccacattgctgttcatcaccaaggaagtcaagactggaactcaagcgggtcaggaagcaggagctgatgcagaggccatggagggatgttctttactggcttgcttcccctggcttgctcagcctgctctcttatagaaccaa

SEQ ID NO: 17932 - DNA, 2391 bp, Mus musculus
ctgctggctgtccttcacaacagtagtctttgtaggacacaggaaccatgcattgggtgtctgcatgactgacatttgtgctgatttccttcctatttcatccattgatcattttcctaatttgtacttgaaaaggagactgagaaagctttttggtggcagcccatttgtcagccctctggtctgagccctcttccaaatatccatgttgcctgtcttccttctctgttgcaggaccttggtgtgaccaaagtgggccatatgaagaggatcctttgtgggatcaaggagctgagccggagctcccctgccgccgaggcctagcctctgcgttctctgcctgcattctccgctcctcccgagactgaggcctagggaggacactgccagcactcagcccctggcctttctcatggtgctattccttttgttagagacaggaagcccaatgcccgttggtaacagctttggagtcttgaacataccaacacagctacctttgagagaatacttttcctagctgcagtcatttggggcagactgtgtcacatccacttgtggctcttgctaacctgccttgtgggccacagggaatgtggtgaatgaagcctgaccacccagcacctggcatccctgcagaaccttcttacctggggcacatgcttggattgtgctgtgcactccttttctgtgtcctttattggtcacactgggtagtaccatcttctgtctctattggctctcagaaacagagttgggtcaggcctcagtggccctcaccagaatgttctctgtgcctgctacccactctgtagttcttcacagcagccccacaaaggcagcccactgctgttgccccctttgttcacaaggtttcattgttttaaaaaacaagctatttactttcctggtttgaaaatggcatggatgtgtttccaggcttgttatagtctgtgaggaaggaggaaagtcctcctgcttaggccaggtctcaggacacttggttctccccactcttgtcctgtgggctgtgagcatgtggacagcccatgtatctcctcaggatgctacaggtgtctgcagtccagtctggggcagataaggattgccactaactcagcattcctgtggagaccaggcttcttggatgctggaagtgacatatgccatgagagaatgaataggggcagtcatctggagccatcttgggtggcttctcatctgcgctgaggtttgttgtcccaggagatgcctgttaggcctcttgactgttgctgccttgctactatctgctgggcagaaagctctccaaggcccagactacatcctgtgggcagttcccaggtgaggatgtcctgagtcttcactgccacctacttacccttctctacttttgagatagtcctccacagggactgatagaacagctggaaagggagggctgctggtctgtggtcctcaccagagatgacaggtctgtgggctctgccggtgcttccccatctgacatgggaaggaagtactgaatttgggctctaggtagagtctgcagcaattccagctgggaggcaaggttgacctgctgtttgttctgaagactagactccttgttcatcttccctttcctggtgacagatctgagagccctggtgagcagagtggagtatggaaagggcctacagtgttgttcctgctgtgttctgccccaggcctagagttccacccattgtctatcagctgtgggctgggagaatctttgccctgtgtgtggttgttgctgcctccctgaatggaaataattttcactttccacctgggattctattttccactgagcagtcaatgtagaccagaatgtggaagcagggataacctcagataattcacagagcttttgccagccagaccagctgaaacttaggtgactagggtcctgagaaacaactgagggcagtggccttcttgagaaagcttcatgtttgggtgagggtgttagaaatcattattgtcaacaaaaagtgaaaggtccagtctgagtgctggagggacctgccaggtggccatgctctccgcagatgtgttctggccatcaccaccctgccccaaacccatagcagttctctagagttctggagagggatagaatgaaggatcccaaggaattggagtaaaggttttgtgcctgcaggtggggctaccttaacccctcatatttataatcttaatttatagtgaccatctggagcagattcctcttgtattgttatgtacatagtctgcatcagagagttgtaaataagttcttctgtgtataataaaacaggcctgtttttgatcttccagtgagcattcctgtcctcatttctgtgctgacagttgctagcggttctg

SEQ ID NO: 17933 - DNA, 1830 bp, Mus musculus
cagctgctttgaggaagaagacctcagcagagacttttgtttctccttttggaggacggtccccagggcatcctgtgtactgagcagtcttccattgcagctccctgtagccacttggcctctgtccagccacctcccctgctccgtatcacagcatcatctctgtcctttcttgtgggatgttggtgccttgggcttctctagccagccttggccattactgtgtctctttatcttattcaggggattctcagtggcagttttcctcttaacatgaattacttacagtgtctctactccccactcccccatcttcaccttcctcacttctgcttctgagtaggtgagtgtccttcaggagagcacggtgttaaatccatgagttgagtcatgacagaacgctgttcacacctctcggcttagtcttaagagcgctggttgtgggggtgggggagatgttttatttggtttttgaggcagtcttgcatagcttgggctgaccttggactccttggatagtcaaggtaaccatgagttcctgatcctcctttccaaatgctgaggctagttttgttttctgatttatttccatggataaaaatactttgtgaactgtatttccctggttgaactgggtctctggctgcctggtgtggcaggaatccctggcagggtattcccaccagctatctccctttgctcttggccttgagctgtttgtctagctgcctcaacctcgtgagcccccttgactttcctagaccaaactgctatcgtggtgtgccttggtggcctgctccagaaatcactatggaagtgactgtgagagtggactcgtgtctaggtcaccttggggtaatctgagattctgatgagaagaaaggtcgctggagaccttagttcagaacctgcatccttttccagcctgtgtccccagctgtcccaagaatacagctgtgtcccttgcccacccatctgggcctgccttcagctccagagccaacgaaatcttgctactttgtctttaaagcctgtcttgctatatagcccaagctgatcttgaccttgtggtcctcctgcctcagccttcctaagaagctggggttatatgtgtgcagcgtgccctgcctttgaagtcccacctgcctggcactctacctggagaaaaccttgcttttcctgcagcccggagacctcgcttgcccaactactagcagggacttcgactttgcagagaatagaatcaagttgctggttagtggcagtcatagtgcctagagcttcttccctggtacccaggagttcctcaccactcccctggaagttactagcctatccttagggcctttaccagatgccttctctagttccatcttgagccacattaaacactaaatggcttcattttctgtttctttctatgtcagctataaattacttggagaggggaccaggtctctacattcagtgacaacatgaaggatattaggagctagttcttcctcctttgtgctagaccagtaaggcttttatataccttgctctatctagctaaggaccctttggtgatgtgggcagtctctcttaggaagacagtttgtgtctgctgactcctctaagttcactcaaattgggctgacatacccagggcaaactgccgggacagcagcaaccattatcattgctgctaccgtagtgtgccttgagttctttgacaacaggagatttcccacagtgggcataacacaggtgcctcggggtttacactgggcagtcaggatgaaaaagtgattttttttgataggaaaaatttaaagtttaaacattttg

SEQ ID NO: 17934 - DNA, 1830 bp, Mus musculus; identical to SEQ ID NO: 17933

SEQ ID NO: 17935 - DNA, 1830 bp, Mus musculus; identical to SEQ ID NO: 17933

SEQ ID NO: 17936 - DNA, 1851 bp, Mus musculus
agtggggttcaatcccccagctctgccagaagacaacccctcccaaaaattctgaaaatgttctaaaatgttaatcgaagtaaatgccctcataaaatggacaccaaattacctaccccctcaaggaacaagataacaatcaagaaacagcctataatcagaaatgggagagaaagtttattttaaaaccctaggataaaaatcacagattctgtcacgtttataatatcgttcagcacatttacacgcgtcttgtttttgaacactggctttccagactcctttcaggaccgttatttggatctggctttccccaagccttcccaagagctgggaaattggtagatccaggaaggagccttgacaggcaactcacccagaagcctctaggggacgcgggagtgccgcatgaagtaatgcgcatgttccacccgctccggcggaccctccctctcgtccctccccttctcgtttccaccggaagtgctccctgggagcggcggccggaaacgcgggcaggatcggttgcgtaaatacttttgaaagaccctattagcgcgcggggcgccacgtttgatctgtggacgggcttgggcgggtgcagtgccgggcagagagccacgtacgccatggagtctatgggtcggcaggaccgcaggctgcatcagcagcttaaggaaagcagtagccgcttccagacgttaatgaagcggctgatagcgaaggtaggctgggacggcggccgaggcgggcagggcgcggtgggcggggatccagcgccccggagtctgaccagctctcccttccccgcagtacaaccagccctttgaggacgacccgttggtggagatgaggacgttaacctacgagacgccccagggtacgaagccctcccttcctgttggcactgggccagaacagtgggcctagaatttgcaatgctgcatttgtcccccttgctcctagggaccttgaatccctgagttgctgatttccaatttaatttctctgaaagaaatgcctggagacacagtgcagcctggttttttaaaatgcctggcatggaagttcgagctaattgattagcggtacaagtgactctgtaaaataaggatgttgacaatcatgggtaagccgtatggttgtgtataacatcaccagagtacctgtcaggccattggaacagcacccaggactgctccgctctcatgggctttgctgtataaatgtagacccatctgttttggacagtccccattatctgccacctctgacgcattttatttaatgttgtgagtgtacttactaccttaaacctcatcggttctctaactgggataagtttgttatttgatgaggtcgtatccttccctaagacccatccctgatgtttgtctgaatttattgataaaatcggatttcggatcacagtctgccaggggtctacaagtgcagtctgtcttttgtcttattggctgttcagggcacgtgttgggtaagcattttaaataagcagaaactgaactaattctacaaagaggttgcttttctctggatgggatcaggacacagcaatataggaatccataagtgtgctgtctgactcttggcttttctgtgctcttgcggctgtttgtgaaggggtaggcagtgtctggagtattttggactgcccatctgtcttcaatgatatattctgtcagtgatatataactgatgtcagttatatgagaacagtgaagttgctgaagagtttgagactatacaagttggtataagagccctccctgaggtctggccaacacatagacacctagggctgcagttgtcggttaacaaatctatgtccta

SEQ ID NO: 17937 - DNA, 1851 bp, Mus musculus; identical to SEQ ID NO: 17936

SEQ ID NO: 17938 - DNA, 1122 bp, Mus musculus
tctaactgtgaaacacttagcttcataggttcctcggattcttctactctcctcgctctccatgtagaagtgaagaggggcagcccccaccccttcacatttcatgttgaaggtcaagctatttggccaaggaactcccttgtgacctgggaatgggcttacataaacagtgatgactgtgtctgtatagctagcatttctcaaacagctcagataagaacttccagaatggatagccagccccacccctggatcgaccgcattcaatgggtcagggttgaagcttgggagtcagctctctaacaagctcttttggataccatgctggtctggtctaggttcccagacttggctgcccagtgattactcatgaaaacaaaaactccacttctgtttgatgactgtcagcattcagtgtcccctcttcccactcctcaagacccatgtctagaaaacttgagaaggacatagaagttccttcctggcccatttgtctgactcccatgtgtctgcaatataaaaccatgatgccgtcatcactcctagatgccctttgctctagaagcccgggagagactgtaccacctaagcacgtgcagtagtctgtgtgacactttctcaggacactggaggcatcagtgctgacacattccagagaagcctgactattctccttggggcagtcacatgatggaggggagggcggggcttggaaacataatagcccagactctgttgaggttgcttgctggaggcaaccagggcattaggcctcccaagctattccaggcactgtatatcaggtactcaggatagaaggaaagtcttctgccagtgaggccccaggcagctgaggatgactaagaatgggcccacacacaaaattgtaaactttgcttaaagcagtgtttcttaacctgtgggtcatgacccctttgggggtcaaatgaccctttcacaggggtcgcctaagacaatgggaaaacacagatatttacattatgattcataactagcaaaagtatagccatgaagtagcaatgaatgcaattttatcgttgtgggtcaccataacatgaggaattatattgaagggtcttagcattctgaaggttgagaacc

SEQ ID NO: 17939 - DNA, 1236 bp, Mus musculus
tctgggttgagcgagaacccgcgaacaaagacaacgaaccaaagcgatgattcgaatttttaaaacacgatctctgtatccaaatacaggacttggagacttaagccgggtgtggaggctgcatagccacccatctcgtcacctgccccacccccccaccccagctcagaggaccttttgtctataatgcttgagctaccggtgggatagggtgggggggaccggtggggagtggacgtgaggacgcaagggtcccgtggtgtgccctctggccccaggtgggaagcttggatgtcagagagacaaaagcgatttcttcttgctccagcagggccagaagttcagactgcccagcccccactgcgggggggaatcacgtgtgagttacctgaggtatgcagttcacacagaaccctggggggggatacccgaaaggggacgggtaggcgctggagtgtactgatgggagggtggggatgaccgctcctttcattctggagctatggaaactgagtaattttatggcacagggcaggtccctgttgcgatttcatttgtcctactctgggcccaaaggaggtggtggtttgaggccatccagaggactgcctcggaccatgcggcagctggaaggcccaggatgctgtgtttctggacttggctgggaatggcctggaagacgccactttccaggggtgggtgtgtgtggttttgttgagaactgcttttcagcctgggatgagacctcttccagatggcctaggccctgtccgtgtgcaggtcattctctcgtaaagagaccaataaaacaaagaacagaaaaaccattggaggtggtggcagtacaggtgcttaaagggtgagggtctcgacattaatgctgtgtgtgtacgcgcgcgtgcgtgtgtatgtgtgtgtgtgtgtgtgcactcggtactgcataatcggcataaaaactggaccctctgggtggaatttaaaaatctctcagcctactgattggtttggaagaccacaccagctacagatgtgtgctgaattgcaaaatggttttcttaacaagggggagggggtctgataataatacacgtggtgataggtttcagacatttaaaaaaaaaaaccaacaaaaaacacttccacaaataaattatcttcaccttaggagaaaaggactttgcccttttgtggcccttggtactgcaagtgaagacatgttcagatttctgagctggg

SEQ ID NO: 17940 - DNA, 1237 bp, Mus musculus
tggtaagtatcattctaaagactaaaattccttttgtgcttaaaattcagctgagagcaacagctctcaaaggtgttctccagctactctctaaaccagctcccgacaggaggccggagactagcctcagctttacaatttgcatttaaataaagtacctagacttcccggaaagaagttctgctttcctactttctcactgtctttcaagattttgtctttcaagcaggtaaatcaacattcccgaggcagaccagtagatgtgcatccccgcccccctagagcacacaggtggcagctgttacccccagtctcaggacatttccagcatgtggctttcagtctgagttaaaaatttaggtttacctagagggctagaagagtagatttttctatattaataaagattggtttttattttaatagacaggcttagccccttagctgacctctggcttttcacccttgctgttactgcaaggtgtccttagctcaataggctgtaaaaaaaacagggatgaagagaaacgacttccagctcctattttacccacaaatcgtggtgttattaacgacataattcttgcttaggctttgctaattctgaggttgatagttctcctttaggagctgcacagcactcaaaactgtgcatactggtttgtgattgtacaaattcaatatgggcaccgcttggtgcagagatacttactgcaaggaaaggtccggcttgaccatttctgagtttcctgtgagataaacccggtttaaaagaggttggtaccaaattttggttaaaaataaaaaatattctccggctctacctcgcctccccaaaaggtaccaagagccacatgtgtgggttttacccacgggaagaatcgggtccatgtccacccaagccaaggttaaaagcccactcatctacggataaaaaaatcatttgatcacctcagttaagcgttgccttatttaacttaattaataggggggagagagattggagacgtactattgaaagggcaagcccttcactgcctcccacccaaataaaaaagccaattggccttgtactacaagagccggtcactccttctccctgtttcccacctatcttccaaaaatgcgaaggaattcaacttagtgttattttcacatcgttcagtcaaacttagccagagttccaacgccctacttaaaattcaactaaaaagttacctaccaagtactaattagc

SEQ ID NO: 17941 - DNA, 1258 bp, Mus musculus
cagagtggcttgtggcctttcttttgttttgcaaacagtgcctaaaaaagatttttccctgtgttcaagaaaaattctttttaacagtgttgcagatctattcagatgtttaaaataatgcttaaattcaaagagttttgcttctagtgaactgtaatcactaaaaaattttgcctctaggtatggctaatgtaactttacattatgtaaaaaaaattttattgtttctgcttctatacaagaagtcaagagttttaatctttcagtgtatattgtttcctaagtaaaaagtattttattaactaatgcttcttaaagtttaccttaaatccttgctctcacccaaaagattcagagacaatatccttttattacttagggttttagtttactacaaaagtttctacaaaaaataaagcttttataattgttattaattggtaattaaaaattggttgtgcccaaaacaattctttggccaaaaagaaaacattattgtaaagtcatttttctcatcctcccagccaatcgttggcccatgtgggcccaactagcttctgtggggcggagtcttaagacacagtttcccctgttccagcacagatgatctagttgtgtgctgtagatggtgttttaaaatgctgaactatcaaaccttaatttgtatattaatagtcaatgccatatctctgagctcacaattgcttaaattgttcatccctcaaatactattaattctcaaatttacaattgcttatgcatatttctagttaataaataaattatgcacatgtgactcttaataactttacaagccttctagttacaactgctccttaaaaaaattgattaaaagtgcaattagtcactgaccctttacagccaagtatttaaaatgttttgtcaactagttattaattcaaaagtttaggtattgtaaaattttaaaactttaacttcttaaaagacaaaaaagagagaaattgtatccccgtgcatgctatttagtgcattcccatgcacactattaaagtcttacctttattttcaaaatctaatattttaatgtcaaagagtttaataaatgctttatagtatcttaaagggatctacttattggcttatagattaatcctaaaacagctaccttattaaaaaagggaaaaacaggttttctccacagaacgctgcagaagcatattagtaaattcgtgtgacgagctggtaggtaagttgactcatgtcctgattaaattga

SEQ ID NO: 17942 - DNA, 1207 bp, Mus musculus
ggcaaaatacctgacaaaaccaaacaagtttattgtgccctcagttgaagggtgcagtctattgcagcaggaagagcggtgccactgtggtggcaggagagtgaggtggctgtcacgttacactagtcaggaagcagagagagatgaatgccggccctcagctggctttcccctttttacgcaggctaggatcccagcctgtgggatgaggacacgtgattacgtgtgtcttctcaccgcagttaacccactttggaagttccctacacatgtgcccagaggtcatctcataggtgctttaggtcctgtcaagttgacggtccaggtcaaaagtaactgttcctgttgttttaaagctttgctgtgtggcttctggaagcctgcttgcccgccttggtcagcgatcgatgggaggtcctgagctgctgcgagctagtccctaagtctgctctgaaaagtcagtggccggttcagaacgaggggattgacagaacctcagactcgctcacttttgggagccccttgttttgacatatgacaaggaggcccaagtaacaggaagggaggtttttgcatattaatgaaagtagaccagacatgggtggcaggggctcagctgcatcttgggcttctcattccactgtcaggcatgtgggtacccggtctcggctcagggcatgttctcaggtgagccatttgcctgcttgtgtccttgtttctgtcatgtacaggctggaaggcaagtagtgtcttctggttttctccttccctctgcacacagcagccaggccaacacagtttagagagtggggggttgggggatgggtgaggtgggtgggttcacctgagtgcactgaggatggtgggtgggctggttgttgcctccctgcctagagctcatcctcttcagcattggctttgaagaccaagagagcagagaaagccgcactctcctatccctgacttaggcatcagtttcacttctaggattgctgggtgactcttctctccatggttgaatgatgcactgctgtgcatagctgtttgtatattcacagtcctgaagtgagcagccctgtcctttgggtgggactggagtttatacccccttggactctgcctggcatggcatggaccttgtgggcatttggggcatgtggtcaacctggagtcccctcaccctctttgccctgccccagggttgagt

SEQ ID NO: 17943 - DNA, 1149 bp, Mus musculus
ggtgtccctgcggtgtgcttaggcctttgggtagattcccaggtacgggtgggtcatgtgatcttgccaattgttttaaattgaagccaggtttttggttgactcattctcatcagccaccagtagatggagggagtgagacatgcaaacagagtgctgtccccactgcccggagtctgtgacatccatccctaaagatgtgtgttcatattgttccgtgtggatgtgcccgagtgtgtgtagctgaaagaacccaacggaattagctgttggtagtaatatgaagcgggaaaagccatttatgaaaagtttagtcatctttgaaaattaaggaaagtgtatacgtttgtttggtttgcaaacactcatttttttggtaagtcagcagcagccagagtggactgtagaaatacggtggagaaccacggggttggtggtgtactgctaagtacagttgtacatcgagggtgggcacccctcctcacctggtagtggtctccaaagtggttggacagtgcttgggcacacagtggaatactgcagtcctgaggggacatcatactttcaggggtcactgtcttaatctgatttcacgttagtgacatggcaagctggccatgaatgctgagaatccaactctgcctgaggtgactagacaactccaaggtcagggtgccagccaggacacctggggctgcagaccctttcctgtgttcctctgtgttctcagctgatacatgcttacacctgggtgggaggagctaggcaagcgcaggaggttaaacttcttggagtccttggagagggtctgtggctcagaccagagccctctgggccttcaggatccatgtgctgagtcccggagacctccttccaggctgaattgtgcccagcagatatgagacacctagaattgtgtctctgatggactccaggcaatgcttgttggtccgggtgggtgcagaaggagctggggttcccactggtgtacttgccaggctggtagaagtagatgctagtgtttctgatgagttttgaatggcagggttctacagagaaggcaccttggagaacatattccctcctttcttattccttagtcctagagaagagatggatggtgactgtcaactgagactctggactggg

SEQ ID NO: 17944 - DNA, 1120 bp, Mus musculus
gcttggctttgtgtatctggctggccgagggggcgggagcttggctgcctctgtgagtgtccagtgtaggccaatgagctcatttttcctggagcaggttaaacaatgtgattactctgggtcctcgtatgggtcagctgacgcccggctgctgtgtttcacctgcagatgtgatgcttgaagccggcgtggatgtttctggatgcttgcagggggcacctgcgggtaccacagccagttgctttggagtgtgttgagggccccttggagatgcttgcttctagtcagcaaggtcgtacaaactgagtgtgttactctgtgtgtgtgtgtagacgcacagcctgagcaagtgtgcatctgtgtgtatgtgtgcatctgtgtgtatgcggtgccccggctgtgtgtgtgtgtgtgtgtgtgtgtgtgtgtgtgtgtatgtgagaatgtgtgtgtgtatctgcatgagtgtgcctatatgtgtacttcctcttcacttagtcctacccaagaacaaccagaggacagagcagatgatgtccaggaaggctggagacatgtccttatgcggtgtcccatacaggggaaggacaaggatgtgatccccgctagcaaactgtagtgtacttcaggaaggtgtgtttgaacacctaggcacaaggacatgaagagtggaatggaaaatgctgcagagttgagcgggtctcaactcgtgcaactcagacatgaccccaaaataaagtcaggaaaagcctccagaatagatgtcacagagtggccacacacaacggtggcatcattaccttggggagggtggggcctcctgtgggcatgaccctgccagctcctgcaggtttcttcctggacccttttgtgtgctcactctctcaggacttggtgtgcttcacacttcctgagttacggctgcagggtgagccgtgctcagctcgggggcctggtaggatgttgacccgtgctcctgtgtagctcactggggaatgagtgtcagtgaggttaataggtagtcttacctggcaaactaaagatgctgtggggtgctaactgtagctgctgtggtgcccagtttaccagcctccacatgaatggcttccccctcacaaat

SEQ ID NO: 17945 - DNA, 1122 bp, Mus musculus
gggatcggagatgttactcctggttttgtgcgaatcagaaaattcggagtttgaagttgagttatctggacaccttagagcaatctccttccctgggacaggtggacactgttgcaagtgtgctgagtgatgtaataaaaatgaagtctgtcctcctggagttcagagaaggcagcatgggtaggatctggtgagggctcggatttctagatgtcatcttgctgtgtctgtatgtgggaggaaggcgagaggaagagagagagagagagagagagagagagagagagagagagagggaggagagggcgctagcgccagggagtgtgctcttagcaccttggtgtctgtcataaaaacactaatcttgttgtggggggcggcatctttatggcttcatctaatcccaatagccttcgaaaagccctccttaaactactatgtattggggttttagatcactctagccagagcatgcaaccttcccccatttttttttctgagtagtttttttttttttaaggcagtgggcttccttgaagtctctatgttgctggagctgagtctaggtagagaggagcgacacacagtagggctgctgatatcctctgaaggcctcacctctgtggagcccttcctccccttgttctccttctggtcctttcatctgactcccacaggagtcttcctctctcctggaccttgtagcctccctggatattggctttcttctaggcttggaaccgtgatcggccacagttcctgggtgaagattctatcatttgacctcagcctcacttgttattttgccacttgctgtgtcccacacccggctcctggcacctcactgttacccagacgcctttccaggctgatgctccagagtaagagcccctgtgacccacataacactccggaggcaagaaattcaccctttcagatggtgagccttgtgaagtcagggtgagcggtggacagtatttctgggtcacatcatccgaagcattgtcataatgaatgggcactcaggagtagtcctcctgaagctggctgcatagccactctgccacctgggtggctctcatccccttcaggctgtgatttacaatgcctgcacatttagcc

SEQ ID NO: 17946 - DNA, 1206 bp, Mus musculus
aagcgcgcgtcccggcggtcggcggcgctggatgcagcccggcctcggagggcggcgcggcggccgcggcccctggggacatgtacctgctggacagcagcggcgaacccgcgtcttcgcccgcagacgcgatgtcgcgcgggacgccccccaggaagaccgtctaccgcatctcggtgaccatggtcaggaaggagcagctggccgctccggctccgcgtcctactcggcggccccggcccgcgcgctccccggaggcgcccgggcggctggaggaggaggccgaggaggcggcggctgaggatcctgagatcgggccgcgcgcctgggacttccgcgcctttcgcacacgcagcaccgggcagctggagctcgggcggctgcggccgtgctcacgcagcgcggagcccgcggacctgatgggcagccccacggctgaggcgcccagcagtcctgacggtgaggaggctcgggccgcgcccctgcggcggagcctcagctttaggcactggagcgagcccgaggcgccgcggagccctgcgttgagcggcgggaggcgccacagcagctctggaagtctggcttgggcgccggacgacgaagtcgaggcggacgtggtcccggagccggtggccggagcgcagccggcggcggagaagcgcaacaccttggacgtaggcgaggtgctcagcaagaacgatgcactctcagacctggagcgctgggagcgcagcaagagcaagaaccgcacgctggacaacagcgacctgcagcggctggagcgcgcgcgggccgcggctgccggccctggggccgcctcggagcaccggctgctgcgtttcttcagtggcatcttcgcgcgcagggacggcgggccctcaccccgcagcggcgccctgcgctctcgcggttacttcagcctgcggcgggccccggccgacacgcactcgtccagcgccgagagcatcgaggggtccccgcgcagaggtgggcagggcagcccagccggggactcctgggcaggagcggtgggggctgggtctgcgctccagccgactgcggtgtgagcactttgaggcccgggaacagagcgggcacctgcttttcccggtgtccagctggccagtggtcgcgagggtgtgaactagcctgctgctcagtacagcagcctgggtactactgaatgctgtctctccgttttatatg

SEQ ID NO: 17947 - DNA, 1234 bp, Mus musculus
aagaagcaagggacatgtacagccctgggcttctgatgatcatggcttgcacagcttcccagtgcagaggagaggaaatgcatgggttttcagattgggacgacacggttgtaaacatgagatgttacaaatagggcttttgccttctgtaagcatctcatgtttgaagataatttctagtatttcccctggaattgctaactattttttcaggggtttccgtgaatctggttctccaccaagacccatcatcacgtgcatgctgggattcggggtttaggctgaaggtctgacacaggagacaaggactggcagggcacctccaaggtgatggctgtatatacttggtatttctctgcatatttctgcactctaatgagtatttttcctaatacttgtactaataatttttaatggctcacaatgactaggtgacattttgatacattaatgaaccttatcaatgacttttgaaagttcttcatgtgtgaggtactttgtcatatattactttgccgtacatggttcctgaagggaggagaggggacatggacatggactccagcctacatgtgctctgaaatatacatggcaagtatcgtcctgaattatgtcttgtgccctaagctctacttcaaggtttatcacaaaggtttatctgctgatggaagcttctcatggtccaggaaggtaagcccggcaggtttctatgtggcagtgaactttctagagggcttactgagactgctaaacaacctgctgaaatggtgcttttgtacagaaaggtggtctgatagaattattacagatccttggaaggaggaagaatgttggtagtgatcttgacctttagattcctgtgatgggtatttgctagttgttctcaggtttctgggaaatgggtgtttcttgggcactggcagcgactgagttcccagaacagcaaagtagctgacctgtgttgctgacatgttccagggccatgccatgccagccccacccccgtcccccacccccacccttacctccacccccaccccaaccacggtatgcagaccttgaggtcaggaatccagtagtaatcctcctgtcactggtctatccagagctcccagagcagaccccaggcttaacctaggacgggggagtctgtcctcatagccatctttaagaagtgaagattgactgcactctcagagccacagagcttgggattggcagtgctgtagcccta

SEQ ID NO: 17948 - DNA, 1193 bp, Mus musculus
cttatcctgccctccgagaaactgttgtcctgatctaacactcacatggaagccggcgaaactcttcattccacacagtcctaaaatgttagtttgctttgtggtacctattttgttcatactgtagttaaatttcaatttaaaaatcaaaaaaaaaatgattggaagttaaattgtttaatgtgtggggaaaaaaaacattgaaatgagctagtaaaagtttaattttatgcacctgaccatttgggttcaaacgaaacatatagatgtgtttaatgccatctgtgaattagatatgttggctcttcttctagaatctagaacagttagacaccgtgtgtgatgtgattgtcttcatgcacccagcagggaatgagtgactgctctgtgggcagtggacagttctgactgctgtctgccctcaactccaggctctagctttctactctgccaagcactgactatgccagaaatgcattcccctgagtgcttagagatgggtgggggtcctcctcctcacaaatagggcagctgcactaccattgctcaagtcaggactcctccccgaggctgtggcgatgtggtgtgatgctggggcaccttgacagctgactgtggagtctctgaactttcagacaagcttgagagctggaggcttacttgtgccttaggtaaaattatcccaggaaagttgtttgctttgtttcattttgggttggttttttttttgggggggggggtctggttaaattcaataaatatcaccaaacagggagtggggaaggacgaaagagaaagaatgaataaaggatcaggagtatcatggcaggtgggccctgttgggacccgctgaggacattggctccaggaggtcacagcatggctggttttcaggagagaggcgtaaggggacaaaaccgcctaagctaaggccctgcctacagcacacgtgtccagcaatgttgccacctacagggctggactctcctcagaacaagaagcaaagatgggtttattctgggaagctcttaagcccagagtagctgatgtcagaaggattcgtgtagtctgtgtttgtgtttgaccacattctgtcagttcatcatccagggaaagctgaagttggcagcagggtgattcaaaaaggccaacccagaacaagccaagggctgccttggttcccagccttagag

SEQ ID NO: 17949 - DNA, 1117 bp, Mus musculus
gaatgctgagtcagttttagggttttttttttttaatgcatatgagtaaactaccattgctcccttcaaacacagcagaagagggcaccagaccttatgtgagccaccatgtggttgctgggaattgaactcgggacctctggaagagcagtcagtgctcttaactgctgagccatctctccagccccagttttagttttttaagatgagcccatcccctggtgttgaccacccttcccaggcctcagtttcccccacagaaactttctccccacctcagaggccccaggctccgggtctcttctcaatttctcccagactctagacaaccttactgtcccggaaaggcagtgtagtactagatagggcaggggctgggggcagggaccaagatcacccaggaagtgaccatggctcctacggtgcccttggggtacagactcccagacctagtagctggtctgcaccattgacgaccccaggatatggtccagccggctgcctttgtgaagtgccagccctgaggaggagggttcctttaggggcttgtatggttcctggccaggacaatggctgtccatcggggctaagggatcagtgtgtcccttaggtcccgtagggtggggcagagtgtgagctagtgcaaccctgagcagagccgctcttcctccctcgctgccccagccttgctgactgcatttttaaagccaaccctaatcatcatctactccttttttccccctttttcttcccctgcctagaaacaggctctgacagtccgaatgttggaaataattggattctaaattctaattcatctgtaaagtattcggtgattaaattagcctaatagatattatttcgtacatgactgcataattttaccctgattggatctccatggcacaatggtgtccccccaatttactattgactcgagagcctcagaaggcaagacatagccctctctctgcttctgcagcctgttttcccaggctaaaagttaaagtgatttatgcctaaaagccagcgtcctcctgctcaggggcaggggcactgtgcatgtcattcttcaggaagagcagagaaagaagtgttaccagacgtcatcctcagc

SEQ ID NO: 17950 - DNA, 2231 bp, Mus musculus
gacccctgttccagtggcctggagacggggcagggggaggggtagcaaggagaaggggcagcgtcccctagctggcagttaagcacatcagtacatttcacctcgaccaaaaggaggcttagatttcacgtcttctcgggggagcttgacggcataaatcagaagcaagcacagtttgtcaggtctgaagcccctatgatggtaggtgtcaaatcagttgtagctaatctgtccagggagagtaccagcttcattacacttgtatagtcgagttcctccagcattaccgctgtttaatagaacgtgattagtcatcaccgggaagaaggcatattagccgaggaggtagttacacggcacgctccggtgattgccacgatatgattgcagtgcgcctagcagcatcatattatcctagacgtgtctctccagcccttggagccctcctttctaaattcactgtcataatttagtatctgtttaatttttcagtccaaagagaggaaatcagttgctgggtattatttgacttcagtccccttacttggtgcaaaaacaaaatggaaaataaataaataagtaaataaagagtcacttggaaattctaaacgaaatcatgaattcggctgaaaacagctttcaaatatgttccaaaactaaatacataaaagacttttttttttctaagagatttttctgtactttggccacaacggatgtgtcaggcctcagtccacaaggtctggattacccaggtttctgtcgtagataagatgtgtgaaaatctatttgaataaaagaagttcataaatatgcattgatttttgcacagacaaatggcacccatgttaatttataaattgagctggatgggaactaataacgtgcaactggttgagctcagagggttacagatcattgtccgtgggaagtactcccagcagcgaacacttccattaatgtgataaacagctttttaaaaggtgcgtatcagaataagtcggtggcacaatttgcttattaaagtcaggacaggaagcagggaggggaaagagggtatgagccctcatcccagagcccagttttagagccgagaccatcttcccagtcaaaccgaggggctgtggcaagaaggggtgatttctcaaaacaccagacccacaaaggtaccctgtgagcagctgctagcggctctggcacagccggctcctgagtctgtagactccgcacagcacggcccgtctggctctaacatccgatttgccatcgtaggtcacagggctcatcagataccggacaccttcagcacggtgatcagacaggaacaccaaaccgtgacactatttagttcttaaaaaaataaattggggcagccttgccagagagccccccgcctggtgacagtgtggcagggagaagtccatcacactggaagacaggacgctgggcagagccaccaccggcagcctgtggagacactccctacgcttatatattgaactttatattttgtaagagtttttcctcctctttaactttttaaaaaaagaaaacaaaaaacaaatgtaaagtagatgggaaggaaagtgaagcttcacacagcctttatatgtggtgcgcgtcttgtggggatctccagtctgggcacagccggaactgaccgggatccagaaatgtcacagatgcgcaagccgcgggtctgaggcccctgaactcagtccataagccctgcgtttggtttctcttcctgctctccatcactgtgttgttactttaaatgtgaatagagaaaacaagctgtcattgcctatttttgaagaatgcgttagcatccgaccccgcgatccgcatacgcctccacgtagcctttaccatagacttctatagagaacacagatagagtataaatgagattcttaaattatttcagtgtagctaatccccactaggaatgcttctgtcgtaggggagcctacttcagaaaggaagcagagtcctttgtgaggtctctcttcggggtgtatatgagtgtgtacatattattgtgtgtttatatgatattttcccgaatgattccttgtttcacatcatcctccgctgcctgaatgcgcagttgctcgctctggttccctccctccctccctgacaccatcagttcttcctcggaacacatggccccctcccctgccagtttttgccgtgctgaactgtccaagagtagcccacttttc

SEQ ID NO: 17951 - DNA, 1592 bp, Mus musculus
ctcagtgtgccaccttctctttccattgtctcttagattctaaatggccctactcctgccaggccctggctagcagcacaccaagatgtgtgcctgggacataacaggaccaagtcatatccggtctaagagaaccacatgacccaactctttgtatctggcctgttttgggcccttctctttaaagcagctgagatgaatggggttttagccaaaatgtcacattcctccttgagaggtgagaaagggaaggggagaggccaggctactctgctggtgccacccagcagtcgaccatagaccatgggcttttagtcccacccctggaagcaagaagcagggacagttgattagagattccagtgcctggagtcggggctcatctctcacttcatggggaaagataccatctggggcctcagtgtttgaagaggcacagactccttctgctcagaagtcctgccctgacagggctctttcagatgctgagaccccacttagtttctggacctgctgttctttggaccctgggtcagagttgcagtgagagaaggtttcatcatggataattctagacagccaacaaggctctgtgtccttaggttttagcagatctgggtcaggcctgcttaagtgccataagcctggtggctccctgcccaaggcagtgcacactgaggatccagggagaagctgacctcccgcccctcgtctcaagaggccaagtttcctatagaagaacagtatttagtttgagtttgctcctgtctggtcagagcatcttaactgaggccttcctcttccatagtgagcctcaggtgggtgtggatacccagcactggcagctactcgagggtccaagcaagggcctcagggagcaagtgagcgagagagagagagagagagagagagagagagagagagagagaggaaggagagaggagagaggtcagctcagggcttgtctttattttgctgggcacgtggcatcttttggggacccccccaggggtcgggaatcaagccataagatagactctcctgccaaagggaggactgatctggaattctgtgtgcagggaatgacatggcctttgtcttgttgcgggtgaaatgaaggaaccgagaggtatgagtgggtgaggggggatgggattaagtcctgaggagagccccttaatacactgttgctgggaacagccgctctaggatcacattgtcccccagtgtctgggttcaggcctgggtccacactagcccacatgttagtgtgggtattagagatggctctcaaatgcttgcaggaagaaaagcatagcctcctgcgtggctcaggtggactcactgagggcatgcaccaaaacagaatttgtaaacagccctttgttcacagctgatgtgctcagaagatgctcggccccccaggctcacccagatggctagggacgggaccaagggtgctgtgagttgggggtccagcccacgtgtagcttctagttcctgctcttgcatgcacacacgcacattgttcacccaccaaccaagtcctgcagtttccttaccagggtagtcgagtagagagacctggctat

SEQ ID NO: 17952 - DNA, 1106 bp, Mus musculus
tttttttttttctaaaatgcaccaccttctaagatgagaactggtgctccagccctgagccctgaggactgaaagagtgttgagtcccaggaaggcacagaaggtggctggcccgttacaacagcctgagggtagaccctcttctttccttcccccagttccaccttgagtcttcttgccacagggccttctttgcaaaaaaaataaaataaaaaaaaaatgaaaccccagacaaggcagggcaccgctggcacttttctgggtaggggcgaggaaggccatctcgcctgcctggccacacatagaaggcagaagcccagtgagggcttctccagaggtgggtcgccaattgggcattttgatattacctcattccatgattttacgtttcccgatgactgatgctttatttatgctgtttgtcctgtaactaaaccacccacagacatttcgctttgcttgttcgttcatacgaccttgttcgggtttaaatatgctggtttgtattttcctgccttgggattttgtgtcagctgtacagtattctaaggggaaaaggagacagagaagcgtgtaaagtaacggagagaggtgcctataatggagagacctctttctaataaagaaaagaaaatatgtatacagtgcttctgtggagtgtcttcttgctacccatttgtcacaattaattggcttcctgctcccagaagaggtaaatcagagaagaggggcttcagtgactgcccaagggagacttgtcctagacacaggccacccttatttgaaggccctagtccctcagcctgcagccagagacccaggaaatagaacctcagaagctgggcaggcggctcccccataactcaatcacaggaacagaaaggccctaataagggtgagtttggcagttcccaaagctctgtggggggaggggaggctcagtattgccccacccaccttccccacaagagtgatagcaatgccatggactgctggggaagcatcactcccagttcagaaaaggtaagagctcccaccccggacatacccacacacactcccatccaggacacacacacccggacacacccacacagacactccca

SEQ ID NO: 17953 - DNA, 1199 bp, Mus musculus
accccaagattgtcgtccccatccctgttcacgttagcaggttcgctattcgaagtcaacaccagcagctggagcaggcccgaccctgagggcccagccagggtggacaccaccatggagaggccctaacacctgaaggaacccgtgtcagactccactgtttaaagcagaactcagaggcacctcctagatgtggacatccaagcaaattgagagtatattcattagacgggcttaaagggggctacagccacaccagaagatacactaaatatttattatacaaccctactttgtacatagatctctatctagactggatctcagctgcagtgttttgaaagggataggatcaaatctctctccttacactttccagatgaaacaaaaccaccactgtactctgtcgccttcagcgaccaccttcccatacgtgcccaaaggtaaacaggagacacaaggacaaacactgcggtttaaccttcttattgttattttttgtttgtttgtttctattttggctttttgagttgagtgcagagcagtcggttgattttggagcaatctagaactctgctctgctcgtttgctttgcctggctgtctttcctggccttgtatatcctatctgagccatgtcggaagcacgtctccgttgtgtttaatttatttcaatgtagcttattttcatataagttatgacatttaaacaatctcagtcttgtgaataataaaaaaaaaggcaaggaaaaactataagcttaatccttggggcctcgttagagtgcccaccacctgggcacctcgagggcactaccaatgtgtggtcagctaagtgacttgcgaccaggatggaggcttactggccataagccaagtagcacctgaacaggcttttaattggagaggaaaactgtgagtttaaggaagcctagttttcatcttaggaatcttgcatgtcctctttttgcatgtctttatctattatagcctggggactggcaaactttggccggaagaggagggaaagcaagctcgggtagtagtgggtttgtacagacacaggggctccaaatccgatgcagccagggaagaaacgcgtttccttagaagaaactccgaccctaaaagcagcggtctttgctggctctcagggcctcggatccataaatcaggctacaggcgttatcttccgacagg

SEQ ID NO: 17954 - DNA, 1149 bp, Mus musculus
aaagtacattttcctgatccaaacaagcttcattgctttcagctgactgtaagcccaggtaataaatactgcatacttcagtgttcatgtagcttccaagcagcaagtgtaaagatctgctcaaatctgtctttctgtggatgtgtcctgtggtctgttagcactctcccattccctcggatgatgtggcctatgtcttgcagccagataaagtacagcaggtgtgaggcacgcagtgtccaggtgactgaaagccaagcagccaacaccaaggaaaactgatggcaacctgctctgagtgtgggctttgaagtgggttttggtaatactccagtggagcttgactgaggtgtgattgcttagttgcaggaggagagtcatgaatcctgtcttagacaatgtcaggatctaatgggtttttgtatgcacaccacttgggccccgggtttagcagattaccagctgtcctccttaggactatatcaagtgcctagtctacaggggcagcagcatctatccttggtcagacttttcaaatgaaggtgctattaaaggagttactgatcatcaacccatgtctgccttcagtggccaaccattggtagccagttcatgctacttcaggataggtggagtaggaagagtaaggaaatcagttctcaaggtttctcaacaaaaacccagctcattgatgtttgtaaagggtgctagagtgagagggcatcccttttacactttgtatctgaagggactgctgtttcacatgctacactttgtatctgaagtgaaaatcttaaagtagccagaggaaaatattaaagtattcaaaagatgttaccagtacttcaaagatgtgaaaattattcaaaggattatgatgcagagaaaagggagagggatggtttgtgttcaggtcatgctgacaaggtaatgtgacacttgttaaggctggagtagtctgatctttggggttcatgagtatgtgtccagagttgttctggggcagttagtccacagatgtttcagatgttatttggcaacgctaaagttcatattgttacttaagatgcacagaaaaagaagaaaacaaacaggacagtttccttgcaaaaatagagggtgttgtcctatttggggtttggggataag

SEQ ID NO: 17955 - DNA, 1163 bp, Mus musculus
agtagaagccttgcgattgagcccactgggtagaggttagtggctactattggctcagccatgggaaaagttaatcctaaaggctatgctggccctgcccaaattggcaagatggctgaataggtgaatgtacaagaaagcctgatgaccctctggggctcaggatgggaggatgaaacagtctctcccaagatgtcacctggctgccacgtgtgtgctgtggtgcagatgcaagcatgtgttcaaacacaaggtgtaatttttaaaaagctacacccagaataaagcttctaaatgcttgttgtaataaaataccaattctgtgccacaacaagccaccaagcttgcagtcttctgtcccaaggtaccaggatgcctacaaaaccatcttgtaaaaggaactgccatcatagacagcaatctccagctctggccatgcagacacaggtttcctgggagggaaagaagggaggagcccttcagagtgactgctcagccaggtttatttcaggcttcctgccgcagaccctctgggtccctttgtctgcgtggaacgggtctctggggcagatggacaaggagtcggcaggtgacagacagaccaacacgcaagattgtatagaatctgaatgtattctcacaaaatgaacaccagtcttatgtagtacagaaaatacaaggggttggaagtcacagaaggcaaggtacattgaagttacctgatacaaaacaaaggaatgactacaaagggacttacaggaaccaggtagatgtttacagtaaagataacgcagtcctgcctagggtcagcttagagacaggtaaggatttcacactctagtgctatacctttgaaccttgtgaaggctagcaccagggggttctgctcttggcaggcctcatgaataatgcaatatcacaacccaacacccccccccatttcctaggccttgctaaattcttatatgagtgtaacttttaagtaactgaagaatttccatttgtcagaagaatttaccaacttgcttctaatatgcaatgtagcctgtactgaaaagttctatctcagtgggattcccttgctctttcatggtattccctagtttgggtgagatttgctactgtcctaggtaaatattttgcagaccagctctgagctactg

SEQ ID NO: 17956 - DNA, 1241 bp, Mus musculus
gactgagattacacatatgtgtgccattattctttttatttttagggtagtgagtggaaccagggctttccttaacgttaggcagccagccactcctcactgagctctcaggtcacctttgttcaggagcttgtggctgagacccttgttttttccctgtatcttaggttcattttgctggcttgcgacgggcttttcaaggtctttaccccagaagaagctgtgaacttcatcttgtcctgccttgaggtgagacatcttagagggtgtgccacttgtctcagctgctttgtttccattgccccgcaacccctgtgtcaggagtaatctgtgaactccgtcaacataagccctgttatggagctcaccaggcactgtcctgccagtctttgttagggacagagcaggccctgccctggtgtagtgtcttaaaagaatgacagaggctggtgccctgttcactcagatcccatccctttggtaggatgacaagatccagacccgggaagggaagcctgctgttgatgcccgctatgaagctgcatgcaacaggctggccaacaaggcagtgcagcggggctcagcagacaacgtgacggtgatggtggtgaggataggacactgaggccagcacactggcgtgtgctcttgacttgcaggttcattttgtttgtgcacgctgtgtgtactcctgtgggacttccatggttgtaaataaaggtttctttttttcctagttatttgagtgactggtcctgagttaactgtgtttgctctagaatgtgctctggatctgtccttgtcagaaccaccatgggcctcttggacaagctcatgatgacctgttagtagttcacaggctcttgctgtcattgtgaccctttggggaagtggggccttgcagtaagatgacaggataatagggctctgttcagttttctatacagagcacatttctggcaggagcccaggtgtggctgaaatggggtccataggtgaatttaccacataccatgccgtctcaccaggttcctagacaacttcattcatctcgttcctgtttccctgaagtgagccctgagaggatgactgtcgtcctggcttacacccagctgtcaatctcaggagtgcttggttcgctgcctgagtggatggtctagcccatggcagggaacctctgggcatgattggcccccgaagaactttctaacctgtctccaaatttaccttctgtgtaggaa

SEQ ID NO: 17957 - DNA, 1716 bp, Mus musculus
ctaggagaaatagctatagacttccctttttgtactgatggagagaaatgactgaaaactttcacgtctacgaataatcgcctcagtgagagcagtggcactaatgtggcaatgctgctagacatggccaaaggcattgctttcgcttctagaagtgttccagctctgtagagaacttaactaggcagcctctgagtgcgacaccattctgtgctacagcagactcctgccctttaactgctcagttggagggaagtgcctgttaccacggttggcagcctagagcacgcagatgcatactctcagggtctccagcagcatagttggcaactctactgattgggagtttttagaaatgggagtttttgggtcctcattaaattgtcaccagattaaatttctccttggggatcactttctcctgacccttagtcccacatccccattagtgtgaggcagcgcttctttgactctgatctccttaggtgcagctcacatgtctgtcacagctccaggctttgtggcagaaccctgaattgtggccacaaggaaatgccttgagggaatattgcttatttgtaccactgtgatgttgctgagctaggctgccgtagtacctcttatttgctctgggactagggcttctagagggtaaggcacagttttgtattggctttttgttttctttccccagcctcttcggtgatctttggtctgaaaggctatgtggcagagcggaagggtgagagggaggagatgcaggatgcccatgtcatcctgaacgatatcactcaggagtgtaatcctccatcatctctcatgtgagtgtttacagtccagcaagcctggctggtgctcatttctcctctgttctaagttttggactgtgtgaagatgtttctccaagaaagactgacgccatgagtaacctgccttttgcatcagtggatcttagatgggagaatatttttaagatagttgttaccatctgaggatatttttggagtaggccgtggctattggtatttggtgggtagagaaaagaatattacattgctaaacaagggactgcccctcagcaaagatctgcccaacctagatttcctcagtgttgcatctgagtgccgctgagtgagaactgtctcccctgctatggacttcaggcagttgtactctcacggggactgatcagcttcgggctgagtgctattactctgtgtcctagagagtggatgaattgaaagtcaccgagtaaactctgcaggaagtgtgggtgtggtggtacatgattgtcgtcctgtcctgagttcccagcactcagtggatgttgagttcctggaaagtcttagaactaccaaaaaggctttgcctccaaattaaacccagcggagtcttatggcattgggagaggctgtacagctagataatcagggcccagaaagaccaaagtagtcaaaatggcctggaagaaagaaagcggtgcacacatggaactgaagcctttgataagtgctcttactgatcaaaggaatgcaaagaagtttgaaagaaaagttcatcttaaccctaaatgtcatttctcattaatagttttctttctgatgtagttttaagttaaaattattgtgtgcatttatgatgcaggtggaactgtgctgtgtagttttgtcagtggataactttgtggggttggttttctccgtccaccattacacg

SEQ ID NO: 17958 - DNA, 1127 bp, Mus musculus
agagtgatgggtgtactgttatagctgcagactgtttattccgtctaactgacagcctctttgctgtgtggggactggggagaggctgcaggtggttctatttttttgaggttaaaagttcgatttgttgccaaatagaatatttactacttttctaaatagtttttttttaatccctgtgaaatcagtaggattgcttttaaaaagaacatttaattgtcttttatgagaatcccaaagttttcaggactagggactcgtatgaaaaactgcagcatgcttctaccagtcagccttgaaaactttcctaatagagtcagtgctcttaattatatgagggtaatatgcaaatcaagtgtttttgtagagttaactttaaaataattcagtctgtattggtactcattagaagacttaacacagcgtgtataatctggtactcagtattttggatttcttggaaaactgattcttctcaagagggcagatagtctgtgggagttgaccatgtgctagtctgtaagacaaggcctagtggagagtctttaacatatagaccgtgtcctgtggtgcagtggaactcacctagaggctgttaatagcagtgtacttctctattttgcaattagaaaggattcagaaaggaaaactggagcccaaacagtaagcagcgtgatgctgatggaaagacactgaggagacttaaaatgtccatgacattttctcattaagttgctcttttttatgcagtgtgtcatgcattttgtaataccattgtggatatgctcttttgcaaggagatgaatcttagcacagagctttttcttctttttcctaagaagtaggttgaatgaatggctacagagagcatttagggacatttggtgtaactggcaccacagtggctggtttatttcttgtccctatcgatgttcacacagtctggagggcattctctcaccatgttatgaagaaactgtggctggaagattagaaactgaagctagaccttatggtcccgcacacatgagtgctgctggagcagctaggtttgcttgatagagaggtagggcggccccagcagcactctgtgcttttagctcattgtaagccttttaggagtgtag

SEQ ID NO: 17959 - DNA, 1198 bp, Mus musculus
ctgctggctacatccagtgcatgcatgaggtgcacacgttcgtgtccacgtgccaagccatcgatgccactgtctcagctgaactcctgaaccacctgctagaatccatgccgctgcgtgagggtagcagctttcaggatctgctgggggactccctagctgggctgcctggaggctctgggaggagcagctggcctccaggagggtccccagaatccccattgtccagtcccccaggtcccggggacgacctgtgttctgacctagaggagatcccagaggctgaactaaaccgggtgcctgctgaggggccggatttggtgtctacatccttaggcagcctgactgcagctcgccgggctcagagtgtgtggaggccttggtgaccaacacttaccagggacctgtgaatggtggctgccatccttaagtttgcttcctccctgggtatcagataaggtggagacagctcaggatgccccccaggtatgccctccccactctccaacagatgacttgaatgacaaccctaatggccaggccctgcaggtccctagcactattttttcgtggaccctagagctctggatggtggctggggggccagggggtgcactaaagaaagacaggagacttttggagagctgccagggctccctcgtgttcacctctccctgccttttgggcattctgaggatctagggcagaagtggccaatcttgagactgagcattagggtcctgggcagggacacacaggccacagcaatcctgacctgaaaggaagttcagatttgctactttggctatgagaccaggggaggcgggcatattctgcggtcactgaagctgctcctcgtttgtaacacagttgcgcgcgtgtgagtttggttgccatcccatcgatgctccaaccgaattaaataaagaactttggagttagttgctcctggtgtactgtcattgatgtgtccaatgtgtgaatgttcaactgcatccaacactagtgtatacctttttaaagggcccaccctttgttagcaaagtgtattcgtgtggtgctgatagagatgtccccactgctggccaggtcctctgtgttcccccactttcctaggagtatgtgtccttgaggattccactagcatcaggtttgtctccagggtaactaagccgtagggagaagatctgtccttgta

SEQ ID NO: 17960 - DNA, 2086 bp, Mus musculus
cttcatgcctgagagctgctctggcctgtgctcagccagttcctggagcagtgtctgctctgcagcagacaggaagagctcttcctgtgcctttccagggaccctgctgaggtcctgtgaagtgccgaggctgcagacactttgtttgggaggggtctctgtcctgagaaaactgcttcctagtggaagtgcacttacggtggtcacagtgctgagagcccacagtctggatttgggattgaccttgtggggcggttggatcatcttgacccacagtgcagcaccaacagagagccattcgagcaaaagggtaagggtggcttgtagtacttgaggaaatcaaatttcctcagctgactggactgccttttattcttcagtcatgtcattcctgacaacagaaggcttgctggaaagggatggtatggggctatggctttgcatgtaaaacacttttgattgggatccacagcagtgttcttttcacctctgcctgctgctgtcctggcacagtctgattgtagtggatgctacatattaatgaggaagttttagatcctaagtagcattcctggtggtgaaaggcattgtggctttcccatggcctggggtctaagtgtaagctggaggaccactgtgcgcgacctgaggagtctagacatgcttttgaagcgcctctaccaccccagatccatgaggtcaccacagaaagtgtggcctttttggtaagacttgcttgtccttcactcaggccttgggaaccagtggcacctaggatgctggtgatgatgtcaccagtggtggtctgctggtacctgtgtctccttggtgcctgcacaccgggcacttggagactaatcctgccctgcagggatcagatgactttccatccgcacagagattcctggaagtgcctcttgacttgggagcttctttctttcccttgctcattttcacctcgttgctctccttcccagagttccttggtgtgcaataaagtagtaggtataactggttagggactcttagtcatctcaggaaagtcccacagatgggtacatgcaagctttgaagtgggcagtgatctgtggaatttactatacactccagcctgacataggacaatggagtgaggagaatgcggggaactgccgtagccttaacagacacccaatacccagtgtcaatgatgcatggggatccaaccagatcctgtgcatgtaagacaagcactcgaccactgagctgtatcttctgcctctttatgtcttaggtaaatgaagcaatggaagggtttttgtaaatctcacttgagattgccatttatgaacctaattgtcttggacatgcaatgtcagtgccctgttctctcctgcagtgtctgcatggcgtccactacttctgttggtgttgggcgtgtgtagtgtcccgtgcactggggcctgtgtgcttgtgctgaagtcgtgctcactgcagccctctagttcctgtttgaggatgaatgagtgcttgtttgcagtgccctggactgacttgcttttgcccttgtgcctagttaagagatttcaaaaggtcaatgactttttttatacattgttataataaatgctttattgccctctgatttccttcccacatgccttaattttgtggcccgtgtctcactgaatagaagcttcctctgtgtacagtctcttatttacattagttcatcattcattcattcattcattcattcattcattcatgtgtgatgtgtgtgtcatcttgtatctgcgctcacatataagctatggtgtggatgtggagatcaaaggacagtgtttgggagttggttctcccaagagccgagcctcttatagcctccccgtgcagctgtgtgcacagttcaagtgggaggggctggctcctggatagcttcctatggctggagagaaggttctaaagcaggagtctgtagctgttcagtggatcttggggttgcagggagaaatctagtcttttgcccaggattaaactatttagtgttgcttggttcactttgtggctctggttccagaactgaagagagttccttctcacagcc

SEQ ID NO: 17961 - DNA, 1179 bp, Mus musculus
ccccgacccctcccccgacttcagtatttcaggggtttgctaggagaggacaagggaccacgggctcagacttgtcagaactctaccccaccatttcctctgaccttcagaggtggcctcactgcccagggttgctttgtatcttcactctcaaattcaccccaattttgcctgcacgtgtcaaaaacacaggatgcatcacccacttgtgtatgtgcaggagtcatcttcaggtgtctccctgggggcggagggggtgtcactggaagctaggctggctggccagtgaacacgggatctctgcttctctctgcctccggttctaaggttacaaatgcctttgcattatctctaagatggaactcccatgcattcttcatgcttgtaaggcaagcactttaccagttaaaccatctaccaagccctttatgtattttttaaggcctgccctgggtacctgagctgctctggagtccacagggccaagccttggctcagactccaaggatgagacacccacccacccccgcccccatgaggacctggaggggctaacaggtcccagggccacatccactgctctggagtttcactctgaggacaatcttgtgagattcttacaggaggaggagtctgtgggacagcatgccttctgacctcagatctgagccacaggccagtggtgagaccctccctctgtctaaaggtccccatgcccgcatgcaatgtgggctgtggcaactcgctcagcaatgcagatgcagccagatgtttgggatgtgatggaatgttagtgtaggcaggggcggggcgggggagggttctaggacttccagccagatttctgacatccttgtgaaaagcagctatggagatgtaggccaaatctcctccttggagaccagggatgggggatttgtgagggagggcaccagagaccagatgtgatggagcaaatgcagacaatgcactggactcttggtgcagaggaaggccgaggggagtcagcctgctaacctaggatgctcactgtgcagagaagaaggggtgtctgtggggaggaagtgggtgtaaagaaatgtaacatgacttttaaaaaatctgtcagtttgggagcatacagcagctgcatgccaaggatggaggacaagcagggctggtctctccttcgtcctcctg

SEQ ID NO: 17962 - DNA, 1196 bp, Mus musculus
tgaaagacgtgtgttagctctgaggtgctgagggctggggtctggattgaagcccaagggtttttgagctccagattggccagcttccagattgccagcatgttcacccctgggcaacttccctaccagtttgtactttaattttaattattttctaacagaacctctgccctcgccaagactccatgcacatatgtacctgatgagtttttatagcaaaagatataaacttgctgttgatttttgtatgaatttttcacaaaaaagatcctgaagaaaacattattttgtgtattttacatttttcccttaccattcagcagttttctgaaggtggtaatgtctgaaactttttctttctaaattcttacttgtacattttttttagctctgaaggttatttttatggtttgattttgtttctttttgtacagcaagcagggttctgctttgagcaagagcgctgctatcatgcttggtttttttagagcaaacctctcgagattgggcagcaggtctgcgtggcaccctggtcttgtccagctcacccgggagcagcacagccaggggcttctgccctgcaacaccgctagtattacagggcgggcaggcctcgtgagccgtgagggtggttggcattagtgaatgtggacttgtaaccactccatcaggatagaaccccagctcgagtttcccaaagacctttgaggctctggccctgcacctgttcaggaatttccattgcggcctcataacctggactctggctagagccatagccctgggtttgtagcctgtggccgctgaaccaaggcctttgtccttgtcctgcaggaatacacagggtcctgagggacagccagtctttgtctttgctctttttttttttttttcttatgacaactaactttttaactgctaacttcttttctagcacttaaagccgccagtttctttccaaagtatgtggagttcagactggtgagaggaagttgagatactcagaagggacatcaagctaagcttctgaatttggtggcatttacagggtagatgggaactgggtcaagcttttgacagacaggctgagcacacattcttggacttttgatggctgggctgctgtgagtgctgagctaagacagagggtggagaggtcttaggacgtcactgactttgccctccctgtggctgct

SEQ ID NO: 17963 - DNA, 1188 bp, Mus musculus
taaattattcagaagtctccagtgacgtgcatgagccacccacacaagtgtcacaagcgagagtaagacagcaactacatacagtcttgcagggctggcaggctagtgtctctggtcaggagtagagtaactgagtctttgccaggcaggtagggcctgtgttgctattgccacattgagacactagacctgcagctttcctactggaaaaaggcagtttgtaaggtaaaatggaaaagcccaagttaaaatgaggtgcttcaacttgattggacgtgttaattggggtggtcaaaagggggcttttaattgctggacttgaacactttggtagctgggccttggtagtcggcctctggaggaggaattgaccaagtaaccttggaggctagctttagggatgtaatctaagggtgttttagcacagcagaggaaaggggagagaagggagcaattcagaggagcaggtctggagaccatcagagaactagacagagcttctgggcctggaagagggccaggcaaagactcggtggaagagatcctctgccagaggagggagctaaagcctcggtgtggaggtgtggaagatgaaagtgcaggcaggtggccggatagtgatgagagggagagctcaggaggcagcttgggttcctgggcatggatttagacaccagttgccaagaagatctgtcttccttggaagtaagagaaaggcaggttctgagttggagggggtgggaatatgagaaaatttccagacctaaaccagctagccctgtggccataaccttgccaagcgcccattggcctgaacatgtgctactatacatgtggattgacagcctgggccaaccagagaaaggtctggaggacagaaggatctagtgacccctcattgctagaatctgtttaagatggaagttttgacctccttcctgggcccaaatgccccagcaaagtgggtgacattctgaaaacacaggctcaactccctgaagctgagtcagagcaagagccctagattgttacggcctctgaagtgagtccatactgctaaaccactgacactgtgactctgtgacaaagagagtgggaaatccctgctatgattctaattccaccacctgacaaagagtttgctcatatacctgacagaggcctctgctaattacaagcgtggcagca

SEQ ID NO: 17964 - DNA, 1103 bp, Mus musculus
gaggactcatagtagcaggaaatatgcaggcatgtccttgttcctgcactgtccataatggcttagtgcatttagctgcaggccaggagtgggcgagtttactcagatccatgctaggaactccagccagatatgtaaacacaaccagcctcccctaacccctagatctgccagccctcaacagaagaggttctgttctgtaataggaacactgtcaggtacaaacaagctcccctacccacaagatgtatgggcagcatggtgtctggactgtgcaaggctgtgccaactcctcaggggcccactcccacctcctgtggctgcctacccataaaacgctgcttcctttcagactctggcagagccactctccttgcccttgctgcctggtggtagagtcttgcagcagagcctgtgggactctaagaaccagtcttgtcctagggtccacagcatgcttttcagactgggcactcacagagccagtgctaccctgatcttctgaccctgtccttctccccacaggctcgctgacctcagtgttcgtcaggcttccttgtggtggtgttggggtaagcatttctttaatgtgtaaataatgtcctgtttgttctcagggcctcagtggtcacagaaatcattgccttgctctctcgagtgggtaatggctgccaggtgttttccataaacagtactatggggtgggcggggccatctggggcttcaaagggactgagagcgtttttggttttttttggtttttttgttttttttgttttttttgtttttttttcacggaactcaggcacctttctttggggaaggttgtctaacaatgcatcttactaggccacagctcttacgcacctcatgtgtacactgtgcctcatggcgtacgttcacagcagtgctacatgcttgtccatacaggccacagaggcctcttagggaattgtggacttttcttgccacgctctagtttgtactccagatagttttctgtgcagtgaccagagcatccatgggtcagatgacatttgtaagacattctctggtttatggtggccttgcatttctataaccaggtgatacgagtagctagt

SEQ ID NO: 17965 - DNA, 1218 bp, Mus musculus
taagaacacaatagataaaagcagggtagccacatctcctcagtccttactgcctgtgtggaggcacaagagcacagtagccagctcctagtgcagcacagagcacagtgtgtcaccatgttcaaagtgtcccacaaagggctagtgttgaggggatagtagagcagtggcttgaggcccctcgagaaggagctcaggcagttccctcactttagatacttcctgctatttttaagcccagaccttggttttagaaaacaaagtaataatttattgaaaattattgtgtgacagtaaagggggtcatgttaaaaagcagaattctctttttaaatgtttttcaaagctatgattaaaatataagccatctacaatattttgaaatgtgatgttatgtgctgttttgttttccacttttcagaaagtcagtaatgatgtgcctatccccatattcaggttgcatccctctggggcagtggccttgtcatggtagatagagctgacacagaaacatgttctccccttgtgtcccacagtgcatccgtggacgcaaggccacattggaggagctgcagacagtgcactcggaggcccacacactcctctacggcacaaatcctctcaacagacagaaactggacagtaagaaacttctaggtactcgagacctccttacatccctaccaggtttgatctgcaagtgatgtttccagcccttggctcctgctggccaggacaggaaggttggctcccactaaggccacggcgcagagaagcctagagcacagtcagctctggaagctgttcaggaatgcttacggccaggggtacccagcccttgccctatttgcagttcctttctaagactgctgaggggaaggctcagagcaggcctggagagtccctggcctggccacactgaagccattggttagactcgggagctgagtcttgcccctgtcagtcagcactcctatgggcaggttcttgctagcagagactcatcctgcatcagcagaaggggctttatcaaataaaagtaggctttgacaaactgtggggccctatgtaatcccagagtgcactctacatcaccaacctggcttaccccacagactccaactgctcagagacagtgatttttgcagtgatccagaactacaggcagtagaaacagagacagagctagagtttcttctggtctcttccttgagactc

SEQ ID NO: 17966 - DNA, 1192 bp, Mus musculus
gcttccagagaggcagcttctgagaacttcttctggaccctcccaagtctgtactgggttcttgccacagggtacctcacatctgcttctgttgctcttctccagccacagtatgtcctgctaggtggcatctaaggaggatgttactcacaacatctgtggcctctctcgagcttacctttactcacctctgcacagtgagctgacacttgcaaccttagtttttcctacctggcacacagaaacactgcatgagcactgagtacctagtatctgtctgcgtctgtctgcaggccacattaccttagtcctgagcatcatttcctgtgtgtctcagataatgctagggcccatgctgtctgggtaaatagtacttgctggccctggatcatacaaatgcagaggattcttcaagtcccatgactatcctgacttcctttgtctcctccgcattgcagataatctccaaacctagtgagccacctcggcagcctgagagccacccagaggagacagaggaggagctccgtgagcaccaggccttgctggatgagccctacctagatcggctacctgggcagaaggagccctccctggctggtgtgcaggtgaagcaggagcccattgagagtgaggaggaagaagcggaggccactcgagagacagagcccggccagcgcccagccactgagcaggagctgctcttcagacaggtgtgggatggacagtagcccctcagcttctcctggcctctgagtcacacactcactgttctgaccctagccatcttactgccttcatgagaggtgggctgggtttgttgtacactctcaggtacacgaggatttgacacctgccctcggaaggtgtgcatggacttctcagtcatccagcctgcactttcctctggtatgggaggctgtagcttgtaaccccaaaacaagtgttggtgagattcagcataaccactagaactagagcagagcaggggagttggggtgttaatcagaaaggagcggggtgtgatggtgcgtgactttaattccaggactagagacgaagtcaagcagatctctgtgagttcaaggctagcctggtctacagtgggttccaggcccaccaaggctacatagtgagaccatgtctcaaaaacaaacaacaaaaaaaggagtcgaggtctgatgagactggg

SEQ ID NO: 17967 - DNA, 1184 bp, Mus musculus
ccagcagcccagtcggtgctgatctccaggttgaggtttttcctttggggttagctgggttttggttttggtttgtctctttattgtatttatttgaacctctgttgctgttttgatattaaatcttgctggcctcaaactcggactctcctgcctcagtcttctaagtgctgggatgtcagggctgtgtttgtgactctcccccagcactctatccagtcttcccagcaccccttctgatgcagctctcgctgggaaaggagcctcctgaacaggatttcctctgctcagccacagtggtccagagaggcccacgttccccattgtctagagtaatactgtgtgtagagcccagacctgtgaacattcaagccaaagtagtagggtagcatcccactacttaacgtggcatggctgtcatctcagcacgatctaaacacaacaccactgacaaatgggtcagctcttagcagagaccccagccttgcaccacagccctcttcccgggcagactgaccaagggaagtgtgtgaagcacacattcttctctgagtccttccacttctctgaactctgtctgtctgtcctgcagccactgctgccctgcaccatctgcatgctgtgctgtcactgccccggcctgctctctctgaagcccggctgtcatgcctctagggaagatctgattccttccctgtgcagcccttctttcctctcccagtgccactctgtatttgatacaaaatctcctgtggtagaatccactgaaggtcaaggtcttgacagtgcctgggtgtcagtttgcccctgagtttcggcatgtcagccgcaaactgttcttctttctggtatttggggatgtgcatgagctagaagagccatcctctggaaacgtctattggatgtgtggcaagctgatgctaggctgttgccatactttctggagtgctccttggtgagctcctggagaaactgcatcaatgggatctccaggtaactttactttctctgccctgctaaagcccaagctccaggcttacagcctctagctggaatcgagcctgtttgcagacatgtgtcataggtgcctgggctggcaggcatgttattttctccactggttactcaacagcatctctcccctctcttcttccttttcccctctgctgttttttttttcctcc

SEQ ID NO: 17968 - DNA, 1180 bp, Mus musculus
gcctgggccccagaatgtggcatgctcacacattaccacatgtctcttgtggttcggcttgtctcttaccttttaatttgtgacttttctttattttctgaatccttgctatctgaaatttgtctgcttctagtcatttcaaagaatccattgtttttgttttataacttgatctgtgagcatgcaatgagtgtctctctcttcattcatgcatttattttgttttgcatttgttctgatataaacataacttttattcttctgtaataactgtcatttcagaggctttcctaggcctagtcctgggagcgtctagcttctgtctagtcttagctaggcctagaatgcttcagcctctgagactcactgcttaataagcgcacccttgctttatagtccttgctttatagctctttgtgagctcctggtcagtgcagctgttctggctcagagctcctctccactcagactcaagctgcttctcttggtctttcctaaattgctctgcttagtctaatactaactttggcagtctgttctaatcttctggcttctcattctttagctcattccgtcttctgtgtctagcttgttctctctctgtagcccatctctgtacaattgtccctgtaaaactgcctcctctttctgcactgcccctcaagtagcttccctttcctctctcttctcgtgaaagttggcacagcctatcctgtcaaatctttctctgattcatcactttgtctgttactaaattagacatcaatttcaacatgtatgctttcttctacaaactaactgtaccttcattgtttgggatttaagggtgtattaaggtgtgtctgcattctagagggattaaaggtgtgagctaaggctaagccacacaacaactagaaacaggtttttccagtaaacaacagattctagaggttcacagtatgatcaaatatcctgcaacattccaaaattgtttaatttcttaatatagatctaacttaggcatctgtattcttactgtcagataaaaagttcctactttgctcagtgtcttccaagaatgaatttatttgtgtgtgtgtgtgtgtgtgtgtgtgtgtgtactcgcatgtgtatgcacctgtgtatatgagtgtgtatctatgtgtgtctgtgtctctgtttatttatgtgtgtgcat

SEQ ID NO: 17969 - DNA, 1902 bp, Mus musculus
cctatactacttcctcccaaaagctgatgatggggaagtttctggaagggtggttgatatctctaagtcagacttttaactgaggttgattttggctccccacaccctgagacatttctggctatcatgatggggggtgctactagcatcttattgggcagaggtcagggatactgctggcttatcttgtcatgagtgcactgcctttatagcccagccactaggtaactagtctatgatgtcagcagtgcagcggtgaagagagttaaccagctttgttttgttttttcctcacatgacatgcaacaaaccacagtggttcatgttgatcaaaatggcttagtatgaattgctttttccagtccctgggtttgtaaagaaagagaagagtgaaaaccagagcctatttccttagttaggtagtggtgttcacatcccaactgagggctcctttcttctctgaccatgcaggttcatctctgcaaggccaggtgacaacgtttgctcttctcgtggattacttggtttacaagacgctgccagtgagacttcaagtttacgcagctgggacccgggcctcctcaattttgttcctgcatgtgctggtggaaatttggagtgtgttggagccactgtttacctggacatcttgagccattttgaacttaaggcactgacgctgctagcaatgagctcccaaagccatccaggtaaggcctgcaacttctgtcactagcattcttttttacagatgtgtgctactgtccctccagcctgcttgttccctttcagattttgctttcctgtggcagttgctgtgggtttgcagcatcagcaggtgctcagaaactggattcttgtcttctggttcaaaggactgatatagacctcccaggggttcagaggatgccctggctttgtctgcccactccagtggcagggagtttccttgatgccaggaaaaagaattttgagtaggtgatgggtaaataccacaggtaacttgcagagtgaggttcctgtcagggtaagtgaggaacagagctgctgtgctgaccctggctgggatgaaaccttggttctgcacagcctttccagtgtccttcgtttgctttctttggagccatattaagcatttcacaagtctttctgcttctcaacagcccatttggaactgctgggacaaaagattcatccaaggtcacagagccagaacaggattagaaactgcatgcttgggcctttaaaagggaaatacatatgggacttggccttagaaagtagcaaagcatgaaccaggttaaatatagagggccctgtctggcccaccttaaggtgtgggtctcctggagaaggtttggctgtttttggctacttctggtgcatttttagtctctaggacttgaggtgtaggaactgtcctgagtacacacaggaggctggatagatgcttggatggatgcttgaggctttgtcagctgcctctgagcctgttctactggatagaggcagaggcttagggtctaggccgttcactccaggactgcctgaaacatagtggtagcacatacttttctgggcatcattgctttatctgagagcttcagagggcagagatctaggttttatttaggtaggaaggttttattgattcagttgttcatgtattgattgttgtaaagaaatggtttttggttgattgcaggaaaaatttaagctgtatagactgaaatgtaaagtagatactcatatgaaggtatgcctcctgctctgcagtgagatggaggtgtgtattccctgtgtgaacatgcagagagatacatgtgcccacatccaaggtgacattacacaattactgtgaatatattatgaactgtactacaagtatccccacttctgcta

SEQ ID NO: 17970 - DNA, 2252 bp, Mus musculus
agtataggaaattcatgagtaagtcaataacttttttctttttttaacttttttactgattcttgtgagtttcgaatcatgtaccccagtcccactcatctcctccccaatacccacccttcacccttgcagcctcccccaaaaatatagcacacacacaaacaacaacaacaagcataggaaacctctgatggaagctggagtgtgtcacagtgtgtcccacagtatgtctctctgtccacacatctccacttgtaatgtccattgcagtgagtcagtggtctcaggagagctggtcttgccactcatctgccatgagatgatgtgggggtgggcgtgatacctggtccctttagccccacaccatctgcagcagtggggagagctgaccctggggtcgtgagagtaggagagctagccctgctccctcactggccttatcactgggggaggagggaattaagctgaaacttccttggactatacagtggagatggccctgatgacaaaggcaccggtgagccagctcctcacaggctgcagcacaagagtcgagccttgactgggcagctcagtaagacctcaagggcatgagaactggagagctcgcttgggtggtgcggataaaggagagtaagtgggctgaccagctcagctgctacccaagcccagattgaggctctgaattcgcccaccccaaaatctatatcacttgcaattggttggggtacatgaaaaggctagccctactgttctgaagctacaaggtctccatgacgcagggcaacagcaggataaccaggaggagtcctgatgagtcagtactgatggtgtcacagaagccagacagctcggactgtggcctcttagtaataagtccatcactggttcccaaggctaagctactgtctccattcacactagtcaagcaggcagtcggggctgagaacaaggcattttctaagcccagcctcctctgccagctatcactgagtgccactggtttcttgtccttcctgctcatcatacaaaatagaaaaaccagctagggctctgtctccatctggatctctgtcctggacaggacttctgtgggcaaggctgcttcattacaatggatctctgttctccggtatccctggtactggatgggcagtagctgaccaactctaaaggttggaaaagtggtctttactctaaacagtgtttaattccttcccccaacagctgccaggccgcaagtatgcccctgggtacaatgccgaggtgggtgacaagtggatctggctgaagtgaagggtcccctccgcccagccgtgtcatagccatggagatgcctgctctgcccaactctgtgaactccagagctttccaagacaacaggaaaaaaagcaaatgatcaagaaattgccagaaaaaaaaaaaaatctaacaaaaagagtctgacccacgcctgggcagagatgaaagaatcagcgtccactgaaaaggttctggaaccttctagtgatgttttggaatcatctggaggagaaacaaagcagagctggtctgctgaaagcccagctcccactggaagccccgtgccccagtgctgttcccttgaacccttccaacttgaagaaataaagccggctctgtagcccctcctcctgtgtctgcgtggcacacttgtgcctggtgcctaaggatgctcagccctgcgccccccacccacccacccctgcactttgggtctctcacacactgttgaagcgtcttttctgaagcatttgttcttttctgaagcacattagagcaaaagggtgaagaatggccacagactagcagaaccgagtcttagagcaggctcgctttctcttatctctgaagagcaagctgagcatagggtgtggggtagtacagatgatgctatccaaaatgagggtgccagtcccaggtgaaagagcagtggcatcttattgttctcctgcatgggaacctggggggagagtccttaggagcgggtgtcaatctgaattgctgtcctaagctgtgagtttgtactgagacccctgctgtggctgctccaagcacatgtaacttgcatttaacttaattaaaacttaatgaaatttagcactcagttccctggtagcactgggctccattcaggcacacacagaacactgttggagagcaggtcaatattaggcagtacagaagagaacactttgatcttccagaaaagctggccttactgctggggccac

SEQ ID NO: 17971 - DNA, 1161 bp, Mus musculus
ctcaaagtggccctgcccagtagatggaaacgtggaagatgtgtgaccagaagagcgggtggccatggctgtgggcaccagtggcatgtttgcatgctgactgtaaatacactctgactggagcaggctgtagctgtgtatctggagcctggcttgcccaggctcgctaaggtagtcatcttgggctcagtccggccactgttccccacacttccaccctcctggtgcaggcgtggcactgctggctgtcctcacactcagtatggccgccaggctgcaaggtgcttgtccgtgtgtccacagcacccccatgctttataaagatcgcctctgaactagactacactggggcagtgctgtccatcccccagagttctgtccgctccctccagctggctaaagctaaacctcctggggagccctttgccaggctacaccgtttaccactctgcctttccagctttctcacttgcttgtcctgtacccaacagcgcttcattgtgatttgtttccatagattttgaagacctttttgatgatgatgatgtccagtgaggccgcccggtcctatgtgctccatgtctgtgatgtgtctggagtctctcgggacacgaccagctgattgtagacaccgtgttgatatcactagaaatgaagaccttgtcaaccaatagaggaactgtctgaaccaactgggtactgatgtctctgggaatgccagcccgtgtccttgtttaagttaataaagaacactgtaacacgcagggtgattttaattcctgtgcttttagatgcaggttgtgactccatcccccatgtgtgaacacagaataacacatgtcactgcagcaagcacaccatgctgctttcagtgtgcagtgactggggatgcactgtccgggtcagcagtggttgtgcaggtgtgcacatgcctgccagagcactttgaggacctgactaaaggtaccttcgccctgtgaacggaaagtcactgcacaccacggtaggtgacaggtttccccctagcctctttatcagagctgctgctagtacaagaccccaggtcagaggactccgggtgccccgggtggagactctgaaggaggtgcttttcccatgagaaacgcatggtctgcttcgtctcaaaggagggtacggagt

SEQ ID NO: 17972 - DNA, 1160 bp, Mus musculus
cttaaagcctgtctgtctgctgcccagtcctgggtccttatccagatgcggctgtgggcagggtgaagagggccattggtctgctgggctcaggaaacaggaaacgagaaaatgatatagttggcccttgagcaaacaggcctcacagggaagcacggtagctcagtgaatgggagagcacaatgcagatccacctggggaagggtatgcagagagtatcagctttaaactgcactgcctccatctctagctaggtgcggtaagtcacctcccaacccatgggcctcggttatctgcagcaaagcctcgtggcagcagtagtcctgggactgtgacaccgaaatgtgtacctgagatgacctggcctagagcagagcctagatgttctggcttgtatcccaagcccttcacattggggttccctcggggctagctggtgaccgggtgcacaaggactgcagtgggggctcaggctgcctttgttctccaggtacctctggccccagaatgttctcgggccatcatgaagttggtctactgtgctcattgccggggagtcccgggcgcccggccctgccccgactattgccgaaatgtgctcaaaggctgccttgccaaccaggccgacctggatgccgagtggaggaacctcctgggtgagccccacctcccaggccgtctggcttgtccttgggagcaccatgcagacagaggtcctgggaggcagtagtccctggtgtgggccacatgaaggtttgaaggcctgatatgagtggggctttggggatcaagggaaagattttattgttccaaggcatatggtagaatagctgcttcagcatgcatatacaccaacacagaggtgatatgtgacaaacccatacatgtatgaacatatacttaaacatacacaatctggcattgtgtatgtttaagtatgatacacacaatgggccagtctgtggtgtgcacagagactccctgcccatcacaggtgtacttacatgtgcatgtactggcataaggggagttgacatacacatatgccaacacatatgaatcacggtatccctctgttgatacggggcaaattagcatgcatacatgtcggcactggtacgaagctggcatgagctggttagtatgctgatctgacaggt

SEQ ID NO: 17973 - DNA, 2623 bp, Mus musculus
ggaagggtacaaggcctctccagagtcctctgccaggggccttctaagggccctgtgtccttgtagcacagttgaggcccagccaggatgtccatctggctatcatgtgacaggtgggcacagcaggaggcagacctaggaactgtgtcttcaggcgggcacaatgggcctcagactcccagtgtcacctaagcactcaggagcccaggtaggaagagcctgctggagcctcctgtcttccccaggtgatgacggcagtggctccggcagcggtggcggatgcccagatgacacctgtggccggagggtcagcaagaagagttccagctcccggacccccttgacccatgccctccccggcctgtcagaacaggagggacagaagacctcagctgccacctgcccagagccccacagcttcttcctgctcttcctcgtcaccttggtccttgcggcagccaggcccaggtggcggtaactgccccctatccccaaggactgtcttggccaaaacatgcaacagaccatatttaattcccttggccttttgaggtccagggcaggataaggagacagtagctctgagtgctggggcagggtgcatgggggggtcctggcctcctgggtctggccacgcctgtcaccctagcttttaattttgtatcaggtcagctgcgagccagtgtccccaaaagccatgtatttcagggacctcaggggcacctctggctgcacactcctcccctaccctcctgcaccacccccagaagctcatgaggccaaccagaagggcggctgttagctacaacccaacggagacctcaagtgagcctgtgccttcctctcctgcctcttcccgctggggactccctaccagaccccatgggccacagatgtcagaaattgaggcccatcctgcagctccccaggaagcctgcaagggatgccagtatgttgctgtccaggctctggcagggccttcaagtttatgcatgataccttctactcagaagaagctctgcagccaggatccccacacacagcagaccaggaccctgtaccactgtggagctcagtgaatctggttctcaaaaaaagacccactgtgggattctctagtatgacgtaggtgaggtgggaggtggcagctggcacagccatactacgctcaactctgccacactgtttgagggtatgttccgtcccctcagatgggctcacaaagactggccttggtggtccacatgaggagcctcacttcaggggaacagccagctacatctagcccctaccccacttagaaaggtcacctggccatggggatgctgggtggctggtgaaactttagctcagggtcaatgagacctggcactgcaggtcaagaggatgcctgggccccttcctgacccaggcagctctgcaggagctggggcagcattgacagtcaagggcttttacagacatgcacattcagaccctcagtgtccttgtccactgagcgctacatctccatcttccttgacagcactggagaggctcagggcaccacttggaatctggtttcctcctatggcctcgagacctgggggcacctggcttaccaaggctgtcaaggctccatcttcccttccagggcctaggggatgctgagttgctatatccaggaaggcagtggtcctgacatgcagaaggcctggaaaaaaggctgcttaccgcttttttttttttttaattttaattttttttttttaactttcttttagtcactgggttagagaggctattgccagcacagcaccaaggcctgcccagtagtcaggtcccctggtccaggatgggtattctccataattggtctgtgggtttgttgggcccatgccctgagcacactcaacccagccacagccctgctagtgccactcaagcaggggcactgggagctagacctgggctctgagatgagtgcctaggtgtcaggacagcagcacccatgctgtacagggcagccgggacagtggccagggtactgggtcctttctctgtcactcggtgtcagtggataatgtgtgttctttgagtccttgtatgaattaaaggctggggacctacagtggacatgacctcatttaaactggtaagactcggtgtgtacatgtgagcctgacatgcctagcccatggcagagcacagactggagcttgttagaaggaggttgaagaggggttgtgcctgtaggaaagtcctggggtttccatgtggtggcaaccattgaacatctatctccaagtcctgcctgggaagatacctgtctgtgccaactgaacatcccaaagtttatgggaggagggagccaggataccagagccagccagcctacgtgggttccaccagccttccacctctttaacacacctcaatctacatgccattgtcttagccatagaaaagttctcattcctgccagggtgccccagaggtacccaagagagcagtgtagggacaaggaatagcctgacacaccagtctatcccaagttatcctacatctgcagaaatgttctaagtaacttaagatactcagagctagttcaccctcacctccaggagctgacctgtccctatgt

SEQ ID NO: 17974 - DNA, 1171 bp, Mus musculus
gtccgggccgccatgactgcgccttggctctggccacgagctctgcccgggaccataacccctcccattggctccaggccaggggcatagggaaaaggaactgtattcattgatgctcgtggaccagggcccaccctgtccctgctctcttgcactgcaggccccagggatggcctatacacactatgcctcctgtttcaacactgacagccatgcctcaccctggaagccagcatctgctgacactgccctggggacagtgaccccagcggtcccacagcaacaaccacaatgtgccttaacgtgtgccagagacccagaatgcacggtcctggaaatgtgctttcctgcagagccctgtgtctggcccctgggctggatggaaagccttgctttagggacagaagacagaggggcaaggacacaggcattccatcagtgtgggggcaggagacagaggaagagactagacctctcaagcaggcctgtctctgtactagtccaagcccccagaggtacagggaagaatggcctatccttgtggcgacctgtgtaccattggtgctctctgtgcctgtctgctaggagagaccccaggctgtgacttcagcctggaactgcaacaggaaccatggtgactgtcccattaaatctccactctgcagatctgacctcccttcctgtctgtcactaccctgtcttttgcacctacccagctgccaggggtagggctggaagagatgagaacgggtcacagaatcatggtcatagcctgtcccaatagacagacctaaatagaggtgggaaccgaaccctgaaggctcagatggggacgggtcagcagggggaggcagggagaaggtggatccttgttcttctcagctcctcaatcagaccttcaggaccctaaaaaaggatgtttgtcaccctcacctggactttagtctctgtgactctgaccacacctctgtctcttatcactggggcacccaggcctctaacactagagttcaatagaggtgtgcattacagggattcatgggaaatgctgagcctggactccagcacagcaagctgtgaggtcagatgtctcggctaacaaaagggaagttctctgtgtcacgtggagccattccttgtggttgctcaaagacaagctggtgacagagcc

SEQ ID NO: 17975 - DNA, 1182 bp, Mus musculus
cctcggctttagcctgtcatgttagggggaagcatatggaacctcttcggccaacattctgtcttcaaatagaactttgttccttcaaatacagagccaggccctcacaatggcatccagctatttccccatgccgcttcatgttgttgccatagtttcccgtatgtcataagcccaaataatacactgttaatattttgctgtaaacagccgattgtcatttagagaggttttagattagatggtcttttctgtttacccaggtctgccatttgcagacctcattccgtagcagcagtggctccctgtctcacacttttccagtactgggacattccttgtaggcctcacttgctgagcacccgcactctagtctgagaaccgtattgatttcccttcctttcaaaagctgtgtctgcagtgtgcaggtggaattctgtgttggacattccattcttaaagaaggtgtcccactggctgtgcatgtacacagtttctcgcagggactctcctgcctgtcacctgtctcatggtgccaccggctctgacatgtcttcttccctctggctccttccataacttcccttttgtccctatttttccagtggttcaattctcaggtgggttgttgtggcatttttaaagtatttcttctgtccaaggttcataaagactgacagcctgtggttagataattctcatgaaatttgagaaacttcttagctatcctcaagtaatgttctgttcgttgctgccctcatttgaagactcattgtgtgcacgtcatactgtgtgcagatgccccagagctcgctggaatgttctgctgctgctgctgctgctgctactgctgctgctgctgctgctgctgctgctgggacctttatttgcagtattttttttttaaattacatcttatggtctcgaggagaaaggcacgtaccatagcacagacatgaaggccaaaggacgattttgaaggagttggttctctccttccactgtggagtccggggatggaattcaggttatcaggttgggggtaagcagtcttacctgctgagccggctcatcggcctgatttggaaagtttctttttcttgttttcacttttctgttttattttttttgttcttactttgattgaaggcagagtcttttctcacatagtaattaatatat

SEQ ID NO: 17976 - DNA, 1109 bp, Mus musculus
accatttccatggtactctgtgggcaaaggtcagaagcaacaaaagccaggtcctgtttcggcaactcatcaaactttaaaactaattttagggctgggtgtagcacatgcctttaatctttaatctcagcactcagtggggggggggggagggagggagaggaggaggagggacaagcggaggaggaagagaaggagggaggaggaggaggaagagaaggagggaggaggaagaggagggagaggaggaggaggagggagggaggaggatctccctaagttcaagaccagcctagtctacaaaaagagttacaggccagccatggctacatagtgaaatcctgtctcaaaaaataaattttaaaaataattttaaagagagaaagaaatgacagacacagcattggtgtagaatggggggagggggcggcacgaaaggtgatgggtaaatatcgctctggcttcttgtcccaatgtggccagtcgatttaattcttttttaaaagtaattgtatgtgtatgagtgttttgcttatggatgtatactacatgggggcctgaggagacaagaagagggcggttggagcctctgaaactggcattacagagccaccacgtgagtgctgggactccaacctgagtcctctgcgagagtcataaatgaccttaaccactgaggcgcctccagcccccaccattcatttacttaagtgtgaaattagacttttctcaaagtgaacattcaaattcaggagcacaacttccaggaaaagcagtatacggtgagcctacagacagtcccccaaacatgctggttacgtgtgtgtgctatatacagaaacagcaggatccttcaaaaccttacaggctgaaggatggagtctttgagaggtttgggagcaacctagtcatttcacaggcacgagccaggctcgagatctctgaggataaccctggtttggcttctttacgtatcaaggcgtattgtaaactttcccagagctacttcctatccattttcatctagagtaataatggccatcttgttttgttcttggggggtctgtccttagaagtagatgagtgccggtctcagccatgcctgcacg

SEQ ID NO: 17977 - DNA, 1145 bp, Mus musculus
gggatctcactggggccctgtggttatgaggccttgagactgacagaaattacagacacactcacgaggttttgagcagaaacactgaaatccggtccagctggggaaacctcagggagtgagtaggtagcatcaacctgagaatcatcaaagccaacccaaggcacagagggtggctcgcctgcagctcagctcagctccacactcttgcatgtgctttcatgctgctatggaactttaataatataggaaatatcttcttatttcagaacaaactcaccatgttggatattgcatcaaatagaataaaaaagattgagaatatcagccatctgacagaactgcaagaattctgggtaagttttaatcttagtaggattggtatccatctcttaggctcagtgagtccattgagcaaagcatgtgaatgaatgcaagcctgcccgtcccgtcccagaagccttgatctcagtgaaccgtgcatgtgttctggggatcagactcgagttgtcagcaagtgttgtatccattgaactatctttactatccgcaacttcattttttttttgagttcagtattttaggtacatttattttttcttttgaataagatcttcctatgtagccctgaccattctggaactctctgtgtagaccaggctgacatcacaaagatccatctgtcttcacctcacaaatgctgggattaaagacatgtgtcaccatgtacagctgagcttttgaaatctgtaaattttacagtttttatgaaatttaaaaaaaaattttttttcctctaaaatgtttctagtccctcctaactcttagttccttgtaaaatggtaagcatgcatgtgctagtcctttggtaagtagataatagtgcacctgttactcatctcccctcctgtcctcaggttctgctccggctgagcctccggttatgtgatttctattgctctgtcttcaagatcttgtttttccttctgtaatactcagtctgctgttaagctcattaattaactacttacatgttaaaagacttatgtgtttacgtttttatagtacatatgcttttgtatggagaccatgcttttgtgtggcacagaagcaagaagagggtatctgtaccctcctctgtcatt

SEQ ID NO: 17978 - DNA, 2883 bp, Mus musculus
tctacctattgctcctgatgtcgtcactataccaacagtcacaacccaatggcaataataaggcactggtggcacctggcctgtgatgctacacaccatttggagatgccaacactattaaatcttgccacgcggtcttcctggtgaattgatgaaagttattgtagccatggagagaatgcaggccttgttgcagtcatttgctcttccaatccgtctatgtccttaccttggtgggcattctgggctgccccagcagaccttcaagttggtttaagtagtcatgactcacaagagcacactggatagtctttcagaccaattttggaaagaaaaaaattttccttgcaaattttaaaaaagaaaagattatatttaatttttttttgagtaaaagatggcccaatgtctgaagctgtaatcctcagtgcccttccaacatgagcgacggctgagcacagcacactgggcactctgtgcccttattcccacttggtaaaagctggaatatggagagcttcgctccctatcacccagctatgttaaacctaagtgattatcagaaacgtccacccctgaactcttggccactgggcactggtcatggctcctgttctcacccacgtcctctggccttatttagatgaagtttctatgagcaaactcccagggtgtaagtctaatgctgcaagagcactgtcctccccacgcctccgacttcctctttcacacagtgagaactaactgtggtcaccaaaggcccctgagcttccagggttctagttctacgctgtcccagatggggccactaactgccacatgtagcaattgctattcatatctaatccattggatttattcatctcttcatctgtgctcacactttatctgctcagaggccacatatcatggaaggtatccattcctatcatcccagaaggttctggaaaatgctgctctagactgtttagtattagtgaaatagcttgctctgaactgagaagcatgtgcccaggtgtccaagctaaccagtaggccaactgcccaggagttcgcaatgtcagaatggctacatgaggtttaacaagaaactgtgtgatctcaatctgtgcaccatctccctgacaagaaataagctcttagcaaggaacactgggtgcagcaaggtgcagcccagagaacactgtgctgtaaccctggaatcgttccaagcaccattcacgtcagaataagagaaaaacatcttagacccacaggactgaaatgtaggtgtgcctgctgcagtcactcacaggagccctacacacgtgcacgtggcttctacagagtgtagagagagaagtaatggagtgggagaacaggcatcaaaaccccagtgccatctcaaggaggtccctgcagcattcagttgggggaaatgtctccaaatgaattggaattctggagttaggaaaaaatgccaaaaaattattccttaaaacaggtctaggtcccaggaagaatttccagaatctagcactggctgagtcccagttgtgataatagaaaatgcccctaaaagtcgtctgcttggttggttggtttggtttggtttttttccatacagggtttctctgtgtagccctggctgtcctggaactcactctgtagaccaggctggcctcgaactcagaaatccgcctgcctctgcctcccaagtgctgggattaaaggcatgcgctaccaccacctggcacccctaaaaatcttaacaaatacagtacagaagtaaaaacactgcttttacataagaacataaatgcaaaggtctgaaatcaaagatcagcaaatcaaagactactgattcttcaccaagaaggttttatctcaggaataaatgcagggatggtttaagagcagacaggactggccggggtgcaggcctgtaataccagccactcaggaggctgagggaagaggatgaaaagttaaagcatgccttagcaacagggtgaaattgaggccagcctgggcaacgtaatgaaaccctttcaaagagtaacaatggggctgcgaggatagctgaagaatagaatacctgcctagcttgtagaggaccctgggttcaattcctaataaggggaagaaaagtaagcagaaccagaatttacataaatcaccacttagtgcagtaaaagaaaaaaataccaattaatgttataaagattcaattgtatatattcctggatttcttttcaaggaaaaagcattattgtcattagcactatgcatgatgtctgaatgtggttgtgggcacacgtgtgctgtggcacagcatgtgaacctcaaagggcagatttgtagagttggttctccttcatgtgagttctgggaattgaacttaggttgtcaggcttatgcagcaagcaatttccctgttaaaccatcccatcagttctgtattcctggatttttatttctttataaataaaaagatgtcttaaaggttgtagaatctgatagacttgagctgtggagaaaagccagtgggtaagaactcctgctctgcaaacctgagaacctgaattcaaatccccatctcccacgtaaaaactgagcttggcttttgagtaaggttgcagtactatgcatcattctagaagaagaacccagttcagtggtaaagtgtgtgcttagcatatgaaggccctgatacccttgccaggggctagggggttagtgatggtgaaggcagtctctccattgggttacacgctgttgttattttttattgtcactgtgatagaataccttgaggaaccaagaagaaggatttagtctggctcatggctcagtggatgtagtgccagcgggagtagcttcccactgcaacagtgggaacta

SEQ ID NO: 17979 - DNA, 1185 bp, Mus musculus
cttttctctcccagttcctcttctgcatcactctccaaccaaagcgtagaaggtcttagctccttttcctgtgagaatccatgttcgccctgtctgcaccctcctattcagagcccgtaggacctgctccctgcgtctgcttttctgtcctggtcatctcaaacccacctgctagctctttctagccctgtccagttcagctctgccaactgggatcaggaacacaggcagaacaaggcagtatttgataatatcccaaacccactgcagctttaccatctctgccatagtggggcctaggaagggcacccagggacatgttctcaggaccttgctttctgccaggtgatgatcgcatactcacgtgtgtgggcattcagagtacagaagagctgaacagaaggttaggggtgatctgtggcttctttcctgtttccctctccctgcccctgggcaccaagcctggagagggcgttttagtagggcacccgaggcaggtgccagaccaattgtgtaggtgcaacaggctgggtctggcccagcaggttacaacacttgtggatagagactaggctcctgacctttgtgggatgtgacctgagagacattaaaacaatctggggccaaaaggctggagaggtataggcagctagacttaggaaaaatatccagggttaggtgtgggaacctgtgacttaatttgctaggacgcagccccaactcacagctagaaaggaaacataccagggcccagggccctctggccaacctacctagatatcacaaccacctctttcctccatggatacctagccttttgagcaggttcggtcaggactcactctcttgctgtggaatggatttactttttttattgtaattttatgtatatgagtggttttcctccatactactttgccattcgaggccagaaaagggcattggatcctctggtactgagtgatagatggttgcaagccatcctgtgggtgcttggaactgaacactggttctctgcaagagcagcagatgcttctaactctctagcccctataatggacttatattacataagccaatagaagaagttacagccaaataaagcaaatgtcaaagatcaggggcttgagtctcccgagcacctgagatctaacaagacacctgtattcacgtggtccttccctt

SEQ ID NO: 17980 - DNA, 1990 bp, Mus musculus
cctagccctcctccctttgttttacccatgtgctctcctgttttctttcttcctttctttctctttctttctttctctttctttctttctttctttctttctttctttctttctttctttctttttttctttttgtttttgtttttgtttttcgagacagggtttctctgtgtagccctggctgtcctggaactcactctgtagaccaggctggcctcaaactcagaaatccacctgcctctgcctcccgagtgctgggattaaaggcttgtaccaccaccaccacccgactgctctcctgttttctatgaggcttgatggcagtcatgtccagagtccatctctgggtctgggtagtctggtctccctggagtatccagggcctgttgcccaccagcatctgttgcccaccaggggttgacctgctgttcatctcacaagacccagaatggagggtgcctgggaggtgccaaggcctaaagctgctgagagggcttggagacctgagcctgaggttctcggagatatcttagaagggagcagaggggaaagaaggagacaggggagtggctcactgactggccagaaccaaggagcggaagagctaggccctgagaaggtgcacatgcctgttgaggttaggcctgtaccttgccctaagtgcctccatattgtgtaaaacagtgaccacccctgagacattgcatttacaagcagctttgtactctcttgaggatggaaggtacaccacctgttccacaccgtccacgtggcaagactactgaatggtcatcctgggaatagggagggtactactctgtaatttatcatagtgggttgggactgtgggggatatgagcatattaatatcatatcaggaaagtcaagcctaagaacttcctgggcacagcaggccaaggaaactatggagctcctacatgtgaggagtccatagaggagtagacattagcagttggctggtgagagtccccactgacctgtctcctcactgccctgcatgcatcaaggactgactaacaggcaaagaagtgactcttccagaggcttccggtcgtctgggtgcactgctgacacagctgtcaccgttgcagatgccatctgccctcctcccatctccgttgtcactcagccccttcctttgtctggaccccgacttgcccttttgcctcctcaaacagccggactcagctctaccgcctcactctcaaacctgcagtcaggggtcctgactcagccacagtttccccaagtgctccggtcctgtttacctcattgtcagagactcgtggccctgagtttcccagctttggcttctcaggcctgttggaaactctgaaactccttgcatctttaaccccttacaaccattctataatctacacatatacatatatagagaaatttactgtgtgatatgtagtgtatcatgagagtaattaagattagaatacagtaacctgtgtttgcctcagcaaggactgcaggagtatctggcaaattgctgccattgaaaatgctgtacctcgtgaatttgtcaataaaatgtgatactgtgagaaaacacaactgttcgtctgtgtttctgacagtgtgttcccaagaacgtccaagctcacactaccagaaatggtaaagccctctcccccatgaagcttcacccccacataaacagggccacctgacaggggatacctatggctggccctataaccaccatctccctggacttcccttatggaagcccggcctgctgccacggaatctctaaacaaatagggtacctgaggcacctcgaatttgcatgtagggtgtgtgaaggaaaagtgggctggctgtttgctggctcagagtcccacaccctcttttcaaacaggcagatcctgtccagagacacaatcagagacctcaccctggtggctgactgcacttagtacctctcttgtctgcttccagcccccttaccctgtgc

SEQ ID NO: 17981 - DNA, 3457 bp, Mus musculus
tctgagaggatgaaagtctcccctaagaagaggcctgacacgctcagccatctagccatcatccacacagttgcactgtcatctccttagaccagcctgctaggtcagcacatggctgctcttgggatgtcccagaggagtcaccctcttctctaactacattctcctctttagccccaggaccaaatcaccatcacagggtatgagaagaacactgaagctgcccgtgatgctatcctgaaaattgtgggtgagcttgagcagatggtttctgaggatgttccactggatcaccgtgtgcacgctcgaatcattggtgcccggggcaaagccatccggaaaataatggatgaattcaaggtgagtccccaaagccaactgaaacagaaggatgagaactcccatctcctacctgtgctgctgaccacatgaagctgggagggtgagtacttggctctaaggtctagagtctgccctttaatgcccttgacactgctgcttccaggtggacattcgcttcccacagagtggagcgccagaccccaattgcgtcactgtgacaggactcccagagaatgtggaggaagctatcgaccatatcctcaacctagaagaggaatatgtgagttctaagcaggcatggtctttggggctgaggcccagccataatcctgtgatgacagccaagtaacctgtctgcatccaaatgtgggactgagcaggggggtccggggggtggccccttggtagccaggagaaggctccactgcctggctgtaggctgagcaacaccacctcccctatgatgtttagctggcagatgtggtggacagtgaggcactgcaagtttacatgaagcccccagcacatgaagagtccagggcaccatccaaaggctttgtggtgcgagatgctccctggacctccaacagcagtgagaaggtcagatgtcctggttattctgtgtgggttaagcttgtgggctagtggagtatgggatggagttactttggaccaccctgtggtaatgctgtgttctccctctccacaggctcctgatatgagcagctctgaagaatttcccagctttggggctcaagtggcccccaagaccctcccttggggccccaaacgataatgatcaaaaagaaacctttccagcctgctgcccaaacccaaccacacaatggtttgtctcaatctgacccagcagctggaccctcgtaaattgttgatgctctttcccctccccgaggtctcgcagcaaagcctggtgggctggccttgtgtggctgcttctccaggcctggtcagcacccagcaggctcagggtctgctcctgatgctgtgctctgggacaggcacgccactgtgtgaaacactaagcaaggtaatcgagcatttcgtgatcacagactccagcttcctggtccacccagcatgtagtcagcactctgaccttcacaccagagctccacagcggctaggagttgacttcctgtgtcatgacctcaggaaataaatttccttgactttataaaagccaaaacgtttgccctcttcctttcccacctccctcctgcccaccacctgtcgcccagaccttcctctgttgaaagcagtcagcttcctttagctgtcaaaatctgcttagcacaggcttcaggataggaggaaggcatggtatcggacagcaagaggtcagatgtcctggtgatagagtgggctgagaagtagagggtggcctgggtcctcagatagtgctgaccgtgcccactttgggttccgaaagcatcaggggcttctattgcagctttagcctcatgatcctatgtatcttagaggcacagctgtgtgtattccacttgggttccctgtgactatcacagtggactagggtggcttgagactttgggggaaaggggaggtagagactggcttttcttttggtgatggggagggggctcaaccctaagtgacagctcagctttcccacgacctttagcctctgcctgccttgttcagttgccttctttctacctcagccagtgtggtagtactctcatgtgggttagtgccacccaaggctcttcttgtgatgtagacatttctggtgattctgggcttgccattgagttgagggtggaggccagtgctttccctcagtccacatgattcagggactgggccagagctgggtgttccttcccagccagcctgaccatgcaggctctggcaagcataacctggatgctttatgcagtcctaaggaacaggcttaaggggcaggtctcgtcgatagaggtggtcatttagggtggattcacagggaaggcagaatgaaaacaacccaaagcagggagcacagctatctgaaggagatcttttcctcaggtacaagaggtaatttttggaccactggcctccagctagcttggctgtaggccaaccctcaccaagaaaagtggtcccgagcagacaaacccctgtcaggctgtggaaactgaggacagaccttttatctccaggtcatctgatcaactagcaacatgtcccctcccagatacttgggttactagaaaagccaacttgtggcgatctcatggccttccctgggaactgtcacttctactatgatacctttccccctcaagtctttgactcccccatttaataactcaggcttggctacctgtagactctaatcctaagtggatccagaattgctttcccaagtctaacttcagttccctttggatggaaccagtcccacatgtacccacttagaagaacgatactgagatgggaaaagaacatctactttgttcagtaggctggcagcttaagccaggtgggtgagacggggagagcgcttccctgcctttccctggagccgtctcttctcccatctgcatgagactggggacaccttgcttccctccttcccttccagccccctcttcatcttcattgtcatcctacaacatccagtctcccctcactgaaggtaaagtttaaattatcaccaggattttgcacatctccttttattgctaagtgctgtagatgtaagccctatcctaagctgttcagggtctcactccttttctctgattgttaataaggactatgaaattgactgtacccaggtcacctctctgcagcctccaagatgttgaggagcctagggcaggggtgggagtgtcttttcctccttgttgaatgtcttccatgtcctatgtttccatagctacatccatcccttggccttaactttggaatttggagattatatgcaaacatgtgtaaaggctcatgaatatggatgacactggaattttataaattctaaaataaaacccaaaaccagatgcagtgtgatgggactcattttattctgtgtatgctctctcctgtgcctgagtggtgacagtgtccctgtagagctccctaatcc

SEQ ID NO: 17982 - DNA, 1188 bp, Mus musculus
ggagtccggcctctgcctgcatgacctcagactgggctccctgtcctgtcctgtttgtgatgtattgagatccgtgtagtctgtcacctggtcacattggtagcaggttctaaaatgtacactgttgtcttcagggctgttggccttgagctcatggggctagttagtctgcccagctcaaagccttatctctaccattgtccttgtaggcactggttccagtcaccatcgaggtagaggtaccctttgatcttcaccgctacatcattgggcaaaaaggaagtggaatccgcaagatgatggatgagtttgaggtagaccatgttccctggagaccatactctggggactgttatcagagagcagcccgtagtggtctgagtctgtgtccttcttcagcccacattggttctgcctccttttgttttgttcagtcaaccgctgactttcctcccaggtctcactcaaatcccccatggcaagtgagcttcactcctctccatctgttatgacaggtgaacatccatgtaccagcccccgagctgcagtcagacaccatcgccatcactggccttgcagcaaatttggacagggctaaggcggggctactggatcgagtaaaggagctgcaggctgagcaggaagatcgggtgagcaagaacgaacaggacaacctgcctgggtttggaaacagtctgtgttcagagcatatttccaacaccagggcaggcaggagacaaaaccaggtggtattcccgtgcagtcagagtgtggtggacctgctgtggagaagctcaaggcaaagctcagtctcccttactacccagatcaagagaaatattttgatatctcagcttctacagaaaagataaaagatagtacctcatctcaagacaagcaggtcactcctgtgcctgtgatggagtgctgtctgcagaattctgagagatgctgctcaggaattgggggaaatctgggaactagatggtcactccaggcaactggcctttccacaggagtttttagttttgttattttttggttttattgattttgggtttttttgtttgttgttgttgtcattgttggttcggtttgggtggaacacagtttggagtccagtgatagggcagagattgggcacgttttgactgtgacctggtgcagcttagccataggctgtggggg

SEQ ID NO: 17983 - DNA, 1099 bp, Mus musculus
ttgtcgaaccccaaattctttagccagccacttccatagaactttctataggggttttctataagtcgttatgccaagttaattagatgatgtaactcgtttcatttttcctcataataagtaggcggggagtaaagtaggctaagtctgtctgttggtggtatgcacgtaagttcatatagctttggtgggtaaaggagacacttgaccctctgacctgaatcctcttgtctttaaggtggaaaatagctattcaatttctgtaccaatcttcaaacagtttcacaagaatatcatcgggaaaggaggcgcaaacattaaaaaggtgattgggtcattgccccagccctaaagcctttgtggattacatagaggcctgccttcccagccctgtgctcaagtgtgtctactgtagggaaactctttatcttcttaatgtgcctctcctttagatccgtgaagagagcaacaccaagattgaccttcctgcagagaacagcaactctgagaccattattatcactggcaagcgagccaactgtgaagctgcccgcagccggattctgtctatccagaaagatctggtaatgggggatatttcttgatgggctccttatccaactcttgtttgtaaagtttctatcagagtcttccaggctcattttttaaaaaagacatgagctttaagcctggggagtggtgtcaagtgttcgttaattttatactctggggctggagagagatggctcagtagataaagtgcttgctaagcaaacttaaggacatgatttcagaacctcagaaatcacatgaagccagcttcctcacatctgtaattcagtatgtgtgcatacatcgagatgggaactggagacaagagagtccccagggtctgaagaacagctcccctagcatatgcagtggataaaaaagaggccctgtctcaaacaaggtggcagatgagaatgaacaccccagactgtcctctgccttccacgtgtgtctacactcacgtcatacacaaaaggatttgtaaaaggaaagcaaactatagttcaagacctaccggattttgtttaactttctaaaaattaacaca

SEQ ID NO: 17984 - DNA, 1225 bp, Mus musculus
gatatagtagttagagaatattccagaagaatgtgctttatcagaaccataaataggaggttttttgttggtggtctctcctgttacaggcctcagcaactgttcccattcctaaagagcaccatcgctttgttattggcaaaaacggagagaaactgcaagacttagaactaaaaactgcaaccaaaatccagatcccacgcccagatgaccccagtaatcagatcaagatcactggcaccaaagaaggcatcgagaaagctcgccatgaagtcctcctaatctctgctgagcaggtgagacctctgagtggcctgtggccctgccacctgccccacactgaagcagcgtgtgttggggagaccttgactgccaatgaatgacttgggcaaggcttctctgctccaggtgttctcatcaggtcactgtccttccaggacaagcgtgctgtagagaggctagaagtggagaaggctttccaccccttcatcgctgggccgtacaacagacttgtgggtgaaatcatgcaggagacagggacgcgaatcaacatccctccacccagtgttaaccgtacagaaatcgtcttcactggagagaaggagcagctggctcaggctgtggctcgcattaagaagatttatgaggaaaaggtacagtgtggaggtggcagagcccatgagcaaaacggttaatgggatttgagtgtgggaatttggctaattccacagttcaccctgcacccttttgtccttggagacaaagtttggtatgtgtctaccttaagtgtcaatgtttagtggttggtggccacatttcccttctggtctactgggtacactatagagtgctgtcctggttttttatgtgtgtatcctttctcaggtctatgactatactggtaggttgctaccacagaatcagcacagactttttgaagtgttttttttttagcttattctgactttgagatgtaaaacctgttccttatttggaagaagtaaggttggcaaatagctctgtagcagagcacttgtctaacaagcataaccctatgtcagcccccaacactgtatgaaaaatgtaagggaacaaatggaaaacagtctggttactcaaaaagtgaccagactctgggccagtccagtagagagaagtagaatttctggggaggccaatcctaacttcacttactgagaaccgcttctcagtccccttcacactt

SEQ ID NO: 17985 - DNA, 2511 bp, Mus musculus
cagtatctgtcagtttccacaaacctcataaaggcatcttgatttagttcagtttatgccctttgttctgcagagggaggattgccagtgctgtaagaaacaaatgcatcacttccatttaaattgttttgtttttactttccaggaaacactttggataagaaagacttcctgataagtgctacagcatcaaggttcttagccctgtggaaggaagggcacccatccacaatgaagcacctgtgtctgaggatttcagttggttgttttttgttttttgtttggttggggtttttttttttttttttttttcttttttaacatttggtggtttttgtttttactctttttttcttttccttctttttctgccctcaaccccccaactcctttggtatgaagtacttttaacatttatatttcattgttacactttaaattttgtaaggaaaactctgatattttattcctcctgaaccactaatgttagaatttatttctaagaatcagtcaacatgtatactcttaatagtgaatttctatgatatagctggcctgactaatcactgacaagtactctttgatttctatctagacatttttatgctcagaatgttcctgtgtggtggacattgatgtacctgtgacagaagtggttgtgcatacttggtggcaaattatttgcttactagaattgaagtcacattgttaactttatatttgtacagaacacctaaaaccaattttgctgctgtagttcattcggcttattcatctgcacaattatctgttaaccaggtagaacagaagagagttatctaatgagatacatgtttatacttaaatagcttttaaaaagcaggatttcagggttgaattttaagagctctggattctagtgccagatcattttcaaacctctgtagagaaagctcactacaaggactttttatactgtggatgctgattatgctatgctgtggagagaaccaaagcagctatgagctccagcttcatattgtaacaagactctttataaggaagagtcagtaaactttttactcaactaaaaaggcaatacttttttaaagaaaccaaaatgtttatattttatactgcactttaatgtactttctataactaggtgcaaaaggtcatagcagtggaaatcatagtccttggctggcatggatccaaccccaggcttgtgattgggtggtgctcttgaacaaaaggccacttgaagcccagatgcctgccaggttttcgtctaactcttccccttttcagtgatccttctattgaaaggaaaatagcagtgctgggttttttatgtgcagactgtctcatctgtttccaggcactgtcattttcttcagtgtgtgtagtataaatgtcttcacaccatgaacgaaaggcttttcagatctgtgccccaagcaggcaagcagagtcctgcctggtttatattctggcacttccctcttctaccctgtcttctaatgtcaggcagtgaccttagaagggaaggggcaggtgaaggaggcagtggtgtggagaagcaaagcaggtgctaactgtgtgctttcatttgctgcaggaggaaggacttgattgatgatgaggcagggatttacgtttaattcagtccaaaactcagtagtactaataagatgaagcttaagcatggttgtttataaatttaatgaggaaaaatacatttgctcgctttgcctcttcacattgcatcactgtgagtgatcagggaagttcattgtgtgaagttcctatcaagaaaagcgtcaatgactttagagtacccatgcagtcctttgtttggcttattttgacattaagtttgttggagaaaaatttaaaaacaaaaaaatgaaagaattcccaagtattcggtgtgagtcccatgtttttgagttaaggtgctacttcgggtcagctgacatctaatattggcagtgtggattgtgaggtcttgcagccacaattctaacccccttcagttttactgcttttgctaacagatacttgctctttcactaagaagtaacttgtacttgtagaaatgtattttgaaaacatttcacacttcaactttgtatccatttaaattaacctttttcaataaagcactattgtttagatattaaatgagtagtcctctttttgagtaaagtatgcgggccattgtgaagattcaagacccctattacaactgtatatcagagcaagatgttacttgtattaatagcaggcgtgctgcgtatattttcatcagagataacccagatactccaaaagaaatcctatagctgtacaggttatcagattgtctgcagactacttgataaaatggacagtaagacttcataggtaaatttactaattagaaaatgaagcaacaactgttaaacatagtgggaagtaaaagtgatccaaatatatttctaattctccatatttgtaagaagagagatgaattaggaaaacagtctt

SEQ ID NO: 17986 - DNA, 1119 bp, Mus musculus
gaaagggtctgctatttactatttccatagttctctactcctatggatgagaatatgcaaattaaaggcttccttttttctctgtaaaaggtatttcttggaaggtagaagagaaacgctgcagtttacaaaagcaactattggaatggcatgtattcaagtagcatttaaatccccaagcacctgaaactttaagactaagtagaagattctgaaaagtgatttggtaatatatacccaaaggttcaaaatgcatgtgatcttagagcccagaacttcatttttaggacagcagtggctttctcatgttgtttgtgagcctgaacactgtaatttgtagttctctaaggcatgtgacaccatgcctgtatctacgttttgattttgaaactggctgttgtatgacctgcttctgggcttgctttctcttctccagtacagtattattggacttgcttcctgaaactttgtattttgttctaggggccctaccaggacacgttagagttcttgttgggtagcagagatgaatgtaagaacttctggaagatatgtgtggagtaccataccttttttagactctctgaccagcctaagccaaaggcaaaggctgtcttcttcagccgaggctcctccttcagatacaggtaagactggcctcagctgcagaaacagctgaccactggggagaggaaagaggtggagacagggaggaggtgccataggctaggtaggtaattgtatttaggagtagttcttgtgaaggacaatatatagggggaaaaaatcaaatattcaaactatgagaaaataggcttaacaaaaactacccagaaaatccaagttatttacattgggccatcttacttctgttcttaactctaaaaggaaatgctctgagttactgctttgttttaactgagcctttatttgtagtggaagaactcagaaacaactagtagattatgtcaaagacggtggaatgaagagaattccatacgaaaggtaaatgctgtagcattgatataagatgtgaacctttaaattttcagttttttttaaattttatgtgtacatgtattctgcctgcgttcatttctgtataccacatgtgcgctg

SEQ ID NO: 17987 - DNA, 1131 bp, Mus musculus
cagacaggataaagctactgacatgagacccagccccgcatctcacaaatgctgggccagccctgacactagccctggccaatttggctatatttgtctggtccataggttgggtgactgtgggtcttgtttggttggtttggtggtggtccctctctgctctaatctagcagtacaatagacattgaaagtttcgtttttctcaaaatatcctgtggaaataactttttctggtgtgaattcaggtccttgaacatgctaggcaaatgctttgcccctgaggtacatcagcctcctctgggatggtaagcactcatttgtgttcatttgtgaggcttctggctctgtgctgggatcgagtaactctgctggtctctgatgcactgtgggcacctgtctcttcttcattgtattagttagattctggaaaggaagctctgggtaaatgtatcctgcttttatttcttttggtttttgtggctaggtcttactgtgtagcccaggctggcctggaacgcatacacctcaagctagccttgaactcatggcaatgtgtcagtctcaaccccccaaacactggactatgtatgcccagtagtgttttcatttccatagcttccttagacttgtagactacagcctctctcttctgttagtccatcagtgcctgctgcctgccacacatataaggccacactgcttagagcagagatgcttaagagagttggttttcttcagtgtatcattcccaaaggaaaccttgcattcctgttatggagagctaatatgcatcacctctaaaatgttgttcttgaactttagtatccatgaccactaccctgctccatcattgtcacctaaccagtgacactgctgggaagcaacagagttgtcattcttgacttttgggtggttggttggtttggtttttgagaattatcatcccaggctgtctagccaacaatgtcttgatctacctcctcctctagaatgccaggagtacaggcacgcatgttaccccacatccagtttatgaggtgctagccattgaacccagggctcatttgctgtttaagcaaacccacccgagtatctgggcagcagatcagggatggtaggggttgagccttt

SEQ ID NO: 17988 - DNA, 1162 bp, Mus musculus
tggagttccttgctgaagtctcttaatctccacccccatctctgtgaacctttgacttgcagacttgggcatgcaggatgtgatattcatcatagtctctctctctctctttttttttttaagatttatttattattatatgtaagtacactgtagctgcaccagaagagggagtcagatctcattacagatggtagtgagccaccatgtggttgctgggatttgaactcaggacctttggaagagcagtcggtgctcttaaccactgagccatctcttcagccccatagtctctcttaaaagccctgctcataggcctgctgctctgcattctggatggctctgtattacaggagaccaaaggcctgctcaaggcatgtcagtggttcgatgctgaacatttattctccaggcttttctggcttgtagggaagacaatggttggtcaggctctcttctttttggatcagtggccaaggttttcagaagacctcccctactcaacagtgagccttattagatttttaatggtttcctgtagaaatataagcaaatccatgtctctaacacaaaacatttgctgacttccattctgatgtgaactcatccttatagtatatagactgatttaattccatagttttttctttaacccagtgtctctcagctgctgttgttcctttctcattaatgttcagaaagtttaaagagtactaatcagtctatccctagggggtctttattcttccttttataatttttcttttataagtctttaagattttaagtttctttaagtttctatgtaagtctttaagtttttactttgtttctgtgctaagaagttccattctaaaatactatcttccctttgcataataagcccagcaggagaatgaactaaaggcaaaataaccaaaataaaatccatttttgggatctatgagattcacatatgcatcttgcagtctcttttctactaaagttaactctttctctgcttcctttgtcagctgtcttgacctaagtctgaatcacctgtaacaaaacaaactacctaactcttgagtagttaatccagtggtgggctgtagccaagtaacatctcccattaatatttgaaattgttaagagtttgcaactgatctcttctgatctattt

SEQ ID NO: 17989 - DNA, 1124 bp, Mus musculus
gaaaagccctggctgagctattaacagtgtgcctttctgaactttacattgttccccaagatgattttctatgtcgaagccactaacaaaacatcttaaccttactaatagtctccatctccaaattctttctaagggcggtggagattactatcaatctacacctctaaatcctctctgaaggtggtgggtgacacaacctactccagcagcaatgcttgagaaagatcactcagtactattgtaagtgccaatgactgcccagggagagtctggaggcccctgtaaagttttcatacaacccatagattgggagggacatggcagccaccaaggcagctagcagaggcatgttccacaacagcatgacatcctgaggacatgtagtcctagggcctctgcctctctgaggcacagccatcttaattgtgctaaccagtgggctgaattccctgagttctaaagctgttttgctgtatcttttgcatggcccccaattatgtaataattataagtaggtactgtgaaagcaaatttttcgttatcctgctcttgcaaggggatagtaaaaaagcagtcttttaaaacaattgctgtcataggccatgccttaggtaataaaggaactccatgctgtaatggacccatcgtttggattactctattcatagatctcaaatctgttaacattgttcgtttccccatttactgtttttataacaaatacaggggaattctatgggctggtagactcttctgtatgctgagcctcctctgttctggtaccgactgttcaaatgcctttaatttttcctaaaagtcactgctctacccacaaaggcttcttagtcacccattttaagggtagggtcattagtataatttcagcagcacccccacccccttataaatttggaaactcaatccctgttgtatccagttttcggacaacctatacggtctgtagttgttctggatgacatttttcaataccttcccccaaagcatcttccatttcaccccttattttaggaattgtctctgctatgaagggaatattaatctgagtcccccactgctctaagaaatcttatctccattaattcacagtcatgccagccaca

SEQ ID NO: 17990 - DNA, 1343 bp, Mus musculus
cctgagggcaaaggaccataactccaagtctagagccacactgcctgcagtagcatgcatgagaactgcacttcttagttgaggtatttctgtctgttatttactaactgacaagaggcaaacagctcatactttctgctgcaaggcctcaagctaggcactcccccacccatttcctcttccaatggcaagaaactggatggagagccctccaggacctacactctacggtccagtggtaacccttgccacattgcctgcacaccccatcactagaagcctagacctttctggattaattttaaaaagcccttgcctttagagagccttgttcacaatttggttgcaaattaccatatttctcacaattaaagctctgggcattttgaggtctgagacctttagtggcttggtcacagtctgtttacaaatgatcattgtatcctccaaggttaatgcactgtgcattttaagatctaaaacttctagctatggcttgcccagttatcatggaattatacacagtagaaccatgatcagttgtcttcttagcccacacctctgtaggtcctgcctttgctttaatgacttagtaaccttcgtgcattccatatttgcattttcaagtgccaaggtcttagcacctgcctcatttcagggtctgttatagctctattcacagctgcaactaatctttctgaaaaagtcagtgaaggcttccccgaagcattgtatagtttttgtaaatgatgtggacttctttcttggatcctcaactttgtcccaagctcttaaagctttaaaggacattgttctccgattgtgtcttcaaattgaacttattcctgtatgccagcataacgaccttcacctagcacctggcccatccctacattaattcctctcattctgctgtgctcttccaaaaccctggcttcttgaccatcctccttttccatttctttgacttgactgccctttaacaccattccttacactctttctacctggaaaaaaaactcctctctggttcagtcattggaaatgtccctatctgttctccttgttcttgtttgatatttttcaagtttgtctgcctttgctctcagtttctctagctgcatagccaactctgctatttttgtagaaagaagagagaaatgaccttgtttttcccagttcttccatttttttggattcccaagcttcatttctgtatttttctttagttgctcagcctgccttttgacctgttttataaacaaaatatcttgaaatgaagaaagggagaaaaaaaactgttgctgaatactatgcagagcatgttccaacaacacaacaaa

SEQ ID NO: 17991 - DNA, 1100 bp, Mus musculus
tcttaactccctgccagccctccttccagtttccaggtcagccccttcaaatgtttcccccaatccttagttcctccctcagttccccagcagtctgcttaaacagttccttcttccagttttcccaatactccaaaccataaaaactgttgcagcctatctgctcagctcagctcctcctggctcaactgtctcctaacaatgtcttctgcaccaactgccttcttctctcactctgctactcccttcccttcagcctcagctgtcctgttcccagaaatccaagaggcaaccagcactgaaggtcataggatcaagcaattctataacagttaagactttttaaagggccagttgactagcaactaaagatcctttaaagggccaggcgcacaagacaaatcacactaaaagacccaggtagagaactgtcacagccagtgtgtccatgcagaaaagtagcagtgtcaggtctgtccacatagtcattatgttggcattaataggaacaagaccctgagctgtcccctgtagtccaagggcatcaccaagcagtatctgtcctaaccactaagtccacctctaacaaggtactcctctttagatacatttttattatcaagtctatttttatatgtaagttcccaaagtctcagtattttatataagccactatgaatatttgaagactaatagcattgttacacagtagcaagattgtctatacagagatgtgcagtgttccgaatgcactgcataatcctttgatctatcaggtaatggtatgtgccttttatatggcagaggcattgtctagttggctttagagtagattgccctgttctcattagcatttgtatttaatttagggcaaatgaccagggcatgggcactagcacatccaggaatgtagtgtgaaaacttcttgatgtgttggctacatcattctcatcactattgacacgcccagtgaccccatccttcctgagggctttggtgcacaggtgtattttcatctctcatacagtctccactgttctacctgagtgatagttatattgtatcacccacactgtggttatgataccacaacagtgtgt

SEQ ID NO: 17992 - DNA, 1141 bp, Mus musculus
gagaggcccaccaaagtttggtctagttgacactgattttgaaacactaaggacatcttccatcctgtgatatgctgttggtaaaaatgctgtgaactgccgggcagtggtggcgcacgcctttaatcccagcacttgggaggcagaggcaggcagatttctgagttcgaggccagcctggtctacacagtgagttccaggacagccagggctacacagagaaaccctgtctcaaagaaacaaaaacaaaacaacaaaaaaagattgctgtggactgtacatctaagaggcttgcgaggtgttgctgacgtgcatgtccagggacggtaatggtacctttcacttgacaggttctcacacagcaggaaccacctgacatctacccgctgaacaaccaactgaatgcactactcttcacagagagggagaagaatgctgtttgttttgagctgtaaaaggactgacttggaagccctcttgtgttgtgttacaactgtaaagactgaccagcctgtaggcttcacaagccaggttaccttctttctgccctacacagcagccccttgacacctgtgttcactccttggttgtctgaagctatgctaggcacctgggagcccttgcagaactgggcagcaacttgggaggctggtatgaccttctatatagactcctcagtccctgcagcaggtagaccaaggagcatagtaactattgggcagctttggctcttcgtctacaccagggacattgtcttgagggctcataggggcccaagatggtcatcatttgccttgtggtgtcagttcaggtactgtgtgttttcatgagtactcgaatcgtccagaatattttgggtttttttttttttttttttaggaaaattgaacttcctgagtattctgacattaagtgttagttttaatagagcattgaaaaccctaccatttcaataaagacctggattggaaatgttctgatgtacagagcctggccagacaggatttctatagcttctgagctattgtcatataacctaacactttctggtggccttctgaagaacaaagtagggcaaaggggatgctggtgggtgggggagatgttcttttattttaagtcacatgggcatgtgcgatgg

SEQ ID NO: 17993 - DNA, 1195 bp, Mus musculus
ccagctctcatgtatgtcacacaggcaaaagctccagccatgtgagtcttttttgttagcacagattatgtgctttttagttttgggctgtgtacatagaatttttctctacttcctcttttgattgattattgataattagtttcttgatagtgttcatttgaaaccaggtctcactgtgtttctcgggttggtctaacatctctgcatgtacataatccttcctcctgtgctgagactgattttacctccatgccagctagacttggggcttgagtatgtttatggtagactggaacacttctgtattttccgacagctagggtctttggcatgagactgaatcccatcagtagttttgtagcttctggaaagaacctgtatttgcccctcgttaggctagcactgcatcaaaccagtgtctccaacacatgggccatgcttgctcttgggatctaactcctacttgtcgtgttatagttaatcattttcctgtgtcattatttggttttgtgtcagcattatttccttacagattgaagtaagagcttttctgttcttttctaaagggtgaggctcctggggattatctatagacctctgaccaagtgtcggggatgcaggctatggaaacaggcccaggcaccaatgagatcttcctccatgaccacttgtctacccttgtcttctacccactccagctacagattcatgtttccatagtgttggctttatctggcttttcagaatgctctgccatcctgtcacctcaactctaatgctgtgtgcgtgtgcgtgtatgtgcaagagagagagagagagagagagagtgagttaccttcttttcttgatcatgcttgtcaaaggatctcgtccgcagaggttttatttttttggctggagaactagcttttgggttttactgattaaataggaatgcctctccttcagaggtgcaggaggcagagatgatggcattggtcgtctgggatgtgtgctaaaagtgctttgtgctctattactactcccccacccccactgtctcagtatcgtctggcaatgacccaatgaaccagagctggaagcatcgactggggtttgagctttcatcttgagctaacaggcaaaacctcaaacataaggaagcatagaactagaagccaagcagtgatggcaaggagagggtcaggcccat

SEQ ID NO: 17994 - DNA, 1153 bp, Mus musculus
gtgcatcttgctttagcctcccaagtagctgggattacaggtctgaagcactatgcctgtgctttatattgatataaatgtttattcttttgaaaattagctttctgttttcagcctagatttgttttgattagagagtatgtatacatttgaaatcctggcagatttgacttctaacttaaaaagggttcaaaattaaagtcttgtacgtcatctgaatattgaacactgtgcaagtggaaggtttgttagttatgtagtggtcaaactaaccttctgtgttctgttctcaatagattggaggtggactcagcggaagaggcagcctgacagctactttaatgtcctcaatgctttcctcgacaggaaggacagctactattccatccatcagataggtggggattaagtttgtccttgggttggctctgtacaaagggcagacttcttgggcttcccttaggagctttctaaatctcgcagagttggagaatggggttctaggccactctctggtctctagtctctgtgagctgctctgggtgttccagcactagctcaaacccaagcctgtccttcccctgtacagcctgcagtgagtgactctgtgcagcctgggggagttaggctcctcttggaaggtttgctttgcttttctcaggagggttggagtcctgcccagacctttctatgaagcgtttactaatgtaccaaaagtgaggcgcacacacatacacacactctctcttttgggatggatgtgtttgctaacatgggtctgtttcctgcagcgcaaatgggagttggcgaaggcaagtctataggccagtggtacgggccgaacactgttgcccaggtcctcaagtacgtaatgagcccagcccttctgcttcttggggtcagcatgagttctccttggcatttaccctccttgagtacttattggcacaggaactaaggtattccgattctttgcttatagacccaggggagatccctgggtgactatgccaattgttctgtgattgggattcatgtttaggtcagagccctagtgtggccctgtcctctgtcttgatatacaaatccatctgtaatgagggtgtcttagatctgggaccatggcagttatggtactgtatctgcaggtgct

SEQ ID NO: 17995 - DNA, 1150 bp, Mus musculus
ttctttctcttctcagaaacccatctgggtcacaggaaattgtagatggtttggggccaaaaaggtaaaagtactacagctttttggtgcacaatagacatttagacagcaggtagctccaggcactcacaagtgaagagttcagacctccttggcactcatttccatacctgccacctaaccctggctttctgggccttcaagcttttgatgctctaggtctgctgtcttagaaaaacacctttcctccccctagatatgagcagagtatggcagtgtggggaggaccgttcaagagcctttgctaaaagcccttcccaagaactcgcagatgggtgaggccagagctactccagatgcagcagctctaagtagcccacaaggtagcaagagatccctgcctatcaagtgttgaagacatatttatttcatcttactctttctctcccatatcttgtcccttgacttcagatggggtgggacgggggggggggaaaggccaggacagtttccattcccccggagcttgtttcctgaggccaggagctattgtgctgctgtcgcccagggtctcgctgtaactcctgttgttggtagtaaggggtggacatatggaacactacaacctgagggaactctcagggcttgagaaaggcttcctgaggttgttcattcttagtgtagtttgcaattcttaatgataaataagtttcagtagaaaacaaagtcttgtgtgtgtgtgttgattttttttcccctccagttatgattagctttgattttagtgttaacaagtaaagacttcctgaagttggacaagcagatcctgccctgttcctggccttgctgtgtagccaatgtctgttttccctcatattaaactcatggtcctaaaaaagaaaaagtgaaaggagatataaaaatgagccagcgatgccgggcagtggtggcgcacacctttaatcccagcacttgggaggcagaggcagtcggatttctgagttcaaggccggcctggtttagagtgagttccaggacggccagggctacacagagaagaaaccctgtctcgagaaaaccaaaagccaaaaacaaaaaaaaaaaccaaagagtcagtaatgctggcatacaaagtcaatggcagctactc

SEQ ID NO: 17996 - DNA, 1242 bp, Mus musculus
gcagaggcaggtgaatttctgagttcgaagccagcctggtctacagagtgagttccaggacagccaaggctacacagagaaaacctgtctcggaaaaaaaaaaaaaaaaaaaagaaagaaaggtgcgactgtgtctgtgtagtcctggttgtcctggaactcactatgtagtccaggatggccctgaactcatagagatcttcctgcctctgctttccaaatgctagagctaaagggtgggtgactgttcttgtcaactggaagactgcttagagcaagatgggtagctagtacatctgacttcacctgtatttgggatacagcaggtatgcaggctgctttctacaaatacctggctgaaagaaagaaagcagcacatgaaggacccctgcaggaattcaggttggcttttgcagagccctggctcacctgatgtcaccacatgcactgggaatagaaggacgtggtacagtgatcctttttctgctgtctcccctgtggtgataggtggttgatgcttccaaaagcattgaggaagtccataaagaaatccgtgcacactctgaggacgccatccgaaacgctgcacagaggccactgggggagctatggaaataaatcagcttccattgccaatacaattttctggttctgcaagagactggtagaaggctcacatctctacactattcagcaggagctagttctcagcagaagagatctacaagacccctctcataacctgagatttaagttgtgcagtatctctctttacctactgcttggctgtaaaggtgtagcagtttccttgagatcaattggtgagaaatcacattttttttacagaataaaaatttacccaaaaatatatctcacgagctttggttctgcccctatttatggtccttccaccatggatttgatcagttattaggtcccatgttccaagcctgtgttcttgggtgttatctagtggcacagtgctcataattctaagcccagtgataatgaccttgttggctgttagtgctacaggggccttttacactatcccctctgccacacccactccaaggaagtctgtggggcaagcccaaaagcttggatgcagtcctgaggcaaaaagtttcacagacttagtctcctggactcttggcatcccatactatgaatgctccaaacttgtccctacatcagtccgtgaatggatctgtgtggtttccttcaatattgttttgaaag

SEQ ID NO: 17997 - DNA, 2120 bp, Mus musculus
tttagaagaacaataagtgctcttaacagctgagccatctctccatgaaggagaataactgatagagcatgtgtttgcccatctcccacaaatcttctttctttctcttttctgtttttgagacagggtttctgtgtagctgcggctgtcctatctttagaccaggcgggtatagaactcagactcgtctgcctttgcctcttgattttggggattaaaggcatgtgccgctactgccccgttttgttcttttgagagagtgtctttggctgaccttgaacaatgataaataacgctgagctgcctgtacctccaagtgctggagttgcgtgtgttttgattttgagacaaggtctcctgtggctcagcttaatctggaactatgtagccaaggaactgtcttcttacccttgcaagtgctgttaccacacggaccttaatgtttttaacttttacttttcctcagcaagaatcagatggtgtctgataatatctttatgcaacccttggggatgacagattgccaagtgataatcgtttaaattgtttcttccacatatgttaagagtgattcccgaatggagtattttgtctgtatagggaagccagggcagatagtcggtatgctgtggccatgtagggagggcctctggggttggggtgtcctctttggccctacttttcttctgaaaataaggacatttttagcaagttgatgaagtgggaagatgtatgtaaaaaatgagtaggcaggcatggagtgggtttccaggattgctagtttcctccagtgcttattgaaatacaagattatggcaaaaactcttcctgtctctggaacaaactgcttctaattgtagacactgaggttgaatgggccactgggatatctacatatgccatgccttattttctgagacaaggtccattgtagacagactacagaggatagagctgtggtgccatcctgtttactcttatttctagcaccaccaccaccacccctacttttttctttaaagatttattttgctgggcagtggtggcgcacgcctttaatcccagcacttgggaggcagaggcaggtggatttctgagttggaggccagcctggtctacagagtgagttccaggatagccagagctacacagagaaacccctgtctcgaaaaaacaaaaaacaaacaaacaaacaaaaagatttatttttattttatgtatgtaagtagtgtagctgtctttagacacaacagaagacagcatcagatcccattacagatgactgtgagccaccatatggttgctgggaattgaactcaggacctctggaagagcagtcagtgctctcaggccccaagccatctccccagccccccacccctactttgaagcaaaagactatatcccactcagtttgctttctctgttggcagaatttttccctggattggtgtaaacaaccggacgtgggccttcccaaacctgacctgatcctgttccttcagttacaattgctggacgctgctgcacggggagagtttggccttgagcgatatgagaccgggactttccaaaagcaggttctgttgtgtttccagcagctcatggaagagaaaaacctcaactggaaggtgagtcatggcaatacgctgccattgagcagttctgtggtagtctaccctctgctgacttcagcacagctggtccagtttcccgtggaacctcagggaagctactctggttctctgccatcagactttctggtggtggtggtgattagactccaatgaactccagcaaacttctgcatcttatcctgaacaagcctttagtcatgtgatgtcaccattcagaacatggtcttgcaaactacatcacactttatcataggagtgactcttcagtgcactgtgtatatagttggagtatacttagcaagtatttcagaaggtggggtttgccggtttcacatttagatagattttacttttacctcatactgtgacttattcctgttggccctcagtcataccataggtaccttcttcatcactaccacctgcgattttaccctactgatttttttggaaccctgtgggtcttacatggctgtttccagg

SEQ ID NO: 17998 - DNA, 1431 bp, Mus musculus
ttcattggtcattgatttgggagggcccggctggtggagatggcttagttaataaaatacaggctgaaatgagagcctgggtttagtttcccaggttaaaaaaaaaaaaaacctagtacggttgcttatccaaccgctggagaggtgagacggactcgttcctgggacttgtgagccagccagttcagccaaaactgagcttcaggtagaagctcctctctgaaaacacaaggtggaaaagtactgaaaagggaacataaggttgacttttggccttgcgccctgtacactggacaccaacccctgatcctacaaattaagtaggttgggaattggaacaaccactttgcaggatattttaattttcaaaccaaccagtcaaaagtcttacaagtacttttgaaatcaagacttgcacgtacattacttccttttctcggggagacttctttggcttcagagatggtccaaagctgtctggaggttgaaagttaggtgtaggtgcaaggagagaacttaagtgcaaacccctgtagacttcaggtgaagagtctgacttcagtcgagtgtatctttgtctttctagaaagatcaacggaaatcggcaagcttctgaattcctacttggaaaagaaaacggaactagaggatcactccgtgcacctgctcttctctgcaaaccgctgggaacaagtgtaaagacctgcgtcgttgctccccggttgtaacatgcacacttttgtgtgtggcaagggtgcgagcacctgtgtgtggcatgtgtgcaaacacccgcacgtcgagaccagaggccagcttgggaggtttcctctaccctaccattcgacgccgtatttgagataaaaaaatcgacgtatttgagataaaaaatcgtcgtatttgagataaaaaatcgccgtatttgagataaaacatcgtcgtatttgaccatcgtatttaaccacatccggcttgttttgttttattaaaaggttttttttttgatttggtttttggttttgtttttttgatactaggtttccctacataacagtcctgactatcctggaacttgccttatagaccaggctggcctcataaaaaatatgtattcgtttttgtgtaatataaatggctacctgtatgtgcacctcatgcatacctgctgcccaaggaagacaactcctgtaactagagttactgagagttgtaagctgtcatgtgagttctgggaaccaaacctgggtccttggcaagagcagtaagtgcttttaactgctgaggcaaggtttgttttgttttgtttgtttttgttttttcgagacagggtttctctgtatagccctggctgtcctagaactcactttgtagaccaggctgactttgaactcagaaatctgcctgcctctgcctgggattaaaggcgtgcaccac

SEQ ID NO: 17999 - DNA, 4128 bp, Mus musculus
ctgttgtgccagactgaagagcaagctaatatatttcctcactcatgttgcaatatgatctttcattttaaaactaccttattttgactgatatttaataattcagtggccagttgtaattttggatatttcctaaaacaagaagccgctgcaccatttgcacagaacaatctcacagggacttgccacagtgactttaggagcaggctcccccatcccacaacctcccagcactgggaatggccacaccatcagtgatgtgtgtcagtttgagctgtaggcaaagtgcatggtgcagggtgaacgcattttaacctgttacactgccactgctttgtgactagagggtcagccttgcgtgtccacggtttccaggactgtctgtggcagcatggaagcacagctggtgctctgtgagtaaagtattgtcaggcactgccccatgctgtgctctgacccttactggagaccaggcactcttggccaagatccctctgacgtgtctggaagggaccgggggctcttcccaggtggaagtaccctctgtcgttttgtgcaccaccttttcctgtgaacttacggccctccctggagattgagcttccgttagccttggactgtcagttaccacagccagcactgcccagcagcggacagccagacagccaggctgagcttccagctctctggggattcccgcctatatttttttactgtgaagatgaaattattgtactagcatgaaggtcatgggtctgtgtgtctatgaagtgagtctgtctactgtgagctgatcgtaagaactctgctgtgctgcatcccactaggccagcagcttatgttcaaggggacgatgattatgtgacatgatttgtgactctgtgcccaatagcagttctggaatgaaggtaggaaactggagtgtactctttgtttgaccactgtccacaaaaccagtgttgaactgtcttgaaatattggggggatgtctacccggggcctgttgagatgcatctgtggtgttccttaagagcgacaggctcctgaaagccacggttgacttagaactcctctggcatgttcttcagtaactcaggctctctgagaagaattaaaagagtccaaccggtacctggcctcacctcagaaaaagacctgcaagacagagctgggttatgcaatttctgatgtaagaagaggccggctctttatataatgacaggcacattgttttcttctgatggtcacaaacaaagcagaagggtgttgtctctgccccatacctgtgtcaccatggtcatgttcttactggacaatgtcttgcacagcctatcctagtgaaagaggaagacaggagtggcttgtgtttgtgctactgaatatgttggtctgcgttgacctttcctgggctgtaggtaccaggcaggttagctgtcgttgataggcaagtgcacaagattgtctctaggctaggaagagctttgggaatggggctggcattcttcttggggacccctctcagggtcagattagatagacataacttagcctttaaaaattgtgagggacccccctcccccaaagaccagatctcatgtatcctaggcaggctttgaactcacaatgtagctgagaataacgttcatcttttggtctttcttcacctcccaaatgctgaggttataggtgtgcaccaataggtctgtctggttttgcaatggtagggaccaaacccagaacttttttttttttttttttggtttttcaagacaagatttctctgtgtagctctggctgtcctggaacccactgtgtatatgactaggctgaactccaactcagagattctcctgcctctgccttccaagtgctaggactagagaagcatgccccaccaccgccagctccaacccagaactcttgagtgttaggtaagccttctgcagattgagtcacaccccagccttctctttattcttctaccatttgttctctttcttcagtgcttggggtcaggcctcatgcttccttttaatcttaaattttagattatttatttatttattgggaggcagggctttattatgtaaaagactagctttgaacttgcagtcatcttgctggagctaggcaatgctgggaccacagatggccgccactgtgtctggactgctttttacagtttctgtaactacaggacgtttttaatcagatcttgcttggtaatgccttagaagctgggttactatgtgagattcagcctgaggcagctgagtcctttgatgatcaggaagaagtggcgtttactggtggcggtgttagaggctggatgagttccatcttctggcttcctgaggtcatgctggctctttccctgaggtcttctacctggggccaccctacatactggcttctgatttttatttattttgtgagttcctatgattatctcctttttgacagttataatgtcatgaaaataagatgcatatagcttggcaaaaaaaaaaaaacagaattcgtgagtttggggatttacctccatggtggaaaaccatgcctaacaagtgtgaagtgtaatgtggtattggctgtatgtaggtgaacaaagctgccttccaaaagtgatggtctaggttagatccctggcaacaaaatggggggaaaacagaaaggaaaatctgtgggttgtggctggtattctgatggaaggcttgttcccactgcttctgtgtgtaagcaaagagggaacttcaggagacgcgttccggcaccagctccgcctcagatgtggagaagccacgagcacacccctcagccctgctccagaagcctgagtgtctccatcgctggatcagacactctcatgcctgctggtcgagacctggctcttaagctgtccttgcttcatcaacagactggcagctgctttgcctgagccaaggctgggtcttccctgtgtaattccccttgtaagtacaggagtgttttgctgagaggaggggtcatctttcttgttttctgtgcacattatcaatagtttattatagaagaagcatgatgaattagtaaaaaattgagcccctagatctgtgaacatgttagtggtgtaatgggtccaagcagcactgaccattcgcctatccagcaggtgggatcagtaggaggcaggctgccagccgtgtcttccactctacagtgaagagccctgtagtgtgaggttttgtggatggctggggaagtgggcacctgcttgctcctgtgtatacagcatcttgccttctatccctcatttgaccccagaaggccttggcggggatgcttcatccagagagcaacttctccatgtgatcacggtgccagggttggccctgttagagggctgggaggttaggtaagtcttaagggtttgaaatcaaacagcgaggaacctttgtttcaggctttgaaactctgttttctatgaacagagattgattggtcttcactgcctatgcccaaaggagctttaaagcaggggaggtctaagaagtgtcttttccctcagaatgtgctgtggtcgttgctcttcgccacactccatccatcaggatgatccagctttaacatgaatgtcacattttattttcaaggaattattacctatgtcccctttgtaaaggagagatactatggtaaatctttttattaaataatgtaaagatgtatatctgtatttttggatcatggattatggatatattgtttaataaagtatttttgggaagaaacatttgaaagtagatcattttgaaaacaggtatgttgatccctgtgctatgtcaaaggtgagcatatgtcatgttcagttactcaaagtcaaggatgccaagggggaccctatagacctaggaccctgagtttggttttggttgggtatttagggaggtcagcggccagtgctgtatttccagactcccagggaagatgtgtgcatgaatgggagtaccaggggctgctttataaagtagtattgaggggctgggatgtgtctcagtggtagaacacttgcctggcatgtgcaaggccctagattcatcctcagcaatgtgaaggaaagtactgggtcccctggtgtggggacctaga

SEQ ID NO: 18000 - DNA, 1221 bp, Mus musculus
tctatcttttaaaaaaatattatttatttaatatatacaagtacactgtagctgtcttcagacactccagaagagggcatcagatcccattagagagggttgtgagccaccatgtggttgctgggatttgaactcagaacttcttgaagagcagtcggtgcttttcaccgctgagccatctccccagcccctcctcttccaccttatagaaactcttgtcagtgtatttaagggtccacttagttcaggatgatcttaatatgagattttttttttttttaatttaagggatgtatatgtctacctgtgagagtggatttgtgcacttggatgcagtacatgtggaagccagaaggtggcagtggcgtcggatcccctggagcttccaagtgtggattctgggaccaaattctaggccccctgaactgctcttacctaatcagccatgttcagctcttattctgtcaagagcctatgtctgtattggacatggagcgggaggggctcctgtccctgtgggtagcctttctctggcttggctggggccttttcagctagactttcctcttggtttggcatttctctggactgtcttggtggttttgagccccttgttccttgttttttttgttgagcccattagccatagctcctcattttatcagtgtctacttagaaaggtctacgtgtaccacaggagtggactctttctgttgttacactgcctactatgagctgggcacctggttgtctgttgggaaacccagtgcagacttaatttcgcacctacctttgacagcagtattcacagcactgagctcgttcatgcaggatggctgaacaccctgaacacagccaacagaaatttccctggtgaccagggtctctgagttaggacagccagcctactcagaaaaggggttcttctgataagaagcagtatgcctttcagaatcgccaggacaggagatgtgtagagcttgagtcttagggtgacatggtaagagaacagagctgtaccatattgtctctgcagccaccactgccttagggctccaggggatgctgggaagtagaaagaagcttgatcctcctgggtggctgtggttaccaatgctgccccaagcttagaggggctcccactgggcatcagacagactagggcagtaaacagtgaagaaggcatgaaaggcctagaaaggagattcagtttgggggaaa

SEQ ID NO: 18001 - DNA, 1405 bp, Mus musculus
caccaccaatgaagacttcagggcagctgacaaatcaggctctgctctcgagccttcagtagaaagtgtgaagactggtatcaggactggctttttgaaaattgatgaatatatgcgcaacttctcagacctgaggaacgggatggacaggagcggctcgactgcagtgggcgtgatggtctcccctacacacatgtacttcatcaactgtggtgactcttgagctgttctgtgtaggaacggacaggtctgcttttctacccaggatcacaaaccttgtaatccagtggagaaggagcgcatccaaaacgcaggagacagtgtgatgatccagcgtgtgaacggctcactagcagtgtctcgggctctgggggactatgactacaagtgtgtggatggcaagggccctacagggcagcttgtttctccagagcctgaggtttatgagattgtgagagcagaagaggatgagtttgtcgtcttggcctgtgatgggatctgggatgtgatgagcaatgaggagctctgtgagtttgttaagtctaggcttgaggtgtcggacgacctggagaatgtgtgcaattgggtagtggacacttgtttacataagggaagtcgagataacatgagtgttgtattagtttgcttttcaaatgcccccaaggtctcagaggaagccgtgaagagagattcagagttgtataagcacttggaatcacgggttgaagaaatcatgcagaagtctggggaggaaggaatgcctgatcttgcccatgtgatgcgcattttgtctgcagaaaatatcccaaatttacctcccgggggaggtctcgctggcaagcgccatgttattgaagctgtttatagtagacttaatccacacaaagacaatgatgggggcgctggcgatctagaagactcattggtagccttataaccttctaaaatgcttttgattctgaaaattgggggaaacttttaatcacattttcttcaatacaaggggaaatattcttgtgaattcacactgttttgtgatatgagcagaaaccattagcatttcccaccattgcctcccatttgtgttccccgtacttaccactcttagcattgcctggactctacagtattttttgccaacctcaggcatctggttacaactgtattgaatttttggccctagaaaaacaaaatggcctacaaatgaacaaatgtgcctggggtgcgtgggaatagctagctatcctctgaaggtgcgttatgggtttgtttggggttttttaagcaacacaaaacacagcacagacgcacgtaagagtaaggactgagaaaggtccgagcttcccagctcactaaggcaggaggaagccttgttagttctgtggcctggagtttcatgtgagca

SEQ ID NO: 18002 - DNA, 1282 bp, Mus musculus
cactgaaataatttgttaatgttctgtgaaaatttttattgtgaatatgaatgagattttattactcataatatgtataaaattattttgaataattaaaattacagtttaaaggataatatccaaagtaattaatagtgacattatcatatgatcagagtggcttacaataaagattttttcttagttttatgttattctcttcaaaacttctgaatctttaaatgtgtttataaaccagtgttattcatgtttctatttattcattttacagatgagtatgtgcctttcatgagaagatttccatatttctactgaagaacagagtttctatgtctaaggaataagaagccactctatcaaggggaggggaatttaagttacatacattatgtcaacctttaatttgttgatactcaatccatagtgcatcatttggttacaactttgtatatttggaactgctgtatttattagtgtgctctgtgttattagggacaaactgtactatgctggattttctgtttgaaaattattttaaaactgttttctgcagagcttttgtccctgtcttttaccatattattgtaacttggctttctttattaatccattgttgttgctttcgttttgtcagtgtcataatgtaaagaactataagccacagctaactgctatgaataaatacaattctactaaactttttcccgtttttatggagaaagagccaaatctactgttatttttgagtttgtaagtagtaataattgtctgtgctaaagtatgaaaaagaataaatatgatttaaaattatttaagtggtacagatagaatgtgtttataaaataaatactgcataattatatattaacatgtgttttatatttatatactgagtccaaaacatatgtttccttgactatagtgtctcagtggatctctgagtttgaggtcaaggaagaatcagacaaagaaggttgactatcttgctagagattagatatttttggaaatctatgaatttcaaatacatttgtagtataatgagagagagttaatatagattgcatggttataagtctgagtcttgtcagagatcaagagattgaaaattttcatctgtagacttcgaagtcaggattttatctagagactagcattatcttgcaacaaatccattcccacccaggtctgatttttacatattttaaaatttagaagaaaacttagagaaaactccattgcttgttagcatcagtgaggtcattgaaatgtgtgacaa

SEQ ID NO: 18003 - DNA, 1632 bp, Mus musculus
attcttgtctataaaatttagattacatagattaatatagagccaaattccatcaaaaagtagtatttccatagttaaatggaaatatagctctgaattttcccactctaatgaaaacatactatatttaggcatgggtaagtcacatattaaccaatgaggccaaagattggcataaagacttgatctgccaaatgaaggggttatgtaccaaaatatctgatacagccagaaatttttaaaaaggagagagagaaaatcttttatatgactgatgatggtatttagaaatatcttgggattacgattagaaattggttctgtgtgacacacaagtatgagagtctgatttgcaataccagattgttgaggccagccagcggctcacatgtctgggttcgagcctgggaggcatcttggaatctggaagaaaagagggaacctagggggtgcaagaaaggatggaaccgccttttgtgactggcggtgaacgagtgcgcagtgccatgaaggcctcgggcacgcttcgggagtacaaggtggtggggcgctgcttgccaaccccaaaatgccacacaccaccactgtaccgtatgcgaatctttgcacccaaccatgtggtggccaagtcccgcttctggtactttgtgtcacagctgaagaagatgaagaagtcatccggggaaattgtgtactgcagacaggtgtttgagaagtcacccctgcgtgtgaagaactttggcatctggctgcgctatgactcccgcagtggcacacacaacatgtatcgggagtacagggacctgaccactgctggtgcagtcacacagtgctaccgagacatgggtgcccgacaccgtgcccgtgcccactccatccagatcatgaaggtggaagagattgcagctggcaagtgccgccggccagctgtcaagcagttccacgactccaagatcaaattcccactgccccaccgtgtgttgcggagccagcacaagccacgcttcaccaccaagaggcccaacaccttcttctagacacagagacccactgaataaaaacttgagactgtcaaaaaaaaaaaaaaaaaaaaaagaaaggatggaaccaagacattagtctgattaaggttcaattttaatattcagaacacagggttataaagaagggggaggggcccattcccaccaaatcatccttggagtccagttgcaggtgaccacgtgaatactccagaacagctaggcggcaggtagcagcagcaggagtgtcagaacgatagagtggcgggctccacacccaatgatctcctggtgataacagtcaagcctgatcagcctgagttcaggctggggcaggggggtgatgtggggggggggagggaggttacatctcctccctgttgttaatataaaaaagaaagtctgagctgaggcataaaatttatttatgctctatagttctgcctgaattcttagggtctaatgaagaaacctgtctcagtgggattccctaacttttctcatagtaaacccttattgggttaagactgtcctttctgtccaaataaacattttgcagagtagcactgaactgttggctccatcttttgtaatgctaaattagttactg

SEQ ID NO: 18004 - DNA, 1103 bp, Mus musculus
agaaagccaacattcacgtggaaactgaacaacactctaatcaatgataccttggtcaaggaagaaataaagaaagaaattgaagacattttagagtttaatgaagatgaagccacaacatatccaaacttatggaatacaatgaaagcagtcctaagaggaaaactcatagctttgagtgcctccaaaaagaaactacagagagcatacactagcagtctgacagcacacctagaagctctagaacgaaaggaagcaaattcatccaagaggagtagatggcaggaaataattaaacttagggatgaaatcaacaattggaaacaaaaacgactattcaatgaatcaaccaaaccaggagctggttctttgagaaaatcaacaagatagataaatgcttaggcagactaactagagggacagtatcctaactaacaaaatcagaaatgaaaaaggagacataacaacagagcctgaggaaatccaaaacatcatcagatcctactacaaaaggctactcaacaaaactggaaaacctggacgaaatggacaacttcctagatagataccaagtaggatcagattaacgatctttacagccctattttccctaaagaaatagaagcagtcattaatagtctcccaaccaaaaaaaagcccaggaccagatggggttagtacagagttctatcagaccttcaaagaagacctaattacaactctcctcaaactattctacaaaatagaaacagaaggtaccctacccaattcatcctatgaagccacaattactctgatacctaaaccacacatagatgcaacaaagaaagagaactacagaccaattccccttatgaatatcgatgcaaaaatactcaataaaatcctcacaaaccgaatccaagaacacatcaaaatgatcatccaacatgaccaagtaggcttcatcccagtgatgcagggatgggttaatatacagaaatccatcaacataaagcactgtataaacaaactcaaagacaaaaatcacatgatcatcttgttagatgctgtgaatgcatttgaaaaaatcccacaccccttcatgataaaagtcatgaaac

SEQ ID NO: 18005 - DNA, 1210 bp, Mus musculus
catgttatttatattctcttaggtaagtctacatgtgtatgaaatacagttaattttcatagtctcaattctgtctgaacacaaattatttaataactaaaaacttgagctattccaatcacacgtttcacagtaaagtatattagaaaaaagtttatgacataaataaatggtttttagaatatgattgtgttctttaaaaggaaatgacatctatcattccaagaaatactgtgttatgttgctacctaaatataataaccataataatcaatatattattttgatgatttaatagtttaagataaacaattgcaaataaaataaaaacaaccataaaaagcatacaataagaactagattgatgtgctcgcttcggcagcacatatactaaaattggaacgatacagagaagattagcatggcccctgcgcaaggatgacacgcaaattcgtgaagcgttccatatttttcagtttcactcaaccaataaagtttttaaaattgtaacaaagctcttaggatttacacatttatatttaaacattgatacatgaatattgactgactgttgataaagtcagagacaacttttcctgagatctcaccatggaaatctgtacacccccttgtctttcctaaaagctgaaagtggctgactaaaatgcaaagcagctgttgatgttttgaagatagtgataaacactgttctttgttagttttgggcacagcatgctaaactataacttgtattgttccaatatgtaacacagagggccaggtcatgaataatgacattacaatgggctgttgcactgttaatatttttcctttggaatgtgaaggtctgaatgagggttttgattttgaatgtttcagtgtttttgagaagccttgcttacattttatggtgtagtcattggaaatggaaaaatggcattatatatatattatatatatataaatatatatattatacgtactctccttactttatttcagttaccatccccatagaatttgacaagaattgctatgactgaaagggttttgagtcctaattcaaactttctttatgacagtattcacgattagcctgaagtgcattctgtaggtgatctctcccgtgtttctggaatgctttcttagactcttggatgtgcagcagcttatgtgtctgaaatgacttgaaggcatcacctttaagaag

SEQ ID NO: 18006 - DNA, 1274 bp, Mus musculus
aactgagtgcaaattctaaatttcagtcctgaaaagatctattcaaaactaaggaggtgattatattcgtgttgtttttacaaattaaatcttctacattaattagtttccctagccaaccaccccacaccccgtaccatccatgttagctctttatgagtttcatgaatcaggttctccatcagggcagcacaagtccagaaaaaagacctggaaaactccagaattcacagaagactctagaattcacagaatttacattgctgtgtctggtggcaatctaggtgtggctcatgatttcagcacctgggagctcttataagctgaaattcaagaaggaggagggatgagctaggagttagattcacaagctccttcaatattcaaagattagaggggtcagtctcaggaaactgagggctagacctacttgtctcaggaacttacttaccaaaaatcattttgaaaaaatatagccaaaattcaggtatttgggaagccaacacttccatcaagcaagggaacagcacaagaaagacagggaaagccacaggatacctccgatgagaatattcttccccactttctgggcacatcttaaatactgcctccattgtgatcaagggtaataggagtcagattttctacaatcccatgtgtagaagtatggcaccctgtggaataggataagctaatgcaatcctaagaagcttagcgatagaaccgtgaaataagaacaagaaaggaaataagaagtctgcacaggtagaagagtatatggtcccttagggagaagaaacaaaaaaattccaaacatattgtctgataaataggacagtagagaattggtctccataatgattagtgttcatcaaaaggacattttctccagtttactcagtttagatatattcctttcacactttttaaacaaacttgcaagagaaaattgctaaagggaaccaataattttggcactcggatatacatatttagaaagaatacctccatttggaataaagtgaacacactactgtaatcttccatttgtaaattcattcatattataagtgttggtttacagcttttagaatatattttcatgatatgtgcttgccacagcttataattatttcaaaatcactttcaggtgtacctgctgtaattttgtacataattaaatctatcttaaaatttcttatattttaattttcttaactgcagaaaataaaaatataaaactctttcttaaccatggaaaaattgtgtacatt

SEQ ID NO: 18007 - DNA, 1175 bp, Mus musculus
tagatcaaaagttcagaaaattgtatttaaaatattatggttaaaagaagcattttgttaaagttgtgcacataaggtaattttaccgtggcacttatcaaaattatagtgtttgttctttcaaactagctcacataatgatattgtcagcatgaatgcctctatgccccctgtaatgagaaagaagagttagaaggaagacattatctgggtaattatggtctactgaaagtaatatatgcagaacaagaggaagtgtttaaccattatatccttgtcaagttgttttatgtcatgagccaataataggctacgagctgaagttagcagccacaaagtcaaatacaggtacttcatatatgtggcttgttacaatgtgcttcctttcttacaaggtctaatgactctcagcactattggctccctatagactagacagtggcaaggtgatacaaagacatgtttgaattgtacaacaactttgacatttttgtatttaaatttcaggtatattataattgttcctgtatagaaaggaaaatcacttctactgcagaaagtactgattttgaagctaaagctggaaaatgtagaactcggtgttcaaacttgcccatatttcttggcattttcttcattacagttatctttacctttatggcaggcactcctataactgtgtctatattaaggtaagcactgcacttgagaacttgcatttccaagaaaagaatgttgtaaacttagaggttcaagtaggcttttattgatttgaacaatacctgtctggggcatcttggactctcagactccatagaagaccaggtgcctgaggtttaaagaagctaatgcaggaaacatcttctgttgcccaggtcgcaaatgttgggcattagtcccttggtgggtttcacacatgaccagtgtgagctgcaaatttgataagttgtgtggaagtcttctggcataatcacagtctgttttctaaattgaagagtgggtgctggcaaatgaactcgctacaaaatgctaagaagctagctgccatctccgaaatagatggaggtctttattgttgttttttttccatttaatgctgttctacaagagtctttaccttccatctggaggtttaccgcctgttttcaaacaaacactaggctttctctttcttt

SEQ ID NO: 18008 - DNA, 1176 bp, Mus musculus
aaggttaagtaattttctttctttctgttttttgtgttttgttttttttttttttttcttcctcaacattggtaaaaatgcggtttgtggtgaggaaaaaaaaagaggaaattctatcttcatagacatgttccttaaaagtgcacacactggtcagtgttagccttaatgagctcttttgtattatttttaatcgtcttgcccattagatgcaattgcacgcatcggagtcaagcagaatttctgttttagcactgtgcgacagctctgtgatcccatctagataccgtcaactagaaattgccatggtaacttcttagttaaggctgtgcctggtgtaaagttcagcagtcccctgaacagtagtgtagaaatatgatgaagtctgtggtgattgaaatggctgtctgctttctgtttgtcactagagatggtagttacaacactacagaagtaaaaactttcccatagattgtatttgcatttcgttagaagcaccttggtcttgatgtcttgccaaaatgtggccaaatattttgaaacttccacatttaagacttaaggaaagaattactagtgtagctcagctaattggatcctcctatcacacaattaaatgtggccgttttagtagacacctttgcctaattttgaataacttcattctctgattttcagcgtagtaatggggcgttctaagactttcaggaaaagatagactagtaagaatagaatggagaaggaaaatcatcttaggatagcctcacctaggccattcactattaatttaacatcatccaatcttttaaaatgtatatgtgtgtgcaaataatcccagtgtggcattgaccttgcttctactcacgcactcacacccagtcttcactcacactcatcactcatccatcagtctaccacatgcaaatgcatagctgcacatacatatttaaaatgcagcttagtgaaacaactggctgagcctatgcatataaatatgtctagttataacatatgttgggtatctctgctattaatagagatggagctgtagaatctatgtcttgtattacttaattttatagataatgtatttaattaagcctcctttgttatgttcttattaatatattttatgattctggttcaaaaggttctagttattgtttgtttatggct

SEQ ID NO: 18009 - DNA, 1161 bp, Mus musculus
cagcctcctgtgaccaagggtatactcttggagactgccttcagacttcaatggaacaccagatttctgggtctctaccagctacccagtaaaagtttgggacttgttaatctctatagtgaaggaggtcatttcttagaccatattttacttacatactccacctccccagaccactttggttcccgcttttgatatactaatatatcatattaattcatcaatgagtatgttttattctgattccaaaatatatccaacagtcatctattttgttctgtttctactgccattaaattctaaaagtcacaaatctctaaatgatggtaatagcctctgctacaacgaaatatgaaaggtttgacaaagctatcagtgttaaaaatttggtttccagattgttgctagtgggatatgatgaaagacttgggagccagtagacatgacacatggttaggaggaggctggtgtttctcctcactgtgaagcaaggactgattttgcactctttcctatgagcaccggtctcagcacaaggttataggcaatgaggccatccatggacagaaatctcagaaactgtgaaacaaaataaacattgtttatcataacataatcatctctattatttcatcaaagtgacatgtaattgactaacacagatttctttggggttcccacacttccactaatgatccacaatttatttttgagataacattcaaaattactctttaaaaattgtttgtattgtatttgttaagaaactgtttacatggggggtgggatgggtggagaggtggctcagcagttaagagcaccggctgcttgtccagaggtcttcagttcacttcccagcaaccacatggtgttgggatccgatgcattcctctggtgtgtctgaagagagtgacagtgtactcacatatataaaataagtaaatcttattttaaaaaaagaaaaaagaaagaaaccgtgtgtatgtgtgtgtgtgtgtttgtgtgtgtgtatgtgtgtgcaatatgccacggtatgtaggtggaagtcaaggatttagggtgtcaattctttccttccattatggattccaggatggagctgaagtaccaggcttctgtgaaaaggactttgccccctaggccatcttggtgtaccaaaat

SEQ ID NO: 18010 - DNA, 1138 bp, Mus musculus
ccagtagacagtgcctggcccctttcaagggaacatgttagggtgatcactgacatcttgacactggcaattttcacagtgggtcattgggtatcattaactgttcagaagacagcagatgttaaaaaattctatatatgcaagagaaattcttaaagataatgtgaaatgatgtctattagatgtgcttccctggcttattatcatcactagaggaaattctaagagaagttgagtcccattggaaggcctgcatgaaggaatgaaatgatgagtagaaaatgggtaaataggactgaatgcctaatagacaaagtacgaacatattgtagaatcaaatccctgctaggatacttaatagtatacactgaatgactaaattcaaaaaagccacctgcagtccttactatttgttatgagggtgaaatctatagagacatcagagctgtttgttgtattgtaaatatgctttctgtggattcttccaacatgtgccgtattttacaacagagaaaaataaaactttattcaaccaactgatttcatccaccataaacttcagtttcagtccacagaacccttggtgctcctaaaagattctcctggtctccatcgtcgtggtctgcagtctctccaggacaaaagtagatatctctactcttccactcttccctctgctttctttctacttcctgctttttccatacaattcctcaacttcctaccacagaaaccaaagtttcctcaacatcagaatttacctttcctgtttctctcctgttgtaatgataaagcagtgcctgcatcaatctaagataaaccattctattccttccgagggattttattctctctcctccttatgcaacatctgtcttattagtgaacccctgggtttagttggcatttaaacccagacacatttaaacacactctctcttttttaacccacatgccaaagtcataaaattatttttctaataatatcaatccaatatgtttttcatgactaaatctcttgaagacatttccccaagtctctatctttactttctcactccctgattaatctgttagaatttcaaatatttttatctcagtttcccttagatcaaagactgaggaaaattattgatgt

SEQ ID NO: 18011 - DNA, 2064 bp, Mus musculus
ggtgaggaactcctgaagttagcccagaagtgcacaggaggggaagacagcaagggagaagccatgcccgccttgcgcgctaaacagctggacacgggactcgcgcgttcctctcgtctgtataaaactagaagtaggtactatcagccatatgagatcccagcggttaatggcaggaggcgaaggcggatgcccagctcaggagacaagtgcaccaaacccttaccttatgaaccttataaggccctccatgggcccttgcctctatgtcttcttaaaggtaagagggctcactccaaatctctggactacctcaatctagataaaatgaacatcaaggagccagctgacacggaagtgctacagtaccagcttcagcacctgaccctccgaggggaccgagtgtttgctagaaacaatacatgagtggcgtgggcagagtttaaaccactttaggtcagcctatgctcggctagagaaaaatctactgtcgtactctgtacatgacccttcacgttagagatggttatatcagctaagtgttcctggaacataaaaattgtttggatcaagttttggatacaggaatgaaatcacaggtacttggggcggggcggggggatatcattctagagcacgcaattgcaaagaaaaccgaatgttgactgttagtttgcatagctttttagctaggaaaaggctttggtgcagtaatttcacctttatgagtctgacacccaaattgggaatgttacctgcttggttgttgctaacttggtatgattcattagaaatttataccgaagtacccagtgcttcttggatctctgtattttactataaaatgtatgtaatgatttgtcttatgaaatttaaagcttgaacacggctgaactggaccactttttatttttaaatattgagtttaaatattttataactggttttgcactgaaaacaattaacatttcagataattaagagaataatctttcttcacttgcctcaataatgatattgagcaatggatttttttttttaatttccgcatggaaagttactgatctttatggctgtaaaatattcctttctagcattattaaagtgtgtcttaataaaattaaatttgggatacaaagtatttattttacgatgggtagcgggtggggcgcttttcagaatgtttccaatatgaagttttcgtcagttggaaacatttccttagtgcttattatcaatttaaattccacatggaacttgaagacagggaggattctcagcactgggttgtcagtatagtgctgcttgcatctttacttcttgtaagtgactgcagctctagcagaggagctcctgattttgactatcaaaggcttaaactgagtatgaagtgataccgctcagcccagggttgggtctttccaggctcagttctctgcagcgaggcactcatcaaaactttagttcgggattagcgtaggagcccaacatactcctacagttttaatgggctaatcctggattacctaagagtttacgtccatcacactggtttgatttgttgctaaagaaataattccttgcctttagtaacagaagcagctcaactattcttgaccataaatgtatgtaactttccttttgtaaacatttctatttcttttactcagtcttaaaggtgcaatttattactgatttggcatttctggctatatagaactacgtagtttatgttttctttgggggcactgtgagtttctaaggggttagcagtcttgcttttaaaaataagaacactttttaattggcggatgggccattcctggaacaatcgtgatttttccctctgtccagaatgaatggcaagctttattagagcagaataagtcttagaaacctcagaaactcttcatagagagacaaccgtgttggcaacatgtaggaaagagctttggagatgctggcttccatcttactgaatcgattagagttttcaatggctggaaagtttctgctgttgtctattttaaagtaaactgcacctttgtaacatattgatgaatg

SEQ ID NO: 18012 - DNA, 1723 bp, Mus musculus
ttacttttctgtatttgtgttgacttgtaaaacattagtgtcatattgaaagcctgcaatgttttatcataactgtagcgcatacagccacatcgcccaccagcgttctcttaaccctgttgattggtgcaaatcccaacggcactggttctttcttctgtttgtatagcagccggcggaccatctcaggcaatggctccccatacctcatctcggaagaagagcataaatagcaaaaccgaggggcatgaacccaagaaaagcactgggaagaaaagatgagcacacaccagaaccgaaagtttccatgcttataaagggacttgttgcttagcaaaaagaatgtctaagaaaccttgactgaagctggtcagagccagtgattcatgtgttatcatgctttactttatacatctgtgtatttctttaaacacctcgaaagctagaggacctcctgtttttattcaaacaaggagctctggcaggatctagaaatgttcaaaagaatgtctgtccgctttgtgtaaggaaattcatgacaactgctattgctgtcactgtgatgattcccatgtgcctgtggcagagacaaaggacacaggaacccggctgactggtaccaaagtgcactctcttcaggtgcctctacacacatgcatttctacagaattacacttagcgagtgggattggacaggcaaagatcatgtgttgatgactttttttaaaaagtacatttccaaagagatctcgttgaccatttacattacaatgtttttgtcattgctacagtaacatatgctgcaatatttattgactggattatatagaccatgaattattttttcaatttgtgctttgaattttttattgtgaattatttaaaatattacaaatgcaggtgggagaactatacctttatacacataaatttacaagttaatctgtagaaaatattttctttatacatatctttaccatcaagaaaaatttcttggttcaccaagaaaaggtttttttttttttttgtattagcaagagaggcaattttttagagtttctttttatgaactgtaactgctaaatttgtaaatcttacacgtgattttctgagtttttcttgagacctatggactcaggtctatgatgcgagttctgctgttcataagtgtcatccagggtatagttcttgtgtttccattcttatgtccagtgtatttgatgatttcaccaagaaaactcaaaagattgaacatttgtagtaagtaaatggtgtttacaaatgatgagatttggaagaaagatggagatgactattgtaatttcgtctaatatttaaataaaaggacatcattctccttggtgctctttctccctgatgcacaagtaattgtttgaaatattttaaattactcacaaactaaacaacctgctaaataaaaatctcaaacattggctataatgcaacttaaggtagtaagctgtagcttcaagcttatgtttagaagtactggacccttattgtatagttagtgtaattcttcaaaagagacttctaaccttaaataatcttacatgaactgacttctagagaataggcgtattatattatcttggttgtttaaaaagggatgagatacagaagctccaaatatatacaaataaataagtacatatatacttcacttgaatgtaaatggattatatggtggtaaatcttgtaa

SEQ ID NO: 18013 - DNA, 1188 bp, Mus musculus
aggatggccgcttccagtctgagtgggtcgggccttgtgtcatcgactacattacagaaagtggatgtgctgtcctcagagataacacgggaaccagactcaaacgacctatcaaaatgtcccaccttaggccctatgtgagagagtccagtgagcagggtaagtatctgctacctctctagggtgttagtttccacaagaaagattagactttcaacctaccttccttccttccttccttccttccttccttcggttaaaatcctctccatctaagttttataaaacttgatggtcttacttctctccaggagtctgattagaatgtactttcataaactcatttttctttttagttttttgttgaaaatagatttttatacaatatattctgattatctttttttcatccaatatattctgattacctttttcccttctctaactacctcagatcctccccacccccccccccaccctcatccactctttttctttctctttcattaggaaacaagcatgtaagattgattaatgagtgattgattgattgatgttgttatataatataaagcaaacaatgcaggatttttgtcttgaattctactgtgcttttcataactgctatgaaaaatgctgaacctgtttcacataaggaacgattccatcttgagttttgcatactatcctcttacctgctgcctcatttttatgtgaaaaagtagcagctcagatcattatcgccaaagagaagcatgttgtccagaatctagctgtgaaataactaagggaactttgaaactgtgtttccttttaatgttgcttcataaagtcataaattaaggtggaggatggagaatactcagaaagctatagaattataccattgcattccatttatagtcccccaagctatgccaaagagcaccctggctatgccagagagcaccctgactatgccagagagcaccctgactatgccagagagcaccttgactatgccagagagcaccctatgccagagagcaccctgactatgccagagagcaccctgactatgccagagagcaccttgactatgccagagagcaccctgactaagccagagagcaccctgactatgccagagagcaccctgactatgccagagagcaccctgactataccagagagcaccctgactatgcc

SEQ ID NO: 18014 - DNA, 1150 bp, Mus musculus
ctgattgggtctcaaaactaaagcagataaatatggtaaatatggaaaggggactttagggtaggagagagggttaaagggggtgggaggaacatgagcagagctttggggcaagaggagcctgaatgtgtaggatccctgtatgaatatgtctgaggagacattcaatagtcagttttttaaaacaggagaaatatgaaagaaaaagtaaacacaaataagtcacaaagtaccaaatccaactgccctgaaaaaaaaaacaacttatgaatttccagtttttaaaagaatctcaagtcagtggttataggtccccattgctttgctcagtgtctagaactgtgccccacagagtcaggatgcaatgaacagctgccgttggctggagttgctttggtgggaattaaggtcactttcgtttgagtcacatgctatgtctaatttttctgtcattctgtaatagatgtaagtacagcctcatcccaataacaaatgcctttgcatttggcagcactttgacatgcctcatgatattgtggcttctgaagatgggactgtgtacattggcgacgcacacacaaacaccgtgtggaagttcaccctcactgaaagcaggctgggtttgtttttcatttgttcatttttatagtacttctgactgtaatttccatctgttttattgtttaaaatgggaaacaaaaacatttgcttttgaataggaaacagggatataaggggtttgggtttggggttcagcacgtgtctggcatcttcagctttctattccttgtactacaaaggacgagaaatgaagagcgatgagaggaggaggaggaggaagggatggggtccttatttggtatccaattcagggattcaataaggtttgaaatgtggagagagaggggttttgttttttggtttgttttttttttttttgttttggtttggttttttcttttttcattttcctggcagtcattgccttgtttccagagacactccacaggaaatttttgatgtgtgaagtaatgtctgttacattaaaagccagtgttaattccagcttggttacagaaggaagagacagctttgacaaagcagaggttggcttgttgccacgagctatcaccccatgtggctctctgta

SEQ ID NO: 18015 - DNA, 1562 bp, Mus musculus
cctctccccctgcccacttacttgaactatgtgcttttcaaatcttccagctaaaggtgaactattgatttgctatgctgtgcttacatgtgctctattttagggaaaagacatatagtcttttctccatgcagaaattattctttatctcaaaaatggggcataagtaagaacatgtgtaggactatgatgtttcatgtcaaaaccgacactggatctgttatagaagttctcccccaaaataactgagtaagatacttgcctcctgcccacttcatttttctcttcctttctctccttctctcctccatacttttatttcctttcctgtctttacattctttgcatcctgggaaataaacagtggaaataacatttcaattgttaaagaaattataatcttaagaatgtaaattcatggctagctgccatcttgcgtccccgcgtgtgtgcgccttctctcagctggtctgcccgagaccccctgagcgtgaaccttagttccccgcgcggcgccatttccactccgacaagatgaaagaaacgatcatgaaccaggagaaactcgccaaactgcaggcacaagtgcgcattggtgggaaaggaactgctcgtaggaagaagaaggtggttcacagaacggccacagcagacgataagaaactgcagttctccttaaagaagttaggggtgaacaacatctctggtattgaagaggtgaacatgtttacaaaccaaggaacagtgatccattttaacaaccctaaagttcaggcatccctggcagcaaacaccttcaccattacgggccacgctgagacaaagcagctgacagaaatgcttcccagcatcctcaaccagctcggtgcagacagcctgactagtttaaggagactggctgaagctctgcccaaacaatctgtggatggaaaagcaccccttgctactggagaggatgatgatgatgaagttccagatcttgtggagaattttgatgaggcttctaagaatgaggcaaactgaattgaagcaacttctgaagaaggtgatacttgcagaaattacaggagctgctattttatatcatgactgctttttaaaatttttttgtttattatggatctgataaaatctagatctctaatatttttaagcccaagcccccggacactgcagctcttttcagttttcgctatacctaattcattctttgcggcaaataaagctgaagaagcctgggaataaagtttggaaagggttaataaaaaaaaaaaaaaaaagaatgtaaattcatgagacaaagatgttcccgtttttctgatttttaagttgagtagctgataagagcaatgaacacagcacggatcagatattaagagcagttttctatattttatgcattggcgtacataatcaccatgtattttgtttttgctttagctttatatcaagagaatcgggctgcccaatttgatatatccatttaactcaataacatcgttattccagaaggacttgaactggattataaccaaagagtaaaaccaacatgtttttttttc

SEQ ID NO: 18016 - DNA, 1099 bp, Mus musculus
ttacaatgttgatcctgccaatccatgagcatgggagatctttccatcttctgagatcttctttaatttctttcttcagagacttgaagtttttatcatacagatctttcacttccttagttagagtcactctgagatattttatattatttgtgactattgagaagggtgttgtttccctaatttctttctcagcctgtttattctttgtgtagagaaaggccattgacttgtttgagttaattttatatccagctacttcaccgaagctgtttatcaggtttaggagttctctggtggaatttttagggtcacttatatatactatcatatcatctgcaaaaagtgatattttgacttcctcctttccaatttgtatcctcttgatctccttttgttgccgaattgctctggctaatacttcaagtactatgttgaaaaggtagggagaaagtgggcagccttgtctagtccctgattttagtgggattgcttccagcttctctccatttactttgatgttggctcctggtttgctgtagactgcttttatcatgtttaggtatgggccttgaattcctgatctttccagaacttttatcatgaatgggtgttggatcttgtcaaatgctttttctgcatctaacgagatgatcatgtggtttttgtctttgagtttgtttatatagtggattacattgatggattttcgtatattaaaccatccctgcatccctggaataaaacctacttggtcaggatggatgattgctttaatgtgttcttggattcggttagcgagaattttattgaggatttttgcatcgatattcataagagaaattggtctgaagttctctatctttgttggatctttctgtggtttaggtatcagagtagtagtggcttcataaaatgagttgggtagagtactttctacttctatcttgtgaaaaagtttgtgcagaactggaattagatcttctttgaaggtctgatagaactctgcactaaacccgtctggtcctgggctttttttggctgggagactatttataactgcttctatttctttaggggatatgggactgtttagaag

SEQ ID NO: 18017 - DNA, 1230 bp, Mus musculus
tggaacaacattatgagctaaccagtaccccggagctcttgactctagctgcatatatatcaaaagatggcctagtcggccatcactggaaagagaggcccattggacttgcaaactttatatgccccagtacaggggaataccagggccaaaaagggggagtgggtgggcaggggagtgggggtgggtggatatgggggacttttggtatagcattggaaatgtaaatgagttaaatacctaataaaaaatggaaaaaaaaaaaaaaaaaaaaaaaaaaaaagaaaagcaccggtatgtgttttagattcatttccctgttttagggaaatgacaggcagtagtttcagttctgatggcaaaacaaataaaaacatgtttctaaaagttgtatcttgaaacactggtgttcaacagctagcagctaaagtaattcaacccatgcattgctagtgtcacagcctttggttatgtctagtagctgtttctgaagtattttcatttatcttttgtcaaatttaaccctgattgaattctctcctttcctcaaggagacacttatgttcaaagtgttgattctttgccttaggtgcatagagagtagacagtttggagatggaaaggttagcagtgacttagccatatgttctgtgttggaatttgtgctagcagtttgagcactagctctgcgtgcctatgaactgaatgctgcttgtcccattccattttatgtcatggagaaataattccacttggtaacacaaaggctaagttatgttattttctgtacagaaattaaattttacttttagccttttgtaaactttttttttttccaagccggtatcagctactcaaaacaacaattctcagatattcatcattagacaactggagtttttgctggttttgtagcctactaaaactgctgaggctgttgaacattccacattcaaaagttttgtagggtggtggataatggggaagcttcaatgtttattttaaaataaataaaataagttcttgactttaaaaaaaaaaagaaaaataaaagtttccaggagatgttaattggctaagacctcaccttaccttatgctcaccacaggaggacttaagcctttgttagatgctatcaagtgagattcaaattaactggtgagaagcaaaaggatttgcagaaagtagagaaagcttctgtaatcaactgttatcaattgtaatcaatga

SEQ ID NO: 18018 - DNA, 1169 bp, Mus musculus
atgtagttgaggtcaatgaaggggtcgttgatggcaacaatctccactttgccactgcagatggcagccctggtgaccaggcgcccaatacggccaaatctgttcacaccgaccttcaccattttgtctacgggttgaggctggcactgcacaagaagatgcggctgtctctggaacagggaggagcagagagcctgcatcatcatcatccctgcatccactggtgctaccaaggctgtgggcaaggtcatcccagagctgaacgggaagctcactggtatgccttccgtgttcctacccccaatgtgtccgtagtggatctgacatgccacctggagaaacctgccaagtatgatgacatcaagaaggtggtgaagcaggcatctgagggcccactgaagggcatcttgggctacactgaggaccaggttgtctcctgcgacttcaacagcaactcccactcttccaccttcgatgccgggactggcattgctctcaatgacaactttgtcaagttcatttcctggtatgacattgaatatggctacagcaacagggtggtggacctcatggcccacatggcctccaaggagtaagaaaccctggaccacccaccccagcaaggacactgagcaagagagaggccctatcccaactcggcccccaacactgagcatctccctcacaatttccatcccagacccccataataacaggaggggcctagggagccctccctactctattgaataccatcaataaagttcgctgcacccaaaaaaaaaaaaaaaagaaaagtgtatttattacctagaacagtcagactcatttgctgaagtagtactacaaaacagaaagtggttaggaatgttcttggaacacagagggctctgcctagcctttggagaacaacgttgtttctgcacaatcatctcaggcattatcagaaatagcctggccatggtacagcagagactagagaaaagaggtaaacttagacaacaaaatcaaaactgctaggaatcattcttttcctggtccccctggataactatgctaaatatcatcatagaaaggaccagtcttgctcctgctaactgaactcatttgtggaccctatgtaattaatgcacgtttactaaggagtgaatttccactggccaactgat

SEQ ID NO: 18019 - DNA, 1116 bp, Mus musculus
aatggaggaactagagaaagtaaccaaggagctaaagggatctgcaaccctataggtggaacaatattatgaactaaccagtaccccggagctctggactctagatgcatatgtatcaaaagatggccatcactggaaagagaggcccattggacacacaaactttatatgccccagtacaggggaacgccacggccaaaaaaaatgggaatgggtgggtagggaagtggggggagggtatgggggacttttgggatagcattggaaatgtaattgagaaaaatacgtagtaaaatatattaaaattttaaaaaaaggattgcaaaatttaaaaagcatttttcataatctgtaaggtttgaatgtaaataatacagaatatttaaatagaccaattagttattaattattaaatatcaacaattggtgaaagatttacatgatctgaagagaaaccagagtatttttttaccctactaatgatgtgttgttgccatggtaatcctgctcagtatgagaggaaccgcaggttcagacatttgctgtatgtgcttggctgaggagccaatggggcgaagctaccatctgtgggattatgactaagcgcctctaagtcagaatcctgcccaggcagaacaatatggcaccacagaaggagccttggttggcccctgatagcagggtccctgtctgtccctgctctgcggggtccccgcattgtcctcgtgctcggcattgggactggggtccgtgcagagagccattcgtcttggggaaaaaaaaaaaacaaaaacaaaaaacaaaaccacaattggatgggctaggtaataacttggtcgtcaaaatgcagtttccttgcaagcatttcacacatatacatgtattttgcgtttctgtgtagatctgtggatgtacatgcatgctttaggcaagggcaaggataatttcattttaggaaagatttctgcaattaatatgcttcacctgttatcatatatgtataacaatcaataagtattagcccaagcttttgagaagatctctgcaaaacaattaagatcttctttcttcttttgatcctatatagacaagtagatgacttcttaatttttattt

SEQ ID NO: 18020 - DNA, 1181 bp, Mus musculus
atatgagttcctcagttttagtgtctccagttttagaaataatgaatactcactttgtcccaccacacaagtgtgtttgtgtgtgtgtgtgtgtgtgtgtgtgtgtgtgtgtgtgtgtggtatttaatgtctttctcaattgctttttatgttatttttgagacagaatctattcataaacctaaatttcagaacttggctaatccatttggccagaaagccttatggatcttcttgcctatatttccacagaattgagcttagaaacattacccatcattggtagattttgtttcagtgtgcaggtttcaaactcagaactcgaataagttgttttcagagtccctgactttcttcattagtaatgttatatcagtagtaatttaaaattaagtatgagtaagagccatggtaatcttgggttatgttagactgtgtcctaggcagagatcagcccagatacccttacccttacctgcaaaggagatacatcactgctaaggctcatcacaatacaagaagcatcacagaaagaggtagaagtggggttctcattattatatctctgtctctgtctgtgtctgtgtctgtgtctgtctctctctctctctctctctctctctctctctctctctctcttctctctttctctctctccaggtttgttagtcacatgcaggctatagcaaacatgttagggtctcatggcaaatctgggtgtctgttcactccttcagtcttgtttagcaccatctcttctcttttccactgagtattccaggcctgaaagatttttagataattttctgtcttgacctctcacctcaacctgagtgtgatgaggggattatacacacacacgcacacacacacagaccaatatcccggctttaccttccatgttattgaatctgaccaatactatctatacctcattttcttttgcaaaaacaagagctttagtaataattattttaactatgctgcagtcagttccattattttaagggaattatggatcataattgtgtatcagagaccttttattaagttttgcaaaagtatgattaatataaaaaattagattattctgccttatttaacagcatcactacattttgtgtattagcactattcttattgaaaaccatcattagttcaagtttgatgccaaatcataa

SEQ ID NO: 18021 - DNA, 2070 bp, Mus musculus
ctcatggaatactgttgaacctacagcactgtcttgattcttttgtgtgtgttctttgctttgtaattttctgttatcactatatctacttgtaaatctttttttttttaattctgctacatttaatgtcgaagagctatatcctgaagtcattttactgtttagaacatttcctagccatgcagtcctaggactggtttttacagagtatctgttgagtactttttacccctgtgctttaaagcacttccagtgcttcagtggcttttagtgatccaccaattgctgaagaggctatgctaccaagagctaagtggacaacacactccttctctgtccgactgctttggtcatttacagcatctcacaattgtagatttcagacatttggattggggcttttggggtccatgttgggaggcaaagtttcctggaaattccatggcagcagcttctctagggtcttgattttaaatccaaagacttgaaccacatcccctgctgcacatgaatgtttgcttattttcattttctcattgtctcctcccatctggttctgttgtaaccatggatgtctgtaggaagaacagcctagagaaagcactgggaaaccagggttgtcagtcccatgggtctgtttccctcagtggaaggaagtgaaggatgcctgatgactagtatgctggagtgctgtgctcagacagcctgatgagcctctgctcactgtgaaggaccagcctccacctcaatctctctcacccaccccatgttctgagcaatgtttagaccctaatactggcctttgtctctcagtgagtagaacttatgccgattcatatccttcctctctgggccctcgtcctaagttctgtttttcagtcaatagagttcatgtttattgtaaaggtcacaggtgctttactaccttgcaagggactttagatgtagccggccctgaagctttgttataagagttgtcacacagagacttttccccagagttctactatgtttaaatgtgtggaaaaattaaaacataggatcagagtccagaagtcttgatccagtctgaccaagtctggctataccaagttttcattcttatctatcctgggtccacttttcctgccagtggcaatacctgcagaaacgcctcaacaaatgttggcatttttagaagagttttgcccattagtattgctctttcatagttgagaactgctgacatactatcaatgtagtagaatataaaacttgaaaacacagacattgaaggaatcataggtatttttgctttatgctctctggcaggattgttctgtaagcagacgaataaatagctgtgtccctcacaaagctggaatgaaccaaagtgaaaaggacggttcccaggcagcatctgtcagtatgtcagagtgctagtgcttccttctaaacaggatgaccaagtcattccagttcatcttttccatcatcctacctgcctagaactcatgtgtaactgtgatatagctactttcccaggtatattggcaggtgtgtgtgtgtgtgtgtgtgatctcagaacacacaggtaatgtgatgtgacctatgacaactggtaatggtggattcatttacattgtttacacttctatgaccaggccttaggggaaggtcagttttttaaaaaccaagtagtgtcttcctacctgtccccaagtacaaggtaaaacagaaggctgttggcttcagctttcttttcttttttgctcagtaatactgtcaagcaggagtttgtttgcaaatgaaagctgtgtaagcatttttgtttatttcaaataaaatatatttgtattatttgtcattcatactatctatccatgccacactgtcttctgtaccaggtagcccaatagaaatacacctgttttgttctaaaaaaaaaaaaaaaaactacttttaaagttaaatacattttgatcatattcttcccctccccaagtttttccagatcctctcccctccctatgcacccaactttaagaccttactcaaaaaacaaacaaaagcccaataaaacaacaaaaa

SEQ ID NO: 18022 - DNA, 1567 bp, Mus musculus
actccctgcagcactgacactcacattcactgggggagggagcactcttccctctggcacagtgtttctcatatcttgaaatgtatatttttgtactgaatagcagaagtaaatgagatttaggcaacatttttatttctctttaaggtattttcttccttttgttaatattatactaggtttcaaaacaaaaacttacaaaatgtgccagtcagcactgtttaaattagtaagtgctttagaaagtagggataaactggtatgatggcagatatctgtaatcccagcactagggaggtgtaggcaggagatcatgagttgaaggtcatagaaaattagacaccagcctgtgcttctaaagccctatgttttctaaaaagaattaaagtaggtatctcaaggtgaaattaattaaaatagtgaatgacagctgaatcatgaatgaatctttgtttactgactatataatggtcataatttgataagttctttgtattttattatttagtgtataaagtcttagaacacaaaatgctttcttacattttagaaaaaaatgtattacaagctgatgtggtgacacaggcctgactataatcccaaagtttacaaggctgaggaggaggatcacatgttcagggtcagcataaacaccacatgttacgtgagaccctgtattaggaaacaatgaggtaggggactgttgtattataagatggctgtatgtgaagaatgatgtaacctaattatcagggaactgaacttgaaagtgactcataagttagtgtggcttctcatgaaaacctcattccagatttcatgctacttacacatcagtcctcctccctgctaccgcctgcacctttacatactgttagcaatcgagggttcctttgttcttccttttgaaactagattctaatgctagtagttcagggggtagtgaagtgctacacagtcatgcctttagagacaggcagcagctaagtgttcccctctccttgtgggagccaagcgagttcattttcccattagatgccatctcatcaggaagctagaatgacactgaaacaactcagtaatggagagtttccatgtcccactagtactcaggagcctttaagagaccaaaggtagcctgatcaggggctctcctttcctcaatagtgcttaagattattgtgctgtgtgctttctgtccctggtaatgtcttggcagcatttcccatttcctccctggtatagtttgtaaaaatagatttctcaatgtaattctgttaagaaataaaaatgtttgacttgtatatgtcactaattttctctagtacactaaaatagattgttaatggactcaccattggaattgtaatatttatgtgcagttttgaaaattgtttcaaagcatcacttgttgatgaataaatatataataaaagggttctctgatgaagtgtttaggaaacatctaggttagaaggtttaaaggtgcatttatttctggtagttatatgaatttattcaggatgcccacaacttccatatgtctggcagcagagtgtttcctccc

SEQ ID NO: 18023 - DNA, 1322 bp, Mus musculus
attcaagaaaatggatattggaccagcaaaatggctcagtgggtaaaagttcttgttgcacaagctgacaacctgagtttgatccctggaacccacactggaaggagaaaatagacttccaaaggttgtcctttagcccccaagtacatgctgtgacacacacacacacacattgcacttgcacatatgtcatgcatgtatacatcacatgcatacatgatgacactgcagttttaagagatgatggataataatgcacagtacattctcatctagagaatgttgcatctggcattctggatttaaaggtgttctgaaataatagtttttcttttgtctgacagcttttcccagtaatgtttgagagcacctgcagccctttgctcctcactgtcaacttcatgtacctgtgggggtggtactgacactctacaaagtcattcccaagtggtgactgaatggaaccacaggttacaacataaacccagcattgacttgcttttgtggtagctctgacttctagaagggctgcaatctgggatttactgagcctctgagcaaagctgtctgccaggctttgccatttctgctcctgcagtacgttggcttgtgcctctctgtgccacttccgggattctcatagtcagccaattagcaaagctttcacctttacattttgtcaacttctggatcatcttcaaattttgggagactctgtggctttgttgattattgtttcagtgtcagtccccaaatcagtggctgtagtttcctaacagtatcataaagaatcaaataaacttgctactcttttgtcttgatattctagctagaccaaaggccagccatcttaatagagtgagcttttcctttatatattctaatatatgaggtaatttgagagtaatttttatttgcgttttccataaagtgacctatacagtgtagagttacctgtacaatactgttaagtgcttggctgatattttgctggtatatatcccattttaaaaaacagttgcttttttgattcaagttatattactagtctacaatgatgaccaaaaagctctttacaagtttttaaacttttcaaattggcaggtaaggaaatatgtatctagaagagtaagctcagctgagcaaaatatactttattttctactgatatgtcaggagacccattatagtgaattaagcgagaagtactaatcctagcacgggcatcactgtgggacagtccaggtggcagctatgctgacacaggcagaacagggcccagctagtttcctagaccctcaggtgacttctgaccccattat

SEQ ID NO: 18024 - DNA, 1117 bp, Mus musculus
gccctagcaggcgttgacttgagttcatgctctagctcatgcagcacttaacctggtaatcctcctgcctaaccttcacatcagctgcgatacaggccagagcccctagggtgtgctctcactaataacaccatcttctatttgaataggctttaaactacaaccatgtgacaaaacatgcttttgtagaccttggctacattgtggagactagcctagagtttgctatcctttgacttcacctcctgtgttctgtatatgggaatgtcctaccattcctgtttatatttgtaattttagttttcatgctattaaattgtttagaatttctgtcacaactatagatgctaagaaagtgtaattctgaaggtacttttttgtgggatctgagctgtgatgtaataaacgtacatttcatccatatgctctgccagtgttttatcattaatatgcttatgtgtaataaatatatatacacatagtgatttttcgatgcagcacctgaacatgtggcttagattttaatgttctcatttttcatccacagtgcaaacccggcctatcatgagctgctgctaactgttctgtggtatggtgttgttcatacttctgcacttgtcaggtgtactgctgctaggatgtttgaggtaggttacattatcttgtcttgtttctatttgtgatttcctttggaaaagaaaaagggttaagctttaataccatgttatatgtgtgtgagtatttatttattgatatgtgacattaagtagtatctagttgtgtactgtgtgatggggcagaactttagctttggcaaattaaagaatgttttctagccttattggttcttttaaatgttgttcttgatttcatttctcctttaaatcttctttgaatggcatcctattaaatgtttttgattgtcctttcctatttactgaggtaaataactactcaagctaaaacaacatagagtattgcttaagttgtagtattcttattggtattaaatacagttacttgccattatagtatttcttcacatatcatatctgaaataggatccctgacactgactgcttataaggcatatacctaaatcttattaacttgttat

SEQ ID NO: 18025 - DNA, 1682 bp, Mus musculus
aatatctgtattatactctaagctattacaatggtacttaaaataatgtaaatttgaagtcattgttataaagtaataaaagtggaaattacttaagtatttaaattatgaaagaataatgcagactttttattatttcttaactgactagaaagagccaccagcattactctgtgccttttggacttgagtttgtatgttctgtaggaactacatgcattcctttcacacagtatttcaggctgctgtggtgaatttgaatggcagatcctacagtcaatagataatgatgagacttacaacatttcacatctctcttgagaatcctttaagtgctgtttagcctcccaacacatagatgcataggatggagttccctgaggaaaacagcacttgagcatggtgaggagtagccagggtgaatttcacaacatttgtactagatttagatgctcaagaataaatgtactgagaagagttaataattgtttattcccaaattgaaatacacaagaaaatataatttaagtctgaaatttaacgcctacttcctataacacattttaggatgctttctgatgatttaaactttgcagtttactttttcatcctgtatgagaagtactaagtaagtttaggacatttggggttcctttttcccttctaaagtgaaagtgatgttagttaagttattattggtttgttgccacctggtaccttaaactcggtggctattcccattgctgtgttttatttgtatagtcttacgttgatagacagccccactggaattgaccaattgtctacacagcgacacagagtgttgtgtatgaaacggagtaactggcttaaggggttaatgtgaggccttacacagttgacgcatatacatgattctcatatttattgtgtaaattggctttaatacacttggatcacattcacttcctgtggaaaagctagctttcccatgcagtcaaagcttataaagttatttgccttaggcaaagccattcatttcttttacctatagtgaaattattgaatagtagtttttctgaactgttggattctaggcattcctgagaaattgaaagtggctacctttcatgtcaaaatgttgatctgttataaataaatgttttgcatacttgtttttgctgtgtattttgttttcactttgaatcactttatccgtacaaaaataaattatttattcatgaaaatacattttagaaatctaatctctataaatttcctattctaatttacatttatttaaaaggattgtggcaatataaaactaatgtatttcaaacatagtttctaaagaaaatgtttataatctactctgagctacagtggaatacatgtatattagctaccagatgaatagataaagagccttctggtatctggagattgttgcaagaatcagagcagatgacaaaaatctacagatgcctatgtggcaaagcgtttatagctattgttatccttccatattttttgagtcatctttccattgctgaaagtgtctagaacaatgcaaatgctctgttaattataatagtatttgggtagaggaaataatttcttttttaagattttattctttgagaaattcacacaagtgttatgatcttatgtactcccaaaggcctcccagatccatgcccctt

SEQ ID NO: 18026 - DNA, 1221 bp, Mus musculus
gtgttttctgatactctctctctctgtctctgtctctctctctctctctctctctctctctctctctctctctctctatatatatatatatatatatatatatatatatatatatctcaggttttttttccaaagagtgaaagggatgcacggccactaccactaaggctttgagtttgtgtggatccttgagagctaagttcaggtgaccttgtcccctgcctggttttggttttgtttcattttttgttttttagtcttttttttttcctacagtggcaggtacttggccactaaatctcaaaaaaaaaaaatcataccttttgtggttttggcatccttattttttttaaactattggctgtctagaaaagatggagggagtaaataggacgtcaggccaaaggacaaaatgaaggtgccagggaaattcaagaaagaatgaatagagttgacatgtcaatttgctttttctcttcctccattagaatgtcagaaacacacttaggcagtaggccctctttccttccaaagtgtttgtgcatgagtaatttagcctatggaagtaaaaacattcttctgtgtgtgtctgtgtgtgtgtgtctgtgtgtgtgtgtctgtgttcatgtgtgtgtgtgtctgtatgtgtgtgtctgtgtgtgtgtggatgtgtgtgtctgtgtgtgtgtgtgtctgtgtgtgtgtatgtgtgtgtctgtgtgtgtgtggatgtgtgtgtctgtgtgtgtgtggatgtgtgtgtctgtgtgtgtatggatgtgtgtgtctgtgtgtgtgtgttgctcccacatttaaatgacaaaccaggagatctaaagagatgcctcacagttaagaagaagagtttgggttcagtacccagtaccccactgttcagtccacaactccatgtaactccagctccatgggattccatggccacacacacacacacacacacacacacacacacacaattacaaatcaaatctcatgaggtaaatgtaaggaaatcaattgtcctatgggtgattttcttttggtgggtccttatacaagaaagcagtttaaaactgaaagaggccacaggcatagttatcacgagcactggttcttggataatggagataaagctaaccacttaagtgaactacaagcagttttgtaattgttggggtccaggagtcacctcacaaaccattcaaacacccacctcagaca

SEQ ID NO: 18027 - DNA, 1222 bp, Mus musculus
cgtgcggacgcggaaaggcggaaggaggacgcgctcgtcgacttgctcctcccgcaccggactccccagcgggcacagagcccaggggaggagccgtcgcggtcacgccccgcctcccgccgggacgaagctgccggccggccaccgccccccgtccccggtcggcgagacccgcccccggcccgccccggcggcatggaggggcaacgttcttgacggccgtgccgccgcccgggcgctcggctcctcccgccgcccccgctccctcgctcgcatgtccgcaccgccttagctgaggatgctgaggatgaagctgccaccgaagtcgacgcaccccagcgagccgccgcccgacgcggaggagcccgaggcggacgcgcggccgggcgcaaaggctccgctgcgccgccgccgcgactgccgcccgccgccgccgcccacgggcctgccgcggggacccccgccgccgccgtcgccgccccgggggctcgagccgcctgttgctagcgggccgacggcgggcgcgggcatgccgggcggcggcgggcacgcggcggcgctgcgcgaacaggagcgggtgtatgagtggttcgggctggtgctgggctcggcgcagcgccttgagttcatgtgcgggctgctggacctgtgcaacccgctggagctgcgctttctcggctcgtgcctggaggacttggcgcgcaaggactaccactacctgcgcgactcggaggcgaaggccaacggcctctcggacccagggtcgctggccgatttccgagagcccgccgtgcgctcgcgcctcatcgtatacctagcgctgctgggctcggagaacagagaggccgctggccgcctgcaccgcctcctgccccaggtggacgcggtgctcagaagcctgcgcgcgactcgagccgagggctcgcggggcagcgtggaggacgagccgagtggcgatggcgagcaggacgcggagaaggacggccccggcccggaaggcagtggctgcgccaagctcgggactggaggcgggctcggcttcagggcccaagaggaactgctgctgctgttcaccatggcttcgctgcacccggctttctccttccaccagcgggtcaccctgagggagcacctggagaggctccgcagcgcactccgggtggagccggaggacgcggaggtggagcccagcaactttgcgggctccagggcccaggtaagg

SEQ ID NO: 18028 - DNA, 1105 bp, Mus musculus
tcagtaagtgccctctgttgctctgtggagatcttgcaagtgtttttgtttgttttggtttgtgttttgttttttatggggtttgtttttcatgtgtcatcctggtgttcaaatgtaaaacattttaattaaaagttaaggaatagagacatgcaattaagaaatatgtgtcttttttacactgcaccttaaaagataatgatacagaaaagataatagaaccaggtagactggttcccaggagaaagtgtgccctccagttccttggcagagcagatgtagagatctgagaggttggccatgctggggcaggatgtgcattgtcccctcctcctataggaccctctagtgctgacttccccattccttatccatgtgcatctcattgtctgcacggcagcatatctaaagaccagcctacgccaggcaaggatactctccttgtcccgcccatcctttctgtcgattttttcagataggctttgttttattcaaggactacaaaagtctgctgtttacgtagactctaccttatcccaggactgttctgtggataaacgtcattgttaatcttctgatgaaaacttgaaaagtttggtaagcaacctgggtgtttatattaaagtcctgagcttcccttgggccccttagtctgtagctacttgaaagttcagctcttcctggagccctgtagctcactgttgtgtctctgtgtccattgctgtcactgccccttcagatcacactggtcaataccagactgaatgtgatgtcctcaggacattgtctgagtcttgtttctgtgtactgtttgctttcctggtttcagtgttcatccctcctgtctcgtgttcagcattgcacctctctcttcagcctggcttttatttggccaataacgctgatatgttgcataggtgatttctactcactttaagccaatattttgaggaacattttttttctttaaatctttccttctgatttcagttgtcatttttctatacctaaaggaaaaagaaaatacatgcctcctcagtttgaggtcagagaaaaagaggtgaaaacgaaaatggactattgaggtgctttgaaagtgtaactg

SEQ ID NO: 18029 - DNA, 1212 bp, Mus musculus
tgttcttctctgtgtgcttgtatctgtgatgacagtcaacatccagggcttcctgtcgtctgccaccttgacctacccagacactgctgagtgaagatgtcctcttccctacctggctgttgcagtgtcacactgttacaatgtgtgtggtttattgcatcagaacagaagctagtgggttttctcaaaagtcaggtacctgcttcctaagccgagtctcctcagccaagtcacttttataaccctttaccactatgcttgatacaatgtgaaagactgcgtggagtgtgttgagatggtgtttgttaatcatgtcagtgtcgtgtcactaagtttaatgctgctggctttttaaagttttgttttgttttaagccaatctatatactaaatcgcttccaggtaattttttgatttcctgaagtgcactgaggttatctgggaggttggatgtatcttcagtgactgctgcattcaacagcaaggaacaagtaccaccatccattgtaagctctcggggtagcagggcttcccattccttggtacagagtagaagtgattgacttttgttgtggggagtagagttggtgtgcagcagaggcactggaatgttgggtctgggttctgaaacctgacattgtgagacaaagaaaaaacttgaagcaagaagaagctagttgaacacttcaacggtagtgtttgtatttatcgcgccagtgtacgttctgaacctttcaggggtaggagctactgggagagacgggggagtgagatggggtagacgaaagctttaatttaggaagaaaaagttcaagtaaaggaaattattttgatgaaatatattttatttgatctgggtatttttggaccacattattaaattgttgagctgcagctgagttgctgaggggagagctttgctaagccttgcacaggtgcgtgtgactcatcgccaggtgtactttatggagcttattttatgatttcaaatactgtactgtacataggaggtatgttaccttctccttatttgtatgtttaccatatactttgatatttgaaatgttatgtactggaaaggccacttatatttctagaacagattggattttatgcaatctttttccttgaattaacagcaataaaaaaatgaaaaacagcctaagaattatgccttattgcaagttttataaaagtgggttttcatggtcgt

SEQ ID NO: 18030 - DNA, 1143 bp, Mus musculus
gtgactttcctcccgccttttctttctatttctgcttacagatgggttcatcccacttgacttgttcttgtaacagctgatcaaatattgccatgacaaccaaaatacattgttctttttttcttcttctgtcctttatgaccatcaggactccacagctcagcaggcctatggtctaccccaggggtaatcacagaaaactgtgttatctaggatttcctacctcataaaaaggtttgtatcttttaggcctttggtgtcaacacctgcgaactctcatcactgcctaagggccacagactcctctagggtaacaacagaagaccaatcacatcagtcaattcccactgggggagggtggggggatagaaagagcaccaaattggaagccaggatatggcctgactgtgtgctgaccagttcctccttagggctcctcaaagtgcatattgcttcctgcacataaataggtcatcttgcctactaatgagccctgtctgggcagctccacaggctctcttctgtagacatctaacataagtcctaagattgatccaagatggatctggtgtttctgccctgccccaactcatatagaacggccctagcagggatgccttagctcttttctactctccatgggaaccaacatccccaaatacaagtgcttgcttaggcctgttaacagagaagaaaggaagtagtctaagtgaaccagagctccaaggacaattatctgtcactatggcaacaggcagttgtcatcagtgactccatcttactttcctcttgttctttctcattctcaaggttttcagcctcctctgtagattctggagcaactaacaagaatagttatcatttagaacctctgctctgtgtcaaaaccccagaccgcacaacctgaactcctgggaaactcagatctcttcatgtcaccctaatacctaccctttcaaacaacttaaaaaaaacagagacctgaggcccctggaggcctcccttccagactagcatctgctgtaaactctatgaccgtcctctaaagcactctggtcctgggcttgctgcacagaggggttgcccacagggatcgtgagcagttctagaaggttgcagggatctctgcaaagtctggtagca

SEQ ID NO: 18031 - DNA, 1146 bp, Mus musculus
ttgataaatacagtggaaaaggaaagtaccatttgtcttaaaaaatatggcagttttgccatttttgcagtgtttaagcaagttttcttcatttcagtgtgtctctagatttctgttagattcttaccatttgcctttattacctatttttcttgtgtttctagctagttgcataacttaattggaaagatgctatcctatagttctaatttagagatattttaataagctcctagcttctccactttttttttttttgtaattcattagtacatttgatttttgctacacgaaaaaaaagctgctttcctttaagttttagatataaaatcaatccttttctaggggaaggccttagtgggagaacaaaaagaaagaaaatgaattagagtacagaggcacaggcaagtgacactgtgacttcatctgtgggcttgttcactttcttattcttattaactgtagcattgcattttatgagcacatgttatgtagactgatgtgttgaggtcagaggacagcttgcaggagttggttctgttcttccattgtagctccatacagacagtggagtcaccttgctggtcctcaccatcagtaccatttctcagatacccagagagacaggtaacacaaaacaaagcgaaaaagcaagtgaaaaactgggtcacctatcatttgtgttttgagtactgaccccgatgtcagtgacccggagtgaattgtgggcagctgctcatctgaaaagttggtggacttttgtataagccttgcaggcagaattgcttggagaatatattgttattaataataattattactattttgtaaagtgtgaggcgtgtggaatgtttgtgggaatagaataatctttgccctgtcagaacatggtctctaaaacaaattgtgtgagaacttttaaagaaataaagcccaaatgtgtaaagaatgatttatacttcttcaggagggcagattaaattattataactggtaatgtcttcccaaagtgtttgtctaagagtagaacaacatcagctcacggggagaagggcaagcatggagaggagacatggccttgttagctcagttcagccccttggaaaaggctttcatttgtatgcagtctaattatactgcaaaata

SEQ ID NO: 18032 - DNA, 2236 bp, Mus musculus
cttgtggcatattggacagctgctgaggtgggacagcagggaccacttcccaattcagagggaacaactggacagtttccaattttattttcttttaagtgtccccagacagctggcactttctactcttacctgttaagatctaatcccagatgacatctgacagtacaattaacttttctcattatactattttcaaacattcctcggccagaggatggctgtctagataatgcctgacatacagtgaaaagccttgtttcatggtgggcgatgctggctctaacccactttaaactcaggtttgcagagaccgtgatgccatggcattagaggcctcaacaccctgattcacaaaagtttggagtaagctttccttttcttctgaagtagataccatagtcccagatgaacttgatgtgagaatactgtttttattcatgtcacatcagcacagcgtgcctgtgtgttaactttaccagactccctgcaagcatcttgcctctcagtatgtgttccacattacctttgacagaggaactcttgagactcctgcttggaatgcagcattgaagcaatacccctgaaagtcaccgttcatcccagttgaggtagaaaactacagttggggccgggggaggcggtgtggacagccccattgttagggaaattatcagctttcccccccagagagctaaacactttccatcctttgccacgtgctaaggctgagttggatgctgaggcttgcagttcctctgtgccattccctctgtgtgaccaagggcttctggggtttcagtgctgagtgcctgctctgatagtcagatcgtattactttattttaatatatccctgtgttcatttgaaaattaatattctgctatataaagttaaggacgcttcataactgagaaagaataggaggcaatcatttatttatttaaagaagaaaaagataatgtcacgggctggggaagtgtttcattggagaatgcttgcctagcatgcttgggaccctgggtttgattccttaccccaatccaaaaacattctttattaaaattgtcctatcatttcagactttagtaatttatacagtttagactgttgttgtggtctctctctgtataatgtagtggtgtgtatttatctagatctgttaaatcatataattgattcctgaaagcagaatctttaagatgactttctgttagatgatgagaacatttctataccatttgctctactcaaagaatcctatgcatttgtccttgtagaaggctgtacaatgaattatgttgtggtacataagtttattatattgtattctaattgaaatgtgtcttgctgaagaccacagttaatattcatacttttgctagaagatgctttgtgtctttcttatcacccttagtccttaggaccccagctcagaaggcccctgctgactgttaccctctagttccggactgggtcttgctgttctgatctttctgggttaatggaggcctatgggtttgattttcgaaaatgagagagttgccattatattttatacttatttgtggtgtgaactcttaaggcgttttgacacatgttaggacagggtttctaccttagaagcttttgtggcggtactgtatggtagcactgctgtaatgtgattttcatatcttgtatttctgaattacacatacagactagggaacaagctttactgatctgaaaatttatttttctagatatttgtcattttaaagatacttaatcaagctacaaaagtcttttatagcattgtctctatttggcttcctagacatttcataaggcctgatttttattatttttaggaagtaatatttttacaatatatacttaggaatctgaacattcatttcaagtatgctctgtctgtatgagtaaaagaagcctaagaaatatagaatataataaagctttttgaacagttacatttcatatgcaaatagattttctgacccttattcctgcttattttgtgagctgtgtctacattttgataacaagaagtaggtgagagaacaccttggtttcttgtaagcagaaatgtttgctcatcctgaggagatgtttcttaaaacacatttttcaccataggtcttcctttgctgcttgtctgcactcttaggggaaatgctcggacatctcactacaacatagacggctacttgtaaggttttcatagagctcattt

SEQ ID NO: 18033 - DNA, 1373 bp, Mus musculus
caataaataaacagatcagttcaggtaagcgaggaatgtatatttctcacgtcacgatcctgagcacccagcaaaagggcttaatactcagaacaaaaattgtagccaaggacaccttgattgtagcataagtatctggaatgcggaattgtaccgtgcctaggagttataaccccgtcttctaagaatgcctagtttgttctttttatggttggaatttgttaattcagacaaatattgttgtctgtgtggccgtgctatccactgtacaaagcagacgtattctgttcttgagaattactggcatttacaaagttttcattatacctgtgcttggagcagatcagatgtgtcctggaaactgtttagaagagacttaactactataaaatgggctgttgtcctgtcctgttggatgagctaacaggtctccctttctcttgcaggtggtcaccatgggccttttccgaacaattgccttgttttaccttggaagtttcgataatatagttcgccgctgcatggtgcagaaagcaaaacctgaagttgtagacaaaactgcctaaaccttgccccttggatgaaagactgaatccagtgatttgaacagtgtgctgctaatggaacacaagttttggcctccagacttttgtatcttgtttttgaatgtgtgagattggaccccgtgctcttcagaaatctggctgtaagcagagggacatgaggccatctctacaactgttaaacactatgcaaatatgggccaggacacctttgattttctgggctgtaggggtgatagtgtgagaactaataacaggaaagcagggtaaagaatagcattccagaacagtaaattcagcttttcggtcattctcccatcctacccatagagatcaagaaatgtcctctgtggcgtttctgaggttttgttttgtttgttttttgtttttgttttgttttgctttttttttttttttttttgattttgggttttaactttttatgaaagatggtccggatttttattagtctttttttcttttttgtaatttttttagtgtatgttattcaaggtgtgtcttccgagtagcccatgagtctgactctcagcatgccttgctgcgcctgggactcgcttctgctagtgaagctggtttctctctctttgatcccataaaattcgagggggatgagagagcagcacagagggcaaggggtgagtcctttgtgacggcaagcggggctttcttgtcttcttagactgatgcttacaacgttttcatttttattcaaggggaaaggcagcctctttacgtgtttcgtgaagagaaataaaatctcctagcagcttaagttacagtttcttcagg

SEQ ID NO: 18034 - DNA, 1191 bp, Mus musculus
aagacttggttttactattttttttttaaataccgttacaaatagttttggtagaccaacattttggcatgtgcttataatctaagtaatctcagtatttggaaggctgaaaccggaggagagctgtgagcccaagttattctagacagaagtccaagaccgtgtgtgtaggttaaaatagcccgaagatgtcattctgtccttccaccatgtgagtcccaggtgatgagcacccttacccgctgagctgtctctcaggtcctgatcccatttctcctgttttcttcctttgagcaggtggtgctgtgtatctcagttgatgtgtctcaagactataaccaagtggagaatgtcataaagcaggtaagaggagaggtgctttcagtttcactgcctgactctgctcagctctcgccaggagttgacagctcttctctataggcttagtggttccatggacttgattgaccttatctttctgaatgatgaatcttccattctctgatgtagtgtttggaatgatatgtaatgttatggaatattcctccaggcacaagagaagctgggtcctgtggacatgctggtcaactgtgcaggcacctctatgtcaggaaagtttgaagagcttgaagttagtagttttgaggtgagtcacagtggtatcaagatgatgtcttctattttaaaacagccctgccaagccaagaactcagctactaatgtacttcaacactgaggaaatgggcattaggtgtgaactcttaagtgcaaggccttttgaccttggcaatacgtcattcttgtctttagtgtcctctttcaccagagtgatagggactctgaagttaaactgctctgctatctatcttataggaggtgtgactgctggaccagtgtcagaactatcttctcacaggctgtagtcaaccccatatactcagagatacacacaaggcctacaggaggatcagagggtggtaaaaggtagaatggtaggacctgagtgtctgagtttgtctgagacgccctgtcactgtgcacatcacgctggcccagccttctacctcagcttcctgagcactgggatcacacatctctgtcactgtgcctagtgtcaccgtgcctagtgtcaccgtgcctagtgtcaccgtgcctagtgtcactgtgcctagtgtcactacacctggcaca

SEQ ID NO: 18035 - DNA, 1176 bp, Mus musculus
ctcaatccttccccagactcctgcccctgccagtacctctgagacagcctgtaagtgcaggaatacagcagctagggcgggagagggatgactccaacccgcagataatcaatattgttttgagatgagacctatgtccccattgctgtctgcaaagttccttctgtctactgctcttgaagccacttagcttaatcttttcagtgacagctgaggctaagatgggaaatttgtattttatagacagttatgctttgtttatatgaggcaagtgaacataacagccttcagatggcgaaaggaaaacacacagaaaacccccacatgttgtgacagtatatcaagaaaatgtcaagaggaaagtcttgggccaaaatttaatggcatttatctcggagtaataaaatgacttgttttttcttttctataatttatgtagtttattttggtgaaaacagtatgtagtggaatttgccattgcaatcacttttacatatgtaattcagtgtccttaagtacattcagtattgttcagccatcagcatgcatcatatttaggactttctcttcatcccatgtgtagtaactctccattctgctactgctctcagcccctggtaacctttattccactgtttcttaagagtttgtctgcatcatgctaaacgaaataaatcagaccacttgtatatttggtctttggttatcaacagtgattcacaggtatctgagtccctgtgttcagttgttctccatccatacccagcagtagatcttgtgggtcatatgtgcttcatatgttgatccctttggtgacccactaagctggggcacagtcgctgaggcacttcacattttaaccagcagtgcgcaagaggtcaagtctccatttcttgtcagcatttattgtccatattgttttattatagacatggtgataagtacaaagcaagttgttcttaacatgagaaaaggctaatagtttacagcaaccaagaacaaggttgttggcaataggaatgcaatccaatagaagctgctataaggcagtttttgctgaagattagtctgttgtaaggcaatttttactatagcttaactatagatttgttttccatgagttttatattaacttagatttttaaaaaccactcccttaaaaatactttaattttt

SEQ ID NO: 18036 - DNA, 1219 bp, Mus musculus
ttcacaaacattgtcgaattgtaaggaaagcaacaatggtatgaggaacagcagagtggggacatcgaggagcctcgcccggcttcatggacagcagctaggattctcatgagtacttgttcaaagagcaaggccttttttcttttcctaaaaatgaaattgaaacggggctaaagctaatggtatataaatgtcttgaaaaatctttaagcattttatcaatgtaaacttactgctttattaaaaattaatggtagaatctttactctcagggatgggcagcaaaacgcagagcactgatgaatttggggtttgtggcacagccagtgctcctgttgagtttctagtgggctggtttctcctgtatagattaaagtgattcctttaaagcagtgggcttttataactccatgactccttccactgtgcactcgagactttctaaatcagtagtcatctttgccttgtctacgcagtgtcttttatagccaagattgaccaaaagaggtagcaaacaagtatgcatttttcgagaattgtcatgaaatactgtaatgggaaactttaataagaaaatgactttcttctggactttgggatgtttcctgtggatgatgtgggtatgtgtgtacatatatatacataatttttaaaatattagcgagagtcatgtctttcacttttaagttcagggagcagtttgttctaaccacacaaacattctcagtgtggtatttcatggagctttagagacaaactaatgtctcattacataatgaaatatgaacataccatcgtgttatttcaatgtcttcaaatacatgatctgagggtgtatgtcacatacttgtgtaccaactcttagttgtgccttggacatttgcattgcctacctgcaaacaattactaggttaactagaattgctatgcagttctaccttgcgagtgctacacggtaattgcattttaaagtatatttgcacattttacatgctatgctatatgattgcctttgggttttgtgtacagactatttttgttgatattcaatgaaaattataggcttgaaataatactgttcctatgtgaagtaaattgctataacctacttttggcttttatatgttttttttttttttattttggaaccttctacataggagaaaatgtcttaagttggttagataaaaagaaataatttatatttattaatgagcat

SEQ ID NO: 18037 - DNA, 1143 bp, Mus musculus
ccgaagactatcccctttttgggtttcctatctgcatggaatgggtctctagttgcaggtggacaaggagtcagtgaatgaatgacaaacagaagcgacacacgagattctgtagaatctgaatgcaatttgacaaatcaagcatcagactttttatacagaaaatagggaagttaggtgacatatcggccaggtacaaatgagattaccggattcttatacaaaacagaggaatgcaaacatggaaggactggcaagaaccaactgggataaaattcagtgtttaacaactgggatcaaaaacagttccacctaaggtccacttaatcttagaagccagggtcaagggtcgtttccatgaacttttcgccttggaacggtgcccaggttttgggggcctgtcgcgcttgtcactgctggagtggatgtagcaatatttttaacttttctgatagtgaccggaatcttaattcttatttcatttactcagatgaaatcaagtcactatcattacaggttcgaggaccctcaagagctgatcctaactgcattgtaaatgacctgctgacaccctgctctccgggagaccctggggctattgaaatgacatggatggatgttcctggagataaactcttggagccagttgtttccatggtgggacattttaaaattttatacacttatatgtcatttcgtttctatagcactagagaatgttatgatcaagctcatgtatttaatacttgaagagaattgtaagtattaattttgtttacatgtaaaaatagttatctaaaggtgtgagacttgtgttaatgaaaaggttgtattttgaaagcacaatttgctctgacttaagtcatccacaaaattctcacatatattgcacaaaatattgttagggcttaattaaaatatgagttttgtcctgaatcgcacatgtttaaaaataaccagaaacatcaactcttgtgtgatagtattgataaatagtattgttttgttttactttcttaggctgcatagaaagtttaaatcatggagttctttaaatttttaattgaaaacattaacctttttctcaaatactgtataagactttgggaacatttttttttattgtgtgtacatttacattgt

SEQ ID NO: 18038 - DNA, 1148 bp, Mus musculus
ttccctattggagtgtttatgctccttccttattttcatatgtctgcatgtattttaaattaaaatttattgtaaaattacaatttattgtattttatgtgtatgggtattttgcctgctttatgcctgtgttccatgtgtgttcttgatgcccatggaggccagaagaggacattgcatctcctggaaaagaagttatagatgattgtgagctaccctgcaggtgttgggaactgaatgcaggacctctggaaggccagtgttcttaatccctggaacatctctccagcctctaaattacaatgcttcgtcaaagttttattttgaaggccaggtaggcaggcagatctctgtgagttccaggacagtcaggactacacagagaaagcctgtaaaaagttttatcttgagatcacatgcaattttcagaaatgatgagaggtatccagtagaccctttccccagttgcatgttgtaaaactggcacaataacacatcaggatattgatgttgacaccctctgcaggtcttactcatcccccagtttgacctgtgcttctgtgtgtgtgtgtgtgtgtgtgtgtgtgtgtattagtttgggaacagtttgctcgtcaaaccactgaaggctatctggaacattcatttatgtacaagctttgtgggattgtctaggagtgcagttctttgtttatattattagttaacatattttgttcagtaaatacaagccagttctccagaactgcaaaaccattatacgctctcggcattcttaacagcatcgaagttgtcattggctttaattttagccattgtgataggtatctgtttttttttttttcattgtggttttaatatgaccaataatagtatgccatctatatggtctcattgatgaaatatattagttaattgggatttttaaatgtgtgtgtgcagccgtgtcaggacagcctgcaagagttggttctcttctactgtgtgggtttattgaatcaattaggttgggtagcaaaaccctttatccgctgagccatcttctggcccattcataaattctctttaaactgttaggtcttcaggatccctttatgtgttctagtagatgtttctttttgatctgatgtttcacagtgttctcccag

SEQ ID NO: 18039 - DNA, 1743 bp, Mus musculus
aacaacactcttctcaatgataccttggtcaaggaaggaataaagaaagaaattaaagactttttagagtttaatgaaaatgaagccacaacgtacccaaacctttgggacacaatgaaagcatttctttttttttttttttggaaaaaaggaaatcaactttattttctctacatttaaaaaaaatagaaccagctattaatttttgctgagaaaatgcttcttttggtgtttacaacattgtttgcattaccgaataggaagggttaactgatcttttctgtggtttttttgtccttttctttgaagtcactacacaacaatgaacacaggatatcactcaaaagttgccattacaaaaagtgtattcggctctggttcaaaaggatgaatggtaatggcctttgatgggaattttgccctccaagtgctctgggccttatagctatcagcaggcaagagagaggcagatgagactgtgtagcaggtgtgctagttcccggcatgagggtagagactaatgtgtttgggaccaaaagcacctaagttgggaatttctggatcacataagagcctggggtgctctgaagcagccactggctggtgctggttgatgtcatgttgcaccagctctcagtaatctcaaagtgggctctgagactactctgcgagttcccagctgttgggggagaagggctatggtcaaatgaaagatgcactgtggagttttctgcagaaattccatctgagaatttttacatttaaaatttttttttaaacaatctaaagagcaaaaaaaaatgtacgtgtattctagttgcaaagtatgcaaatgcttcagatggctttgtttttattgtgtaaaactgttgaacacaactgtggtgcacaaattctttccatgtaaggagtctatgcattttacaggaacatatcttatgattgggtaatgagacagttatacattcaactgccattatttttattaagtgctttcactttctttacagttattacaaagttatatttattttctacagatgggtttctgttttcatgatgctgtaatgtttacttcagcttgttgagctttctttgtgatctgcatgtcacaatgtgtgctctaaggtgactgtcaatgctgtgacaactgtaacttgctttgtaaagggctggtcacctgtggatctggtttatgaatgcatcgggatgattttaccagatcaccttttcagaaatgaaagcatttctaagagggaaactcatagctctgagtgcctccaagaagaaacgggagagagcacatactagcagcttgacaacacatctaaaagctctagaaaaaaaggaagcaaattcacccaagaggagtagaaggcaggaaataatcaaactcaggggtgaaatcaaccaagtggaaacaagaagaactattcaaagaattaaccaaacgaggagttggttctttgagaaaatcaacaagatagataaacccttagctagacttactaaagggcacagggacaaaatcctaattaacaaaatcagaaatgaaaagggagacataacaacagatcctgaagaaatccaaaacaccatcagatccttctacaaaaggttatactcaacaaaactggaaaacctggacgaaatggacaaatttctggacagataccaggtaccaaagttgagtcaggatcaagttgaccatctaaacagtcccatatcacctaaagaagcagt

SEQ ID NO: 18040 - DNA, 1200 bp, Mus musculus
ggaaaagaaacttgaagagactcccctatcctagatagagcttcatttggaaggaaaggtttaccaacccagtgttaaaatttctgacccagaattgctcttgactaaaagaaatgcagggtcaaaaccagagcagagattgaaagaaaggctgtctagtgactggcctaacttgggatgcatcttgtggctgagccccaaagcctgacactattgctgatgctatgttgtgcttacagacaggagcctttcttctgagaggcccaaccagcaactgactgagacagatacagatagagtccactattagcctgaggtcagggactactatggaagagatagaggaaggattgagggagataaaaaagggatggcaaacacataggaagacccctaggagctcccaaacagtaagttgccaaccaaagagcatacatgggctggtctgaggtccctagtatatatgtagtagaagattgctttgtttgtcctcagttagagaggaggtttagagacatgaggacccagggaaccaaggttcctggggtggggagagatggggagtaccatgtcagagacaaagcagaggtggaatgggatgaactctggggaaggaactcaaatgaggacaatgtctggaatgtaaataaataaaataactaattaaagaaacaaaaataaaaaatatttaaaaacataaagaagaaattatctttttttcttagaaaacataatatttcacaaaatactaaaagtcctttaagaatcaacaaagtggtagaacataaagttacagaggtcaggtgcatttctatattactagaaaaaagtctacaaatcagtcttatttactgtagctacaatcaaagtgcacagagatctaaatctcccagacactgagctatcaatcaggcagcatacattagttggttccaggctcccaacacatatactgcagaggactgcctggttcagactcagtgagagatgatgagcctaacccttgagagccttgaaagtccagggagttttgaggaaactataatgttatatgaaagcttgttagtgatctctggaggttcagaaaaatgggcacaatatcttcaacttcagcattcattctttgggaacccactggccactatattcagggtaacttacctgagggtcctcatctttctctcccttctcctttaaatc

SEQ ID NO: 18041 - DNA, 1182 bp, Mus musculus
ggaagaaccagatgtgtagtggggcccagagaatcatgagtggcgtctcagaagtcaagcactgaacattttacagttacatttgttcctgcttttatttgactgtgactatgccctgaatcttccgtcctatattaaaaaaattaaaactatgcaacatttttttaaaggtgcatgcagtagggacagtggatattttagaaaaattttaaacttttaagtgtctttaattactttagagaagttagaagcttggatatttggataattttaaaccactgacatttgacagtgtttgggttattaaaggtaatattaattttaaaagatgggatgttttatattgtgatatcaaaataaatatgccatttcggagataattggagaattaaaaattgtagttggatagttatatatttgtatgttaattgacaaggtgtcggtgttttgttttgctttatttctgaacttgaaacatctgggaaaaggaaactcaattgagaaaataactttgtcagactgcatgtaagtaagtcttcctaattaaagattgacgtgggatgcctcagctcactggaagtggaattgctactgtgcctattgtcctggatgatataagacaacaaattgagtaattcatgaagactaagccagtgagccacattcctctactcctatggcttcagttgctacctgtagattcctgtcttggtttttctcacttatggactgttacttgagacgtgtataatgaaacaaccttttcctttccaaattgcttttcatcttaatattttattacagcagtaggaatttggataggttattgatttttacaatattgttcagaattctagcatgctggggtctcctattaccaagataagaagataagcaagtgagctcccaggctctatttaaagcacactggaattccagagcagatgggctttatcttactccatctctaggggcatcccattatgagagtatgagggggctagaaactgttactggggaggcctggagacttgcttgcccattgtccttgcttcaggccagatgagcggttgaaggctggagcctggttttttgtttgtttggttgttgttgttgtttgtttgttgtttctactaataattgacttacctgggcttctctggatttgccaatttcaaatct

SEQ ID NO: 18042 - DNA, 1605 bp, Mus musculus
caagtgtatagagcatttgtttctttctttttcgtttactttagaatttacttgtaatatccattcttgctttgtgctcatgaatacatctcatattgctcaaaagcttttctcctacccatccactttttcattattccatatttcaggttgaaagatacatactattatgtgctttgggtcactaacgttggattcattttgtgtgaataagttacaaactttatttttaatttttgtggtatttggagggcaaataaatataggagatagcttgacaatgttaataagatgaccatccattaccagtttatatcatttcttttttctatttttgaaagatattaaactagctcattgaatgcagaggcagctgtcggacattcgtgtagtctcgtcatcagcgtagctgggcctacacgcaagcaaccatgtctaagggaccagcagttggcattgatcttggcaccacctattcctgtgtgggtgtctcccagcatggaaaggtggaaattattgtcaatgactagggtaactgcaccatgccgagctacattgctttcacggacacagagcaattaattggggatgcggccaagaatcaggttgcaatgaaccccaccaacacagtttttgatgccataggatgatgctgttgttcagtctgatatgaagcactggctcttcatggtgatggatgatgtaggcaggccctaggtccaagtggaatacaaaggggacacaaaaagtttctacccagaggaagtgtcctccatgattctgacaaagatgaaggaaactgcagaagcatacctcggaaagattgttaccaatgctgtggtcacagtgccagcttacttcaatgactctcagcgacaggcaaaaaaaaaaaaaaaaaaaaaaactattgctggcctcaatgtacttagaatcatcaatgaaccaactgctgctgctattgcttatggcttagataagaaggtcagagctgaaaggaatgtgctcatttttgacttgggaggtggcacttttgatgtgtcaatcctcactattgaggatggaattttttaagtcaaatcaacagctggagatacccacttgggtggagaagattttgacaaccgaatagtcaatcatttcattgctgagtttaagcgaaagcacaagaaagacatcagcgagaacaagagagctgtctgtctcctcaccacctgcgaacgggccaagcacaccctctcctcacccaggccagtattgagattgattctctctgagggaattgacttctatccctccgttacccgggttcgatttgaggaattcaatgctgacctgttccgtggcacactgggccctgtagagaaagccctttgagatgctaaactggacaagtcacagatccataatattgtcttggtgggtggttctaccagaatccccaagattcagaaacttctgcaagtcatcttcagtggaaaagaactgaacaagagcattaaccccgatgaagctgttgcctatggtgcagctgtccaggcagacgttctatctggagacaagtctgagaatgtccaggatttgctgctcttggatggcattcctctt

SEQ ID NO: 18043 - DNA, 1234 bp, Mus musculus
cataactttctgaattcaagtacagtgtatatttacaaaattattgattgttttgtttatattgtgtcagggatattatgaaatattcttagtaattagataatcctaggttcttttgaaacaagaatcgtttgcatactatacttaatgagaattacattttgttgagttttacaacacttgaatactcttcatttctttttaattaatttattttttacgtattcactttacatcattctaccagtctgttgccgtaccaactcccccattcccgtctcctctgagcaggtcgggggcagggcctgggtatgtacctgacctcagcacttcaagtctctcccactgaggccagacaaggaagccgaggtagttgagcatatctcaggaacaggcaacagcttttgggatagccctgttccagttgttcaggacccgcatgaaggcccaattgcacatcagctacatatgagcagggtggccattgacttttgggtgcttcctatatcctagatgtgccgtatcctagatatgccccccatctcctcacccctgtcatttgtatatttccattcatcttcatggccatctagccatctctcctgtccttccccacacctgattctgaatccaccattcccctctccatcccctccaccccagtttcccctctccatctgcctcttatgactattctattcctgcttctaagtgagactcaagcttccttacctggatcttccttcttgtttagcttatttggatctgtggattagatatgggtatcctgtacattatggctaatatccacttattagtgagtatataccatgcatgtccttttgggactgggttaccttactcaggatgacattttcaagttctatcatttgcctgcaaaattcatgataccttggtttttaatagctgaatgtcattgtgcagatataccacattttctgaatccattcttcagttgatggacatctaggttgtttccagtttctggttattactaataaggctgctaggaacatagttgagcaagtgtgttggtgagattttggagcatattttgggtatatgcccagaagtggtgtagctggttcttgaatactctttatgacttcttgtaaaacactaagtggattttgtgacaatagataataaaagacttcttgcatttcacaattgattatagtgcagtttcagagtactccacagctgttcttta

SEQ ID NO: 18044 - DNA, 1177 bp, Mus musculus
ttcacatgttaattagatttacacacagggagtaaatgttggatttgttgtattttctgactagaccactgttttctgtgcattggagacattggaggcattaatattccttgaaattttattttattggaagcaaacctgtgccagggacacagacatgctatataatttcctaacttttcttgctttgaataagctgaatgtcacctggatttcacagcctatgaggtatagtctgttttttgtttttgtttttttgctacatctttaatatataatttacaataaccagataggaaacactgtgcttaacacatatgcctaaggaaaagatcttccccatggatcatggcgtttatgtttacagaacatttactatttttaacattgatgatgtgtagtttttctacttgtgaagaatctgtgagcaattattctgaatgggcagttttcacagacgatatacaatggcttaagtcacagaaaatacaagatttcaaactcaaccgaagacttcatccaaatttatattttgatgctggagatatacaaacattgaaacaaaagtctcgtacaagccatttgcatatttttagagctatcaaaagtgcagtgacaattatgctgtccaatccatcatactacctacctccacccaagcatgctgagtttgctgccaagtggaatgaaatttatggtaataatcttcctcctttagcattgtattgtttattatgcccagaagacaaggttgcctttgaatttgttatggaatacatggatcggatggttagctacaaagactggctagttgagaatgcaccaggggatgaggttccagttggccattctttaacaggttttgccactgcctttgactttttatataatctattaggtaatcagcgtaaacaaaaatacctagaaaaaatttggattgttactgaggaaatgtatgaatattccaagattcgatcatggggcaaacaacttcttcataaccatcaagctacaaatatgatagctttactcataggggccttggttactggagtagataaaggatctaaagcaaacatatggaaacaagttgttgttgatgtgatggaaaagactatgtttctcttgaagcatattgtagatggctcattggatgaaggtgtggcctatggaagct

SEQ ID NO: 18045 - DNA, 1604 bp, Mus musculus
agcaaaatcaaaaggggtctcataaaggtagaaagtagggctgtcaagagtacaagataagggcctttccaccggagtcttaggttttccgtgtggagatgtctaatgtagcaggtcttcttctcttgagtaggccttctggagctgctttttcgctcactgtctcactcactggaacaccttgagcctagagaacaaaggctgggaaagcagcatgtcagcaccatgtacaaaggctatttttaccagtggaggggggggggcttgtagagtaatttatagggggggtcagcctaaactgtccaggggtgtttctatctctgaagagcataaagggtaggagagctatctaatcatagcgccagtctccgctgtcaatttggtaagggtcccttaatggttctattcattttctctacctgtcctgagctttggggcctgcatgcacaatgtaactcgtcactgcgctgacattctggcaggagagctggtacactgatggcagtagcctcgtggttaaaggtaaacagaaggcggggacagcagtaccgtggtggacagaaagcaagtgatctaggccagcagccttcctgagggacatcggcccagaaagctgaacttgtgactttaagacaagctctataaatggcaaaagaaaagtctacactgacaacaggtatgcttttgccactgtacgagacaatatacaaagagggctgttgacatctacagaaaaagacctaagatgctgtggctaaaaaaatcagatggcagatctaaccgccaaacaagaggctcaaggagcaatgatcctggcagtcaaggagcctaaagattattatgacaccagagagaccagctttagatataccactgagcactatcaagctatagacagtatttgacttggcctgggggccaagaaattcaaaggtgtggttaggtcctatgactactatgttacaggactctctgacttgacagaagaaatagtcaaaagcttcaaggcccgtgctatgatgaggtagaatttctaaaagaaatcttcccaaggtaatagacctgcctttgttgcccaggtaaatcagagactggccaagatattaggaattggttaaaaataactacattttataaagacctcaagaagttggactctaacaaaccaaataatcctattaaaaagtggggtacagagcttaacaaagaatactcaactgaggaataccaaatggctgagaagcaactgaaaaaatgttcaatgtccttaatcagcagggaaacacaaataaaaacaaccctgtgattctaccttacaccagtggttaagatcaaaatctcaggtaacagaagatgctggcaaggatatggagaaagaggaatactcttccattgctggtggaactgcaagctggtacaactactctggatggtggttcttcagaaaattggacatagttctactggaagatccagcaatatgactcctgggcatatacccagaagatactccaacttgtaataaggacacatgctccactatgaccatagtagccttatttataatagccagaagtggaaagaacccagatgtccttcaacag

SEQ ID NO: 18046 - DNA, 1333 bp, Mus musculus
gaaacacccctggacagtttaggctgaccccccctataaattactctacaagcccccccccctccactggtaaaaatagcctttgtacatggtgctgacatgctgctttcccagcctttgttctctaggctcaaggtgttccagtgagtgagacagtgagcgaaaaagcagctccagaaggcctactcaagagaagaagacctgctacattagacatctccacacggaaaacctaagactccggtggaaaggcccttatcttgtactcttgacagccctactttctacctttatgagaccccttttgattttgcttctgtttttaattataggtccatgtgtgttaaataggcaagtcacctttattaaaacagaaattagtgcagtgtggcttttagttttaagacaacagtaccatgccctaaagtaaaggatcaagtatgtcaggaaaaaaatagtgtctagttctaagattagaactcctaacaagtagaaggggggaatgaaagtataacaaggtaaaaacagaattctaggcctttaggcccaggcttgggaatgtggcctttgtaaaggtatgctaatcataaaagagatagcgacattcctctacccacccgcttcctggattcaaagagtgctcattcatagaaagtcaccctggccattaccagaacctgaaatgcaaatgtgctattgttagaggctcttagaagctgtcttgagagttaacaattaccaggtattccttgtgactcttataactttacacttccttgtgactcttaactggtatctttggtatcttccaacaacgccctccccacttccttgagttttggtttcttcctttaaatacccacttacccagctactggggcgccacggtcctctacccctgcgtggtgtatgaccatgggcccgagagagagcgctcttgaataaaaatcctcttgcaatttgcaaaaaaaaaaaaaataataataataataataaaataaaataaaataaaatgtagttattttagtacattatctgtaggcacacaaatacataatgtgaattttgttagcattatgtgaatatagatgtttgtttccttgatgaattattaacaaatacgcacttcacgtgtacttcacctttttaaaatctcagctaattttgagaagcagaatcatgaagaacacaattccaaggtcagcctgtacaatttaacaatgccctgtatcaaatgagaaaaagaaagaaacagaaaagtagatgatacagagaaaatgtgaatagaaaaaatagatttgttagcataatacaagctttgtatcagtaattt

SEQ ID NO: 18047 - DNA, 1193 bp, Mus musculus
gagcccagcagataatttgttctctgatttagtcttattaagaacattttaatgaaaaagatcaaagtgagaaaggaaaaatataaaatggttggttgaagtaataaaggtacactggcaagtggagtgcagctgaatcctatattcaaggattaaatagataaagtgggatttccagggatataaattcttgtctccctctggagctcatgagcctatggtttggttgtagatagtggataggttgttgttgatgcctctttctgcttccctactatgtacaaagagttcacatcatggcttctgtaggcacctctcattgcatacattcaaggatcctctaggcaaggttgaatggttgccacttgatggaggattcctgcccaccactgacatagtgagttatgcctcttccttaagaacctaggtagaaagtacacatgcttggctacttgccttccagtggctgtagtttttccagaacttgtgtctgttactagctcccactttactctgctctggctgggtagttgaatcttttaatattgcttatggcttttcagcaagtttgggagtggatttctgtggaaggtattgaattgtttcttaatctatatggatgtgtgctgtgcatagttgtgtatgtatgttttgcataagtgtgtgtgtttgtacatgtattcatagatgcctgggtagatattgtgtgcattcctggattgttctgcaccttattcattgaggcaaggcctttcaatcaaactcagagctactggagaaccagtctatcaagcaagccggcttactcctggtgtttcatgttgtctgagtgacaggtaggctggcatgccctctcagtctttctctaggtgcaagagggctgacctccaatcttcaagcttgtattgcaaatgccatatttactgaaccatctatcagttcaggagagaggttttgtggggagggagaagtccagggaggggatgataccctctgtgtgttgacagattgaatgatagctgaggtgaccagggctatgtctttgggtacatagtgactgtggcatccaaatggaaacatacccctcacaagggatgctcatttggagctgaacattgagagcacgaagagaacacatattctgaagactgagtgaaaatgtgcctgtgaccttaaaattcactcaatgatcc

SEQ ID NO: 18048 - DNA, 1184 bp, Mus musculus
cctctcatcccaattagtgtaatcaagattatccttcataggtatacttagatccccaggctcccaggtgattataaattttgccaaaatgacagttaatattaaccataaaagtaatgacatataggacatctttgaactttgaaataaaactaccaattatacgcaatttcataaagtttggtgatgtcagagtgtggcatcagaaatttccacagagccttaaggtgacctcaagaccttggcctccatagagagaaatttagagagctgctctttgagttctttgaccatcatgaagccatctgaaatgaacatgttccccttgctgaaaatcaaggagctgatgttcaacttctttcccttaatttcctgtgaaacatgggactgatcctatgatgccacctcaaaatgatagggacttgatcatcaacacccacaaaaacgccagggttggtggtatgagcctataatgccagtgctggggaggcagagacaggaccatcttagggcctattggcccgtatatagctaacatagctgaaattgtgaactcctgaatcagggaaggatcttctttctgagagatggttagtgattaagactacttgctcctaggagtttgattcctagtggtcttcggtgactctcgggtaagatgtttattgaatatgctttcttttcttcaatgttttgggtatctttgtcaaatattaagtgctacatccactcaagtagtgacaagcacaacaggcccctaaaacctgggcgctgtcctgaggagaaaagtttacagaaacttagtctcctgggttcatggcatcctgtataaagaatgctccagtgtccttgctttagttggtaaacagatctgtgtgctttcccttaatattgctttattataagtgctcctaaggattgattttttgacatatagctaagttagattctaggcagtccttgatctgaccctgggcatggatagctaagtcactggcctgcacagaaatttaccattatctaggaagaaggaagtttgtaacctaagaaggaaccagagtaaataattagaactatagatagctgagttacacccatatacaagtatttacaatggcctagggggaaggtggactatacagtagactagaataggaactatggcaagggcaggaagcccttga

SEQ ID NO: 18049 - DNA, 1149 bp, Mus musculus
ggctatcatgcaaacactgagctggctgaagcgctagagaaacagacttggagaatgggcaggaacaaggaaaggggacagcagaagttgcagccaactttacccttccaggaacctgggttggaagcaaatttggatacttcgaagccaagaggacagcccctgtcatatctgatgttcaaagtcagctcctctgtagcccagttttccttttcttttttttaaattaaactatttacatcttaaatgttgcccccttgtcccccctcccagagttcttcaccccttcccatttgtatctgagaggtgtcctcctccaagtatccctcttccctgagacatcaggtctctacaggatcaggcacttcctctctcatatgagggcagacaaagcagtcctctgctacatatgtgccagaggccttggaccagtccatgtatgatctttggttggaggcttagtttctgggagttcacaggggtccaggttagttgatactgttgttctttttatggggttgtcatccccttcagttccttcaatcctagctcttccatagatgtccgagacctcagtgtattggttggctgtaagtatctgcatctatctcagtcagcttctggtacagtctcccagaggatggctcctgtctgcaagcacatcatagtattaataatagtgtcagggtttggtgcctgcccatggaatggatcccaggttgggtcagtcattggttggcctttccttcagtctctgctccatttttgtccctgcatttcttttaggtgggttgctatcccacccctccactgagggccctgcaattttcctttactcctttgtttttttttaaagatttatttatttttttattatatgtaagtacactgtagctgtcttcagacactccagaagagggagtcagatctcattacggatggttgtgagccaccatgtggttgctgggatttgaacttcggaccttcggaagagcagtcgggtgctcttaccactgagccatttcaccagcccctcctttactccttttatagaatgtgcttcagtttattaatttacttaaagttattttagtcctcccccccttttttagacagggtattgctgtgtagctgctggctggcctggaa

SEQ ID NO: 18050 - DNA, 2915 bp, Mus musculus
cacatagtgatgtatccgatttctttctccctgtgcagtcgaggctgtctgtcaacagtgtcactgctggagactactctcggccccttcacatttctactttcatcaatgagctggattctggttttcgtcttctcaatctgaaaaatgactccctgaggaagcgctacgacggcttgaagtacgatgtgaagaaagtagaggaggtggtctatgacctttccatccgaggcttcaataaggagacagcagcggcttgtggtgaaaaataggagcttttccctggggctggccttgctggcgccgcagttgccagggagggctagctcagtgcctcttcctgtagttagcacaccagttgctaaacactgcgctttattttcgtaaccagctgtgtgctgtgagtgtcagaattgaaatactttttggatctaaacaaaaaaaaaaaaaagaaaaagaaacctttccacggatggggtttttttgttgattttcagtgcacttgccgtgccgtgttgtcgtcgtattaccattttgtcaacagtgtgaatgttggtcccttggtaaaagtcctttcttgcttacctgactgttgatgtactgactgacaggtttgttgtcttgtttgtaatttctcccacaagtaaacaatgatgttttctaggtccagattagtcctccatttccagctatagcctggatgcagtgtgagaataaaatggttgacaagcaagggaactttattttgcccatcttaagtcttgtaagtgagttgaattttttgcctaggaaatttgaggccccgactctgtccctgctactaaaacagagcagatgaaactgtacagttcaacccagcaaggtcaaggtagaaagagcctctggaaaagcgttgtgatgtcttgtgttgggttagagcatctgttttctgacatcaccttacaccccggctgccgtagcagttagtctttacacctgcctagagctaacacctgtgtgctgtatttgtaaacatggagaccttttctcagcagccagctagaactggtctgggagtagaaagccatcctcatgtattcactccttatctgtactgaggagtggcttcttagagacatcagtgctgtttggagtagaagaaagtaaaatttggctttaaaaaattcatgtgattggcagtattttttggaataagaaattgaaggttgtgattctgtcagtacatttaaaatgtatagtttagggtagtcatgtaaactttgggctcctctatgccctctccttttcagatcgcataagaattcatatgtggccattcttggggtagaactgaaattattaaagtcaaggctggtgatgtagcttttagtgatagacttgcttggcaatgtgaggcaatggtccatcctaggacttcaaaaaactgaaagaaaaaaagaaaaaaaaaacccaacaaaaatagtgtaggttttttttttttttgcaccctctgacaggaagctgctgccattactagtgtaataggaagtactcaggggtgtcaccctttctttcttggtagcattttgggcttcatgtttgtgcagtgggatctttgacactggcttttatcaggccatggttagagactaactggaaagtggggcctgaaagtgcaggcttgtgctcccaggtacacaggaggctgaggcaggagattggcaaattcaaggcttcaggggtagcctgtctaactgagtgagatcctgtgacaaaaaaaaaaaaaaaaaaaaaaaaaaaagaccacccacccccacacacacacacaagcaaaaaacaaaaaacaccaaccaaaaaggctgggggtatgtttcagtgactttccctcgcatgtttgaggccttgggttcaacccttcgttgtgcagcgagcggggtggcaggaggctgactctaatttcccatcctgaggaatgagctgtgattgctgtatattgttggacatgtagactagctttcttcatggttctttttgcagggttagagtaaggtattaggcaatttttgttagtttaccatttgagacagggttttgctggtagtccaggctggcctggaactcgcacctctgtttccgtttcctgagtacaggattagactcttgaaagtgtctgggaaggtagaaggcttttcagttgcatggtagtttcacaggctcttgcctgttcttgtgggttctgctagacatcattaaagctcttgtcaaaagtttcatattttcctctttagagacagaggttgtaatgtcctgcctgtagtgttgtctaggctggtctcaacctcctgggctgaagctctcctcttgcctcagcctgtgagcagctgggactctaggtcattgccaccatacataactcttgaaattcagtttcagatgcaatgaacaaattgcacttaaaagtgaaggagtatgttctagtgttgtgattctacttgagagtttagaagtgtcatgttgataattagttgtgttcgttactggcttgtaaagcaataaaactgtttttggtctctttgtaaagtagtgtgctgctgtttgaactcttcttctctatggagaatcaaattgttcatgttctgctggccagtagtggcccacacctttaattccagcacttggtagaggcaggtggatttctgagttcgaggtcagcctggtctacagagtaagttccaggacagccagggctacacagagaaaccctgtctcaaaaaaaaaaatttcatgttccttgctggctgaagaagcctggagtggtaagcctgagctgttgtgtaagggtgacaccaaccaagacactagtcactcccagggctttgatgtaaatgcagatactgtctgcatgatcgacctccatgaagaaattaaaggtgttt

SEQ ID NO: 18051 - DNA, 1242 bp, Mus musculus
aggatgtccatgcccaagagaaccacctgcaacgcaaagaagcacagcgtcagcggtgcagtgggatggcgctgacatagctggtccccgcgggcgcccagcgactgggaagactgagctggctggtcaggaaagggtactcggcacggaaaaacccgctaccgtttggaagaaaaactcgccgaagcggaactccactgaagcagcacgacctagaggagcctactgcggccccgccctctccttgagttgcgtatgcaaatttaccaggtcgcaccctccccccaaattgctaactctaagcctccctccggccccgcccagaaaggcgtgtatgcaaattttcagacttgtgacgcgcggccttctgggtaaagacaagcaggcttcagaaagccccttgggagtttcagaaaaacagaaagggtattcgacgtgggaagcagcagtcgaagaaaatactgtacaccgggcaggttggggtaggcctcctgcggtggtcaccgcaaccaaacccggacttagagctttctggctgccgggcgcgcgtggttgcaagcaaccatccttttcttggggttgcgctactgtccaatgaacgcgtagtgagggcagtactgctaacgcctgacaacacacctgcatcggttagagctctgctttaccttggtgcaatttttggaaaaaaccacaaaacctctcttccttacctaaacatttaaagattaaagtagccgcgtgtgtactgttgccctcctcgcagttcctttattgtatgctagagggcagccggacagtaattactggagaccagctttctcaccgctgccctaagactgtgatacactaagaagcgctccctttggaaaatgttgtaatacagataaagggttccgtatttgggttttcatccagcttacaagtaaatctatatactaattcaaacaccaagccagcactgggaggaattagatacttgaaagtgtataattcttttgaggcgcagagtctatgtagcccttagcatgtagcccctgctggcctcaaacttgtagctcccgactgctaaaattaaaggcatgtaccacttcccggggcccttttttctcccaacttttaaaatagttctatttatgagcattttctttaaaacaaagcaaaaaaaaaaaaaaaaaaaaaaccaaaaaaacaaaaacaaacaaaggtcttacttttgagccacaggatttaagtttccttagt

SEQ ID NO: 18052 - DNA, 1199 bp, Mus musculus
agctgtggcctgctcccagctttcctcaatgatgtgccaccctaacatctgctctgggctcccctgcactagggccagttgtttaaactgtcaggatggctagacagaaatctggctctgtggcttctcctctttccctgcctctgtgcggccatgagtccttttgctccttgcctcacataatatagagcggcgggcagcagtttgttagctatcagaagctggaaaagggtgtgtttccagatagggtgtagctaggtggtgacacgcattttatttcatgtgtcaaccatagctttagacctataattttccattattagaacaatggagcagtagatacactcaggcaaagtcactggttttctgtgtattgcatgatcccatctctggggcagtgagcgcttcctccctcctgtggataccaacatgtttagttctaagaaaagcagagaagcagtatgtaacagtatggccagtccttcctgacttctcttgcttctccattaaaggctctacagttagtaccaaatctgtgtcgacgacaggatctctccagcgatctcgaagtgatattgatgtgaacgcagcagccagtgccaaatccaaagtctcctcatcctcaggatcccccgccttcagctctgcagcagcactgcccccaggatcctatgcgtccctaggtaaccaggctccctcccatcctgctgccccatgaccctggcctcggagcagagcttacacagcgcttccctctatagctgagagcagcttcactcttgagggatctaaagcataagtaactactctcaaagacagttcctagcgacttgttgtccagtgtcatgtcaatgtcccttttctctggagtatcagcctgacctgtaaagacatgtgcttgcaggctgtgtggtcctcatgtcctttttcctatagcaagtcctgcccatacctaagccgctggccatattgccagcactggctttccccctcccctgctggtgggaactgagcaagatggctcagtgtgcctttagggtttttgtcgttgaatgtctcttagaatgagggtgacaggaagattctaaatgaatgtaatgaacctttaaccacctttagcacaactgtgcaggtgttctatactacatactgcccacacactgctccccaaaattgtttctaattactttccaaatttt

SEQ ID NO: 18053 - DNA, 1774 bp, Mus musculus
gattcaaaataatttgaatagtttgaaaattaaaactatttgtgtggcttgagccagtaactgcatttaggaaacatatgtgccaaccttaccatactaggtatgggtttaacacactgtcttgtattcagagtgtgagaggagaatgaagggggctattgtagtctactttaaaagaaacctattgccaggcgtggtggcacacgcctttaatcccagcactcgggaggcagaggcagttggatttctgagtttgaggccagcctggtctacaaagtgagttccaggacagccagggctataaagagaaaccctgtccaaaaaaaaaaaaaaaaaaaaaaaagaaacctattgatgttaaaaaccaaatgatgctgttaactaaaatggctcatacagtctgcggcccttttgcatagaatatctccactactaacaaacatttcaactgcagacttcttaagcaagcatgattgttcaagcaagcacacccacagaccatgcttaagggctgcacatgtgagcacagctgcagtgaattgttgctttgtccttcagagtttcattaaacccttacactagtctgctgaggcaggtgtactggttaccttccttgagaggagtcaccaaggcagaaactgacacagttgttcagcagtaatactaggattggcaccaaaatccattgggctgaaaaatcccctttccaccacccccatacatacacactttctacaagacaacaaatccttcttcacaaaaatgtgcagcatgtcacttatgtcacctaccttgacacttctgtttttaattccctaatttgtaagcacagaaaatgtgtgtgtgtgtgtgtgtgtatgtttctttttatatttaactctgcactgtagtttttaacggatgagtcatgaccggttcaccttcccacttcttccttcccctgctcctcgtgggacattttagaagaagcctgtgagaaggagatacgagccctatggaatgtactctgatgatgatgccaacagtgatgcctccagcgtgtgctctgagcgctcatatggctccaggaatggtggcattccccattatctgcggcagactgaagatgtagcagaggttctcaaccattgtgccagttccaactggtcagaacggaaagaggggctcctgggcctgcagaacttactgaagagccaaagaacactgaggtgaggacacacatctcagtccctgttagactcgtcataggctttgaggtgcctctgccattatagatagagtccttgcaaagttctagtcactgagtcacccatgtcacccatgaggagacatagtacctgccacccagatgtctgaaaacatctagcaaatccatggtcatctgttaggttgcttggacatttggttcctgacaggtgcacatctgacaggagcatcctttagatgatgctccctggggagtcaggttcagaaaacaattgtacctgtaggcgcacttctccccaaggctccaggataaactgcagcaagtacaagtctgtaagctcatgtatacattcatgcgtacaattcaggcataccgagcaagtcctcagtgagatagagcatttcccaaagcagcagcacgctagctttgtaatgattatttctggtacctctctttggtattttataaaatatttaaatagccaagcattgcacagattaaataaagggatgcatttataccaaatttcctcatatctctgttgctattgccatgctattttgtacc

SEQ ID NO: 18054 - DNA, 2600 bp, Mus musculus
cggattgttggcctctcttctccttcttgctgacttccccctgttcactcatctctgtcttcttctctctgcagatgaagctgctgaacttatatataaagagggcccagactaccaacagcaacagcagctcttcctctgatgtgtccacacacagctagtggccgtgccagtctgtgcagaacacacattggtggtgcctctgagaagctccatcagttgcccagtccattcaaggaggccgcacataatttattacaatcagtattttggtcccttccagcttttgtgtagaattttgctggtattgaatgtaacggaagcaaggcctggggactgagaaatgaagagccatacttgcacgtgtctgcaccacctgctgacatcaccaaaccatggagggcacagctcttagaatccagagctctctagccagtgcttggtacacagtagcatatttttcagtccatacagacttgggggtggtttggggtattgctgtgtgttctttatgcttatgttcttagagtatggtcagatgggacaagaccccctcctgtcttctacatgacatggagaaaggttgtgtgttctttagggtgtatcttagagttctcaaagtggaactgcagtctgggcaagaaaaagacgacaacctggagctggcctcacaaaaaacacgaggggttggtttctcttgcagagggagccaacttccctgccttgggaatagaatcagtaatgccaccaaagttctcatggttgcattaaagaaaaggtgactgtaaaacgccaagattggaaccagacttatatcatgtgtcccgggaagtgctggccaaacctcttgaaacaactaaggtagaatctggctaaatagattttaaataaaattcttaagccaaatgacaattcttaatgcaatcatgcaaactttcctaggctggccttggatgtggtgtcctcctgcctcagcctcccacgtgctggggttactgataggggccacgtgcccagcaaaagcttgtttgcggtgttagttttcgaaaagcatgtgctcttctagtgcagagcccactgtaactaccagggttgagagcagaggctgggctggcgagttctctagcactctgcttctctgaccctccaaatggtaagtcaggcatggtgactcatgcctttaatcccagcactcaacagacagaggcaggcggatctctgcaagtttgaggacagccagggctacctagtgagaccctgtctagaaaaacaatcaaaaagagatagtgaggttggagaaaacccgtgggaaatagacactgaaaatgaaggttccgtgtgtgtgtgtgtgtgtgtgtgtgtgtgtgtgtgtgtgagagagagagagagagagagagagagagagagagagagagagagagagagagagatgagtggctcacacatctaactgtcccactgctactgttcagagaactcaggggtgcattttaagggatttgctattattgatggacttgggctcagaacatagcaggaccagaccttactttcagttaaaacacaaaaactcctgtctgttaagagttcatcagtgagaatccttctcaccctgcactaggctccctctgtgttgtagccttgtagccatgtgcagcctggccaggttacttaggggaactcccaagcctaatacagttagaaaggccctgctctggcattctttgccccactgtaaccgaacagttccagagcattacctgacatcctcacagtacacacaaagggctagccccgaatgtcacatgaatgtcagtctgagtagaaagagtacaatcatttctgtctcttgggctccacctcaagactgctgcccgaaatgctgaggagactcgcatgccaccaccacctcatggagggcgacagagcccactgccgctctctgaaccctgacagctacagctgccttgccttgcctccacctccccaaaggacaatattcaaagcacctagaccctgaaggactcttcacagcacccagaactgtgtttgcctccccatctatctgactatccaaggccttgaaaccccctaccctgggggaccgctcatctgacttcctgcttcctggcgagctgcccctccctctgctggaccggcgctctccaggtgcacccccgtgctgtgcggacctggtgcccacagatggcctgggctcgccttacctatggctcactactagctttcaacatgtgtgcaggtaatgcaacaggtttgtctcctacgtcttctgttcctttctctgccacctttatggaatctcacactttaaaagacagcaaactagaactttatagacaggacactgctaacaacgttcagaagagagaaatgctctcaaacaatcggccaccaagatagttcacacgcatggtccttgcgcccccagattgggtgttgtttgttttgggtttttttgaggctttttcatgttacatccatatctgtatttatatcttatttgtttcacttcccaagtgtatcatggcaaatgtacagattttttgttgttgttgttaataatgtgctaggatttgcta

SEQ ID NO: 18055 - DNA, 1209 bp, Mus musculus
cctccttgctgcgcaggtcctgagccttaacctcggccatttctgtgttgttcatcgctgaggccgtctggttctagagaaatacttgagttttaatttttaagaattatgtgtctgtgtgttctggttgcctgtatgtctgtacatcacatgtgtgcctcgtgccttcagaggccaggaagagctaggaattgaactggggtcctattgaagattactcagttgctcctaactgttaagccatctctctggccctgagaaattaaattttttttccattttttattaggtatttagctcatttacatttcgagaaattaatttttaaaccaatttttaaaaaccatttttactctgtgtaaaatgcttactgtgcaagcatttagaccagaattctgaaccccagagcccatgaataaactgggtgtggctaggaggcataaaccggagggtcaggggttcaaggtccaccttagctacatgagatactgtctcagaataaaattacagaaagaaatggaaaaggtattaccttcttccctcaggtcagtcgtatgaaatccggctgctggagaatcggaagctaggggacttccaagatctgaacacgaaatatgtgaaggtgagtaagctcagggctggctcctcacatgctagaggggcctgtggggtctgaatgcctggggctgggggtggtgggaaggaatccctgagctagtcccatcccagtttctggagttcattgtcccagtgaagattagatgggtaggcagtggagcagggtggggtggcttacattggtgaagtatgctctgggttagatagatagaagctgtggcctaattttgccctcaattgagcctttcttacttgcacataacagcatagtaatcagacatgtatgtgaagctgttcggaatactggaaaccatggaagcatccaccttcttaccattgtccgtgttcttgggattctgatgatagacaggaagtcctaggaaaagggaccagagaggggcagaaggttttccctggctggggacaggtatacatgctcgtcttgtggccctgcagtccctacacacagctgtctccaacatttgccttccacagagcatcatccgtgtcgttttccatgaccgccggctgcagtacacagagtaccaacagttggagggttggcggtggagtcggcctggggaccgcatc

SEQ ID NO: 18056 - DNA, 1145 bp, Mus musculus
aggaaagctacagacaaccatggacacaaagtctggtgtacagaagaaagccagcggttcccttctcctttcctcttggcttttaggtttttaagtttcttgttctgtttcctgggcagatagtggggatgtgcatctcttaaactctgagccctgcagttggagggtcctttgatgtattggtccttcctgtctcctctcttatgtcaccctgattcctgcttctttttcttgagtcactggcttcatggctagctctgccaatctcacaagggctccacacacagttctcctcctaatactgacttcctttctcaggaccctggtagccatgtctctcctgttcttggatgacttgataagactggagctatttatttgtgccttccatttctttctcagtcgccttgtctctaaggatctgctacattcaagcccagagtctctgcattgacatggtagatggcacagtgtacctatgtgacctctcattgtgtattagttccttttctgttgctgtgataagatactctgacaaaggcaacttgataaagaaagggcttgttttggcttagagttttgtagggattatggtggatattatggtgaggaaggtgccaaacagaaagctagctgatctcattttcatacacgtaggaagcagcacagagagaaagagcaagagcaggaaatggtacaagccttcaaggaccaccaaccccagtgacttacttcctccagcaagactgcatcctctaaaagccccataacctcagcagactacatcaccaactgggaccacgtgttcaaatacataagcccatgggatacatttctcattcaagccacacattttgcccatgtgacctcccacattttctagttagagatgctatggactaggagatgacatgtgacttcctcaccagggaagagaggtgaggacagaatgattcctcatggaccactactgtgtattctcatttctgttgagcaaagagtactaagaggtgaagattctgttatccagtggccttgaccatccattctagacatttgggttggggtatgtctcagtagatccctccctggcaagtatgaggccctgggcaccatcccagcgctacagcaggaggtacttactg

SEQ ID NO: 18057 - DNA, 6940 bp, Mus musculus
ccaagtggcccaggggtagtatggtgtttttttcattgctcatttaagattctatcataggtatatagataggtgctttgtctttgttggcatggttgaattgttcactttttttgtttgttttgtttttttcaagacagggtttctttgttagccctggctatcctggaactcactctgtagaccaagctggcctcgaaatccgcctgcctcggcctcccaagtgctgggattaaaggaatgtgccaccactgcctggcttgttcacctttcttaactctgggggaatttgaggatcagtagctatggtagacttaattcatctttattatgcccacccagtgcttcaactctttcctaatcctcaagccatagtgagttacttctaagctcaaagatttgccaaaggttttggcaaatattattttacaggcagaaaaactactctcacaggaaagatgagctctcagttccttgtcttttgagacatgtgggtggggttgacagctttattgagatgttggtgtcgtgaatatattggcacaggctttctgtggacagggtttcattttgggaatgtgcctggtagaatggacagctcataaggtaacttttcaccggtttgagaaactgcccagtgtttcccacgcagctacacgtgtttgtattaccaccagcaatggaggatggttctagtttctccacctcctcatcaacatttgctgtgatttctcattcttgcccgcctgtcctctctccctcccccttcttcttccgtatagtccagcctggcctcgaagtcactaagtagaagaggaaaattgaacttctgatcttcctgactctgcttcttaaatgctaacaacatagaaaagtacctccacacctaatgtatgcggtgctgggacaaaatccagggctttgtgcttgctaggcaagagctctctctaccagctgagccacctccctagtggtgacctgtcttttattacaatatcctgctggtgtcatgcatgtctctggctaatgatgttcaatgtctcttcacattgattggccatttgtatatctttgggaaaatgtctggttatgtcttgcctgtttttaaattgggctctcttcattgaattgtacaagttgttgatgaaaatccttcatcagtttttctccattctgctccattctgtaggctgtcttcaccctcttaatggttgatgctccttggggtgtacatgtttctaaattggttgtgcttagtagtatgaaccagcactcccagtactcagctgaggctcccgaggccagcccaacctacatagtaagacccagtctcagaaacaattgtcatcattattttaatgtgtgtgatgcctgagttaccttctgctgattgtagttttgatgtggatactaagaaaccatgacctaatgcaaactcaggaaaatctgtgttttctccttagaattaaaaacgctgtttatttttattttatgtgcattggtattttgcacattggtatagtatgtgtggttgtgtgtgtgtgtgtatatatatatatatatatatatatgtatatgcacacatacacacagatccttgtaagggtgttagatcttctggaactggagttgcaagcaggtgtgagctgccatgtgggtgctgggaattgaagcttggtcctttggaagagaagccaatgctcctaacccctgaaccatctctcctggtccctcttaggaacatgattaaagtttagttgttacaatgagttctgctccagtctgagttagttttacatatatgatatgtagtgggagagtctagtttcatccttttacatgtgagcgtctacttattttacccctaattactgaaaggactggagcttctgtagtctggagacctccgattcctggatctttgtgagcacggcgggaccattgctgatctcttgttccttttaccttcttggtctgcatttgggtctactgctcttacggccacttccctcctctcctcctgtcagcaggactggatgatgcccctctgttctgtcgtttttcctggcactaacacttcctagttctagaggaaggtaatgaccaaacgtttcccaaacgtttccatgcttggatagagaggcaaccgagtctcttagaataatatgctcaaggcgagccactgggagaaacaggactcattgggcctctgactttcagcccatcaggctatctgtggcccctgttcccaagtgatagctctacatgggctaaaggaagagagactaaactgataccttttttttttctcataccaaagtcggtctaaactggagagccaaagatggcacactgtaaaaagagcagatggcatggaatgttccaagtcttgtcttggggtctgaattagttatttttctcattgttgtgaaaaacatctgacaaaaacaaaacaaaacaaacaaacaagcaaaacaaaacaaaacaaaacaaaacttacaggagtgagggtttctttctggctcacagtttaaaggtccagtttgtcgtggctgagaagtcttggcagccagagcatgggacagctggaagcagaggcagatggatacaatgtttatcttaccatctctgtttttttagtcagggtttctattcctttacaaaacatcatgaccaagaagcaacttggggaggaaagtgtgtatttagcttacacttgcacattgctgttcatcaccaaaggaagtcaggacaggaactcaaacaggtcaggaagcaggagctgatgcagaggccgtggagggatgttctttactggcttgtttccttatagaacacaggactaccagcccagagatggtcccacccacaatgggccctcccgcctttgatcactaattgagaaaattctggatctcatggaggcatttcctcaggggaggctcctttccctgtgataactacagcttgtgtcaaactgacacacaaaactgctactatacctttttactctgcaaaacttcagccatgaaatgctagggtaggttttcccacctcagataactaatctagaagactcctcacacacttgcttggcaggggagagtccatgatcaaggagctggtctttcctgggtaatgcttattctttgcagtctggatgtgcttgactgagtaatttttggtagtgggggaatgtattcttgctcccgatgagtgaattaaaggaatagaaaagaaactcactggcagacatagtcagaggtttatttccatggtgatactaagtcccatcaagttgacaatcaagattagccattgtgggggtctagaaaacagtcagacattgccctagtgacctcttacccagtctgcctggagccccttgagagctattaaccaggaaaaggctagaacccataagcacgtcaccagttcctaagtccagtgttgcttcaggggctggcccaagtagctggagttctgaaaattattaacacatcagtggaagaaatagaaagactctttagctgttgtcagtggaaagttgaggttgttgggggcaaggggaattgaatatggtcactgccttaggtacactggagggacaggaccaaaagtcaagggtcccaggctccctttaatacaaggtgaacagtagaccattagtagagtgtccctgtgtttgaatggcagaactgcccccctaaaacaagaagcattgatctggagacctgagaacctggaaactagtcagtaggtgaatctgagcttcgggaaaactttaccattgtttcccattcatcaaagtcatgtggtggacaggtgacctttgcttgtcctcggtattcagtgccaccagtgctgctgcagctgcaggtaaacccgagtggatggatgcctgctcaccaagtcccaggctttccctgactgcagctgggtgagtgcaggtgtgtaggtgtgggcctcagtgatgtgctgctatctgctgtcatccgagccagtctacttggccagtatagagtgttcttttctctttcctcttccaatctctttgtcctttgaagataggactactgggcccaaagagcagtgagactctaggaagtacccagactcctttcccaaggccagctctccttagctgcttctccgcctcagtaggagtctctgagcccctgcaggcactgctgtaaagggtctctaacctgggccttcaggctgttctaaggactggagtgaagaggtctgtgttcccttccttccaaagagtgccctccctttatatttgcagacaggaactaaactcagtgctgtccactggtttcgccatcatttagttactagagagcattatcttcaaacctagttcagggaatgatagccttgccatcaaaaattacactaaattactgtattggattgcttgtgttaaattatgcaggactgtggtggggctcgatggccgagcacttcccaactgcgagcaaggttctgagttctatccctagtaccataaaaccaataacattgtggagagctgggtatggtggtgcaaacctgtaatcccagtactcagggcaatgctgtggccggggagtaaacgaagggtgactgagtctcaggccagtctggactattaaaagttgttttctcttgtgccaacatacttaattttacctctttgcccttaaatactgaaatatttactccccaactcctttttttttaacattttaatgtattttattgtcttatttgtcagtggtagggaacagacccagaattcagggcctcacacatgtgaggcaggtgttctaccactgagctagcccctaacctcagcagccttctctctccttaggattacttagggcactctcaagcattaagggctatctttttttttttttttaattaggtattttcctcatttacatttccaagggctatcttaacaatgcattttgcataaacttaggagaagtagaaggtgcaatcagaagtctggagagttccttgccttctgtgtatctcacttctggaaagttctgatcctcacttggctcccagggactatgcccagcctttccatgagagagagtacagaggtctcttcctcaaacgctcctgttacctggaaccctgctcggcctttgtcctggtcctctggtcagggtttgatagaagaaaggacttttgtgctgtatttatggattgccgagctgtagggggtagcagtggcctgaggcgcctactagaacctgcctggaaaggacagactgatttcagcaggtgtcttgaagactaaacccctgttagcttagcatccctggagcctacagacccctccccatatatgctagacccttcctgtgtggttgtgatttctgggcagcttcctgccttccctggacccagatttctacagtacttgtggggcagagtgtggtgttccccagggatgttcatctttcatagcttgtctatctgtagacgccccctcccctgtcttctgcatccccttgcatcctgcagccactccaaacctgtctatcctgtattcctcattgacctgcttctcatggagtttttatctcaagccctctgcccaggtttctagctggggaaaccattgaaaaatgagagacagactgggtccttaaactacaggaagttacacatcctgttttccaaatccagaattctatacctgactgcatggaacgggtcacattcaaaacatggatatgctacaaacaaaattacccttgggtcatgtgtgcagcatatgcagaaacacaagtggatcttgtgtgtgtgtgtggatgtaaaccccatccccaagataactgtattacatttgtatgtattggtagttcaagatctcaacccgcccaggtagaggcttgtttatctaggatattcaaccttccgtggactgagccaggtcctacgaaggccacatctgtgaagtacgtggacaagcttcttcccacgtggctgccctgaggctttgttaatgggctgacggaactacgggagagagctttgtggggctagtattagagacaagcaaagggggaccatttcaagcactgacctatctcttcctgctgggtaaagtcttgcttacttaccatgttcttccatgctttgatgtgactctttcttgaggtgttctcacctaccttcttcctctaggtggggtgattcttttctaaaggtggtagggttttttaggtggtagtccagactggtcaaatatgtgtggcaggtcacgggaaagggagtcatggaaacccacgttgtcataatgccatgttgtttttgtacctgaaataaagcatattttgcacttgtaaatgaaaaatctgtatgtgggctctgtgctgggtcagaatgcaaataaaaccatttgtactaaacccatgtggctggaacctcaacttgctttgtttattgaactgtagcaaatgaatctactactgtagagtattgggagacacagctcagtggcattaggaacacgcacacgctgcccctatgctccgtctgtggtgttctttccatcttgcagaactgaaaccctgctgccttattaaacatggctctgcagtcccttcccccagccctttgcagctaccacctactttgtgtcaatttgaaaatgaggggcttcacttaagtgaaattcagtatatgtctgttgtaggagattaagttacagtatgtgttaggatctcctctgttttaaagcttagggatactcagctgggtggctgggccatgtatgtgtctgttcactctcattgatcacagactccccccatctgtgaccatcaactctgcagattccaaaggccctagttttgattcctataatttcagcagtgaggagcagaggcaggagggtgagaagttcaaagtcatccctggc

SEQ ID NO: 18058 - DNA, 1715 bp, Mus musculus
agattcccgggttctggctcctttgcctctatcattcagctaatgagagagaactttggccaggggctttccaagtacacgcccaaagaggggaggggagccactctgggtttgaatctgagaccatgctggatattctctgctctgagaagatgagtttgccattctgccacctgggaggaaaagggattactgtttcccctggattcttccatgaagctcgtcaaggttgctcaccacggaggagaaaggcgcatcccccgggatattgtagtctcctcagttacttgctaacatctccatttccttaggtagagtgggaccagcagatttcctaaatggagaagaattaataaaacacgtattttactattggggggggtacagggtctctcctggcctgtttacagtgttctgaggtatacagtgaagccctccctgggaagaagacttgcgtctacatgccttgggttgctgtggactaggaataggcagggcctcgaggtggaagaggccttccccaggaaaaggaagtcatatgtttacccgctcctatttctccagtgcactatctgaccactctctcatgggagatcccagggctcctccacaccggctggtggccagcagacaaccctgagcgaccacctgcagcctccacactttctggtcccctgacctctaccctcctctccaggttatttggcatggaccagtgatgacatgcatggtttgtggttgagcggaaggttgaaggcattgattcttggactttgaggaactcttaactgaatttgcttgttcagtatggcctggccccagataagaaatggcatgtggaaactgactccaaaaagagtcagtcagagcgcactgcagggtgaacccatgcctccaccaccacagacatgtgcgtatcccaaacctgttcctttgagttaacagaaacttttgccaaccaaacctcaccaatcagagcttccttctggccatgaccttggctgtggtgaggagcttcttaacagagtctggaccctctgtgtcccagggcagcaaacttctctgtttacaacccagagacaggaccaactccaaatgacagctctgggccatgcccctgggtctctggctcttgtggtgtggactcattgcctgacatagaccctagcttcccattctgtctgtatctattttgtgtagacatcgtcttgcctgaatagactgtgggtgaatccaaatttggtccagccaaatttatattgccaaacatttttagctttttctacatgctataaattgagatgacatgctcaacttgtaaataagtcttttttgtacattaaaagtaattttttcataatttatcttgttgatctgcttttcccttgacagtagttaatgagaatccaggcagtaaatttggtgcatttgaacaaaaattaggctgtatttttttcataacagtgtcaaaactgactaccccaccttaacccagacaggcttaattcaaaatcatttactggctgtttgctttctgtcactttggggtgggggcagacagtttgccaagactgggatacgagtgagcttagcacatctgagtcaagtagctgaagtcccagtatgccagatctcaatacagacccaggcacagtctgtggtttctgtggtgatacccatttggagttgggggtgttttgtttacttcctcatgc

SEQ ID NO: 18059 - DNA, 1196 bp, Mus musculus
aactggagagatggctcagcatttcagagtgctcgctgttcttcccaaggatccaggttcaattcctggcaccaacatggtggcttccaaccagctgtaacttcagctctttggaccaggcacacatgtaatgtgcagacatacatacaaacaaagctcctgtacacatacaataataagataataagactatggagtaatccaaactttcatatgcaggtttataaaacaggtttataaaatagtgaaggactggacatcttataaatgtgtgcttttgttcatgtaaatatcacaaatacatacgtgcatgcacgctcctgtatttcacagtaaagctctcccaccaaggtctttgatgcgtccaagttacttttatactgcaaccctttcagtattttctagaaaagagggtaactgtcattactaaaacacatgctttggggtgcacaagtgggagtgtgtgccatgggggtgggagtgggagcagggtaggagatgcaggggagcccctgagtctgtctagctgcctgccatgcatctggagtgtcctatctgaccagtccacttctttccagttcgaaggctgttccaaggcctactctcgcctggagaacctgaagacacacctgcgttcacacacaggagagaagccatatgtgtgtgaacacgaaggctgtaacaaagccttctccaatgcctcagaccgcgccaagcaccagaaccgcactcactccaatgaggtacgcatggctgcgatatgcagaaatgcatgcagaggccctggcatgtataaatgcatcacccttgactagtggataaccatgttctagtttcatttctattgctgtggtgaaataccctgacaaaaagcaacttggagagaaagagactcacttcaacttagacttccaggttaaggtctattgtggggaagtcaggtcaggaacttcagttaatcatattcttcaagagcacaatgaatgcatgcatgcttacttgcttgatttcttgtactagattccatttcttttttcatacagttcacaacctcctgcctagggaatggtctgcccacagtgggctgggtcttccaatatcaattagcttaattaagacaatacccaataaacttgtccacaggccagtccaaaacaatctctcactgagactctctgcccacatgattctaataa

SEQ ID NO: 18060 - DNA, 1226 bp, Mus musculus
ctgggacttctcacccaaatcaaagtctgtgtgataatttatgcaaatgagggagggctggtggtggccagagtcacagacatccatcaccccatgtcccagcacagtcatccttcatcaggcccttaaaagatagtacagtttttgtttaaggcaattacttaatcttgacaaactcctgtgttaagcagggctattaatggggcccaccattaatcagtgcgaacccaggtgggtgctttctctgaacctccatcactcttggggacccaaggtgggccctttgccatcctcaatgccctaattacacaaacagcatgctaaccacaagcatcccacgtggacggcaggggcacccagccatggacaggaaagaggcccatttttaatgccaggcagaaggttttctgagccaagcaggatgatccatggaggttattagtagggaccaggagcacagctggggagaacagataactcctctcctgagaaactctcctgctcttagcacccactttgtcgcctacctggcggtctgcagaaggattgcacaagtaccttacgttggccagttacgtttacgtttggatgactaggaaggagtttggaagtaccaagccttgccctgtgtctgtttggcatcatcatctctgacaccccataaaggagctgggtatcagagtgctcctcttcatccaactaccacatgtggccctgtcacactgacacctgcccaatggtgtcagaggggagctggccccacaggagaacccgtagtgagtggaatagagacagagcccagaacctggatctccctcaaggagttcatttctgtttggatcagagcagaacaaaacatagaactacttaggaaagacgggggttcatttcagcttgccaattacaagttacagtctatcgttgtagggaagtggaggcaggaactgcaaatagctggtcacacccacagttaagagcagaaataaatatgtacttgcttgcttgtgtgctggtagatttcttcactcttataccattcaaagccatctgcctaaggaatgatgctgcccacaggccaacccaatgttggcatctctcattgagactcttcccaggtggttttaggttgtaccaagatgacaaagctaaccatcacaacggtcaccgaagaaatgtcactatcttatcccaccagtgaggatggaccagaatcagtgtgggtgggt

SEQ ID NO: 18061 - DNA, 1210 bp, Mus musculus
atcctggagacatgagcatggaaaatgaatgctttctggctgcagtgactaagacctgggaaagacagagaagaagaggtgagatctcagaaggacaactccatgtctccatcccgctctggctcttggtgtgtattggtttcactctgctcttgactgtggatgggctatgaccagctcccttgatttcctgcagtgatggactggaacctggaattgtaagctaagttaaaccctgagttgcatgtggaggccaaactgggtgtcttccttggttacttttcaccttgattttcaagctagtatctttcactggacccagagctcctttattatgctagtgtggatggttagcaagccacaggtatctgtctccactagggattaaaaatgtgcaccaccatgtctgatttttttgcatgggttctggggatcaaaagacaaagcctcatgctttagggtgtgctgtttagttttaactggagggtttcagttgagcaattctctagaacatgttagcctatgggcatgtctgtgggggattatcttgcttgctaattgatgtaagaagacccagccaattgtgggcggtaccattccctgtttaggggcctcgtactgtgtaagagcagagagggctgactgagtagtaagcaggcagcatgcgtgtattggtttcgctctgctcttcactgtggatgggctatgactcgctcccttgatttcctgcagtgacagactggaacctggaattgtaagcttagttgcttttggtcaggatgttttatcacaggagcatgaaggaagctagtacacatggcaagtgctttcccgatccagctttcatcccaacccaaggcttagtgaacacaaggcttgtgctgcatcctgactcaggaccaggaccaggaccaggcaagtttgtgttttctgccaactttagatgctgctgatactgcttgacattgttggtccttgaccagttgagaaaagcctgagattcagtggggagagtgtgggccaggcagggctagcttggggccagattgtttcataagctgggtggagcaatgctgctcactcacacagaacaagatccccatgaggccatctggggaagacctacagtccctcaaatatcatctgagaggccatccatgccagaatctttggtaacccagccgacgagcagagacacacaacctacaag

SEQ ID NO: 18062 - DNA, 1229 bp, Mus musculus
ctggctcctcactggtgcctgtttggactatttaccctggctggcctactttctttttcaaacctagggaggaggaggttggaactgtctcggcacgcgctccagtgtgcgtgtgcgtgcgcgtgcgcgtgcgtgtgcgtgtgcgtgtgcatgtgtgtgtgtgtgtgtgtgtatgtgcatgtactcattcatgtatgtgtatatgtgtcattggtgtttatgtttgtgtaactgggaaagaaagcagcttgctcatccttctgcatcgcagacatcactcatggtgaaggaatgtgagtttcctgcaggttggttcttggtaaacatccctcatctctgtttccagaaggcatggatccttcagctcttacttaacaggtctttctggaaaggaaagcataacgtgagtacacagaaacacacgcgcgcgcacagaaacacacgcgcgcgaacgcgcgcgcgcgcgcgcgcgcacacacacacacacacacacacacacacacacacactttgtattttgatgctagaaagtgactctgagtacgtatggaggccaggaaggtatgtgatggctgatcctagcgtgggatggctcctctctttcttcctggggagtacacagctacctcccagaggaagtgctagcctagcactggctaagaagcaggaaagagagagggaaagatggacagtaatgagaaagagacagagacaggaagagacgaagaggaagggaaacaccagcagcagtctgtttgggggacccctccctactcacccataaaaacttgcatgcctttaaaaacaagcaaacaaacaaaatccccagtagttcagagacttaaatctattatcagtgccccttgctaagtggcaagaccaggtccaggcctctcggcctggccctgggtaagctgtccttcactgtcccaggagttggacgcccttcccctggtccaggcttctattatcttaccctgtccgtgagccatttcgctccatcacatctactaccttctcagggtttagaaactgcagtcaggagtctacttggccagctagaggaaaatcaaggtcttgcacaggtctgtaaactcctaaagagcagccgtacaacagtgcaagttcacattgtgtaaactacatgttgagtgcattatttctggtttgatattcttctacggtccctaggaccttcagccagagtgtaggcatgtacatgtacgaca

SEQ ID NO: 18063 - DNA, 2397 bp, Mus musculus
tggaaataggaggcagacactcacaggccatatcccttcaaatgtttgaatttcgcacaccatttcaaaaaccatgcttgccaaagcacatttcacccttagtatataattaagaagagatccggcgacggtgacaggctcttcctgtccatgacagctgtgtggaaaggcagggctcttctgctgggagagaggaggctctcattaaagcggattcttactgctgtctgtcgacgccttgctgtttattcgtgatgctttgtttgtaacgaaacaggctcataagcataagcttgggggctggagatggacttattgatagaactcttgcctgggaccatcatcagtgtcacgtgacctagccctgggatgcgtaggaaagccaggatgcatggccatgcacagccagttgaggccagcttgggctacaggagagcctgtctgaatgaataaacgaatgaaagaacgaacatttggaccctgtacataagagttgagtgcaccccacctccttattcttttctctcttcctctcacttctaggtattctttgatctgatgagagaaatccgggcaaaaaagatgtcagaaaacaaggacaagaacggcaggaaaagcagcaagagcaagaaaagtttcaaagagcgatgctgcttgctgtgagcgggctgcagactgacgcagcagagtgggccacactgcagcgcagcgagccggaggtggcctcccagctggctccccattcgctctccacaactgcattcactatcacttcttgagatgggacagatatccgtgcgtcagtggctggcagaagaaagacgcctttgtctgtgtaatgcctctgttaactttgccaggagctttgagagtctgccctctcccacccttcctgaaccatgaccaccaccagctctagggtcgtaatgttggagatcaggaatattggttgtgatgacaagaaagagcccacttactcctcctcgttctaggacacggtcatctttccttaggaaattaaaatgcttcatattatctgggcatggtggtgcacccctgtagtctcagaactctagaaggtaaggcagggagggtagcctgagcccaaggccagcctgggctacctaacaagaccctgtctctaaaagaaaaaagaattaacatcttattttcttagattttaagagagagtctctggcaagacccccctcatcagttctaatcattttagaagtagacagaaaaaaatatctaagctcaggtaatactgaaaaagccaaaatgttttgtttcgtttcttttttttttttttttttaaagataaacttgtgtagtttggaagcagatttagaaagatgaacttcacttgggccagataggctgaaccaagcttcctggcgtttgtagagaaagtgggacgctgttctcttcatatttaaatgccagccaggtgctggctgtgggctttccctcctcaacacccttatttagaaaggaaactgtgtggggggagatgcaggcctgagccccatagcgagcttgccttttctgactgggtcttctggtcccccctacaccagccataggcctgttctttttcttccttctgaaaactgtgaccagttcaaattatgactcagaacgtagggccagcaccagctacctctgcagactcccagtgactctctcttcacaagcagatgaagggaaggctcagaagggcatctcctgtagctcctggcagctggttctggtggcactgagatgagtgccaccagaggctcacactcactctctgttgagcttcttcccagggaaggggattctgggacagggggctgccactaagcacacacactcctcctattttccagaagtgaacatttcatgtttaggtgccgaatgtgaatctgggtggggagagcgggagcccttcgaatggattttttttttctttttttacagaggttatgggaactaaggtctgatccctggaaactgatcttgtgtcacttccaaagaatcatgggctttttcgaataaaaaaatttacacttttcaggatttcgccctttttcctgcatgccatcgaatggaacgctcagggaaaggaattagcagttgctcgatgttcttaacagacgtgctgcggtatccaacaagcgttgcttcgctgaatcccctgggttgggaaacacaactataaatacaagcgataactgtagcttcatctctcctgtgggagacattgccatcctccttcgcagataaagccctgaagacaattacacccgagcactaacagacagccctgtccattaaagacttcgctgacataaaaatgtccccgtgagagagatgactcggtaagaacaggtactacaaaagtgtgagagc

SEQ ID NO: 18064 - DNA, 1410 bp, Mus musculus
tgtggagcccaggatggtcataactcccagcagtcttcctgccgcagctttccaggggctggattttcagtcatgaaccattgagtctggcatagacttgttctgacaggttttctgtttggttggctttggttttgagttgctaggggtcataaccagaaccttggactgggaatggtggcatgtctttaatcccatcactctctgagctgcaggcaaactaaggctacatggtgaggcccgtgtctcactcagccactgagctatgtccccaagacccactaagtttgttctatagagaccccgagataacagatacttcaccaatcagttctgctggtgctgcgcagcatcatcagaggcagcactcagcatcgttgcattcactgcagctgattcacagtgctgcttcccagctctgagcacaggagagtgctgcctgcagtccatggtctgcagcactagcagccactcaggcagccagcacttgaggacattgtgtcaagttgtccacagggctgcaaggagattgtgggtctcagctgtgaaagacttggacctattatttgatccatctcttgaccatccagttgactggaaatttgcatacatgtatgtaataaagaatgtgggtttatagatcactgatgctttttttttttttttttttctggaaaaaaatgaaacttgggtttggatggtcaggatgaactggaaacattcctattccaggatagggaacttggtttgcactgtggagacttggcctgagctgtgttctgctgtgtgcacttctggtgggactgcttatcttcttctttatggcgttgttgggggtgatagccactaattctcaggattccttcttatctctctctgtgtgtgtgtgtgtgtgtgtgtgtgtgtgtggtttcatggaactctgtgctctttctgtgctcacatctggatacaatagacgattatgaggattcaccagctcttttgtgtttaccttttctacatgttaagctctgcagtagctttgaaactgtaatttatttttgtatcacatgcactatattcagtgacttcctgttgtatgtattagaagcactgcagtgaactgtgagttgtctgtacactgaacaagaactctaggtatgacccattgcaataaaacttccatgagagttcatgttttatgagctgtttcttgagcatgaatggccctggctaaattgttaagtccgagccactgtttattgtaaccaaatggactaaattgcagccctgatacagtgttggggatttgtgtcagtgtgggtgtgggagattaggagtggaaatgtttccaaaggccagaaccctccttggtggctggggagataattcagtgagtaagcacttgccgcacaagttcacatcccc

SEQ ID NO: 18065 - DNA, 1099 bp, Mus musculus
ctttagcctgtacccaaaaaaaaaaaaagataatgttaaagtagtacccacccatcatagaaaagtgtatggatatgaacctatcatcccaaaacagaaatgacactgaatagctttacctgcttaggctgaaggatcaggcctcagttgctgtggagacaagggtgatgtgcagacggtggtggtgccagtagtgttgcactgatgctaagctgctaagctgtgtcccctggagtttgttctgcccaccatgtgatgtgtactcattcttgcttctcagttaagaagacacccagctcgtggtctaaggagctgtgatttgaactaccctggcttccttgtgcatagtttgtgctcaggcaaacactaatgtcttgattgggaagcccagggggttcagtttcacagtgtccagaggagctggacagtttagaaacactttctaaacagtctgctaaggagttgctcttcttgctggctgtctccccttagccagtagtgtatcttgtgtgatcgtccgcagtgttttttccagtcctgagtgataagacatttcttacaggatgacacttagaattggggcttgacccaggcacactgcactgggtttcagatttctggtgtctggaagtcctggatggcctgcaaggctagctgttctgctaacacacacccaagacacggcggcttagagggcctaaatgtcctgttctgcttagaagcaagcactgtcccttcaagattgagtccatatgagtatcccataacatttttgtctccaggtaactgaattcttactagtcagaatatttgctagtgacttggttaggattcacttgaatcccagtaaaaagaaatcctatgtcctactgtcaagtcctaagcttagaagtacatattgagtgacatattttccctgacagattagacactgttacatgtttcctgtgctgttacagtagcagtactctgctcctttgagaatggtagtgtctaatgagacaggcctgagggcgcctgtggaagcagtagaggcagggcaagtccatgagacagtgagaatgctgacagagtgaggctgggtaagaaggcaacaggc

SEQ ID NO: 18066 - DNA, 1224 bp, Mus musculus
tgtgtttcgtgatccactgagctttctcggtcatatagtttatcacagactagagggaagaagaagctaacaaagccaggctttgtggcacccacatctttcttcccagcacttgggaggcagtggtgaatggatctctgtaagttcaaggccacctggtctacatagttccaggacagccagagcaaatagtgagatcctgtcacaaaaaaagagaaaagagatcctcctcacttcccatcttctgtataatccctctgggtttgaagctctaaccatacttttctaaagtagatcactcttgaatttcctgaaggctttaaactctactggcaacccttagtttttaggtcctatgtttcctggcccccttaaagacaagtcttttctatcatcttagtgtgactgtaggaaggaagctattggactcagtatctaaagagtctgtgttggatatcaaaactgagtgttcctccccagctgccctttcttcctctccatggcccccgtattctcctggaggaattagtgccacctttatccaggcctgcttttatttccttccagtactgcattcaatgaaaatgatgtgcccgtctgtaaagattccctcactccggtgcatggcacagctgcagacagtgcctctgtactaaaggtaagaagattgctttccatttttcaaaagacaatattgagtttaacctgtactataatgagggacagctggtgacttgtagttggcactgggaattgaggcaagaggcacagctgagcttcatctcctggaaagacaagaatcttcttcccagtctctatgctgcttgtgtctgcttcagctgggggcagtctgcttgctggctgtgcctctacctgaagaaacagcactttggtacacatcaatttgtttagtagttgccgcaaaatgatatcaacaatacatgttttcctagagctctctattgtcaacagtcctgcatttccaacagtaacttcttttcttacgtgatcacattgtattgctgaattgcattgactttctgccctaacgcaatgcatggcctgcatctcactgccacctgggtgccctttcccttctcaggaggattcagctggggcaccaggactctcctatccaaacctgccaggctggccacaagccagtcactgtctgaactaccaggctttatctgtgtagatgcaagagctgcatgaatattcaca

SEQ ID NO: 18067 - DNA, 1185 bp, Mus musculus
gcatagcactgtgtcctcgggaagggttttcaatgttagcatttaacacatcactcaaaacatctctcaggggattcatgtttatgacaaactgtcagttgtcatccacatgccatctaagtaagactgagttttaaaggttaagacataaaatgtacacccaaaaggaaccatattcagtcatggtgcctcagccttttgtggtgctatagtaatactcttctcatatgctactctctaaagtggcccatgccttcatttcagctaagagcctgcggtttaataaaaattattataatatttttttcttaacaaacattttattaccacagctgtagaaaatgcaataacagcatggttcatgtagagagatatgtctgaaaggtttctttgggtggttaacttagagttaacgtgaatggttaccttactagcaggtggttataccaaatgcaaggtggaaagctttccttgttactcttttctcaatgaagtccttgacagatcatccgagtttgtatcaccctcataatctgacccatacaacctttaaaataaaattctgaagtcaaagtcttaccatttttgagatggattacctgtataattcaggctctttggtttaattcacaaattagctggaaaagtacatgatgattgacacactaggaagagagaaacaaaaacagtatttcctcttttacaattatttttaattttagaaaaatttctgaactttaagctgtataaggagaaatgagaagggttatattcagaactgttaatgcttggaaataataaagctttgttatatttaacctgtcctgcttaactcagaggttggcttcatcctataggttctctcttcagagggctttgacagaagtctgctgttgtagatacagtagggcttgtcactagaagacaggtggctaaccaaaaatatttagagcatgaaattcataggcaaatcttgatctgatttttttattatataagagaatcattgcttaaatatactgtagatgtaagatggatattcaaaattttagtatatcctacagaaaagcagatgcatatcttaaatatctccaagactcaccatctagtatgctctaaagacaatactaatgtacaacgctctgagggttttttgttttgtttgtagctcagattataactaag

SEQ ID NO: 18068 - DNA, 2802 bp, Mus musculus
atatacagaaaatatttttctatgaacagaaggttaaaactttaatttcattgcttaaaagggataaaacaatatttgtatgtctttcatgctgtaaagaaaatgaatgtatctttcaaatgttcgagttgttacttgattctaagtatatgtgttttagaaaagcaaactgcaaaaggttgaagagtcttacaagtcattatgtaaaatgcaatgttggaagaaatggaatttcattataaatgagtagtcactatcaaagcatatttcagatatagtgtacattcattttcacattgatttgttttatttctagaaatgtttcttaaaaattgtatatactgttttgagtgtaacgtaattgatttctaacttgtgttaggcttagtgtgctgctgcatgtgtctaccatggaggaaagttcccaagctttgtcagtgtcacagccaccagtaggggcatcattgtgagaatgtgaaacccatgcctaagagccactgcagtaaatatgtgcagaggcctctgactgtgctaatgtgtttccctttttatcttcaatgacatatatagtaagactactggaccgaactctcctgacttgtaacagtggtggcttgtatgcttacaactttattcagctgagtgaagactctttaaaccagtgcccataggtgtgagtgatttgttcaatagcttccttaaatctagtatttaccagttattaaacttgatgaaaattgggaattcattgttttgacacttttctagccattcatacttatttcaactcatgatgtaccctgaacaaccaaaaagtgatccatggttagtgtcatatttcctctaccccagcagttacaaagtttagcactgctaaataactgatgacttagaagttgcattgttaaatacagtcactgccaaggatcatcaaggagatagctttctttaacctttggcccagatagttgctgcttcctggtttccctagatgtgctagctatatatctggtatatgtcttcatatccactatagtaacaattgggcctagtttaccctttaaaagttttttgttttccactcatatactattccagttatcttccttcccaagattgtctggattcattttcccagtgtttgaatgagttaacaagatccctcactcctgaatcctgtagagtcctttttcagtgctaaaattgttttccaatagcactttatttcatgcctactactgatttaatttatacattaaaaatatctatcctagagtttgtaaatacagaaaagcaattgattagtagtagagtttattagattggccccaagtttaaatgctttataatgatctcttgatagcttctttgatacttaagaggtaacttatgtgactttagctctgccgttttcctgtaatttgtataatacagtagaggctgcccagccaactatattgctggacttatttctctcagctagcttcagccgagcttggttactaaaactgtttttgtgctctgagttttggacatcacatgaatatttggaaatctgtttgttttcagtatagtacctaaagatttagtagatactgcaccacaagttcatagtttatatgaaagacaaagggcagaatttataatattgtaacagtttatattaagctgtttttataatctgccagtacaatacatctgctgtaaaaatataaaagttgtctaccccagtggtctccagcacagaacacaccaattctaaactatgctgtggacttttaaataagaaaggctagttattgtcttctacagggtaggttaactttaggcctgatagcttatacttatcagtactgttttaaacaggagtttaaaaattatttttttgtagagggtattttaatttgggaactttctttttttgtaataggtgctatatgtaaatatggagtgagaagttgcttgattaaaggtctagtttatttccttattaaaatacttttcatttctgtttccatttcatggtttctgctgaacttaatagcaaaatagaattagtcccttaaagttgtagactaccttttctcacagttgtacaaactaatttccatatggtttggtctcagattaagaggcaaagaagctaagagtgaaaacaaaatacataagcttgaatttggtcaacactggactattagaaattatcactgtgcacttgtcactgcagtttactttgtgtctgaaaggcattgtgtgtgtgtcataatttcagtgaaaattagaattcctgccattcatgtttaaacaatccacacatagcaacagtgaacaggataaaaatgctggtttgcattgaaactgttttagtcctaacctcaatttatattatgcaaaatacatttacagatattttgttggttatatttcattttgatttagtacttgttcaggtacaaatgtgaaacgaaaaaaaaaacccacctagctgttaatgttcaattgaaaaataaagatgcgctttagtaatctaatgacttcgtttcaaggttcttttatggagacttattgttagaccaatgaccgtgatttattcattaatgggtgatcagttagaagggatggctgaatgctaaacctgatgtttatttctacaatcagtagtgcacatggtgtctcttctctgaaggggggagtagagattctaaaaagaatttagaaacttgaagactatttgtgcgtgtgctatgtgtgtggtgtatgcatgtgtatgtgctggtacagccaccaatgctcatagaggcc

SEQ ID NO: 18069 - DNA, 1988 bp, Mus musculus
atgtgagaacttgctcactttttcacatgttattttatatggatatggttaaaatagacacatttgctagtggtttcagattacttatgcagtcttgataaaacataggttccaatggtagatgttttggaatgctatttagttgggagaatgatatacatttaaaaatctttagtaaaatataaatcattgtttcatatattcagaatccataatagtaaaattcagtatttaaatattaattgccagggtaccaaataaattgtcacttataaatatttcttgtcttatttttaaagaaagaaataaacatatctttacatcaaacagaagtccccctattctgatttcacatgcaagacaatattagtcagtgaactataattttgctcagacattccattctctacccagaggcaaatgtaatttaggctggtaggatatcattgcaagttaaaaagggatattgggttggagatctacacattataaagctattttatttcattggtcgattttagcctaaattttaaatcttgccatgtgggtagaaggtgacaaccatagaccgaaagagaaaagctagtagaagggcagtgtcgtgattcatttgctctttaatgtaaagctttgggtacatttctgtagataacactgctgttggcagtgagctttgctgccttttaagtcggcagtgcttgtttttaagtgacaaggggagaaataaatttaaatttctcatagaaattcttgtctaagaactatactccattagtattttacgtgtgaaaacagcccttttagagtatttattaggatcctaagctaatcgtagccttcacaaattgttactatggatatgctaattaaattttgctagttacctaacatataacagtcctttacatctaagcatctaatcagttaattaatctaaatagatttctagaaataatgctagttttcatacgccaggtagtgctacactccatacatattgatgtaatattgtgtgacaatacccaaatttcttgaatcgaactacttttccatttcactcgccacttgtaagtccacaccccgacaaactcaagaaataatgtgtttctcccaacaagtgaaaagtcagtattggtgagtcaggtcttttgtacatgctaaaagtaaatgtgaaaaacttccttccctaaattcacatgacttttctgcttcttttattgggcatttggttatgtcagcactgccgagatgctctgtagtaatcttttgaagtagattttgcattcacaaaaagaataggttgtatttgctaaactaatccattcattcaaaagtgagacagaataaatagctcaagaaaagcttgtgtgtagtttgctgggccaagtaattgggaaagggtaatgactgatcattttgacttaagaataaaggtaacagtgtatgaaagttgacttcacatgcacttatgctgagccattaggacggttgcttgaaagttttgggtactactactgtacgtgccttcatagagaaagatgagtgcattgatttgcatgtgtacttcataaagacatgtccacagacttttaaccatggggttgtttatatctcttggcaggtctgaccaagtctaatgagttacttgagcaaaaaatctcttgtctcactagaagtagtacttgagagctaaaaatttgaaagattttgttcagtttttatgtccttgttattataagaaggaccacaggtccagcaattaatttagcagaatctagtcatcttcagattttctaattctcaatttagtgttgctgtattagactataacttcagtaaattgtgactatgatcagtacttgtaaagtttacctatttctacttgggaggcatgctcagttgtcacttggaacctgtgacaccttagaagtttgaaaggagccttcagaagtgatgccaattaggaactggactcagtttgctagagc

SEQ ID NO: 18070 - DNA, 1145 bp, Mus musculus
ttcagggttttttttttctaatttatcttttgaattgagttttctggaagtaagaatgtttgttccaaaggtaaaataatattattttattagatattttcaaatttctctttatagtttcagtattttaacattcctatcagcagtgtcttgggttttgccaagaaaatatcatgtgagagtttctggtttttttgagttttcttaactttttacccattggtaaaacttctaactccgttctgtttcatgttttaagttttttaataagcttgatgagtgagatgttagtttttggttttttggactttgttgcagtgattctggttttttctccttgtgtttttcagagtcaatacagatttgtatgtgaagctattctgaaagtttatgaagaaggatttgttaaaccattaacaacatcatcaaataaataaaacaaaaaggttggaacaagtactgggaaactgattttgttatgttcactgtgccataatactgcttgcaagaaatggcctctcacacaaaaagtgaagaactcaaaaagacgtcaagaacttcagcactactgcactttatgttttaaaaagtcactcaaaacctattactcacatggttgaccattttgtgctttgctctgaacgacgagtgaaaactgaatatgttcagggtagtttatggaattttgaggtgttgccatgcagtcccctcgggtagaattgccacagataaggctcagaattctcatctcttacacacccgtaccttgaaagcaaaaaggagtaaacatcaggagtctgctctggtctttcccagtggttcatgtactcgctctactgagtaccagattttatttttcaaatgttagcaataccattctcaacattagccagtacactgcctgtggatgcagcacatcttccctgccatcccaatagggacctgctgttgagaagaacattggaacgtgctgttcccaggaaatgctgcacagtgtccatttaccagcatctcagagaactaactatgaatctatggattttcttggatttaatgatgtaacttatatttatcataaggttggcttattccaaatcatgtgatttcacattcttgatgtaaaggaatgcatgcatcgtgtctta

SEQ ID NO: 18071 - DNA, 1138 bp, Mus musculus
ggatgaaccatttatttgtgtgttaatagagctcatgttaaacaaagttaaggagctggatatggctcagcagttacaagcacttgatgtatttacaaaggaccagagtttgacttccaatatccacatggtaattcacaatggtctgtaactctagttccaggttatctaataccgccttctggcattcataggcaccagacatgtacttgttttacatacacacattcaagcaaaacgtccatacatgtaaaactaattttctttaaaatggagctaagagggaaaataaataaggataagttgtaggcctggcatttataggcccaacatctaagatctgagctctcttatactaacttgaacatgaaagatgcttagtgactagttgggtgagagaatatggggctgatttattcagctttgtgttcatttatcatatgatcaaagctagcatatctttagacataatggtgtatagacttctatctatgccattgatccatttcctagaaattaagggcatgtctattcagatctccagctcaaaatgcctcattttctctatttttgtaagtatttattaactctgtgtgtgtgtgtgtgtctgtctgtctgtctgtctgtctgtctgtctgtctgtctgtgtctgtgtctgcatgctcatgatcacacatttgaacactcctgtgtgtgttgatgcttgtggcatgagcccaggatcccaagaatgtcagaaaagggcatctatccattggaactggaattacaggaggttgtgaattgccaggtggatgttggtaactggacctaggtcctcttcaagagcagaaagtgctcttaactgctttagtcttgcctcattttcttaatgtgtcttcagatattaaatatgtagatggataaagaacccttcttttttccaaaggaatagcaacccccatagcctttcaaccccacagtcattcttgtttcctacacaaaggcaccaatcagatataatgcaattattagttattgaatctatagaatacatctgtcaatttcttactgaattctattaagattcttactgtgctttttgttgtattttagctgtatatgatgtagtggaagaaaaactagaaagtgaaccaga

SEQ ID NO: 18072 - DNA, 1149 bp, Mus musculus
taccacaagatacaagatacggaatgttttttacagaaagaaagggaaaaaatttcactgactatacttcatgtaaaagaaaaaataaataaattcagcatacttttttaaaaattatcttttttggacctctcctccttgaagcagaggctcagaaaatcatcgaggagatgaagtggtgggaattgttcagtgcactttgtggtaaactgtgttctgagtacagtagctacaagcaaagatttataacatttgcaatttgagaaaatgtttgatagcaaactattgcttctctttatatctttttttctattattcctcattctcttatacttcctagactaatcccttttttgtcatataaatcaaataaagccttttttggaattattttataaatatatcagagtaagcaaactctttgactatgacttattaaaagaattttaagatttgactcatatcaaaacaaaaccttttatgtattattcacttattttctacagatctccaagtaagcctttggcacggaaattaatggattgggaagtagtcagcagaaattcattatctgatgacaggttagaaacacaaagcctcccatcccggtctccacctggaactcccaaccagtaagtggcaagcccgcgtcatgcttgcattttgtacttattggctacggactttattgcctaaagatcacaatttataaaaatttaagttctttgttcaaattttcaaaaaaaatttttattgtgttttactttttttaagcgtgagtcagtctctctctctctctctctttatatatgaggacatgtggccgtgtgtatgcaacagtggacatgtggaaggtagaaaacaacttgggggagtaagtttttccactctaggattcccaggattgcaaccaagtactcaggcttgagggcagatacttttacctgattggccacctcacctgtccctaacagggtttttgttgcctcaaacattgcctgtttgcttgctggtcattataaaagtgacctaaaatagccttagggaatgagcaagaagaaaattgaacagcctttactttcctcagcagttgattttcaccagaaggataattcaggatttagtcatgacttgaaattttcataaaac

SEQ ID NO: 18073 - DNA, 1722 bp, Mus musculus
aagggcctcttcctcctgccctgcctcaaccgcagactcaccaagatacgcaggggctgggagaaagatggggctgtcaagttcatgctgcccggcgaccacacacagggggagaaaacaagccacgtgtgaggccctggaagtggagatggcttgtgggggccctgagctgggttcgggtctcttttctggatgctgcacagcgaggtgatgatatatgcgtgggtggctgagatcctaattcctgggatgcaggtgtaaactgacatactcagaatgacaccccatacatgtgatatgtacttacatatatttcacatataataagatttgctattattcttacttagctaaaaaaaaaaagtgggtccctatatttcagcgtaagcatttcaaagcaaatgccacacattgaacagcagatcccacccttgtggtatctacagaggcagacagacactctggtataggagaaactgtctttcgttggattctctcctttaatctctatgctccttattagctgaatcctaaagttggtgcaaagctggggcaagaaatgcctctggtgccgcctacccccatcccagggctaagaaagaagcctcgagtgaacagggaaccaggtctggactctgctgcttccctgggcgtgcgtggggaggctcagcaagaccccctgggatctatgcaggagctttttcaggtccgtcctttcttcagggaagggtctgaagctgccccatctgatcctagctgagctgagaagattcttccccaccccctgaaagtccagagtcaccaccggagcctgcaaattgatccttctgcgaaggtgtgaagtcaccgcctctccagagccattaatgaacctggtcttcgggaggaggataattgtttcctctccattaagttgctggtgaccccccctttaaatcactgtgccttctcgccttttccatcattaatttggacatctccgtggagtggacacttgtctgggcagtccggggtgggggggagcattagagattgcagagaataaccatcgaatcctcttcttggggcaaccctccccttggatgtgccccaggcctgccttcattaaattggtccctgaggagaataatagggacccttttcatttaccctgtcgcctgtaggcagaaaacctaccttctgagcacccagaaaacacagtggccccatgctcttcttcagggggttccacagcccccttccccgtgtttttgcctccctccctccttcctcccctccctccctccctcactgttacgttcaaccacaaaagtcttcaaatattgtttttttgaattcttaaagagacctcattttattacaatagttaaaattgtcctttgtttattattcttattaagctttcctgggcctggtttattaattagacttaatcacaggcgtgtataggagaaatgtaacatatgcttgtgtgtgtgtgtgtgtgtgtgtgctcgcacacgtgcgcacactcccacatgtgttttgattatctacagtctcaggaatcctgagactgctttataattcaaaacaactgggagtggcttttctgccaaagctacaagtgtcaagctttactgccccaaacacagagggccagaccattgtcagggcatggcgcatctatcctcccagccctgtgacgtccatctatgaggaaagagttaggaaagagccagt

SEQ ID NO: 18074 - DNA, 1770 bp, Mus musculus
gacccagttttcccttgattgtgtatgtgtgtggtgtgtgtgtgtgtgtgacacacatgtttttgcagtctgtgattgcttctgtaaatcagttaccaacctttcggtatttgatttcaataaatgtaagatatctgtgcgctacatgaaagatatgtttatgagtacatgaaatttctaagttttttgaacacagcatacattgtatcacaatgtcaatgtgccaaacgtgttactgacacagagaataagaatgctttgaacaatttagaaatgtaatgaaagagaaaaagaaagctaaaaacaaagcaaatagaaagcaaattatagctggccgttccctctcaccggctggtgtgccttttcccgtttctaatcagctgtgttcgtcacagcacccacatgtgttgtctctgttgctatcgtttcagagtttgagtcttatatggtactcatgaacttccatagaatggttttaagtctgcattgttgtagggacccaaagaatactttcccgatttcttcagaaggctgtgtgatgggcagaggtggttatcaacatcaccccactttgagtctacatttggaaaaaacaaatgactaaaatcaggggctttgtttagatgaatgtgcttgggaatactgtgtagccctctctctgccacagaggccaaagtgatgctaattgtcactggctactgaagctcacagctccagtgcatggatgacaggaacacaggcagatcaaggtgacaggtcatacagaacctattggactctagaaagcaggccatgtgactgagcagctatagagggcctgagtgtgtggccttcatcagtgcagtcggaagatgctggaacctgactccctgtgtgctaatgtctattacaaggtctgtccttggagagcgtatggagagcacacttcacacatcccgttaacaacgcctgccatgtatttatgggttaagtcgatcagctgactctccgctcgctttgcatttctgaaattgttaattgactggcacacaagggtaaattcttctgactactgtggtgtgcgtgtgcttctgttttgagtgtgagagaaaatgtattcatgtgtctgtgtgtgcatgtgcccatgctttcctatagtgtcaggtagacattttaatttcttttaaagcagtgctgtcagactgaaatcttgtacactggagtgtaatgtgctttgtgttctcaggcgcagagtgtgaacatcccaagagtactccatactgaatatgtatacacaagcctaatggtagtagtggtgaccacactactctatttattattctgtctttcagatgttattcatttagaacaaataaggtatatttttagaatcaaatttgtaaacactataaaatctttaataagttataaggtctatgatatgtttactttgaaaattgctgttgaaagcaagatgtattaaatatgtaattatcaccatgtgttagtcctttttattcatgataaatattagaacattgtacttgtcctactttgggttttactgctgtgaacagacaccatgaccaaggcaactcgtataaaggacatttaattgggactgacttacaggttcagaggttcagtccattatcatcaaggcatggcacagatcaggaaggcatagtgcaagaggagcttagagttctacatcttgatttgaaggtttctaggagaagactgtcttccagacagctaggatgagggtctcaaagcccatggccacaatga

SEQ ID NO: 18075 - DNA, 1188 bp, Mus musculus
ctccacctcgttgcagtggtagaggcagctccagcatggctaaaccttgggctccagcttcctgtgtgttacactgacagaaacacaaatgaggagaatgggggtttatttggctaccatctattggtgaggggcactcagggcatgaactgggccagctgctacctcacagtaagcagagagagggagcgcacgcaagcaagcgtactgtatagtgcccagctggctctctcttctctcttatagtctgggcccacccccagggaatggtaccactgactctcagcctcagtgttctcacagtgattaaggcgatcaggacaatctcccacagacaagttcacaggccagcctcttcctaggtgatcctagcttgccttaagttgaaagttagcattatcacacctagactctgtcctgctgcccctgatgtgagctaaccgggtgggcgcccccatcctttagtaaaggtctactctgctggcatggctggaggcacccagccacaatccaggggagcctctcatgttgcctttctcatcccctcaggatgcttacaagccccggcgaaagtaccgacggcagcggggagcagaggagctgccagacgaagagtcccgagtccactccacacttctggaatatggcaggtacagagtgggtgctggtcatcgagtccaaacccagcaccacatgaaaaagtccagagtggcggcgcacacttgttatcccagtgaggaggtggagacagggagatagatgctggggctccgtggccagacagcctaaactaagcctgttgagtaagatccaagccactgggagaccctacctcgaaaaccaaggtggaccctgtcctgaaaaggaaggttgttctctggcttccactcccctgtatacacacacaaaagagtaggtattgatatatttagtggatggatagatagatagatagatttatagaatatacatctaaataaaggctttttgagttttcatgtcagcttactagccctctctcatcctcaagggtgcttttcccttcttaataaactgtcgaaagaaagaaagaaagaaagaaagaaagaaagaaagaaagaaagaaagaaagaaagaaagaagagagaaagaaatgaaaggaaggaaagaaagaaagaagcaagcaagccaacaattaattttttgtta

SEQ ID NO: 18076 - DNA, 1225 bp, Mus musculus
cggaaacctagcaactgggtcatgctaggtaaaccccagtgtgagatttgtgctcccttctgtataaacttagcatacacatgaacagcaggttgggaccattaagcagaagcaggtgggggcattgggcagtcacagaagaagtgcttctcaactttagtttcctaatgtatgattgagaggcatgaggcatgcatactgataggaaagaaggggtgctgggctcagtgggtagggtgcttgtctaggttccatccctagcatcacataaatagacatggtagcacacacttgtgatagaggcaggaggatcaggactttgagtgtatcctaggctagaatttcttttggtgtggttgtaggcatgatcaactacaggctgcctgtagccaaggatagctgtgaaggtggcccaacatgaaattgtaaagtaatttagaacacagattattttccatctcttctcttaaaactccattacactatgtactccataaactttgtaggtggcggggtcatgttgtaaaagcataacggtgatcactcctgatagagagagattgggttggtaactcttggtagagagaggttggtggctactttgtcccattccttaatccgcaaggcttaatagagatgatgagaggttcctgttcttctgtaccaggtacaaccgccctcctgaggagcaggcaagagatctaaacagaataaggtggttgacctatgcctctctgagtccagtgctctcgtcttgcctggcagatttgtattacaggctgcaagtccatagctgggtaaggctgttgctgacactgttaccccagcgtctgtgcagcaacatctgacacagggaaagctaagccatcagaggagaggcttcgagctcagatctaccttgatttctctctcctacattcaaagtacgtgttacctaaagcagtaatgtcttactatctggttctggtaagcaacaatgagcagcggccgacctgtattgtttagagctttgtgggtagactgtgttattctttcaattaaacctgaggaccctacatttgtatcagacatcctaaatcagatagacaacactttcgtgagtaattccagcatgaagtgggctgctcagtctgacttattgttggctgaggagattccctgagatccctggtcagttcagaatccacctggaggctggtggaaggggagggcctctcagggtagt

SEQ ID NO: 18077 - DNA, 2213 bp, Mus musculus
tctgtacccagacatagctgtacccagacatagtatagcattgtatttggagcctactggcttttaccagaattgtaagatggtggggaaacatctgtaggtgagtcttttttttttttggtgtgtttgtttgtttgtttgtttgtttgtttgtttcagtgtgtactttaagagaagccagattcagagcagagagcttgttcacggggctggctcccagtgccatgcattcttaggaccagcctctaggtcaggagctacctcccctcccatatgcttttcatgaagttcctgaggatgctctggttgagaccaagctcagagcagctgtgagcaggctgagactgaggtgatggtggaaggcctgggaggatgtagggacgttctctacttctccgtgttcagtggttagtcggccagcaccacaggggcagtggcgagtaccatagaatatctgtcaacctgcatccagaggtactgtaatgaagcagagtccacgctgggcataagctcctgttagtctgatcttctggatcagggtctggtttgtagcacttgattcaagaacagtggagacgcaggcttgtggtggaaccaagccagcattggtctccaggaaaggctttccttctccagactgtttctgggggacccctgaggaccttgaacaaagcacggggcaggccttccaacagctctcttactacctcccaaggtgccagtcctatccttggcactttggcagactcctgtcttttctatcttgaatattgtagtcactacctgaaggggtatctgagagacacccagcctgacctgcaacccctatagtgcatcccttctccatggttctgtcttgcctgctcccaaggtgatggatggctagtttaaaggagctgggcatcctagcaataacttcctacaggaactttggcttgtgaaggttcaggcagttgaactgaattatgctctgagaattaccataaggaagtgttttatgatgtgttcattgccagggttggccactaagacaaagaccttaatacagagcagtataatgaagagcccagtaacatgggtggtattgtctgttgcagctgagcgtggctagaggaagagtcaatgccttctgagatgcatcttagagttttccatgctcttccttctagcagcaggtggcactgggccaaaatagtatgtaaaacataatggagggccagggagatgtcccagtcggtaaagcacgagaacctgagttaggatccccagcatcaaggccacacatagcagtgtgctcttgtattcccagcccgtgagaggaagaccaaaaggacccctggggctcactgaccagccaggccagctgagttagtaagcttcaattcagtgagaaaacctgtctcataaaattaggtggagagcaatgtaggtggcatctgagttgacctctgaccttcatatgcacaggcacatacatatacatgcacacacatccccatacacataaaggaacattcatatacaaaaaatatgcatgtttttcttctcagaataactatgtataagatcatgagcagggctctagtgcctcattggcagtgtgtttgacaccatggggagtcgcagcttctgtatcatcatcggcctgtatcaatttcccagatggccacgctcacccttcattgatactctcttcatgtgtctgtcctctccacgattttggatgatgtcatcacaatgatctcctggtcatatcacagtccactcgtcacattcctgttgtctgtcttaatgacacatgtcactgcttaagtttcctgatccatcacaaggtctacatctcttttctttggaatgtgtaagggcagcggatgcagggaccctacccacctcactgtggctcatcagacagtcagaacattccagttggttaagttggctccccaaactgttatctttgcatcctatagtagcaaaatatagatctaacctaacctatgctcaggtttaaacaggctgccagttctagtcagcagcactagagaagccctcttaagtccattagtcactaaccttgaaggatggaatggaaaaggagtttcccagaagtttccagactttaactacaaggtcaccttttggagatgtgtagtattgcggcagggaaggcacattaatgtcgaatagggtcattagtgtgttcttccttcaga

SEQ ID NO: 18078 - DNA, 1178 bp, Mus musculus
cacacacacacacacacacacacacacacacacacagagagagagagagagagagagagagagagattttaaagtctactaacagacattatatgcgtgcagtctctgaggataaaatgaagtacatccaggtgtctatgctcagatactgtcttggttatttttctcttgctgtgataaacactatcaccaaaggaaactttgggagtaaagaggtttatttcatatcacaactctcaaatcgcactccagaactacgggtagtcaggacatgaaatcaaggtgggaccctggaggtaggaattgacatagaaggcatggagtatgttgctttctagcatgttcattctgctttattcaccattcttttcacaccccaatcctttcactctggggatagcgccacccacagtaggagggccctctcacatcaatcattaatcaagaaaatattttacagcaattgtatgaaggcattttgtcaattaagattgcatctcctcaggtatgtctaagattgtatcaggttgacaaaacaaaacaaaaatagtcggtagtggtggcgcacgcccgtaggatttgctgaaggaggcagaggcaggaggatcacgagttcgaggccagcctgggctacacaaaacaaaaataataaacaaaacaaaggaaaagaaaacaagactgacaacagacacaagagaaaagaaatatgtctcttacttgaaataacttgaaattccgttgttgggggcaattctgtctctctctctctctgtctctgtctctctgtctctgtctctgtctctgtctctgtctctctctctctctgtctctctctgtctctctctctgtctgtctctctgtctctctgtctctctgtctctgtctctctctgtctctctctgtctctctctgtctctctctgtctctctctgtctctctctctctctctctctctctgggaaatagtagtagctaatgtaaaacaaatagtaagacgaatacagccaaactcaaatatcacatgagcttataatatgcagagttatagtgaagatacgtttagtttcaagtgcagaaatcaagagaactcagtattagctgatgacagataacaggactaaagacaccttctatgtctagagctggaccagatcaggaatgccccaaattatccagtc

SEQ ID NO: 18079 - DNA, 1240 bp, Mus musculus
agctacacttgagggagtcccctgcttagtataagacttttcttgccttgcctgtcatatctctcatatctgttcattgtttgtttcctttgctcttgtcattatgggtcccctcccctctaccatcaaggaaccccagattagggcactcaaaacccttctagttacttgtggtctcaagataaaaacatgatatagaccaactttgagaggaagttgctattttggccccctggatgtcaccagagaatatgtaggaccctgacccctggatgtgtgttctcttcctcatctgcaagatcaaggtacagtctgggattacacctcccttgtgttttgtccctttcctccttacagttattgccagtcttaagaattcttccccagaggaagtggtggctgcccattacaaacagtgccaggatcaggctaatattcaactttctattatgaaccactcccaattttccaggaaagtaaaatgatctcaaggcgcggcgcggcgcgcgaaatgtggtgtacagaagacccactccccagcgccgcttgtgggctcaagtccttctgatggaggcccagccccaggcttgggtcttcccggagtcgggttgcttgggaatgcagcccaaagcgggtggtaaactccatctaaggctaaatacgggcatgagaccgatagtcaacaagtaccttaagggaaaaaaaatgatctcaagaatgagtatgagggtgcctctgctccggccatctggtagtcaggctccaggccatcctctacccctgctctcccaggtccctcgctcactagcccttctgcccctgccccattggaggttctcccagcttacccataaagtggtttagagggactttgccttccagcagttattcctgtggtggtcgctcctgcgatgcctgtccctcgagctggactgccattcccctggggggcctcattcttctaaggtatattgtgaggctttacctgtcaatcctggccttagtgcagcgactaggtccggaattcccactcagctggcaaacttggcactaatcagaaatgctgccaatgattctggcccagattccccttattttgagcaagtgctaaagcaatgggccatttaccatcagacctattatgattggtataatctccttaaggtggtgcttgaccttgccttgtttcttaattggtggtctgtatatcatgacttggctgagaatcaggctaggatta

SEQ ID NO: 18080 - DNA, 1186 bp, Mus musculus
catggtggagaagtataaaattctcaataagaaaaattatttacaaaatatcaccttcataagttaaatattgtcagcatattgacttaatgttgtaaatacacatctcctgcattccaggctggcttcaaacttgctagatagtttgaaacatctattctcctgtctctacctccaaacatatgtgcaatgccatacccaaatttattcattcaatttattcaaaagtccttaaaacccttgaccctaaagaatttcaagatcccaactatcgccatgcacacacccacatgtgagtgctttctctttatatgcatatatatggctataaatataaattttgtattactggtaccaaaaacactttttttggttttgttttttccagcaaggattctctgtgtagctctggctgtcctgaaactcactttgtagaccaggctggcctcgaactcagaaatctgcctgcctctgcctcccaagtgctaggattaaaggcatgggccaccatgcccagctcaaaaatacatttcttaaagttgaaatcatttgcttcttccataatgggacgttgaaacttctgcttgtggaacagcgtgtgttggaaagcttgtttgagaatggctactagagtttaagaggctatgtatggggtttgttggggatgtagtggtggtggtaaggatcagacctagggtccagtgtacacttaagcacatgcctagctcaagagtttagaatttagtgtagtttaaagttgagctgccttttttatgtagctgtttaaaatatttctgaagttcaggaatctggataataccttaattagtagacactgtcctatatacctattaaaaatgccaaacactgataacattaaacatgttcatcttgatagagataatattgtataggtctagtgtgcatgtatctgggatctccacctttgaggcagagacgggaagatcaggagttcaaggtcattagctgcatagtaagtttgaagtcagcctggatacttgagactctgtctcacaaaagcaaataaacaaaggattatacttttaaaaaaaagaaaaaagaaaagtatggaacgcacagatgtgacactgcagcgtttcatttcagaaactggtctttgtgcacttctctggaaggcttctgagaggacgcccagatttggctt

SEQ ID NO: 18081 - DNA, 1944 bp, Mus musculus
cagtcatgcaccaggtgaaaagggagggcacaggcatgctgatagtgtaggctcttgtccttcagattcctgtcccaatttaaatctagatttcccaagtggaaaagcccagcagaacagactacatgtcagaaccccgcagagacaggtgtcgagtgaacggtgggttgtgaattaatggccctggagttccggcagatttgtctatcctagattttaatcttggtttttagagttctgagctttgtccaaaagccatgaatcgactgataaatattgtttatttaacacgagtttaaaagtatttcttttatagactgttggaaaataggagaatttgacctctcaaatgcattgttctgttttttttttttcttccagcctgagttctaccaagtatgccacaccaaaaaggattatgaagaaattggacctagcatttgtcgtcacaatccagtgtttggagtcatgtcctaaagttgacttcttgttgattgggttagggagatggaaatgagataatctttctgatgacctgtttttgtctgaatggatggttctgaggtttttaaccaaacatgatcatacaggaatatttaatgagtgtgtcaacatgcagatgtagaagagagctaagacgattgttttcctttaggttgaatatttgaatcttatgtgtatcaaaaaagaaatgggttttagttctttctttgccctgatattttgtatattattgacttacccagtgtgctgggctcagtgggtgtgtagagagctctgtaatgcctgattgggcactgctgagtgggtagtgcctgagcttgtttatatttcatacttttttatactttgaggaaaaaaagtcaaagaaaaactgtagtattggagggaaacaatgtgaccaaggaaaagatgagttcaacaagcagcctcatgggacttggcgcacactctgggttccagttatctcgagctgctccacccctccccagcccaacggttctctctgcaaatgcttggatctaagaagctagtctcctgggttagccgatgcctgccctgctttctggttacttacattctgtttcttgctttaaaagaaggacaagactgttggaccagtattgcaattctgtagagtcgtttcttattaaaacaataatgtgattaccaaaattggcatatttaaggcctaatgccattctaataaaggcaaaaaatttctttttactacttgtttcaggctctttgatctctttataagttaactaatacgtctattttcttcagattctgcagtagctctttaaaagcacagcggttggatagcaagctgacttttttatgtgctctgtacaaataattgtgaacttttaatatgttgagtgctttcattttgataactggatctccatttgatatttcatttgtataactcatttgcagtctgaattttttttagtgccagtccctgacatatcatgaaaagttggttttctttgcattttcaaatatctggatcatgaagaaaaagtgatgacaataaattaaaattgaattacccttcctgatggtttttcttcgtgcagtggagttcaactggctgtctacatgcttgataggatttttgtttctggagaaatgatggcatgtgtttaagtctctggcatgtgtgtggtagagaatttcttgtgaacataagattttccagtttgtagaacagcaaatgggatatgttttataatctataacacttaaatcagcactgtcagtaataacaatgtaatgtacaaaacacagtagaattaggaatgcctccattacatgtccttaaagagcttttttggtctgttgcagtaaatctacacagacaaacttgggaactgaaccttagttcttatgtaaagtctatcaggatatttgtaattttattattttacctga

SEQ ID NO: 18082 - DNA, 1223 bp, Mus musculus
aaactatttccttattctttttgtatagcttttggaatttgttgtttatcaacaaagctgaaaattttctgtatttctcatgctttgaatatgtaaatctgcctttgcaaaaataagtctcatttatttgcatctcgttgtacgacctttgtggagatgtctttgttctttcaagcttagccatgaagatgtcttgactacttcctgtatagtaaagagactactaaatggtttctgaactttatgtcaagttgataacctaaaaactaaacatacgaagccaggctcacacctttaatcctagcacttaggaacagagacaggcagagctctaaatttgaggacagcttactttacatatcaagatctaggttagcaatgctatagagagatcctggatctcataaaaacaacaacaaaatccctccatactactaaatgcataaaaatttaatcaacactattattttttaatttctttggcaaatctatgacattaaaacaaagcaagcaagcaagcaaaaggatactgagaatttagatttattccaaggaagactgctcatgctgaaggtctttgaaaaaaacttctctaataaaatttccatctccaagatttggagatagatgtgtgtgatgggttgtatatgcttggcccaggcagtggcactattagaaggtgtggccttgttggagtaagtgagtcactgttactgtgggctttaagaccctcgccctagctgcctgtaagacagtcttctgctagcagccttcagatgaagatgtagaactctcaactcctcctgcaccatgcctgcctggatcctgccatgctcctgctttgataataatggactgaacctctgaacctgtaagccagccccaataaaatgttgtccttataagatttccttggtcatggtgtctgttcacagcagtaaagccctaactaagacagtatgtaagataatgagattgttctttttttcatacaagtcttcccttttgcagggggattgaaacagggtctcactatatagtgctggctggcctcccacttacagaagatcctcctccctctgcctccccagtgcgctagattaaaggtgtgaaaccccacaatgccacatcatgacagctttgtgtattttgttgttgttgttgttatctgtgataataattgtcgctgcttgaaaaatgtccttggtattcagaattacagg

SEQ ID NO: 18083 - DNA, 1207 bp, Mus musculus
ttttttaaaaaactgatactcagtttacaaaagttacccccatccccttccccaccctgggaagagttgttttgtatcagccatcatgagattcttggtaggaaagtggtattgtgtgctactggttttctagttaactcatggtgtctggaagtgtgtatggccttttcagttaaggtacttgtatactgcagcttgcacttaggaacttctgagttctgagtttttaagagtagtgcttgctagctcatggtgatgacaggatatactggtagtttgtggtagtctgatatttaagcttgggcaaggtcgtgctgtgcatgttacatacatgtttgtgtcactcttgcttgtggctctaggaagagagcgttccttttaaactctgaactttctaagtatcctgatgcagtaagaggcccatgaactgtagacagtatgtagtctcattacagcttacttctgtagactttcacccctagtaactctttaacaggttattttttgtctgtcttaaccttttaggctgttcttgccttagctgcatcctggacctcaagacaagtaggagagcggacgctgacgggtacagtaatagacagtggagacggagtcactcatgtcattcctgtggtaagtacagaaaattgctaaagaggatgtgaaatagtatacccagaggcaaatggtaggaaagatggacctttacaagactggaagctcttcctgggctaccaccatcactgactgcatgaggatctcgaagatcttaagagcatcaacagtgctaaaaggaggccaatgccaactccttaccatactattcccccaaatcatagctatgtttgtgaccggtaaaggtcacagagctgaaaagagtgttgtggacctcacacagtacataaggcatgatcagccccagatttgatttcacttaaagccctaggaaaggggcagaataatctgtggtgacaatctcacctggcatcatgggtcatgtaggaggaaaagaagggcacacaagaggaaaagttcttagtgagctcaagtagcaaatgacagcttccaaatatggtgtacataatatctgtcagccacaggctttctgtgtgaatagtttgcttgtccagtaacttcatagaagaggaattatatactctggtctttatgacaggctgtgttgtgttcacttatgtttttgaaattg

SEQ ID NO: 18084 - DNA, 1148 bp, Mus musculus
tcatatggcccatgctggccttgaactcagtatgtattctgactgactttgatcttctgattctctggtttcccctccccccacaccccacactttccaagtgctaggattatagacacgtgccactgtgcccagtttgggaagtgtttgggatgcaacccaagaactcatgcatgctaggcaagcattgcactactaagctacatgtccccagggtggcttctgttgcatacattttgatagtccttgaaggtgaagagtggaaaagatgtgattttacacttgaactttccctaagcgttatttctgtggtgctgttttaggtgggctgagttctttacctccatttggactgggctctgcccgctttgcaggcattgcatttgaggatctcagagaagcccttgcaacaaggtaaattctcatgttatcagtaaaaagcagagactactagcaaatgtctcttgtttccttgggctggatttctaatttttatgtggttcttctcaaagaggctctaatgagatctctgttttctaaactaacagactgcaaatggtttatgtgtttatcatgaaccgtgtgaattcccagagcagtggtttcagtcagcgcaggcgaatggccctggggatagtgattctcctgctggttgatgtgatatgggtggcatcctcagaactcacctcggtatgtatttctccaccaatgatgttgcactgtgatagaattaacatggacctagaggattttgctaatgatgtaggataacatatagtgtcaagctatagtattttcatgcttctaacatcagtattttaaatattgttgaattctttgtttttctttggtactgaattagtgtcatttaaagtaaaaattgacaggatgctctttgttgttttctgaaggtacaaaaactttgtgtgtatgtgtgtctatatatgcacatgtgtgcacacgtgcctgtggaggccagaagggggcatctgagtccttggaacttagataattgttagtcctgtaacgtgggtactggggactaaactctgaaggaatactaagctctttgaatcatggagccatttctacagtcctacctacagctttctcacatttgtaggaaacatatctcagaagattttttt

SEQ ID NO: 18085 - DNA, 1227 bp, Mus musculus
gttctctcagaaaacactttcattcgccccggatggttctgtgcatgctcattccttaagtgacgccattccaatacaggcttcgatggctgtgaagagagggatggttttaaaagaatcatacacaatctgcaatgtttatttgtttccctgagtcaacagccaggttttccaacgttgcagcttaggagctggtgagtggtagccaggaatgattttgtctgcactacccaccccttctcccccgcacccccccccccccccaccacacacacacacagggtctccatggtccaggacaatctggaattcactatgtagctgagaataatcttcaatttctgatcctcctgccttctcccaactgctgggattgcagtgtaccaccactccctataatgttggaaatgagacggagggcttcaggcatgataggcaggcaaagtaacaatctgagctacattagcagacccgtgttcatgttttaaagaacccctaggcagctcaagctgtaccacgtttctctgcaaggttctttccaaaggaattaagttctagatgcatggtcagagtttttgcaacactcctcaactctgccccaacttgtccctatcctgccctgtcatttggggactacaggatggccactagaaaggtttgtggacagcaggtgactgtagaaactcagttctaccccaacaaacagctcagaattcccttgtgttggtggcaggtcaccacccttaaccttctccacaggacaggacggtctttgtaagtccctgttgttagaatctaggtcctgttttgtacttaaacatcagccccttcactgcccagattctgacagacacaccttggtgtgggaaggagatgaactaccttttctatcaagggttaaaagaaacaaagaaagatacaaactccatctagcactaaccctgtctccactcagcagttttctaagataaaaccatgaactcaaggctgcatcctgctctcaaagtctttctttgtttactgttctgggttagccaagtacatcagtgcaaatgtgagctaggctcaggaccctagaaaaaatttttttttaaattggttttgtcatggaatatctttctctatctatggtgatttcaagtttttctgggtatagtagtctgggttgatgtctgtggtctcttagagtttgcaagacatcggcaagatctggttttttagagtctc

SEQ ID NO: 18086 - DNA, 2135 bp, Mus musculus
gtatatttcttctttgatcagtatgaagtgtccttccttatcctttttgataacttttggttgaaagtgccttttatttgatattggaatggctattcaagcttgtttcttgggaccatctgcatggaaaattgttttccagctctttactctgaggtggggttggtctttgtcactgtggtagatttcctgtatgcagtaaaatgctgggtcatgtttacatatctagtttgttagtctgtgtctttttattggggaattaagtccattgatgttaagagatattaaggaatagtgatcgctacttcctgttattttttaatgttatttttatatttctgtggctatcttcttttgggtttgttgaaagatgattactttcttgctttttctagggtgtactttccctccttgtgttggcatttttcatctattatcttttgtagggctggatttgtggaacgatattgtgtaaatttggttttgtcgtggaatatattgttttctccatctatggtaattgacggttttgctggatatagtagcctgggctggcatttgagttctcttagcatctgtatgacatctagccaggaccttctagcttttttagtctctggtgagaagtctggtgtaattctgatagatctaactttatattacttgatttttttcccttactgattttaatattcattctttgttttgtgcatttggtgttttgactattgtgtaacgggagaaatttcttttctggtccaatctatttggagttctgtaggcttcttgtatattcatgggcatctctttctttagattagggacattttcttctataattttgctgaagatatttactggctctttgagttaggaatcctcactctcttctatatctatcatccttaggtttggtcttctcattgtggtcttggatttcctggatgttttgggttagaagctttttgcattttgcattttctttgacagttgtgtcaatgttttctgtggtatcttctgcacctgagattctctcctctatctcttgtattctgttagtgatgcttgcatctatgacgcttaggaacctttttcctaggttttctatctccagggttctctccctttatgatttctttattgtttctacttccattttcagatcctggatggtgttgttcaattccttcacttgtttgtttgtgttttcctataattctataagggacttttgtgttttctctttaaggacttctacctgtttacctgtgttctcctgtatttcttcaggggagttatttatgtcctttttaaagtcctccatcatcatcatgagatgtgattttaaatcagagtcttgcttttatggtgtgttggggtatccaggactcactgtggtgggagaactgggttctgatgatgccaagtagccttggtttctgttgcttgtgtccttgctcttgcctctcaccatctggttatctttggtgttagctgtccttgactatgactatgactatgactgtggcttgtccctcctgcaagcctgtgtgtcagtactcctgagagaccagttctctccaggagcagtttgggttggagagctgtggcacagggtcagctctggggtgcagtaggaaactggaaggatcctgtccttggctgttccttggttcctgtgtcctgagggttctgtacaggtccctctgaacagaagtggtggtcttatctgtgctcacagatgtgtccacactcctgggagaccagctctctcccagtggtatttgggtctagagcactgtggcacaggatcagctccgggagcagatcagatcccgggaggatcctcgggagcatttcttaatttcttaatttcgggagattttcctctttcttagcttgtgtcatttgacaaaaaaactaatctgaacagcttgcttgtatgagattctgtctcgaaatgaggtcgtgggggttgaagagttacctcagtgcttatgagcacctgctgagcttcaagaagactagttcagttcctcccatcctagttaagcaactcacaactacctgtaactaccgctccaggggattggccatctttttctgacctgtacaggcagctaaaagaatgcaag

SEQ ID NO: 18087 - DNA, 1225 bp, Mus musculus
gacagcacaaagaccatcattcataggatgaatgtattgcagcagtagagtactgagggagcaagaacctgcatgctgtgttgcatgatgagcatcctagggtctcctagttgctctgtggttaaatgaaatcctgtgttatcattgcaggtctcagtacctggcccaggaagggtaactagatccttagaaagctttgcaacaattcccgagtgaggagaaccctcccagggggttggtgcacaggccagtggtttgaatgggaattgtctcccatactgtgtctcagtggataattgtgagattaaccagctggtggctctgtttgggatggttaggaaacctttaggaagtggagagctgctggcggaagcatgccattatggttgttaggggagggccttaaggctctacatccctagaccacttcctgttctttctctactccttgtctcctgctcccgacaccacgccttcctcaccaggctggactctatccctgtccacagttaagcgggataacttctgatccttttgcactcatctcccttacactgagactacaggtgtgtaaccgcaccctctttatgggaatgtgagggatgggacccagggctttgcacatgctaggcaaggtgagcttcaactcctgaacagttaatgttggatataaaattctgttcaactgtaaagatcttatatggtagttttcttttggagtacagtatccttaatgtgattttatctttaacacacaaaataaaatggtcaagagtttttgtttttgttttcttctcaatgcatattggttgcttccccaaactacattagcatccagcagctttccctttgcttgcagtggtaatccagacattgggttctgagcctggcattcacaagcctttagcctgcagtgcctgctctgctgtcctgccatagttcttcccatgctaccccgcatccgtcctaggctctaatcatctcccctctccaccctcttaggcctggagggttggctgcttgtctccattcatagggctgggattatcctcagtaaagctctctggttttggaacacacatcaaactaccttccccttctctggcctgtccctcttctgcagcatcccttgcctgatttccctgctgactagtgcttagaagcgtaattaggcagataatcctgcaggaagctaagaacagagtacatgacaaaaggaacaata

SEQ ID NO: 18088 - DNA, 1137 bp, Mus musculus
ctctcctaagccattgttactgcttgtataaccttgggcagggtcctcaagaatcttatgtttcaggagcttttttgggacttgtgagtctcatgtacttcctgaaccttgtaggttttctttcctgaatcttaaagagcccttctccagatcagactatttgactttggaggaactatcagcatagcactgttcagtcccccctccctaccctgaaggctaacgacagcaagattcagtgagatgactcaggtcagctatcgcatgtcttctccaccgtggagatggataacactgcttctgaactacacaggctgtgtttacacacccaccagcttcccagcatctaattttgaggggtccaagtaggacctatgaagagttgagacaggtttcaatcagcagcccattatccctaagagggtctggagctgtgtttgaacctatcaaagttgccaggtttagtactgtaaagttattgatgctttttttttttcttttcttctccatttgcctcattccaggataatgaagaaggttgttggaaaccggtctggctgtccaactgtaggagacagaatcgttgagctgatttatatcgatattgtgggacttgctcaatttaagaaaacactagggccatcctgggttcattaccagtaagtactacatgctaagacctttcttcccctaagaaacattgtgctggtaggttgtttctgtttctgtgtttttttgttttttaaggataatttagtattacgttataaactgtatggagtatacctctcattcctaatgaaattcaggctattccccctgactgtatgcttcctagggttgtttattatttatattgatattctgagaataatgtgtccagccaggcataatggcacacatctttaattccagaattcaggaggcagagtcaggcagacctttgtgagtccaaggacagcttggtctatacattgagttctaggacagccagagctacatagtctcaaaacaaaggcaaacaaacaacaacaaaaaaccctataactatgaggatctcatgcatttaatcaagtgatttttcgtgtgtgtgtgtgtgtgtgtgtgtgtgtgtgtgtgtgtgtttatgtgagtgta

SEQ ID NO: 18089 - DNA, 1475 bp, Mus musculus
gagggaaatggccttgaaaacacagccagtcactgtcacagcattgccagaactggtggatcccaggtgtgcttggcagatggcagctaaaaggcacataaccttggtggggaaataaatgcctgtggtgtcctgagggccccaccaagttccaaagacaggctgggctgcagatgagagaggctgctttcctgtgtgtgtgtgtcccttcctccccctccccctacatagcttggtcctaatttctggttagaatttacctttgttgaagaaacaccatgggattatgtaattcttgtttgctgctgtggtaaactcagccccaccccgtcaccgtcccccctcattccccataccccatcgtaggctccaggagctgtccttgaacttggagaaggatttgggtaagaatgccagtcctagagttagtagcacgaggctttgtgccttgcccccattgatgtctgatattgctgcaatccagggaactcactcttagaacttgatggtttctggggaggaaaggatagttgaggatgaatgctacaaagggtgggagcctggggctggcttttacgtgaagcactattgttctatggagtttgagcagcccctgtgagggcctgacagcaggttggcctaggcagtatgccggaatccccacctttcacaccctggaacccttctgtgagtccatccctgctgaagtaccgctcctgtgctctgtacacgtgtgagtttctggagacacctcccacagttctctccatgctggcgagtgaaccaatcctcttctacctcttgctgttagcattgtccacccagccccagctggtagagtagacttcctggccggcggctgctgcccagcgcctccctgtggccaggaggagcttctgcctagctgaacagcagcctgtgactggctgagccttccagaagcaacagaaaggaggatctgcttgtagtgactaaggggtggggagatggcgcatggaactttttggtctgggaaatcatctgttcttctcttgatctctacctgggtgcatacatcataccaatcacacctctagcgcctccccgaccacacccctgttggccctaagacagacacctcaggggcctgagattctagtcccagagaatgaagtggagtgaagaggtgatgtcagggcgggtactggccctaagcactgacaggggtccctcaaggcctgcctggaatcacctctgcccaggttcagctgccaggaaggcagaagttcaaaagcctagctatgaagcatctttattaagctttgcaaaggtttcctgctacaggaggggagaaagctgtgcagtctcttgggaaaggacttttcccttagagtgggcctcggggctgcactccagagttgtggcaatctgcctaagtttccaaacctgaaggctgtgggtgacagtgctgacattcaaccggcagggggcgccaa

SEQ ID NO: 18090 - DNA, 1591 bp, Mus musculus
agaaggtgaaagctttttcagagtaagaactcctgagagggaccatgccttgtgcatttctgtgtgtgttcttatacaaatggaagcactgtatagaggtttattttgtctctaagatgaatcgtttgttttaggtgagtgtttggaaatagctgtctgttctttggctgggacatgtctttttgtttctctttggggttggattttgaaggctgggtgctgtcgaaggctgatagcagattgttccagccttgaataactacatttgtccacagtgtgtgcacacacatgtcccagtgtatgcaggcacacaagactgtatatatagtgtgtatacgtgtgtacctgtgtgttttgtgtatgttccagtgtgtggtgtatacacatgcacccccagactagggccaagggtgccaagaatcctttagtaccctcaggaccagaccctatctctgaatctgatgatgaccaaggtagtgaggggtctcatgctccatcaccctagctctagctgacatgttgctgaggcagaaaaccagccctcagtctatctctgtagaagaaggagcccccaaatacttcagctagttagcatggtggaggcgagatgttgactttttctcgtccttagcgaatgaatgtaggcgtgaagttgcggtacctactagtgagttgggttgcactgaagctatgtgttgctcatggatgagtgtgtatcctttagatcagaccagggtggtttacctagattgtatgtaactaggcgccaccaccctctcccaaaatttttgactgaaaaggaaagaccaagtattttgttaacgacaggctatgctgtgtcacgacacgattccaagcctggactcttatatttatttaaaactcttttaatttctctttcttctcttcccctctgtctgtgtgtccgttagagtagacagatggcaggaataggtctgtagtccttcaggaagccagcagcctggagctggaaatgggctcctctcattcgagttgccttcaacagaaagtgagaagttttttcggcttgggtttttttttttctttacatatagcaaaagaccaaattagctgtatagtcttggatacagaatataagaattactctagctgtcctagcacttagggtcctgtggggattccgtgtttagcacagtgcctggctcatagggagcctagtgaatgttcaatattgatattagtagtatatcataaaacttgagaaataaagagctgcgctcaccccctatctgttgattcagacatgatggttacatagaaaccttgttgagtcgatcagatgctataggaattaactgtttcaattgtttaagctctgtgcctaccctgctcgctggaattctagtgtcttctcgaatgcactgagtaattgggaaatttgccagtcttcagcactctgtgaaacaaggctgaatttattacctgaaattgaaccaccaatatgttctggaacattccaggggtttctttgagggaccttttgagctcaaaattaaaagttctctcacaagtttcactccgtgaattagagtttaatttttactccgct

SEQ ID NO: 18091 - DNA, 1102 bp, Mus musculus
taaccacttagttacctatctcctcacagctccccgagatgtgttttataccaagttttcatggtggcttaggacatttgtcctagaattaagttattcttgttggggagggggtatgctagagattgaacccaggacctcatgaattctaaacaactattctgttgagcagcaacccagctgaaaactgattcttaactctgttttgtataaaatagctatctatagtagagtacttgagaccagatagtttataatgttcagaaataggctcacagatctgcaggctagatggcctaaaatgaagagcctaacttacagcaagggtcctagcgtcctgtgaagaaagagcacaagaacacaagagagggaaccttgtctccctctttacactgactttcaaggcagctttagaacaagagttagattgttaatggtttgtaggtaattaaaatagtttcctaagtgaaaatccagttagatcatcatcttctacatgtgtaccatgttttataggatggggaagacttggaactaacaactcaacatatggaggcaataatctgatttttacacttaaggttctgattgtaaagctggtatagtatggccatgtttagagagaaatttggagttttctctgaaggctgtcgcattattacttgttcgttgccaacattttaaatatgaagtcattgtacagagtgtatgctaatagtaaagatgtaaagctggtcactggtgcttagtagcagtgcatttttcctttacatgacagtcagtaccgatcagtgttttacaaattgagttcataccaacgtaacaagcaatgatggaatttgccactttcttcgtaaatactgaagacataaacaatgctgtcccttaagggacttgtatcctagtgggagagaagaaatttacctagagcttatctttgagtctgatgtgaaatagctaagagcaagtagtttgagctgtttcctactggtgaatgtttactgcatcttcctggatggaagctgggagggaggtcatgttaggcactaagcagaagtggtgaagcctagcgattacattaggaagctgatatgtaatgaat

SEQ ID NO: 18092 - DNA, 1264 bp, Mus musculus
cttcttctttttgttttttgttgtttgtttttttgttgtttttttttttttttttaatccaggagaatgctttatttcaacttttagctgactagatgcttaacttagtaacaagtttagcccttgtaactggctagctaaaagcaaatcggcttgtttctcagatctatgggggatagcaagaaacatttgagtgaatgttgttgaagattttcagtagtatagaaaatgatggcgctcttgtgatatttgtaagtagtaagtaaaatttactttttgtgtacaaatctttgatgttgtattgagagtttttgtgatgttgacatgttgaagctgatgatattgtcttcgttcttctttcttttcttacagcaagcaaggatttggcacagacatcctatttcatggctaccaacaggttgttatcctgaccctctttgttgcactgttgtagcacactatagcttcctttaatgcagggccccctcgacgtgtctcttgcccttgttgcaacaggagactggaccatctactgtggtggtaccttcctggttgctttgcggtgtattgtacaagggactttgggcacagaggggttaaatgcacactgtgaagtgtagtggtgctttctggtggcatattctcgatttgtgagtgcataagtctaaacttggtagcctgaatagcagctaaagattacacagagctaaacttaacctagaaacttggtaagtataaagctatttttagtttacaattatagttaaatgactttttttaattttcacattgatccaatcttttagaataattgctaaagtttaagtaaaatttatgtaattttggacttgttccagataatattcctaatagtaaattagaagtagtcaattattatcggtgcttaggtttgcagagatgcaatctttattttaaaagtcctgcttttccatttatataaagtaaaaatgtagtgtgtgtttgtggcttttcagtaattgtttcatctactctaaactagaatagtttgaaggagctataaagtaaatgtataattttgttctggcttgatattaaaggttgaacattttttaagtgggcactgtggaaatgagaactgaactagctttttgaattagcaaaactttggttagtcagctagacatggtggtatgcctgtcatcccagactggatggtggagacaggaagatcagaatttcaggattaccatttactacataccaagtttaaggccactttggg

SEQ ID NO: 18093 - DNA, 2654 bp, Mus musculus
ccacggtcctgaggccaatcacgagtacagtacaagcagccagcatatggactacaaagacacattcgacatgctggactcgctgctaagtgcccaaggaatgaatatgtaacctttgtttaggtcaacttttccttgcctttttaatttaaaaatggttggaatggaaaacgccctcctggtccggcggtggtgccactgcttccatatttgtaagtgctgctttgttcttcattctgaaagaagagatgatagtaaacaagcctatctccacatacgatagtgttaccaggactgtaaccgcatggaagatgcagctgagaacattaggatgaatggctggctgctgctaggagcctaagctgcttcaagcttctcttatttatgatttgaatattgtagctgttttttgttgttgcttggctttgaatgagtgtcagttgttttcttttgtgtatttatacttgtatgtatggtttgcatgtctcagtgataaagggataaaacagtatactgacagctgtttacaagaaagtggagaaaaatgtacatacatttttgtatgtttagatattaccataaatactcaggattggagctgcttgtaagaataacaatatacagaataactttattttctctcgtcagagtccatcactaatctaaaacacaagtggcactttttttatgttaaccttaattaaactctaggccttactggaagccgctgaggggacacttcactactagacgggaatgtggtgccatgggtggtccttaacactgggaagcactcagtttgccttcagaggtcctgaccagattggctgcagaatcagccgttgatttctgaaggcttgaagaggaaaacacaataaagtttacatactcttgatgtgaagtgcatttaaatgtttgttggcttgttgcagtgctgtagaaagcagctaataattggtgtgaggatgactgtgactttgctcacagcagctcccagtgaagatgagtccatttcttcaggaacgctgacactacagattctaagagtgaacaggggtcacttttcctttagcattgcagtgacaccatagtcttgaatatactcttcccatggagagagagagtgagtgtgtatgtgagagagagtgtgagtgtgtgggtatgggtgtgagggagagataccatatttctttttcaggtaaatgcagtcttccttataaaaatgaaattaaacctatgctctcttgattcttttatattctaacaataaataaaaaagaaaagattgctgactgtgcattgtacctgtatttatagcttatggtcattatcaggaaaatgtaaggaaaaaggccagcctcaggcaagccactgctggggttttacatgctggggttttacatgcgtttgcacgtcttagtaggttctcattgaggtaatgcttgcactgtcacctgacgccttgtcaggggatagactgacttgtctaaattttggtataagcaccaatagtatggctcttgtctcttgcctaaccttgaatttatttctgtggtaagtcttagctgttgagtctcttaagatgggtcgggttcaacttgtattgaatcacaagttttcctctgtatatgaaatgttttgttataaagccactgatctgtgcacaattgtaattttattcaagtatgttgtggttgtaaatattagagttgagccttgtactctacttttatttagcagttatcccatttgccagtagctatttgttttttaaagaaaattgttgattattttgtcaatgttatttgaacctgggatgtcaggagcttctttgtgggaactcagcctagcaggctagtcctcactctgttcttgtttcattggtaatctttgttactatgtgatttttgttgctgtggtatactgttgtatcataaacatgatgattttgatacagttacagttttaccgtggtacatttccaagaactagcataggatttaaacagagtacaaggcgagggagggaagggttttgttcttggtgatttagatgtgaaacctcaacagagcatcatgtgaattgacatgaggtggtcgtgctactgtatcattgggagtgacccaggaattttaatcagcctttgtaaagagtatccagagacgtagcaaacttattttcagtatgacatagaaaacaatgtgaatatttaaggtctgggactgtagttaaacttcactaaggattttcagaaatgtgttgttttttgtttgttgttttgttttttagatatgggaataaaggtaattttgttgaatcttcattggtgctaatgatggacagttaaacagatagtgtctacgctgtggataagtacacttagtgcttccagaactgactttgaaatgctgtgtattcacttctcactctgtaaatgtaattctttacaatgactatttattaaaaggcagtcagtgtgatttttacaggattgtgtgaactattcaaactcttcaacctcagaacaagatgctaaaaccacaatgggggaaaattcatgactccttgtttcctgtccactaaggaaaacccttataattcatatcaccatgaatttgcttaaatgatcttgtttgcataacatagttcatttg

SEQ ID NO: 18094 - DNA, 1652 bp, Mus musculus
taaccaaaatagtatcaaacttaggtgtgaaatttcacatgtgcatagtactgttaaggtgataacattttttgatgagttttttaatacttgaaaatgattaaaaagcattctctttacatcatcctataaaagagtgactcattcttaaggtgtttccctaggtttgccaccttgttgcaaaagcacattgtaatcagaggcttcctgtctacctctctcagctaagtttctaaaatcagtatgtgcttcctaaatctctgccttagctactaacacaagctgtcttcagaaccaaagcagaggagtgtttgttttgtgggagccttctggaggcctgcattacaaactcagtgccagtgcccactggtagataaggccccacatgtctcctatggagtagcagtgaaggctatagtgccagtcctgggtacgcttcagagcactaagtactcagctttaaagatgtctcgtgtggtactgggtggtttcgtgagcgcacactttgtgccaacagatagtaattatacagaactcccaaacatttggacctatctgttccctatgaagtaaaaacagaacaggttaggatttactttagagaaccagtttgaaatgtcattagtcaccaaataccttgccttaagatgtttcaagaaagtgtattttcttacgatttaaattctgattttatttgcattatataagccgctgcctatttagtgcatgggtgcaacatgatttgttggttggatgacttaaggctcctgcattatggagatggcttattttgataacttctcagaaaaagtctctggtttggaatctttgagatgagacatggtcttcctctataacaaggaaaagggctgactgtaattaattctcctgtctccaccggtgcctggatccgtgattcttaacttgttctcaatcttatataagcaacaagtacttaaaacttagatgtaatttgccagaagattctgaggatttttttgctgagaaaaatctagaagctcttagtaaccaaggacccttgacttcacttctctagactcagcagtttcccctgcaggagcgtttcccaggaggcagtagaacccactcaccacattttcacaggagaagaggcagccaagcccacactagaagaccgggagttgattgggtttaattccatgcctgttggtttgaggtaggcaggttgaaacatctgtactgaccagaggcagagtgcattcccgttttccctcagtacttgatgttgagacaagtgtgcaggcacagctgtaattaatgcaggccaaccgacacttggagggcagctttggcctagacagaagccaagtcaggtgctcgtgggaaacttcttagtcggtgatcttggtactacgagctctgagtgtgttccattatttcagtttttgaagtgtgctttgtgagtccccttttctggtttataaccatctctcctgcctggtatgtttctcgaggtgtgcttcatggcggagcagctctagttgtgtaaactgacatcatccttcactgcaattccgtaatctcaagtcaatctgggaactccgtagtttgttttgttttcaagtttggagaggaagcctcacttaaaatcctccagcccacaagttgac

SEQ ID NO: 18095 - DNA, 1149 bp, Mus musculus
ttattttctttttttttcttttttttggtttttcgagacagggtttcctctgtgtagccctggctgtcctggaactcactctgtagaccaggctggcctcaaactcagaaatccacctgcctctgcctcccaagtgctgggattaaaggtgtgcgccaccactgctcggcttggctcttttctttttaaatagcccatcaattccttttttttttttttttccccatatgctccttgatatggggccctccccagcaacatggtggacctaccaggacccacacccttaaaggaaactgagtctctcctccctggaaaccatcatctgtccatggctcctcagccacacatcagggctcatgaaccccttccattccgtgttagaatggggactagcttgatcctctgtgaatctgagtgcagtggccatgtcatgtccacaagatgctatgtaccctcctccacagtggaccctgaacttgtggaattattggttcttaaactgtatttccataggtagagatgaagtgcttggagtactccaagtacagaatggggagaacaaaaacgatcgtccttcagttaggactgtttttatttcttcaaacatgttttaaagccattttataccattagaacagcaactcagtctagggaagaacaattcatttttggtggttggttttgcctaagtgatatgtgaatacttatgtttaaaaaaaaaaaaaagcagcccggcgtcgtggcgcgtgcctttaatcccagcactcggaagatagaggcaggtggatttcggagtttgaggacagcctggtctacagagtgagttccaggacagccagggctacacagagaaaccctgtctcgaaaaaccagaaaaaaaaaaaaagcaggcttcttgctcactggttcagaccttctcaaaagtaactgttgttactagtttgagttatgtttcttacacttcttcctttccactgatgtgtgcatatggatatgatttggtttcatttctgaatgtgcactgatacgcagcttgtttatcctatcaatagggtcaccccatgccattaaatgtacatctgtgtcatttataattgttgcatattattctaacatgtggaagtcctacagcttatttaattattc

SEQ ID NO: 18096 - DNA, 1293 bp, Mus musculus
cgggtgccttttcctcagacacctcctttttctagggggaggaggaggagcggcagctcctgccgtgggcacctgagacgcccttgtggaaccagcagcaggagtcacaccagcatccagaagcatgtccagtaccaagcttgagccagatggatagatttgaggtgtcagagacttccacctggggggaggtggcctgtgttaggggaacctcacatcagcaggcctcttaccttgggggacagagtttgttcattctcctgtgacagtcatctgtgtagacacttagtagctatccttactagtattccatatgcaaggtagagtatccgttaactcacattctggacacttgctggtagagcctttagtcccaggatctgtgtttttaaactgccacgtagcattctgtttattcagtcaccagatggatggtcagctttattatgctgtttcatgagcatttgaatattctaggagaaagactagaatttcaattttttccatgccactaaccaaatgcatttcttctgataaatctgtacatgaaatgtagctgcagattagagctctctctgtgtgtctgtctgtgtgtctgtctgtctggtaggatctctcggtcctcttggttgcacccctgctttgcactttacttctctgcgttgctggttagggatggtatttaatgacatcatacgagcacatgttgaacacacatcctgggaacatagatcaccatgcagttagtgagctgtggtgtgtgtgccgaggctgtgagtgggctgaagcacccggtgcaggggtgatggctctgtcctctgcagctcagaatgcatcagtacgctgctgcgggacctctccttggtgattgtaaattattttgggacctaaaattcccacttgaatccaaagtaaaaaatggttatggtgaagtgtaaattccgcctgtgtgatttttaaaaattaatagacctacacaagccctgtgttatttttgtaaaagaaaaaaaagagtatatatatatatatttatctgtatggtgtgcacagacacgtgtctgtttgggtatatgagggccaggggccaacccctagacttcccagcgagcactctttcctctgaaatgctggactttgcttcttagaaacccatagatacgggctgaggcatgaggggccagaacaaatacaagacaggacagtgtttgctttcctgggtattgatgacagaactctacagtgtggggttggtctaaaatggcattgtttatctaataaaacggactgctgttt

SEQ ID NO: 18097 - DNA, 1224 bp, Mus musculus
tcagacatcacccggtttctggtgaagaagtaaggcgagatataaacagaagcagatggcctgcaggcagaagcagttgtcacaattcatcttcatgtatgtctagtattttaagaataggaagtttttaaatataagtcaataactgaaatttagatttttgctaagctctcttagtgttacatacttaacagaaactgagggatgatgggaagattctggggtcttcctgactcatgaagattgtcaattatgtttcagcaagattttgttccgctttttttccccttctacaccttaatcactgcattgggcatggatagtgtgggacaaatatattcacgcaaacctgacagctcttgatcaccattgcttctggactgtgtagtataaagggaacattccagaacaatcagggacattttggagacaagccatgattagtaaggaatgattacagctcaggcgcatgtttggggtgcagcctccttgcttgatttctgggccagtcctcttcattgaagagatgcttttgttaatgaactgattgtaagctcacatggtgtctgtgtacaactgctgtgctctgagtaaccatgagaacaagtgagagaccacagtgccgcacagcctcgcttctgttttcctgtttgctcccttgtttcctgtcatggtttgttttgtttttaatgtataaaatcaggctaattgtcaaaacagattttgtctcctggtcctcgtttcctggttttaaaatcctggtagtgatttgttttgttctgttctttcaataaaccttgtaattttttaaaaatatttttaaattatgggtacgtgtatccctgtggggccgggggagatgcgcagttgcccacagaggtggtgtagctcccaggcctgccacacagcagctctgacagatgctgcagactgagttgctaaccacgggaccatctctccttctccatatcctattttattaggtttatttctgttacctcttaaaaagaaggatggccaacaaatcgtggtggcgcacgcctttagttccagcattcaggaggcagaggcaggcggatctttatgagtctggggccagcctggtctacagagtgagttctaggtcaggcaaggccatgtggtaagaccccgtttccacaataaagtgacagtggggttgggaggtggctcagttgatgagctgctggccacacagcataatag

SEQ ID NO: 18098 - DNA, 1196 bp, Mus musculus
ccaccatatttacaaatctttaagttaagtatgaatatatgaacattaaaggaaacaaaatatttaaatggtgtgaaaacttatcaggctgggctgtggctcagtggtagaatgcctgcccagtgattctcctgccttagtcccttgagtagtggagttgcaaaattgcaattgtgaatccacattcactgctttgggtagctttatttttcctttacattttttttaaagtgggggtgttccttcaaaggccgtcagatcttctagaacgtgagttacaaatgtgaatgctagcatccaaacttgaggtccacagcaagagcagtgtgccctcttaaccactgaatcatctctctggaccccttggattggctttctgaaactaattttcactcagaaataacagtaaagggtgtcgttttgctcctgttattaacaggaaggacataccgcatacatggatttcctcctgtgacatttagctctagctttgccctttgtgttttttgtcttaacagatactttggcaaaaggcgtcagtgggactgtagaggggcatcaaaccttagtgagcttcaccagctcctaaatgacataatgatcagaagactaaagagtgaagttttaagccagctgcccccgaaagtcagacagcgcattccctttgaccttcccccagcagctgtcaaggtgagagcctgtctttaggtgaaaggcttacttcattatgaatcatgctgttaaagattgggcattagacttcacagaaaagcatactttcttaaaactggcttgattcgtagaaccactgttggttttacatcatctcaggaaaagcacaagatgattttaattatcaaatctgtgaacagatacagctcccagtgattcaaatgtttatgatgactataggaagatcacttggattttaacaaactatttagtatgaaggattcatggtacctataatgtaaatgcacaggggtgggtgtgtgtctgtttgtgtgagtctgtgtgtctgtgtgaagctggggctgggtcagtggcctcattgatgaaatacttgccatgcaagtgtgagggcttgacttgagcatgtcagaacccaagtaaaactggtctcatgacgtgtgcatctgtagtcccagtgctgctgaaatgagatgggagcagagactcgagcatcccctaaagct

SEQ ID NO: 18099 - DNA, 1227 bp, Mus musculus
tttcccatggaaagagcttagaactgggtggagattgtcagagggaagacaacacgaatctggaatcttcttcattttgcatcagttagctgtggtttagataactcaacctctctatcttattattttttttttttttggaaaatgtgtatggctcacagttactttttaagtaacgtgattttgtgacaggtaggtaaagcatttgtccttatggtctcaagaaggtaggtaaagaatttgtccttaaggtctcaagaaggaaaaactatagtatttccacctagggatcatctgtctttaattataattgacaaaaatttatttaaatagtatagactcttaacattcctaatgatcttgaatatttatcaaccataattggtataataaaattattaatgtaatactttttagtatttgatgatttctttcaggatatataggctttatttgtaacatactttttgcaaacattgtttagatgggtctaggaaagacaatccaggcgattgcaattgcttacttctacaaagaggagtggcccctgctgatagtcgtcccttcatctctaagatacccttggatagaagaactagaaaaatggatcccagagctagagccagaggaaatcaatgtcgtcatgaacaaaactgacattgggtaagaagaacttatttgtcttaatggaaaaaaaaaagtgtgctcatattttggtttgcttttgactttttggtactaatgacaaaactcagggcttgatgcattttatttgtactcggaatgaaatactagctgccatcattagaagagtgatgtggtttgacctctgttacctgcaggacacttttaaagttaatgtgaaatatacgtaaaggcatgaatcaggtggtatcatataagagcgtttgaatatatttcttttttttttttatttcttctttttggtttttcgagacagggtttctctgtgtagccctggctgtcctggaactcactttgtagaccaggctggcctcgaactcagaaatccacctgcctctgcctcccgagtgctgggattaaaggcgtgtgccaccacacccagcttgaatatatttcttaatgattcatttttaatattttatactcttttactatgcttagttcccaaagaatattttgtatgttttcaaacaatttagtattcaacattagatatatgttcctcagtattaaatatttatt

SEQ ID NO: 18100 - DNA, 1204 bp, Mus musculus
accagggctacatagagaaaccctgtctcaaaaaaaaaaaaagtagaaaatatttagcaaaataatagaaatcaacaatgaagtatagcacacagatgcagcacagaaaactaaataacagatttatgccaaaatgtgtttgctagtcagtataatggttaattctgtcaactaaccacacctagaatctcctgttgaaagtctcaatgagtcagagatccgattgccttgtggacctgactgtgtgggcgtttgttgattcgccttcattgatgtgaggtggcccaagctgaatgtgggcagcagcactgtttccagtttgtggccctgggctgcacagaggtagagggagctgcgtgagaagcacgcttggcttctctgctctcaacttggagatgtggctgttggagttctcttcaccttgacttctgtgacatatgatgggctatcctggaactaaaggccaagttaaatctttctccccgaagttacttttgccaggatactttatcattatcacagaaacagaaaaaaaaaaatgcagaccttcgttttcttgttctgtctgcctgtctacctacctacctacctacctacctatctgtctgttgaggcagggtctcactattgtagctcaggctggcctgcagctcactgtgtagactaggctggcttgaacttagaggtccatttgcctctgcctcccgagtcttagaattgaaggcatgtgttctttaatccagcgttcttctcatctgtaggaacagccaggcttacagttaaggacagaggtggaagccattctgcacagtctcatgccttcatgcttggtcctcaagggtctttgcagctccctccatggtgagcaagagcttgtctgaagcaccttcactcccacatagacgttggcagctgtagagttgtatgcagtcatcactatccagtgttttcattcacttacagcagcctctctggcttaatcctttagcgtttgtgaagtgttggtggtgagttacttaatcagaactctgaatatgctttgctttgatgattataaaattaatttgcttttgttttattttttccaggtgtatggtggctgatgaagtaagtaccttagagccttttctaaaaatacacatcagcgtttactgtcttctatccctacattgactatctgcctctgctttttcatgtgaccata

SEQ ID NO: 18101 - DNA, 1224 bp, Mus musculus
cttcattgccttggtgagtatgcttttttaaaaaatgaaataaaaattttaaatcttgaaacttgttcataagacagaaagcttaatttcatatttgaagtaatttgctgtgcttccattttttgtttttgttttttacttaaaaatcaaaagaataaagcaaactaacattgaaagtattttaggatatctttaaattaaaatatcagtacattaagtaatgtttttagaaaatcagatccccaatctgataaacagattaagctattttactgactgtatcatatattgttcatgcctcatattcagtctttttgataatttaattttaataacagcacacttctgcatggtagcattaaatagttctctgttgcccaaaaatgttggatatcacaacaggctttctctttatggagagctttctggtgttcgtttctttttggttggttgatttggttataggttgttgttcttctcaagcaacagtaaagtgaaaggttattacagaacggaagcacggtgagttacctcagaagcagaatgactgtaggcggaagtagagtcggccaagtagctacacaagcaaagatgtacatttcattttgtggagaagagtttgaatattcatatcctttcaggaaagattttgaatattgatggttttgttggtgagaaagagacttattgttcatgcttcctttacataggcctcaaaattaacatattacggagagggtttaatgaggcagtcagattcatagccatcttagcagtcactggtctgaatcagtttgcccttggcttcctgtttctctacccacttacccacgaagtagagttgcccacctgttgcctggagtgtgaagcctggtagttttgtttgttctcacattgtagctactgctgcagagccagcagctagggtcctacactgtatccccacaggatttctttcttcttaatcttaggggtacaggtccacttgtaggtctgttgaaagcttgcatgggactgttaaccgtactgctggaaaaacagagctccctgaatgcctgttccaagggcctagtgacagggcttagattttcatacttgtcattaacttgagatggaattgtttgtatcctagaggacacaaatttcaccaaaagtctaaaagactgctaacaatattattcccattagaagtcctgagaggcatagaaaccaagttactccatg

SEQ ID NO: 18102 - DNA, 1218 bp, Mus musculus
gactggaggaaccaggtgttcagcctggaacccgttaccgctaaggggcggagccacatccttaaagccttcctctcatcttcccacatgaacgacaaaattgtcctttcatccttaaaaagctctataatcattccctgaagaaagagagttgtctaccacatctccagtgattaaaatcgcccggaactcgcccacctcaggattctactcgtgggaaaggtggctctttcacaagtgggcaaaatggctgtcctcctagctttatcattggttgactcttacgtcgttcagggacgacaacttgcccgggattggttctttttcttttgtgggtggagatagacttagtcccgttctcccgctgtcccgcagtgataatgggggtggagcgaaagtggttttcaaacgctgattggataatttgtatgtcacttaatgttgacctagcgtatgaggtaggctgctttccgtcaacgcgacggagaggcggggccagtgcgtggtgggaaggggcgggattctgccgccgcggctgccgctggagccggtgtccgggctggtgatggggttaattcccttccgtgagactctaccttgcaaccagccggccccgccgtcgccccgctgtgccgcgctcccgccacctcctcctgctccttctcagtaacgcgggtaagagatgctgtcccctcccccgcggcgccccgggaataacgcgctcgctcccctcccccgcccgccaaccggtagcgctaacggagcgggagagtgaggcagccggggagctaagcgctgaggagacggcgtccctcccctctcctccggcccgccaggggccgtcgggttctgaggcgagccctctagtcgcctccaccgcgcggtgcccgccgcttcgctgggggccatgtgcagcgccaaccccttgaggcctagcgggggagctggggacaggttcccgagcgtccctgctgcagctgctgctcttgcgagccctggagatccggggaggacggaggggaaaagcaacatagtcaggccaggctggagcagggaccgttcgcggaactgttctccggggcctggaccagatgcccggggctgatacccccgctccggggaattgtcacacacaccaaaagggaaacagcacgtcgtgcccgtactgcccgtactgctagaaaaaacacagtggggaaattagcaagaaagttgaat

SEQ ID NO: 18103 - DNA, 1209 bp, Mus musculus
tctcatgtgaacaggaactctgcagtgagctagagccatattctcagtgtataagaaccaaaaggaatgatgcaattaacttgttacagcccaagtgacctggacaggacccgaggtagccaaaggagcacatgccaatatttatttgagttctgatttaatagatagtgaatgcctttgcttcattttcattttatgagaaaatttctcaatctaatagtagccacttaacagaataaggagtaactgcattcgattcccttaggaacattccttattactattaatagcatctcatgttctttagaacactgtttctgtggagctcaagataaaatacatgggctcttaggatgtacactgacctgtccacaactctactgtaaaaagttacactgaaaaaaaaatgatctttcattttcttacaacttttgttttctagaattcttataaaatactctaacatgttgcttatgatatttctgattctattgtttttagcgagggaactagctatgtaaattcattgcctgttgacccttcaatgctaagtttttcatgtaagagtcttcatactttctttcagggacagaatgatgctgctgaaattggaacaagaaattttagatttcattggtaataatgagtaagttctcagatttaacaagaaaagagattgtcattgtgattctccttgacttactaaattggcaattgttttcctttcaggtccccacgtaagaagtttcccccgatgacatcttaccacaggatgctgttacacagagtggctgcctactttggattagaccacaatgttgatcagagtgggaagtctgtcatagtgaacaaaactagcaacacaagaatgtaagtgtatagttatgttgtctgtggactaatacttgccttcctacagcaccttccatctacagtaattgcctgatcacttcatgcaatagagccaaaagtacatttatctcattaggagcaaaatgcacacctggattcaggcaaggcttgtttgaggaacagcaacaacattggaggacatgctatcagccatgtttgacaccctttcttaatgaatttttaaaattagtttaggtatctgtgaccacctctagggaatttgtttaaataatttttaaaaagaagcaataaacagattttaacactcacattctgtctactactttattatcattt

SEQ ID NO: 18104 - DNA, 1204 bp, Mus musculus
aaaaataaataaataaaataaaatagaaatatatatatataaagtgtagggcttgggtaatatagctcagttagtagagtgcttgcctcatatcaaattgtcttgggttccgtcctaagcactgcacaaattagacattgtgatttatagctgatctccagcattcaggaagtgggagacaggaggatcagaaattcatgaaattttcagctacgtaatgattttgaggctattctctgagagatgagatactcaaagggatgtggggtgtagggtgggggtgtattgtagcatttgcattggtaggtttggcccatgaatgaaaggctgactgatggccaactttttttcaacaggataaccttggcgctcagttcagccatatgagtcttgcccgccagccatcagctgatggttctgaccctcatgccaccatgttccagtccactgttgtactacagtctccacagcagtctggttacatcgtgacgacagcacctccacatccgccaccaccacctccaccacctccccctcctccttccctaccacctgggcagtcagtccccactgccagtttctctgcctctgggcatcctgtcagccagcctgtgctccagcagcaggggtttcttcctcagccctcaccacaggtgtgttgttttttcacgttctttctctctcaggaacctctaacttgggaacaatttgtgaggtagtgtaagtaaagcccatggttatctctggagattgtcaaatgcctagggagcagccatataacatttagttacaactcaacgtacgtcttctttgaatttccctctgactctgagaagtgggtttttttgtttgtttatcttaggaaaacataataagtgtgtgtgttagttagggttactattactgtgatgaaataccatgatgaaacaaaagcaagtggggaggaaactgtttatttcatttggtttacactttcacatcataatctatcattgaaggaagtcagcaaaggaattcaaaacaggacaagaacctggaggcaagagctgatgcagaggtcatggaggggcgctgttcagttaactggcttgtttatcctggcctgctcaggtttcattcttacagaacccaggactccttgcccaggaatagtaccacccacaatgagctgggtccttcctgccaatcacttattaagaacatg

SEQ ID NO: 18105 - DNA, 2243 bp, Mus musculus
aagatgacctggtctagcgaaagcccttgctttgtccccacagaaagactgagattagggctggagagaaggctcagcggctacgaacactgactgctcttccgaaggtcctaagttcagtttccagcaaccacatggtggctcacaaccatctgtaatgggatttgatgccctcttctggtgtgtctaaaaatagctacagtgtagtcatatacataaaaataaatacatcttaaagaaaaagaaaaaagactgagattagtagctcaacacttaatgctgaattggaatgattttaaggagtaattgtgctgtgagtttgtgtcagaatgctgtttcctgtgtcatctggggcagcagtagttggtccattaactctttcacctttttcatgctagttgtcggcaaggtcttggaaatcacagaactaccagacggaataactcgagtggaagccgagaagctttttggggaactctttaaaattggcgccaagatccgatggctccgggacccccagtctcagcctcagctgcgtcgtcacgctctctgctgtggtagtggggataacactgtcaaccctgagcactctaaacccagtgacctggcctctacgtacactgtcctagctacgttcccctccatttcagctgcacagagtgcactgaagaagcagatccattcagtgaacaagtttaagctgagaatgagcaagaagcactacgatttccacattttggaaagggcaagttctcagtaaaccagccgctacctttggacccctcactctataattccctgccctctcccatctgattggcttgttaagtggagcgtatgtaatatagagactcctgggatgtttggccatatgttaccgcttttggaagaaagtccagggacccagaaaagggagggggaagatacccatttcaccccagcgtctataggaatccacacgggaatggttcagagttagcagctgtttctaaggaaatgctgttcagatgcctcctaacttttatagttattttgttttatatttctgaattcttgtatcagatccaaagctctattgtacagcaaattattcttcaaagtgattataaccagttacaacctgtatttctttttgcagccagcacagtgtgaaccaactcagactttgagagaaaaagaatgcaggagtggaataaccaagtcaaaaaccatgtcaaaactatcctctggggggtgctgagggtgctatggagacccacaaataaacaattactcctccactgaattgctaaacacagaaaaatttccaggaaatccagaactccccaacagggtccttcttcttcatttaggtagtgtggccgttaagtgtaaggtaaattatgttctcgatgcctcctaatcaaaccacttaggttagaaagaaacaggaatcatcctaggcaggaaaattactccacttttttttaagtgtccttccaataactaatgccactcatcagcattgtcctctttggaaattttgtcctcctgaggaaatgcacttgacgagtgctgaaaacttcttaagtggtttaaattttgttttcattgtttgcagcggattactggacatcaaagattcattgcacttatgaacaaggaaccttattttcaatttctgtgtaattttgcaaggctgtacaatgtgctgatgcaagcctttttcagttcaagagaataaatgtttacaaatgtagacccactttgtcttttttctaattagaaacatccttagggactgcgaaggtgtcacattgggtgaaagcactggttgtacatcaatccctaaagcccactaaaagtagaagagatcctaccacatggacttctcctgtgagaaagcagtgtgctttcccatgatgccaaaagtagtaacatgaaataattagcatcatagctgacaacagaatagaatctgacctcttcttcaggctaaggaagggttcgtttgtttgtttgttttttcctgatcctaatatggaagaacttgtggcctatgactagagaaaatagacctcagattaaaacccattagtcctgtggtcttgatgtaactcaaggcagcacattctgcaaaacagctgagttgaattctccacatcagcaacagaaaaatgtcaaaatgagacctcagaaggggctcagcagaagctctttgtggaaatggtctgacccctgcatgccagcactcttcatggtct

SEQ ID NO: 18106 - DNA, 1181 bp, Mus musculus
aaatagtggatgaaagaatgacagactacataagactcctcactcttgacttcctccttaaagtgattgtgcagagtgctcttaaatagctatttctaggttgatagttgactctttttcttgggaatttattatttcttcctaccccattgtctctgcagacattcgttcagaatcgtctcacttccaaatggtacctttcccttgttctttagtgtatttccatgtcccatttccatgtacaaatttctcctgggacctcatctcattcagacatgcagtcaagtattgtaggcatatgtgtatgctcactatgctaaatatttaaatattccaataaacacagaatacaagctatatgtcttattactacaggttcgcttgtaggaatttcagtcttaagataacaaggaaaactgtctttgtccttatggaacatttttttttctagttgggagagaaagacaatagacaataaagataattaagatgtatagtatattaaaagtgggtgacctgtaatgggttttgttgtccaaggttcttataacaaagttaacttaaaaaaaaaaaaaaaagcaacttttttttttaaagtgttaagtggtgctggagagatggtttagtggttaagagcgctcgcttctcttataaggggccccaagtcctgataccaaattggctccatgataaccaattgctgtgtaagaatagatattctagtgagactggacaagctaagagaacttgctcctctttcatcaggacccaggttcagttcccagcaccacaaggcagcttacaactgtccttaaccccagtttcaggggatctaatggcctctttgggtaccaggcacatatatgcgcagacaaacacacataaaataaaaataagtaaattaaaaaaaaatagacttggaagggaagacccatttaagctactataaatatctgggtggcctctgccagctttgttcaaggtggtagtagtggaagctataagtagttattatttgtgtttgttttgatatagccaactgaaatataaagttttttgggtttgtttgtgaatttgctatgctggggctcaaaccaaggactttgtgaattctagacaagcactgtaccatgggactacattcatgacttcaggagatcagttttctgatttgatagtta

SEQ ID NO: 18107 - DNA, 1813 bp, Mus musculus
atgttttcagaccgtgtatagtctttatttctgctaagaggttttgagttaagttgtttaacctgaaaaagtcaaacatgaaatagctggatgctaggtccttgtgtagggtaaccagctgttgagcctagaagaatcccaaggccaccctgccaccaccgctcctactcagactccacagcccctagcccagtgtttcatttaggatactttttgctgcaagattctcaagccacacacagtaactggtatgtcactgagtagtctgagccccgagcacctcagcgagctaatcaggtgataactgatgtttagcgtttctctttgcactcatcagcctcaaaaacaaaacaaaaaaaaaaaatcttgtagtttttgatcttacttaaatatcaaataaaaaaagtttccaaaaaaccagaatgatcttatttttgctgtaagcatctttgttgtacagggctgtatcgaggtcacttttgtctgactttttcctcccagtgctgccctgaagatgtcagcaaaataactgagtacctttatttagaaaaataaaatgtagaaactctgtgtcctaggttactgatgcatctgttttataacctgttctcatcgatgccaggcagatgagaatggccagtctgcggcttagattgctcactaatattcctgctgaaatctcacatgcagcagtcacacttgccaggccaaagtccagtactgtaggactagggtagagaggagacacttcacccccattattcctgaaagttgtgatgtttgaaccgtggggtatgttttgctgtacttctggttttaaaatggaaagtcaacctgaccctgcctgtgtcagacaggaagaactcctctcccctgcggagtaacacgcgtgttgcgtgtgagctgtggtgctggcgggaagcagggggcagctaaagtgctggagtaacagaaccttcctgaaaacatgcctaggaactttaaatatttcatattttgacacaatagctttttctaagtaatgatcctcattgcagaagtttagctatgaatagtcctaatattagttaacttaaaaactgaaaacaacaaaatgccttctgtggatgtaattcctgttgagaaatggaacatactaatccagcacatgtttattgaatgtctgctatgttggtggaaagaaggcaggaagcatagctgtaggcacaggatgagttgagctttgtaaattgtgtgtgtagagggcagcgtgctaatgtatatgtaaagagaagaacacgctaatgatgtatgtccttggagttctcttgcagtcttctgcattgatcacatttgttaacactatttaaagaagttgtttgccaggcatggtggctcacacgtaaaatcccagcgcttaggaatcaggtgcaggagtttaagggccaggctggtctacatagcaagttcaggccagggctacaaggtcaacaacaacaacaaaaatgcaagcttttaaaactttgtaggaaccatctcatctaagatccagtcatctaaaaacacagcaagctgggcgtggcatcttgttcctgtacagtacttgggagatggggcagggctctcaaagctcaaggttatcctcaggtccaggctcaagtccagcctaggcagagtgagatctgtctctgcaataacgaggcaatatatgagttttaagaaatacttgttaatggtatgaatcctggaaaaacattaattacctcaagtcaatttgtcttgaagaaaatcaaatacaagtcttaaaatgtccatagttcatgtgtgagtaaca

SEQ ID NO: 18108 - DNA, 1488 bp, Mus musculus
gaggagggactcgtaaaaagggccaataggcagtgattaaaaatgaacagattttagatattagaaaattttttacacaatcttaaagttcaagcacagctgttttgaagttatactgacaagcatttgataaaatgtgtaggatacctggggctgatcttccagaggtcctgagttcagcagccacatgatggctcacaaccatcctgaatgggatccaatgccctcttttggatgtctcttcttcagacagtgtgctcatgtacatgaaataaaataagtcttttttaaaaaaaaaaatcacaatacctgctaggtttcttcgtttttcaaggcagttatacctgaagggtagcatcctagtaagaggggttgagcagagcactgataatggttgaaggtaaggttctgtccagggccttatcgagaggaaacaggaaagtgtaagtatcggacatttggaagcgtccgtggttctggactgaggacaaactgtgctccacaggatcacgttctgattgagctcacccaggctgggctgaaaggctccagtgaaggaagcgagagctatgaggaagacccctacctggtagtcaaccctaactacttgcttgaagattgaggtattgaaggtaacttgatggccagggacctgtgctgtcctacccttagcccggaccctgcacggcactgagagacagtgtctggagcaatgcttgaggaggatttcagaagtgatggctgagttcatggctctgtgaatttcatactgggacaggcttgggcactctgtcaataggcttcttgtactattgaagttggaaccaaatcatgttgtttctataagacatttcttcatgtataggaaaagcctgctgcatttgtcatacatgtgtctgtggaaattgctttcttctgttcccagccactgcttttacccatgaaaataaaacaacttgttctgtgattgtctgttggattcatttctactcttgattattgcctccatttccatgagtgactttttttctggcttattcgctagtagaaagaccatgtcaagcgagagttcttggtgactttctgaagtaaaatcccagtggttttgctggggtttgtttgggtttgggggtcagggtgtctggggttttttggggggagtggagcagctgggtttggggggaactttttttggtttttcgagacagggtttctctgtgtagccctggctgtcctggaactcactttgtaaaccaggctggcctcgaactcagaaatccgcctgcctctgcctcccaagtgctgggattaaaggcatgtgccaccacgcccggctggggggaacttatgtagcctagacttggatttttgatcctcctgtcttaattcccacacctggcttctagaataaggactgtttaccatctgctcagtattttatttctttcctaaagatagttccttgggattgttctcaattgtttttat

SEQ ID NO: 18109 - DNA, 1099 bp, Mus musculus
cacatgcgtccatatacataatagcaatttaaaagattcttaaacttctcgatcacattgaacaggtgaataatattatttttttccttataacactacaaattgactttgtcagatgccggggaaaggtctcactaggtagcctaagttgtcttaaatctctagcctctggttcagccttttaagtgcacaaattataggtgtgtgccactgtgccctgctgcaaatggtatcaataagatctctgtccccatctctgacactcttctcaagccagttgtcttcactagtaggattttaatttgtttcagatttatctataaaatggctgttttctgaagtttgtactaagcatagagagtgtgcatgggcactagatgggcatgttgaagtcaccaggaaggacttaggtggttatttccttccttaggtcatgccgacagccctgcccctgtgaataggttcaacggctccagtgaagatgccagccaggagactgtttccaagccctccctgaggctgggctttgctgaatactgccgaatctcgaacctcatcgtgctccacctcaggaaaatggaagaaggtgagtatgtttcccacgctgcttatctgctgtgggtcttacacgcgctctctgccacttgtgatgttaagccttgtgttaagcttcagaactcagaagagatgatggtttgtgttggctcactttaggagggagcctgggtagtatcagcacagcctccctacaagctcattgtcagtagagtacagatcattctacaatacaggacataaataaataccgatgttcctgtatttagcttatgattttgaagcagaatctttagatctgatgatataaacaacatttttgcaggtggaaatgactatagttgctttcttaccaacagatgtcttgcaggatatttgtgtttatctacaaaataccacagatgtaatacaatcctcctttgtacctggtcggtggggcacttgcccgctttttacccttgactgctttgccatggtttcatatcggtttcacagttagccatgggtaagaggagaagccatcatctgttagagctgaagttca

SEQ ID NO: 18110 - DNA, 1122 bp, Mus musculus
ctcaggatagacttagtgctaatgagctttgacatcttgaggtacatttcattttattctatttattgcttcatgtgttaaacatcatttagaaatggtcaattgcttatactggtccattgtcttcatattcatagaattaggacatgaatttataggcttctgagtgtcagtttttttaattaatttactgtctttgtgataaagtttcaacctctgccctctgtttcctggagtgcttccatccaggaccctctttacctgacatttaatgtagtcgatcaagtgtgtgtgtgtgtgtgtctgtctgtctgtctgtctgtctgtctgtctgtgttgtatgtatataaataaatatctccttgacttgactggtttttaaacagatttccaaagagtcagaagacttcattgtggagcagtacaaacgtctccgccagagggatggctctggggtcaccaagtcctcgtggagaatcaccgtgcgacagcttgagagcatgatccgactctcagaatcaatggcccgcatgcactgctgtgacgaggtaccagcccctctgataacacgggaacaggaatgcatgagttgacttttaggcgggtttttatctttgttatggaatatctcacagccagttgataactattctcccagtaaaaaggttgctatcataggtttatgaggtatgctgtctagactaatagtgatggataaaagtgtttattataatcagtaaattatggagtgcagatacaggtgagtacttacgcaagagaaacctatttaatctctacagtggccttggcctctggctgggaatacaaacgtgactgtgactcctgcctcagaggactcttcctccttagggttgtataatcagtgtgtggcgggtgtgggcattattttgggtttgcatatgctggggcaaaattcagggctttgtgtatgctaagcacactcatgactcttaccttagctccatagatttttaattgctcttggtgccctagactcaaagcaaatgtcggattatgggaaggggtgatattggaagccacatatctgcttcaaactaagaggcttttgtgtacttttatatacagagttcatttaggatt

SEQ ID NO: 18111 - DNA, 1099 bp, Mus musculus
aaaatatctgtagggctggtgagatggctcagtgggtaagagcacccgactgctcttccaaaggtccggagttcaaatcctagcaaccacatggtggctcaaaaccatccataacgagatctgactccctcttctggagtgtctgaggacagctacggtgtacttaaatataataaatgaataaattaaaaaaaaaatctgtaaaacctttgatcgtggggctagagagatggctcagcagaagttaattttgtcttgtttgaagatagggtctcctggagcatatactggccttgaactcttatatagttaaggcttaactccactgaggttcctgcctctacctcctaagtgctggaattgatcgcaggcctttactcctagtctgtcacttgtagctagacatcatcccttactgcggatagatagtacttgggagtcaatactactatgactgacagaagttctcttgttctggatcaggtgacagattatgctattgccaggcgcatagtagacttgcattcaagaattgaagaatcgatcgatcgagtttattcccttgatgatataagaaggtaccttctctttgcccgacagtttaaacccaaggtaatctgccctgccagacctggataagtcgtggtgtgtgtgggtgttagaactaggtgtgaataaatgggttctgtggaaattaaccgaactgagttttagctttggttttggtcttttgaggcagtcagggtatccattgcatagtctaggctagcctcaaactcaatcctgctttagatgcccacttctctatctataggaatgtgccaatatgcctatctgtattcattttttaaatatcctcaaatctttagcttattgtttgagaattttattcttgaataagatatgtttttataaatccacctctcgcttctaggctttttattccttccatatccacaccacttttccttcctaactttgtacactccttttaaaaccctctaagtccactataatctccttaaattttaagtttttatgttgttctgagtactggtttcttcaaagatggttaatttgttaagtactgaaaaaatat

SEQ ID NO: 18112 - DNA, 1243 bp, Mus musculus
tggagctgatgggtatgagacagaaggcattcgagggctccgggcccttggtgtcagagatctgtcatacaggctggtcttccttgcctgccatgttgcaccaaccaacccaagggtaggtcttattattacttatttgtttgtttattgtgctggggattgagcataggatctgtgcctggtaggtaggaattgggctccatcctcaaccttagtgtgagatttactaagatggtagagctggataaagaaagcgctttgctaaggctcattttcatcttcatatcagtgatgaacttactacaattcagagtaataaaacagcggtagcttttgttttcctctggacaaaagataggcttttatatatctttatgaatgaagcctagtttagggactatagtaaataaatcacaacgttgacctcccaagtgatcttactgtagcggaatttctttccctttatgttatcttggttctctataatgtctttcattttgtttttcttcttccacttcagtttggagggaaagaactcagagatgaggaacagaccgctgagagcattaagaaccaaatgacggtgaaggaatgggaaaaggtgtttgaaatgagtcaggacaaaaacctgtaccacaatctctgcacgagcctcttccctactatacatggtaagagctctgtctgttgataaaaacttgaaatcaggagtaagcatttcatggattcagtactggttcagggattttcatgaagagattgcttttagagctgaagaaatgactcagaagataaaattactggctactttttcagagaacctgagtttgattcaacagtattcacaaccatctatgaccccagttttagaggatccagtgtgttctggcttctgagggtactagacctgcatgtggaacataggcacacatgcagacaaaataccatgcacttaataaagatgatgcatcgctgagcagtggtggcgcatgcctttaatcgcagcacttgggaggcagaggcaggcggatttctgagttccaggacagccagggctacacagagaaaacctgtctcaaaaaaccataaataagaaaggaagaaaggatggatgcgtgcaccagcaaaagctgtagacaaccaaaaggtagatgtggctagagctcacgcaggggctcgcttggcttgacttagtgctggtgggtagttggattccttatgagtgagacatctagtgggcaga

SEQ ID NO: 18113 - DNA, 1446 bp, Mus musculus
cagcataaatgaactatgcagacaacatatgaataaataagccagttgcaaaagggcaagttgtgtacgatgctgctggtattttctggtattttagagggttaggttcagaaccagagagtagtttggtgaatgtctatgtctgagggatgaggaaaaagaatatttaataggtatagtttcagttttataaagtaaaacagtatgctccaccaaaaagctattggactggtaaatgagaggttttcaaagggggattaactgttattttcttgtccacagggctggaaagggtgacgatgctgtttttaggattgcataacgtacgccagacctcaatgttccctcgtgaccccaaacgactcacgccttaaagccacactttttattctctccaggaacctgctattgattaggttatacctgaggtacttaaaatatgcagtagaattaatgtcttactaaagtgccacaattattttttaagtagctcagtacaaattaatttaagtaaaaaacgttttagaatttcaaatatcctaaaataggaaatacttgaacgttttaatgagaaatttctatggttgaaattcatagcctttcactataggaaatgttaagaaaaatttaaacagtttaagattatataatttttttttcttttctatattgaggtggccaccatactaatattctaaattttcaatatttgaacttttaactcttgacattgaaaaaaaaggatttggagaaattaccaagattttaacatctataaaattggtatgtcttaaaagttatttcaaaaatcctgtgaagcatctgaaactggctagaaccagtaacactgagacattgttaccagtcctgaggctgagattcaataaaaacttacagctgatgatagtgttgtgtgactttatagaaatctgattttataactggttattgatgaatgtatattgggaaaatagaaagtaaactaaccttatattaatattagatgtgaaaagtgccgagggtacatgacagcatgtgcctgtgaccccagcactagggtgtgagcacaggagagctaacagttcaggacttctgctacgtgagatcctgcctcagaggaaaagtaagcacatgggaaagtctacaggaacatgcacgacgtgtaaatatcttagtgtatgtttggcgcccttgagagagatccctcccaagaagctccacacgttggtttatcatggccactgcacactgggcacagctgactcacaatagctaggtggtggggctgtgctgctgtttggggtgatgtgcttcagtagtgcagatcaaggcaggatggccaggagtggaagagacctcaggcagctgtgagtcttaagagaacagactcttggaagatagcttcagtgagacaagtcgtttaatggggatcggagggggttgcag

SEQ ID NO: 18114 - DNA, 1174 bp, Mus musculus
agcagatgcacgctgaacatgattcagcatagactcaaagtttctcaggcttttggtctgatgagcacaattcctctgagaacagtttttttcctctaggcaagtttccatacatagatactcaagcttcttagtggtgactttttatgtcttgagtacaaagatagttggtgtgcagtcagaagtagcaagtatggttcctttgtaagaattcttgtcatcattacaaataatcaaataattagagattacctttgaaactttttctttcttactgcttttttaaaagactgtattttcaaaaatggaaatttcgatgaactcttcttaccaaccttattgttcattgtggcagtccttgtacctcagcctaagagctggtattacagatgtacactgctatctataatcatcacaaaccctttaaagggtagaatctgcaggaaaataccctctagcatataggtgctaaatagaaagtggaacataactggaattatcatctaaacaactgtgttcagtttcttggtggttttttttttgttttggtttgttttggtttttggtttggtttggtttggtttggtttccttgcgttagagattaaactcggggtcttgggcaagaagtgtactgctgaactacattgcttccttctttttctaatttctttttccgtaatacaaattgagcacagaattttgaatatgttagcttgctagacaaatgatgcagtcttgagctatattcccagttccttctttttaataaaataggtaccttcttttctaggaagaacctaatggacagggaggtgtttattcttacataacacagtccattttccatgtacattgatacagttgggagaccaaaaataggggtttagtctgtgatagggtatatttattttttgttgttgttttttttttttggttttgttttaaaatttgctttctaaaaatactaagtttagttatccttgctaaaagaaagaaatagctatgaagtgtactagtggcccttacagagtatattacactaaagtgaattgtgtctccatacgtgtagcaatataatgacatacctctttgatctgtagattactaggttttgaaaacagaagtttacacagtttgtggtgattgggtgaactgatgtttaagtcacttaa

SEQ ID NO: 18115 - DNA, 2041 bp, Mus musculus
agtattcacctagcagaaagccctgggctccatccctcacaccatataccctaggtatgatggaacatgcctgcaattccagcactgaagaaatggaggctttttcgcaatgggtttgccgtcctaacgcaggtgttgtgaaagccactgctaattcaaagcaaaaatgggaaaggaaaagactcacatcaacattgtcataatcggacacgtagattcctgcaagtccaccacaaccggccacctgatctacaaatgtggtggaatcaacaagcgaaccatcaaaaagtttgagaaggaggctgctgagatggaaaagggctcctttaagtacgcctgggtcttagacaaactgaaagctgagcgtgagcatggtatcactattgacatctccctgtggaaattcgagaccagcaaatactatgtgaccatcattgatgcccaggacatagagacttcgtcaaaaacatgattacaggcacatcccaggctgactgtgctgtcctgattgttgctgctggtgttggtgaatttgaagctggtatctccaagaacgggcagacccatgagcatgctcttctggcttacaccctgggtgtgaaacagctgattgttggtgtcaacaaaatggattccaccgagccaccatacagtcagaagagatacgaggaaatcattaaggaagtcagcacctacattaagaaaattggctacaaccctgacacagtagcatttgtgccgattttaggttggaatggtgacaacatgctggagccaagtgctaatatgccttggttcaagggatggaaagtcacctgcaaagatggcagtgccagtggcaccacggtgctggaagctttggattgtatcctaccaccaacttgtccaacttgtccaactctgcgactgcccctttaggatgtctataaaattggaggcattggcactgtccctgtgggccgagtggagactggtgttctcaaacctgggatggtggttacctttgctccagtcaatgtaacaactgaagtcaagtctgttgaaatgcaccatgaagctttgagtgaagctcttcctggggacaatgtgggcttcaatgtaaagaatgtgtcggtcaaagatgttagataaggcaatgttgcttgtgacagcaaaaacaacccaccaatggaagcagctggcttcactgctcaggtgattatcctgaaccatccaggccaaatcagtgctggctatgctcctgttctggattgtcacacagcccacatagcatgcaagtttgctgagcttaaagaaaagatcggtcgtcgttctggtaagaagctggaagatggccccaaattcctgaagtctggtgatgctgccattgttgatatggtccctggcaagcccatgtgtgttgagagcttctctggctatcctccacttggtcgttttgctgttcgtgacatgaggcagagagttgctgtgggtgtcatcaaagctgtggacaagaaggctgctggagctggcaaagtcaccaagtctgcccagaaagctcagaaggctaaatgaatattacccctaacacctgccaccccagtcttaatcagtggtggaagaacggtctcagaactgtttgtctcaattggccatttacatttaatagtaaaagactggttaatgataacaatgcattgtaaaaccttcagaaggaaagaatgttttgcggaccatttgtgtgtgtgtgtgtgtgtgtgtgtgtgtgtgtgtgtgtgtgtgtgtgtgtgtgtgtgtgtggcagttttaagttattagttttcaaaatcagtactttttaatggaaaaaacttgaccaaaaatctgtcacagaattttgagaccattaaaacaagtttaatgaggggaaaaaaaaaggagatgggaagatgagaagttcaaagtcattcttgaggccatccagagacaacattgagagagagagggagagagagacagagacagagagaaagagagacatagagagatagagagatagagacagacagatacaaaaagagag

SEQ ID NO: 18116 - DNA, 1330 bp, Mus musculus
aaaatagtttaatgcaaatgtatttgtgaatgttctcaattgttttaatctattgaaactttacatgtagttgttcaggtgtctttcattggctcttattctcaaagtatcttcagtgtgctaagatacaaaaagctgcctttcgtacttgtttccataattactgaagtatattgaagtaagctgaaggctctttattatctttgacttacattaagacatttgacatttgttttgagctcctaattagccagttcttctagtgttttatcccactgaacccgaaaagttaatgtttatcatcagtaaataaaatcattttgatattaatttttttctttaactttcaggacatacatgtttaataaccttgacagttttgcatgtgatgctatcactcattggctacttgacatagccaacgaagagttacgaagaaagtatataaaactactgataatacttctagtttgttagactgtccaagaagaatggatacaataaatttaatagtgttgtttgttctgcatgctgtcattgtcttcaagatgtgttagaaatgttaagaaagcatgaagaaagtttgtttggtatggcatttgtgatgcatataagtctcttggaaatatttcaaaactagacaaattcacaacattgcatggtctcttttctaaaaagtgtgggaaagtgtagaaaatttccagactagtatggtaatgtggggagagggaaatcatgatttcttaggctagatctatcctgttagtctagcttatgattaaaataggaagctaaaacatactgattagattgcaaaagtaaaccaaagtccccaaacaaaacttctgttcttgtaagcagaatcgccacagaggtggcacattctaatttaacccttgacctgaagatgttttcacttttactttctatgaagatgagttggctaaatgttataaaggaagactatactaacaaacctgcagtggaagctcacttgatacagtgcttgtaccacaagcctaaatctctgagctccttcctcagcacacagttataataatcccagtatttgggagatgaaggcaagaagatcagaagttcaaggtcattctgcgttacctgatgaggttcaggccaacatgggatacctgagactctgtagtaacaaacaaacaaacaaacaaacaaacaaacaaacaaacatacatcatagatggatggatgcatgaacaggtatagatagatagatagacagacagacagacagacatacagacagaaagaaatgaagaatgttgaaccttttgaattagttgatggcaaattaaga

SEQ ID NO: 18117 - DNA, 1300 bp, Mus musculus
agacgtgtacctgtgttcaaggctgagattagataacctatctaaaggcttgttcctggagaagactaaatcttcctctctcaggagccattgagtacatgtggctcttcatctagagtgagtatgtatgtgtgtatatatatatatacacacatatacatatacacacatacacatacatacatatatatatatacacatacatacatacatatatatatatatatatatacacacatgtacaagccacaataactagaagggattatgatattgagggagtgggagaaaccttggaagagttggatggggagcaggaggcctagaatacagtgtgtgtgtgtgtgtgtgtgtgtgtgtgtgtgtgtgtgtgtgtgtgtgtgaaatattaaaaataaaaaagacaggagatgcaattgatagatgaatatttgaaaaacaaacatcctagaagagctaacattagagtagagtataacttgtcctctgactgtttccttgttctgtggctgtgagacccaagggggtggcatgtcctctcatcacagtgtgaggatgagatatggcctgcttggtgtgtctggcacttttttcatagttgcctcgtctactgcttagttattgcaactctggtccaaattggaattcagtctttcttctgctgcaaggcaagagtagtccagagctactgagtgggaagagaaagaacattgatctaagagctactaaggatctagcttgtaagaggagacttttctgaccacttggaattgagctagcctgttgaacgtgccatctttaggagtggactctcagtctactgcttgctcttctcattcccactgtgttagttcacttctataggaagtcttgttatccctgcataacaaggaacaaaagttggagctgaaaagcagcaggagtctcaacatccttttagaacaaggaccttccgagtagctgagcaggagcagtagggagacacgagtagaaagtacttattccagagtttagggaagtttaccaggctgtgcttgtgtctatcacaaaccccacaaagagaatataacctctagagtacctggagttgagactttcagtttcctcatggggaaaataggtgaagacttgtataaaacagggaagagaaaataatagtttgcttatttatttatatttatttattttttaacacacaactgaatggaaaataaaaccctgaaaaatggtgggaggggtcctggagatatagttcagtggttgagtacttgcctagcctataggaggccctgggtttcat

SEQ ID NO: 18118 - DNA, 2089 bp, Mus musculus
cagacagggctttactggagcagggcctacaggatggctggcccaggactctttccccttttgtgagcttgtcagagggctcctgggagaatagctacacagtggccagtgctggaggatgatgccgtctgtcggcagtgtggacccacaactgacatgcatcactgtaccctttttttgccttgtctgtctgtccctcactgcctgtgtctctcctctgccctctttccctgctcccaggaggagatgaccagtgccttggccacgatgcgtgttgactatgagcagatcaagataaagaagatagaagacgcatccaaccctctgcttctcaagaggcggaagaaagctcgtgctgtggaggatgcggctctcgcccactgagccgctctgtctcccacccactggaggacaagcaataactctacatgaatatattttttagacaaagagacacaagttgcccaatgctgcctcctgttctcttgggctgcgtggcgcccagaaatgcctccggctttattctgcccttggctctggctcccccgaggtgggggctggaggatgtgtgaggggcaaggtgctcctgagcccgttgctcctttgcattttatctgtaatttggcgtagagtttttatggaacctgtcttcttgtccttttccccactcctcactccttccccaggtcctttcccatctacaaaggctgaggcttatccacaggtgttgtggaagttgttatagggaaagtccctaggttgccctatctgtctcctctggcctcccactgtaacgtggggtcctcactggctctagaatctgggagttccagggagaaggcagcagagtggcagtaggtggcccttgcctcccgctgaagcccttagacatcaccagtgtgcacaacagagcagcacatgtgtgtgcatgtgtgtgtatgcctggatccatgccagcgactgggcattggagggtctagggaaggcggggctacagggactcctgcttgaactgagcctgcctaaatgcctaggtagcttgtctagatccagagccaggtaattgtggcctctgtgttagctgggcaggggaggcagtgaggggttggggggcactgacagccatcaggaggactgggtcccctcaggacccctttccctgctggtcccagatccctgaggcactgatctactgagtagcctctgcttgcccttcttgccacgattaacccactcttgtcgagttctctgaaatttttagccatttctcaatgggctgtccactcccacggtgagcctgggaaggttctatgcctggaaaggcagttgcatttcatgcatctcccctgatctctggggtacctgccaacctcccttcgacaagggcaggaccacgtgtggtcttcctggatttccaccatgtggtctggtggatgggacagtcttcgcaccaaagatgtcttgactctgtccctgcccactagccaccttaccctctaactactcaacctgggtgggggctccccaggattgaggaggagcaggcggggaagagtctttgtgccatggtcccccatgcccctcctgctggaggaggggtgtctccctcaggggttggtggaggaggggctcttgggcatccctgggcctggggcagggcccagatgtctgcagctcctcccatgtctttgatggtgtgttcaacactcagactgttgtaaactctcgttttgtatgagcaaaattgtctttactaaacaaatttaatagttgaaagtttttcattctttttcttcctgaggcttgggcccttgaccgtttacttgtgttctcccagcctgtgtgtggagagtgtttcctgtgacgggtggcagagccctgtgccccgagaagggagaagagagcctcctggctacatcagcatgggaatagcccctcgtagacgagggcttgtgtcaataagcacgtctcctttggagccaggaaaacagggtggcgtattatcttagagtccagaagggggcagtacaggccaggcagaaacaaaagtgctttgagtgagctagtctcctcagaaagcctgtgatag

SEQ ID NO: 18119 - DNA, 1161 bp, Mus musculus
gttcaggggaggcccaaggactgagtctttgcctcgttttgctcatctcaggagaccatagacctaggcatgctgggtctttatgtccctagatgtactagatctgacagggccccgccatgagtgggctgccagagttaagctgtgattgagtgctatgaaaatgctctgctgggctgagggcagcacttgggatctgtgtactcttcctaaggagagccagggtttctccgtggagtctgggattcagattttgctctaaagtcccagctgactccacgaatacactcccaggacatgttcctgaagctaagtgggtgccacatgtttgtaggttctcagcggctcagcagtgattgcaccctaagcttgtagctgcagagtcccttctgggagagggtcctcttctttccccggcccccactgttgcctctctttctttatgaagggatgaaggactctgaggcaggggaggtctcagcattcaaagagccaggacaacccacagtgatctttgctttgcagctccggaagtcctgggcccggagaagtatgacaagtcctgtgacatgtggtccttgggtgtcatcatgtatattttgtaagtgggctggtgtgtggtgtgggatggctgctaggctgcagtgcgtcagggagctggggacgctttaccactgcaggacaagaggaggctttagcatttccccttcggatgggggctccctgggaattctgagttcctgcttcacttgatgcttggtgggttctggttgctaagtggtggtagaaactagctaatgggctagccgtctaggtgacatccttggcacttagactcctgggtcctgcagtcccgatttctctgggactataacaagcagagtctgtttcttacctgattagtggtgcagggtttctaaataacacccgctttgcccttctcttccttaggctgtgtgggtatccccccttctattccaatcacggccttgccatctctccgggcatgaagactcgtattcgaatgggccagtatgaatttcctaacccggagtggtcagaagtatcagaagaaggtaggaaccggccttcggggacaggggaaagagtgagtgtgtgcgagcgtacgcacgtgtaggtatcagtctttttcacatgtgt

SEQ ID NO: 18120 - DNA, 1188 bp, Mus musculus
tgatggatatgtttttgttagacttttttttaacaaggcagaacatttttatatgactataaaagaacgcttcaagggctaatgtcaaaccagcttgtattggccatctggagtatacattaaatgactttttcataggtcagtgcattgttttcattctcatcagaggtactcgaactcacgtattaccctcggtttcaatctctctcaagatagaagatattcttttatgtttttacgggtttttttttcttttttaaattttatgtatactggtgatttgcatgtatgcctgttttagggtgtcagtcttgggagttacaaacaattgtgaacccccatgtggatgctgggaattgaacctgtgtcccctggaagggcattcagagctcttaaccactaagctatctatctctctccagctcctcgatagaagatattctaaaagcacaagctgactgcttgtctcccttagcatctattccggagggtactggggtgtgggaggcatggctgtaaggcaaagctagaagtcttaaccccagcaagcaattctgtgggctcattctagatggaaagagtacaggtagctgtttgtcacctgagccactgtcacagtggctcagtttttagttctctggttttcgtgttgagttcatagtattttatggctttgtcttttattatttcgcctctgatttatagcctgggtactcagtggtttacagatcttacactttaccaaataaccctgcacttaacgctctgctgtcataattcccccaaaggcccgtgtgttaaataaaggctcgctccccagcaccaggaggaagtgctgctcctaagccgtggccgcagtgttggatgttgggcagttcattgtgaatgtgcttttaatgaggaccgtggggccctgatctcattctcttcttttaactgctggccatcaagtgaatggctttgcttcactgaatactccatcgtgatatgatactgcaggcttaggacagcagtgctgttcagctaacagattgaacccttggaacacactaaagctttccctatatagatccatttccttgggtatttgttaacggtaataaagagctaacccatattggttttaaacccaactcatgcatcctttctcggccaactcaaaaggagctaacttaatgtcacaaatga

SEQ ID NO: 18121 - DNA, 1235 bp, Mus musculus
tggtgtaccaaaactaaaagtatagggggggggggggaaacgcctaaacgattattcctggccggagagactggtgtcggagaggtccgtgccctgaggtggcagagcctaagaaagctgtggtaaggagagatgttaactctcctttttaagtcagtgtcgtagacacggatagctccgcagggattttggagccagctttctttaggtatcattcttggtgccatagtagccttttaatgagaggttgacagattgccaaccagtctaagacaggagtggggacagcatgtgaggtcatctgtgtttccaatgactttctaaagactaactttggttgcttagtgaaaataggtgttccgatggaataatatgcccaggaggtcttgagaataatgaataagacagataataggatttggaaaagctgagaagggggcatcacgaaccaggcagtctttcttcagtctttatgatttgtatagtcattctgaatgtctgtatttattaatgtgcatcgtgctggtgtgctttctgcaggagaaagctccgggccgatgtgacagctgctttccctgccctgggaacagatcagatctctgaattgatacctggaaaggaagagctaaatgttgtgaagttgtatgttcacaaaggggattcggtgactgtgtacacgagtggtggtaaccccatcctatttgaactggagaaaaatttgtatccaacaggtatggtaaccagatgaaatgcccagactgcagccctggtgaaacacgttattctctgttgatttggtgtgatatttgtttttgttttcccccataaacataccttttcaaatgaaataaacacagaatttcccaatactattcctaaggatcttctgggacctagtgtttccagaattgaccttttcaccgtaagagggataagaaacaaacgaaacccccggccccccccccaaaaaaaacccaaaacacatggaaaaatggcagtgcaaagttctgagagaaaggagctgggggtattgggaagagtgctgaagtgttgccaaaggtggaattttagagcatgtaaagaaaatatggcgtaaaccatctgtaaaaggctttttcttaacacagtggagaaaatgtacgctcaggactaagctgtgtcagtcacacacttcccctgagctgcttcatagtgggttttcctagttagagtctctctctctctctttttttaag

SEQ ID NO: 18122 - DNA, 1296 bp, Mus musculus
agaaaagagtggggcactttgcttgaagctctctgctggcttgcccctggcaggaagtggacaatggtgctatagagccaaggacacagcctcagagcacagggtgattgatgatcagcctctttcccatcaagcttcccggtcaggctttgactttgaagatgcgaggttactagactgcattgacagcatcagattatgactccaactcttgagtagttcagacttaaaaccaatcagccagagtagccaggactgcaaagacactcaatacagatggagaaaaacttgtccctttaaaagagggccagtgtttcaattgagcctccagaggagaccactttcatgttgtgcttgcctttccataccctttcctcgggttgttttaagcccaagcttctccgtgtagcctaaaaagttccctaccagcccaggctgaagccacactgctcccgtcccagaagaacgccaaatccttgtcattcaaactgtgcatcgtttgcagagctgcaaaaagcaacatgagctagcgactctgaggttgtgcacgccatcagccccttggctgcctgaggtctcatgcccagccttacacctctctcccttaagaagcccccgtcctgctgtgtactacaggggcacgtggaaagtcattcccttcatcctgcatgtctgtagcgttaggagaaggcatggctcctgctgcaaacactgtgaatgctgctgagaacgtccccccatggatggctttttatttttgacaagaaaaaaaaattcatgtattatatatatatgtatatacacatagaggcatatagctatatatacagaaaggcgtttattcagaaaatgatggtaagattcagactttaaagcacagttagacccaggacctgtactgagggttgagcctctggaaagcatggagttcctgacgtctcagaggagtctaactgctggtagtgccttctatggttgtattattgctctgtatgtgttcttttcaggatattttctttctaaatgtctttctatgttttttaatgagtaataaaagcttactgtaaaaacaagtcacgatggaatcgtccttgctgaacgtcaacatcttctggaaagtgggctggagagaggaagactgaggcaactgcaggtacatttctagacagagccaagctttcttctccagtaagctagagaatgaaggctaccattcaaacgcttttgagaaaattgtccacacagtagagggtactgcttctggctgcctcttctccatctctgcggtgctggacg

SEQ ID NO: 18123 - DNA, 1165 bp, Mus musculus
gttcatggttgtggacaacccacagaagtttgcactttttaagcggatacacaaagatggacaaggtatgagtttctgacctctccctagtctgctaatgcccacagtcactaaacctcactatcagtcctgggtgggaagtgtaggcttccaggcagcaggattcatggaagggccaagcacaggctctgggcaggaccaggcagctcatgcctactgtgcccagctccatgcacacacaggaaagacacaccctgggctctgggctcctaatctctataatgggaaggagtccgcccactgctcctcttcctctggaagatgttgtaaatggaaatatggctaaactttgccatatgggaatgaaggtagtgcctctcaaatggcaggaatggatggaaggctcagagccaccactgccgtgtcaggtccacgcccattagaaccaccatgactatttccagtcatctggccaacctgtgcatttctgagcccgaccccaccctgtcctcatttgagatgagcacccagcccttcattctgcttgcagtgctcttccagaaactctccattgctgactatcctctctaccttcgtctgctcgctgggcctgacaccgatgttctcagctttgtgctaaaggagaatgaaactggagaggtggaggtatgtctgggccctttacaaaaaccagttctggccagatgggtgctgctgtcttaactgcaaagtgtaggtggggcagcaggacttccagaggctcagcatttaacccaggatcatcagtggggcgcgcatcacagggaagcaagttacaacctgcacagggcaaagcctgtgggaaggatttcatttgctttgtggaaatagggctggcatgggggtgggtgtcaaacacagaaactgtgttcaggccccacctagtttttcctaaggcccagtaagctcaaactctgggctctactagacatagacagttttgaaccacctttctctcctaaaatgctgacttcctttctccaaagggggtctaaccatgttagactcctggcaaaaatgttgtcaaatcaggcagaaatcttccaagcccagaatacttgggatgcggtctttagggagtgatggaatggaggagaggctcagagtggggttgtttttgttgttt

SEQ ID NO: 18124 - DNA, 2202 bp, Mus musculus
cgttctggtccttcctccactctttgcttccctctgttgttggaatccagccagctccagtacatactgttcttaggttagccagtgacaggttgtccatgatcgggttgctgcgatatctgccaaggcaagacatagggacataagcctacgtctgtcccttcagaccatagaggacaccttgaccagatgtttggctgcagctctcagtgacatcttgtttttcagtactgatttaaaaaatcatatatagcccagttttcattttatataaatatatatatatatatttgtgtgtatgtgcatgcacatgcacacccatatacaacacaggtttttctagcctctcctggtcatagaccactctttgttgtggtggcagttcacacagaagccacctggagtctctgttctcatcacaaactttgttctgtttggaacagagaaacctggcctttgagatctctgtcataaacatttagcagaatgggacagtcctgtgacctgccgtgcgggtgggattctgtcttcttcctcttgctgtgagggagccaccggttgtttgcatttgctctgctccatgctgtagaagtgcatcctagtcttatctcggagctttggaagtttttctgaacatagagacttttcttccgttcctgtctttgtctctgacacaccattttccatgtaagatgttttccaatataagacagttctatagctagctccttttagagtaaaaagtcttaaagttttattgtgtttatggcagatttaaaaagggtaggaaatgagtccttctttctcccactatttttggcatctgatacttttaaaatttgccattccattaaaaaaaattaagttgctctctgctaatccaaaaattgggcccagattaaaactatttcaagttcacctcttggcttagttttgttataaagctctcgggatgaacaggggcttgaaaatccctcgataaattctagaagtgctgcctcttgaaactgttttttgtttatccaaacaagggtgactaagggaactttgacctccaccaactcaaaactgttttcccaaaaccagaatcttaaaaaagggaaaaactgaatgtgtcacattgggtcctgcctttgacctttttctaccgttagatgctctcccaacctacaagcctggtgcttgaaacactggctcttttacatcgtgcttccccaggagcaccagagctaggaaatcacaccatgggatcatgtgtttcaacagctccctgccgctcaggctcattctctgtttcctggcttgaatgctatgcttttattttaactgtattgttttctatagttcaagagagatgggtttgtcatttgggttggaatctctgagtgttcttagctttgggctagaaatgatccttttggaccaacttgtgaagctggcagttgaatctgtagaaagtggtggatgcctctctctgagtgaagggaatggggagcttgaaggagtcactaacgagaagagtaacttgcagcaccaggaagactgccccctgagctagagcagagagagcttgagtggtgtgagtctgactgcatggggcaccccttggtcctttggatgtctgatccttgctgtgctttttactgacctgggcttgtactgctcctgagccaataggggcttccagacccaaggatccgtttccttgatgactaagaagccccacccttccctttttacattcctcctaacctaagtgagcagagtttccaccctgccctacatcctctctccaggcactaccctctaagaaggtaaaagcaaaggttcttgaagaccatgctttgggcctgtactttccttcttgccttctctcttaatcctgtacattatttgtgttttttcatccctttggtccgatgtccatctgctgatttgcataatgaactggacagtgtacaagtggttccctactaaccccagctctgggagcctagctgtcttccttatctctggtgcttctgacgcctgtgagacggtcctgttagaaggagtaggaaccagaaggaggagagtcctccgcagcagagctcacttcaactggaattgaggttgcacactgtgatttcacaaccaaaagccaaaaggagccggccaccccaggccttaggcaaccagccttcctcaaataggcttgcctga

SEQ ID NO: 18125 - DNA, 1186 bp, Mus musculus
tcttcagacacaccagaagaggtcattggatccctattacagactgggaatactcaggacctctggaagagcagtcagtgctcttaaccactgagccatctctgcagtccaaactcagattttaatgtcaagtttattgacaggaatctgtagtcacttttctcattccattttccaaatcaagtgaaatgccctattgacttgagaaatagggcagactttagaccttgtattttggcttccaataccagggtctggggtagagtttagaggcacctcttcaaggccaacaacagggtggagaatagtgtgtgaagacaggattgttgtagcatgcacatctgaacccttccatcagagttaggatccacttgaaagcagggacacacaggggatggcagcaaagggagcccttgatgttctggccttcatctctcccagaacagccttctctttaaaccaaaatcataacagtaacagtgacaggtcatcaagatggctcatcaggtagggttgccacttagcctggcaacctgagtccaaacccaggagcccacattgtagaaggaagagatgactcctgcaagttaccttccaacatccacagagacataaaggcatgtgtgcatacgaacatacacactgcttcacatgtatatgtcaaaaaataagtatatgtttttaattttttaattaaaaaaactaaacattaacttgcattttctttttagcgacaagccaagtacacagaaaataagctgaaggccattaaagcccggaatgagtatttattggctttggaggcaaccaatgcatctgtcttcaagtactatatccatgacctgtctgatattattgatgtaagtacctaaagctggggtggaaggctgagaccacctcttgcctagtttcagaaacatggtcacgtgttcctcatttctgcattcaggcattttggccattttgagaataatgtgaagatagcagccatgatccattgtaaaggtggtgtaccttatacaccttatatcattcgctcctcacagcactccatgagaacaaagcaataccgtctattgctgttgactaataaatcagagtttagtgatttacccagagttagtaaaaggctgaaaaaaatttataccaaattctgattcctaaacccatgttcatgacttttgtg

SEQ ID NO: 18126 - DNA, 1208 bp, Mus musculus
gtcatcttgattctttaatttaacatttaattacccattttgttgcttatctgagtgatattaatttttttacaccttattgaatccataaaaggtaatcccattccccagaggcgaatagtgcctgttcatttgtcctgtcaatggatgcctttctaaatgaccaacaagaagtgtggtggtttgagtttgtcctcccttgctttaaatcatagaacccttgtacttcctttactatatttttctgtactcaccaagcaaagaaagtcagttaaagatttaaaatgttaaactcagaaagatgcggcagtcctagttaggagcagattttaccatgcaatctcagtcttctttttattattacaatgcgtagtgtgttgtatcccccttttctttgtagttctataatcaggagccttctattttcttccagtgttgtgctataattagtagtctagtctgaagtataaaatgaaaggtttttttccctagcagaaatgctgcttattcactttattttacaaagagcctactcagtctctacgagtcattcaataatccaagaaacatcaattagaatgggctgtgtaaaacaagtgctgtgggactggacaactggttaagaaagcttcctgccctttcaggagggctggagtttgcatcctagcattcacatctggtgcttcctaactgcctgtaacttccgctccagggagtcagactttttcttctggcttctgcaggtgccagaagagatacttctcttctgtgtgcatatgcttacacacaactcaactcacatacacgcacaacagaaacactgtttaaatgctgaattctgagtattcaaggacaaattcatgccctaaatgtgcatcatctaattagaggcatacatacaaataacgaggtgaccagaggcatgaagagagttctgacttggtacttgttcattaataatagttttcatattgctctatttgcctgttcacttggcagttctgtaagggctcaagggccaggaaggactatgaatatggatgtggagtaaatgagagagtgagtagatatctcttaacagtgccaggcctgtggcttacaggctctcctgcaagtcggttcacttgagtttgagagaacagtctggtcggtttacatggcaagttgcaggccagccaggactacaaagtgagaccctgtttcaaaaa

SEQ ID NO: 18127 - DNA, 1210 bp, Mus musculus
caggtaggttgtggctcctggcctggcctaatatgatagtggtgagaactgactcagtgtctattcttttcttagaatacctggcccctctatctctctcttccctctttgctttcctttcaaaacttgaaacttacttaattttgctctagatgacatacacttcttttgtgtatgtgcacatgtgttgtggatgcacatgtatgcatgcatgtaacctactttttgatacactttcttgttggtctgggccttacttgctagactaggctacctggcttgtaaacatctagaatccacccatatctgtctccttagcagcaaggttacaagccccgggccactatgccagaccttttttctttgctttgggttcagcctctggtccttatccttgtgcagcaagtgctttaccagctgtactatctaccccgtctcccacttcttttttccaagtgctttcccttttccttacctccaggcaatctttttaaacccctgttgattctgtacatttctgttcatgagttaaaaccaaatcaaacccctgctccagggtacctttgctgtggcagatgaacttgaaaagctccagtgaggggcctgcaaagacggaggcctgaccacaagtcctagaatgtgatgaaagtgacaaagcaggagtactatcaaccttgaaatcacctaaaagtgctcctgatcatgaaatctgagttgacgccctcatctcccttaaatgaaattccttagacttcatttttaagaaaacaaagcaggggctggagagctagcttagtggataaaagtgcttactgttcttccaagggacccaagtttggttcccacgttctgttcggacccaagtctagcactcagacaactcacaggtgcctgtaactccagctcaggcgattcaacacctctggtctctgagagtacatgcactcacatgcccttgctcacacacagacacatatatgtccaatttaaaatacaactaatctttaaaaaataagcagataaaaccttctatatttcttttttttggtctttagtaatgcagagaaagtgggatttagagttaagaaggccaacattataggccattcagtagctttgctatactgaaacttttccaggttttctgtgcttctgtctcttttgaacatatgactaatatatgatggaatagccaccaatccatagtgtc

SEQ ID NO: 18128 - DNA, 1193 bp, Mus musculus
ttgggtgtggcaccctctttccaaataaataaatgtaattttaaaaacagagtacatttctttttcattgctaaatactgtcccatggtgtggccgtttgactgtttaaccatttactcattgaaggagccctgggttgtttcctattttgagctgttatgagtaaagttactatgaacactcaggtacagattcttatataatgagatttaaaaaaaataatattgtggattattaataggaaattcaaagtttttgctcatctatagaagaacataatataggatattattattcctacatctcagagttttgtatataaactgagatagtatgaaacaataaatgtcataatatgtaatgaaatataaacatatgagccaagatgctaactcactgtgctctatcctttaatcttagacatcagagtagtacttttaaagattactcacatacatttatttatttatttatttatttatttatttaatttgtttgtttagtgatgtgtgtgtgtgtgtgtgtgtgttcatgcaattgcatgcatatgtactggtgtgtgtgtgtgtggaaatcagaggacaacttgcaggaggtgtttctctgtcttcagcatgtgggacctgcagactgaatttaggttatcaagctttgtagaaggtgcctgtacaggctgaatcatctaagaggcccattgtggttaaattatgattcagagagcttttaggctgccttcttttcttattactgatgtataggtagtctttatatactctggctgttgatgattattggttgaaataccttctgtcagagtttatcttctttttattgaattcattaatgtgtgagtaatgtaaattttttatacaactaaattgtctaacctctttatagcatgaatttgttcaaaacatatatacatgcatatttttcctattctgaaattataatatacttgtattttcttttaagagttttaaagagtattacttgtcatatatctttgttgaatacaccaggaattaatttttgtaaatgctgtgagctagggatctaactttattttatattcaatatgaatgtttgtcttaccttcataatcctttctctccactgatctgtaatagtcacctatgtgcttacttcagatttatacagatttgtggacaagaccaattctccattatgct

SEQ ID NO: 18129 - DNA, 1183 bp, Mus musculus
tcttcgggcggagcgggcgttgttaggccaagatgaatgggccaaagctggacttggagtgtcatccccgaccccacccctgttgcgattaggatcttccctccgactgatcgccccctccccccttttcttgcatttacaggctagtgaaccggagcaaagacttccgacccactctgcgctgcagcggcacccttttgggatttgatttgcagaatctttgagctggtaacacacacacacacacacacacacacacacacacacacaatcccgcgaagaacgcctagccctcctctggcaccccaagacaaacccactccctcctagggacacagctgggcgcgtccacacccccgcatcccctacaccatgttgtgcggaaggacttccactcccagcctgtgtcgttgatgtcagaccccaggccagcctccgggcgctgcagttctcctggttaatgctgcggttgtggttagggctttagtacttaagccagccgccgccgccccccacttccccacccccggcctcagcgcccacagtctgcatgtgtgtgcagtagccggctgcccatcccgccgctcgtgttctcctggagctctggataccaccgcggggcatttctctgcctgtgggagaagtggccttggaggcattgatatcagtggttggatttttcccgtggatctatcaattcacaattcggatttggaagaaagaaggaaaacatgacgtctccagccaaattcaaaaaggataaggagatcatcgcagagtacgatactcaggtcaaaggtaaggattttgaaaattagcataaagcatatgttctgcggactggtgaagcatgcgtttccaccccaattttcagggcgtttgtttcttgggtggagcaggtggtaagttgaccccagaggtggtttcataggtggatcagcagtgtcaggggccataggcactagaagagggctttaggaatatctttgtggggctgaccattaatttggcagttttttcccaaaggctgggcagggtgggggaggggcaggaggttctccggggagagagagagaaaaaaagctgctatttgcctttgggtgtcttgagtcaagcttccttgaaggacagctgaaatctgacaggtgtttggacatttatttcaaaggttgtagagaagccc

SEQ ID NO: 18130 - DNA, 2948 bp, Mus musculus
aggaattgcagtaactgaagaatgatctgacccagaattgagacaagggcagccttcctgtaagggcaggatttagtttagaaagcccctggcttgctgtgagctgtcctggcaaaaaggttgtgaccggccaagccttgtgatccactgaacacatccaattttgtggcctctggctccccctgcagaaagcgggtggctacaagcagaacccctgtctccccaggtgctgattctcctgtacatcgcagactggatggtgcactggatgtggggccggggcctggaccccgacaacttctccatcccatacttgactgctttgggggacctgcttggcaccggactcctggcactcagcttccatgtgctctggctcattggggacagagacacagatgttggggactagcttagccattcagtctttcccccacccctctgcactttctatttggatttttattttccttttgtttccctaccccaccctacactacactcccatgcctttctgggatttcactttgataccaaattctcattattttcaatgggaattttttatacattgagccaagtttggataggaagaattcgggacagacagatgggctgacataagcagtaaaagtagacttttgagacaatcaccaagtgcaattccacggtgggtgcctccagaggaggttagatcgggaccttggcatcctgtccagcatcggggacctttgcattagctttagcgacctcagcctcggccctaatgagaaactctcaagtgggctctgggttgtttagggtttggctgaacagagggaggagggataattaacactcccacacatgcacgcacttttatagatgtggaccaacttcacagcactgggcaggggaacgttgcttcaactcctcgtaatcacaggcctgctccaggccagcctgcccgcagagtcacgtgcactggagattccatctgcgcacatgtgccttgcccaactgcctgattgcttcccagctgaaatgagtggtagtgacccgggctcttcacggatccatgtcatccacaggtttccaaaggtccatgtgccccctgagtctagagaaccgagttcaagcctcctctctttaattctctccacacactccgtctccgcgcagcttgccagatgggcttctaagattggggataggacaagggaatgtgccaaatgacctggagattgaggcaacggggaggggtggggggtgtctcactgccgtctctcatgacataatcacgtggtcagtcttggcctctgtcacttcctaaacacactcattctatcacacgagggctccgttggcctttctctcggcttctgcccacagacatgcatcaaccattcactcattcagcaaatctcagcctccccgagatgagcccttccacagcaccggcctgcaataattcttcactgagcagtcgttacggggcgcatactgtgctaagttcagtgcctggcatcaacccaccagtgctaagggaatcgctgctctaacctcacctcatcccctaggctacagaggccattgtgcctcttcaacctgacagtaaatgttccctcgttcgcccctaactctgcagtgactgccaaccccgttgctcaagcagcagcatgtcctccaataccctcctcccgcagcctctctcctctccacatcttgctacccactcagaagagggcttggaattagcaagctggatatcaataggctgcttcagtatctgcctcgtccatgattcaaagaaaaccaaagtcccttccctacacatgccccaaactgttcaacaaatggggtgcaggctgtacttctggcctgtctgtctggaatccataaattcttccccctgtgtagcctaaagggtcagcctccaagaaaaggattaagcagtgctccgtgtctaccaacactgtgcttagacctagagactcttctcggcctcatttcctctgtcatcacctgaaatcagaactgtcgaattggacagattcatagagattgtctagttggggttgtgtcaggcagatcagtgtggatctgagtttatttctgctcttccctctggcctaactccatctcaaaacacaagactcttgcacaggcatcataccctaagactgtgaccccagggtccccagccacttgctctatcctgacatctggagttggatcaggctgtctggagactgaagcatccttcttcctttgcctagaaaacagaaaggtaggggcgcccaggctcagcgcatgtgagtggaggggcctggagtgacaggagagtgacttcaggagattcatttcttcccaccgggttgcacctattgcatgtacttttggcctgactggaagaaacaaaattggtttactttcatatccttcaaaagttacagaactgtgtcttaagagaattatttatagttactataactgaattgacaaatgtcgacttaactgataaattatatttggtaaaataaaatggaagtttatttcaatggcttgtatccctgtgtgtctcatcaaaaagcagactcagctatttccttggaccctgttctgtggtcccgcccccacctcagaaatgggaaggggtcgatgtgccaaaagtgaggaaccatcttagaatataatagaaaacacatcagacacaagcaatgatgctatggggcggatgttaagggtacaaagtccttgtgttaaaggatattagacggtgctctcccctccctggcccccatgcattaccttggtgcaggtgataccagcatctatgggttagaattccttccttgcagaggtttatagctgagttgagtcagtgtagaaatgcttttaccttgagtatttaccatgtaactggctgcaaaagaattgtacaattttatatgaccttccatgaatca

SEQ ID NO: 18131 - DNA, 6028 bp, Mus musculus
gcttttgccaggtattttcctggttcaagctaatttattaaatcagaagtctagatttgcttagagtttcattctggcaaatataattaatatgtttcttgttaaaaagttttactcatctcgccatattttagagcttccaaacctgtttgatagttgtagtttctgctcagaatgtgacctaatcctcactaggagtaatgcgccttttcgtgtgtttccttcttagtgagatgggataaatttttatacttacagacttttggttttgtaaatgatttttttaaaaggcatttttttctgttccccaaattgttactttccatatttcagtgacgccaagtccagtgaaaggcaaagcgaaagtgggtcgccccacagcttcgaagaaatcaaaggaaaaaactccttctcccaaagaagaggatgaggaagcagaaagccctccagaaaagaagtccggagacgaagggtccgaggatgaagcctcatctggggaagattaaaagtgatgtttagggagaggttttattaaaaacaaaggaaacctctgtaggacacggtttgggctgtggcttgactcatgggctttcagtgctatttcatttgtctagaataatgtttttctctctatcatatatctctttccctcttaaaaccattgggttttttgtttgtttgggttttttttttgtttgtttgtttggtttttgttgttgttgggtttttttggttttttttttttttcaagatagggtttctctgtgtagccctggctgtcctggaactcactttgtagaccaggctggcctcgaactcagaaatctgcctgcctctgcctcccgagctctgggattaaaggggtgcaccaccaccgcctggctcttaaaaccattgtatgcttacgtgtttaagttgccattttgtctcagtcttttctttgccaatcccctccccccacgaaagccatgtcaatcaatcactggagtgactgtttgattttcgagttgtcaatggagggaaggaatgccatggctgcaaagcaataagatttcaggtggacgctatggaaactgcttcttgctagagaacagcaacttgaacaataatcaaaaacaaaaaactagaaaggttttaattaaatatttgttctttcttttcctgtacttttgacagaccagttgtcacttaacatgagtttatatgtctgaactgtaagtgtcaaaaagaatcatgactctaaattagtactagtgaggcagttggggtgaacatgaattctggattaactcagcactcacattatttccttgggtgtggagggaatggtgttcctggaacttagtggatttgttattctcaaagagattcagagccagtgcttcttttgtcttgataacggtcttttttctttttttttttttaagtaggccaccagaatcagtcttaatttcatattttattcatgttttcattgattcaagtttttaaaatacttcctgtttttgggtagtttcaccaatgatccaaaattaaaaagagatttctttgaatttcgatgatgaatttacccctcacagtgcatttcttcacaggctgacaatgttaaaagttttaagcaaataaagtttgagttagtgtgaagctcagatataaaagattgagatttatcctttatgaatacaaataattgaaatgagggcccatgaaccatgccacagttgtttcctttcgatatttaaatctttcctccatagtaacatgataatgacataatctcacaacctcctcctgctgcttccatactgtggagttgtttgcttcttagttggtctgacccctcctttctgtttatgcttctttttaaagcaagagcctgagcctcaatgggatgaatgaactgtattttatttagggtgcctctgtgccattgataacagtctagataccttagcaaagcatcaagatcaggtttgatcctccacattcaggtcccactcgccaatagaagaaaagattaggggtcctattatgctattaaaaatttagtggagtaatttctgtatatttttctgcacttaagctaaatttgcttcctcagtattctgcctttgtgttttttaagtgacatgtttgtctcagacagtgtcattttcttataggtgttcataggacaaagggttatttaagaaatatttttactctggtttttaagacactttaaagaacattcttagatctgctttaaaataaataaatgaataaataaagcacctagtagcagagagttatttcaaccctgcactgctaataaatgagtattaacatggccaaaaatagaaacttgaacataagcagttggattattgtattctgtaatgggatataaggttgtgagctatgtagttggtattacagattattctatttgctgtggtgggcttgctcaggaacccgtccttaaagaaagaagagactcaccatttccaccaggcatctctcccttttaggggtttataactcagtcttacattcctagtgacatttaggcttttcttaggttatgtttcatgaaaagttgtgggtagggtctctttcaactttaggcctcaattttttaacaatctctttaataatctgcactaacatctctgattttatctacctataattgagaaataatactatcttctacgttacttgtgtaaaaggtgtgtctgattggacttgtttagaattccttttaaaactaactcattagattgaaggtatattttctaattacagttcagttgggttaatggtgtctcaaatgagcacacaggctttaagtgacctttgttttcacttttttttttagtggtttataacactctggtcttcccttcaaatcgtgtatgcaaacaggaacacatttaatgtgactcaactggaaaccggtgctcagcagttaggtgtaacaatgatatgagggtgtgcccctcagttcataatgactggcccttggcacctctatggcttactctccttcctcttttcctctgtctttttctttctggtgtgcctatagtgaagtggcaatgtattcaactgtcttactttgcagtgctcaggaatgggatgctcatttgaaggtgcttgtctgttactgatgctcagctaggtttacctctttagtagatgcagcagttgagctaacactacattctagttctctaggctctggttaaagcctttgtctccccctgtcagaaatggtagcctctgtgttgcccagtggtaagttactgctgcttttaaccgtccaccactgatggggttttggagagaggacccaaagggtgtatttacatatctgctgaaaaacttaactgctttcagtacctccctctccatattaaccttacaaaggaaaactaatggtagcatgaatatttctttttttctagggtagccagagaatctccacagacaccttaccaaaaccccagtattttgtgtaccccaggctggcctcaaactcctgttttgttttgtttttttcaaaacaactgattttttttttcctgtcttcaatgcttatatatggtactagttcagatagcattttcttccacataaaaatcagtggaatttgaggttataatctagaaggacttacagtcagctgatcttgaccttttttgagcctggtttcactttgtagtgtgtctgggagtttttttccccccacccctcactcacactgctgggattaatgccaccatgtcaggtgacactttttaaatgagcttttatttttatgtccaggaacatgtgggttagagagggaaatagtgtaaacaaaactcaggtttaggggcccctgccagagcagacttgaagaaacagaaagctttgttgctgctgtgaatccgtgcctctttggacagttctctctaccagtagcaccagaagctacactagaaacattcccacctgtgactgggtaggaagaaatgcaggctaggcacttcatggtgtgcggacggaggtcagaaactagcagtacttgcttcttgccaaaggggaggggaagttaaagccactggttgctcttgagggtagaatattgtcattttctctatggaggaagctgctgagttacttgaagatggggaaggtttttttgttttgttttgtttttttagtttttccttttgttttttgagtattgcgatgtcaagctatcaatagccatgttactatttgaacctccttttttttccccctttgtcttagaaaagagaatacatgattctgaatatcaaatccataggttatacttttgttcaaagcctaattcacagtggtgtgattgtactaaccactaggaggatcccatatgcctacctgttgccatgccaatgaagaatgaactggtgacatctgagcatgctctgtggctgtagagcatcacagttgggtggacactttgtatattgggtgtggggggttttctagatcatgggggagggtaaaatgattttgggtggggttttttggtggttttttttttccagttttgggggttttttgttttgtttttgctttttatggagggttggggagtatagtactcagttatgccctaaaaataacatgtataaaaccctgaagtgtgatgtgggtatgtgtgagtgcgtgtttgtaaatgtctggcatttaaacctttgtcttctggaagttagtgaattctttcccttttcctctggaagtatttgttacaagatttgtaaataagagctctacatagtctgtgtaccgtgaacatattacagcaaaccttccatgcttcattcctctgcaaggcataagactgccaggttgctcagctcccgtgatcagtttgccttcattcatcttttagacttaatttgacagttctaaaaactcctagtcttcctcaattttagtctttaatctttcatgttctgagcagaaagggtcagaaagttagcctgtcttcggccatggctgagagcctggcatccttttcttcatacagtagtgtggcttgatacatggctagacaacagagtgttgggcattcttgcaataccttagcagtgctgaaatttgcagcatggtactaaggaagctaaagtttgaatgtaaccactttatttaaagggttttttctttaatttaaatgataccgagttgaagtgaacatgattttgttgaccatgttcatgaattatagatgcaacatgcattggtaggctcatgtgatggtctgatgtgatacttcatttcatccatttacataatcctggtctgtacgcatttgcataaacaacaacaaactcctgccttgctctgattgaaggatttccaggactgctgtctgctcctgaactttgttttaagtatgcgtatcctttgcttgtattttgtattaagaaataaggaaaagaaccccttattgttgagcatgttggtattgtcccctttattttttttctcttggggacattatgaagcaagttattctttttctgtatctttttcttttcttttgtaaaccttttggtttgttttgtttaaaaatggctttataaaagggcttttgtaacccagatgtgtgcttcgtgtgcttcttgggatattgagagcaaatacactgaccattgtgcagcagttaccttagcccatcactctctgactccccctgtgctgaaaaaggaacacagcagaagtcagtgcctagaaacaatcaagggacaataggttgacaacggtttgtttgtttgtttgtttttaatatatatattattatttgtgtgtgggttttggggggtttttttgagacagggcttttctgtgtagtcctggcagtcctagaactcactctgtagaccaggctggcctcaaactcagaaatcagtctgcctccaaagtgctgggattaaagccatgtgccaccaccacccagcttttttttttttttttaatttatttattatatgtaagtacactgtagctg

SEQ ID NO: 18132 - DNA, 1366 bp, Mus musculus
gaggggcaggacagtgaagacttccctatggcccagtggaaggaagggtgtgcagggggttgaggtagtccctgtggaacttgggacctcgaaagcacctcctttgtttgtttgtttgtttgtttgtttttgtttccccctctgttcttctgtctctattctgtctcagtttcctatcttttctagagggctctgcacttttctcaatctgtggatctgagttgactgactccttgtgtattctaagaaaagctagaatagacttcaggctgtttccccaaccatgttaagggggtggggggtgggggtggagagtctgcttggaatccacaccaagtagcacctccttaggttttggatttttttcccccccctgaaagccagttgcctggtttcctatagcccctgattagaggcagtgagggcctgttgtcatatacgggaatccccgcacctgaatacacacctgtctttgtttcctttttatccccaccctcaggtgttcctgcccaaataccgaggggacgctggaggtagcagcggtgaggacagccagacaaccagcttcttgccaggccctaagccaggagctctcttccccaatggacacgtgggctctggcagcagcggcatcctggcccctccacctgcactctgtggggcctctgcctgcgatgtctccatgcgagtggtggtgggtgagccacctgaggccagggttgttacgggacggggcatttgcctggacctggccattctggacagtgcctttctgctgtcccaggtggctccgtccctgttcatgggctccattgtccagctgagccactctgtcactgcctatatggtatcagctgcaggcttgggtctggtcgccatttactttgctacacaggtagtgtttgacaagaacgacttggccaaatactcagtgtagaattgtgtaaggcatcaaagagagggtctgcctcatgggttctcagcccttagagggctgcagagctggcctctccaggtctttgtcgcctaagtggctctctgctgccaccctaaggcagtgaggtgtattgttgcacagataggagccagagctttcggggctctggcttcagagtctggctggcctactggcagcctctcgcatggaagtcattctgaagttctgcagggattgaaatgtggtctgttcaggtgtcctgtatcaaggctccaggttaacagctaacctcctgcttaagtcaccagagggaggatttgggggacctgaacaaacttccctccaagtcccttgaccagattctgccactgttgctcttgcatgggagtttcttgtaggatgctctcctccacagggtttggcagggtg

SEQ ID NO: 18133 - DNA, 1190 bp, Mus musculus
agcgttggctgtccagtgcagagactagaagtatgctggctggggaggggagggccacggtgccttttagaggggtggctggagacctgttactggttcatttatggctatcttaagagctctgttcccaggatgtgcaatagtagtgtgagaagtagtgttcagagtggtgggaacaggtactgtaatgggcttgcttctcatggtgcagtatttagtttgcatgcatatttggaatttccctcagcagcactttgtagtaatttagtgggttaatattgtgtaaactaagtaagtattgatagacgacctaactagatatttgaaattctgaaaacataaaactatttttatcttcttgagttaaaggagaaaagccattggtgtgtttttacagatgaactatttggtaatttactgtcttagcacagagctgccttgggtccgagggtaccatttaaactcaggctgggtgtggtagcacaggcctgtaatcccaccacgtgggaaatggaagctggaggatcaagagtctgaactagcctcagctacatagtaagttcgagactagcttagactacaagagaccctgtctcaaaaaaacaagcaaaaacctcacaactttgtaagaaaccatgaggccttgtggggttggatagaccttccttggaatgaatttgtggaagcacgtgcttggtctgtggacgcgcatgcgtgtggcctttattttttttaagttggtatataaccttgctgtgtgtgtgaggcagacatttctatctatagactacctccttcctagaaaagtctgagctttgtgttggtttgaatagccatagagttcttagcatcaacagatactcagggagagacgctgtcccttcagctcatccctggtgtgcatcaccagtcaccttgctaggacaagcagtgttgggcatcagtagcctgaggcaagggaggagcagcctgtcagagtttgagaccccttctgaggcattgtagttctaattctgctccggaccatctccgcttagctcagtgactgaaggtttagagttgggggtctcagggtggtcctgtgaaggcctgggttggagggtctgccagttcccttgggtgcccattggtcccctgtggtgggtctggaggctgtgcaccgtggctcagagcagtgccacacacccctg

SEQ ID NO: 18134 - DNA, 1563 bp, Mus musculus
tctgctgtctgagggtttctaaaatggatttgagcagctgagtgttcaacacacagtgctgggaaggaatagatgtgataacgctcccagaggctggcttcggtggcaggcattttgttagtctcctggacctgctgttttcagagctaggaccaccccattatttttcttagattatcagacctacttactgaaggtgcagtttccatcttggagggggatgcttacgggtgatgatgcgtctcacgctctgtggaacttgccgctatcagaatcatgttttcacctgtaaacacagcagatgtcatctgtcagtgcgcagcagcaggtgttccatctgaagctaacagtgcttcgagctgctttgcatggctaaaacagaaagtggtgagcagccagctagccagagagaagcgagcagtttcttaggtgctgctgtttgtagttagcccttgagaggtagagatgccgagtggcttgtgggagagtagctgcctgctaatgtgatttgacttgatcccatggtgctggggagaatatgacgaggggcctcacttgtattaaagaagtgactgccgctggattacaccttagcaacactccctcccataactttagacagctttaaccaggaaattcctggagagtacagtctcttgaatgttcagtgtaatgcacatggggaagtttcatgaagttaacttgtctatgaagtacttaagttggaattgagcaccttaggtactcctgaggtactggctgagtacatctctgtgtatatactgccatggtgacccacggtatgtgaatctttttcagagggaggcatattcatccccgaagatggccattagtctatttgttctaaacctaagaaagaaaacctaatcactgctgcacgtgtgggtgtcacttaaagacagtgccttgttcagttcagttttaaatgcatggaatcacaggccttaaagaccagttaccgacttggtaggacccagtgctcagacatacttcagtcagtcaccttatcctcctctcttctgttcacacattaagcattaggacatcttgcctaaagttctttgcaatctgtttgctttcatataaaatgggttggctgggaagttcccgggaggtgtctagggtgtaagagtcctggctcgttggcatgatgtatccttcaaaccatatataagcagcattagcagaaacctcaaggaagggtcaggaagaatggtctcgtctttgccttgttctcatcttagtaaacccactgattctgctccctgcagggattatgagctgtgctcatgcagcctggagtcttctcagtaggatgaggggagatacagagtgcctggcagctggtccagaggtcctgtcaatagaagcatttgctctgccagcatcaggcccagggctgctggagactgctactaaaatcgctctgcactttcttgggatctgtattagcactgtttgtttgtctgtctgtctgtttttgttggttggttttagagacagggtctcactgtgtagccctgagaagctttctatatggaa

SEQ ID NO: 18135 - DNA, 1210 bp, Mus musculus
cagaaatggtgaaagccgtgcccctgggaacagatgggtttccagcgtctttctgctaacgagcaatgctagttggttcagaaagtgcagggagaatgaaatggacagtctgttgttctttactgagatcctcaaggtacagaagaattttttttaaaaaaatagctcatttggtattttataccttttatagatgaaaattttatactgtgtcaaggccctccctccctcccatataaatctaggactactatataattcaagccatgcagtatacagagagcagtgtcagtatgcagaaaccagtgtctgtcaggagtgccctcttctatacagaaggtaggttagtaatccagagaatacaagaaggcggctcaccagcccgggcagggctgggtgcaaggcttctggcatcagcgacatgacatgatttgtctctgggaagtctctaggaggaacaaatgtcctgttacagtcattggtttaatctgtacattctctgtgcatatacatgtgttcatgtgagcatggactcatggtcccaagggctgtagttcacacactagacaccagcagagcagaggtgggccaggttatcagccttctagctgtgactccagaagccccccatcccccacctccagccttgcttgtttttaccagtatgatggcatttctaaaagcaccctacctcacaggaattctgagagaactgagagtgtgtggagcatctgctgcatgccctacatgggacctgccttccaaatgttcatggttttacttctattctttgtaacacctcatacgcagcttagacgtcatctccatttggtacaaactttaagtcaaatttaactttgaaacgccgatggcctaagcaaatccttttaactatatttataaattcattgaaaagtacctcatactagccatattaaaatctagctgggcaatctaactatggtgactgacctgggcaaagagaaagtggttgtatttttcttgtagtttttttttcaagaaaacatcctttttatacagatctagaaagaagaatcactgcttatacctacattggtgatgattgatgtgttaatatagaaaactcaaaagaatctcatactttcctaaaataaaatattttaaacctagtaagtgtgttatccatcttgaagggcagtcgaccctttatactgaagatcaaatggtc

SEQ ID NO: 18136 - DNA, 1597 bp, Mus musculus
atgttctccactgcattgaacctgagacccctagagggtaagtcacacttccaggaagctcacaagccacagagatgcgacctgagctcactggatcagagcacgtgaaggataggtgtcccttcaatcccttccccattcctccattgtctccagggcgagggaagagccggcggcagagcatcttctgaaccatgcccaccctgctgcaccttgagggatgagaggccacacggaacatgaactcaggaagtatatggggcctgtgtggccatcagagggctgaacaatgaatgcctgtggccagcctggagggccactcggcagccctgttggtagcatttgcttccttcccttgcttgccacacagctctgtggtggcctctacccggataccattccccttgtcacccactgtgggatggggcgtgaggtcacttcccgaggggaagtgaggtcacggaggtccttgggaccctttcccaatggaagtgcaggagaatgtgggggccctggccctgccgactcatcggcttgacaaacccccttcttattccttggaccctgacttcatcttcttcccctctgagaacgaggaatatggcacctgacctgggaccctggaattgttcccatgggtgtgctgaccccacccaaaggcagacattcctggaacatcagaaaaaagtagtacctcctcttgtcacctcccccaccatgctattgtcccctccttgccagaagccctgtaccctctggcttgacccaaggctaaaaagcaccagcatgctgcccatgtccagctgcatccggaagtgttctggtactccaagatgtactcctacagcctcagccagcccctgcccgtccccccagtctggaaagggttgccttaaactggcaggtggtagagtgcactctgtccttggaactctgacctagcacctatgtccttcttccctaagccactcctatgagtgttatcattcctgagggctgataagacaaccctgtctcagggtcctgaggctggcacccagataggcaaggtcaccttgacactggtaccatggtaaccttggctctttagggctggtgcagcctcctctccacaccccaccactttcccagccctgtctacctgaccctggcactggcctccacagaaagggtgggaagggagtccgcactgcagcctaagctggagagaggtgagattgcagcaggtttgatcctgagagcctcatcctacatccctagagaaggcacccttcctctgtactcctctcatggtgtagggtctctccaacatttggctgaacttgaagggcaaagaccaaggggaggtcaagccccaatgcctgtcctaacccctgggagcctgggttctccctaaccccctttcccactgactgtgaatgtcgtgactcagagcaaagacagagaatatatttaattcatgttgtacaaaaagcagtgagcagtctcattcagaaaaggagactgataggacaatgccagagacagaggactctgggtgtctgggtttgctgacacatacatacgacccattaaagagagtctggtctctgcacat

SEQ ID NO: 18137 - DNA, 1318 bp, Mus musculus
gatgctctagtcatgtaagccactaagatagaaggccagtctcagtttccctagggaagagcccatcctggaggcagccacagtttcctcccatggagatggtctggataaaagccagtgggaggccctgctgagcctagagagtgcagaaaggggagggtccccagccttggggccagagggcaggcttggcacagccactgggagctcagcctcccctcctcctgcttctccttccacttgagctggtttgagactggtttctggaggctgtggggtgtaactttgggtttgtattttttctgctcatctttctgcctgtcaccgggtgtgctgtttttctgaaaaaaaaacaggccccaagggccctgagcctccagcccaaacccttagacctctgggatcacgttgagttctatttatttatttacttatttatttatttgtacccacccttccctcacttctgcccagctgggctccagagagaggaccctgcccatcctccttttgaagccaggacttattcttggttcatcatactccagaccatgtatcctctggtgtcctggctggaagaaggggcgtgtggccatgcagcccgctctcccaagctgtcccagcaaatgggcaggaggggcatggcctcttttatatatatatatctatttattttatatgtgtgtttgtgaggaagaggatatttgtcatttccttaaggctctggagtgttgtgttcgattctgcacagcccagcctccccgagggcctttccaagcacagtggggatttcttagaacaggagagaggaatccatgaagcaggagaagcagtgcctgccagctgtggtggaccttcctaagaaataaatatcctttatgttttcaaaccatcctgtctgaggtctgctgattacactgtctctgaaaaatcacaggatttctccccacactgaagcattctgggtatcatctgctggccagatgttgtcttccatactgaatgaggaacacacacacacacacacacacacacacacacacacacacacacacactcacctgccttgctctgagcaacttaaatgatatgcctatcaatccatccagccccagctttgttggagcacttcccagaagggaaatggagaagcgcccatagatgctgtgaccagttgtagccacaaggggtcagcagagtccgtgctccaaaacctctctcaagacgaagtcctcacaaggctactggctttagcttggctttgttacacttgttcagctgaggcagggagtaccagctttccaagtatggtgtggag

SEQ ID NO: 18138 - DNA, 1118 bp, Mus musculus
tcttacattgcctttttctgtttccctcctagctggaagctggccattctggccgtctggagaaaactgaagatctgtggctaaaggttcgaaaagatcacgcccctcgtctggcccgcctttcgctagagagccggtctttacaggatgtcttgcttcaccgtgagttcttgcttctttccaagtagattggaagttgagggccctctggcatttttatgcctggcctccaagaaccccagagtttagactccggcctccttgcaaagctgcctcagcacttagtgctggttttgaattcctgtttggttctgctgcttatgtaatgtgaacaacacgatcaaagttaagtcatccaacttggttagaatacactgaatttctttctattgcatgactgcatgattacaacttctggcctctaggcaggactgcatctaagaatctaaagagaatgcttggtaagtctctatcccatctgtctttatatcttataggtaaacctaaattaggacaggaactaggccggggccaatatggtgtggtatacctgtgtgacaactgggggggacacttcccttgtgccctcaaatcagttgttcctccagatgagaagcactggaacgatctggcattggagtttcattacatgaggtaggccttggtttccttaatctctctggggaatacccaaagaagctaaaaggctgggataagtttcctatcacaagctgcagcatcctatccctctacacacagattgcaaagtgttctacctacctagtgatctggtccagacatgctctttccttagtcttttcccatcacaattctcaattgttcatgctgttttctttcttagtcacaaggactgtcagtattgatagtcttgggctttttagccttagtggagaagcagttctcctttccctctctctggacttggactatgtgtggacctgggattctttcttttacatcctggtatctcatgcagagttagagcccaagtgtagttgccaaaacctctttttctcataggtctctgccaaagcatgagcggctggtcgatcttcatggctcagtcattgactacaactatggtggcggctccagcg

SEQ ID NO: 18139 - DNA, 1147 bp, Mus musculus
tggaaggagagaacagactcctacaaattgtcctctgacctacacacacacacacacacacacacacaaagcaaatgaataaaatgtaataatttaggaaaaaataccttccagtgtcacatgataacacccatgaagttgcagtttgggggagagaaagatggcctggatattgtagatagaaagataacaggccatcaggaacaggaaggggcacatttattctctatgatcaatttttgcttgtttgtttttatatcattgttgttctttctactgtattagggtagagccaaggtcttatatgttggtcaggtctcccacacctaaccctttattagagctttaagaattaaagaattgctttggttgctgaagagggaaatcaggtgccagcatgttttcctcattttacagaccttcattactcgatcttccaagactatagtgatcccagtatatgtcggggatataaagaggaaagaaacaacccctgccatcaggttattgacagtatgggggaagaggacaatgacaggagagagtgtgggatagtgaggttggaggcaggactttcttaggactgctttgaggctgggtgtgcagacaaaaggtgactctgacctgctgtttttggcagctggacaaacaaaaccgtgccaagatcaccgacttaggattctgtaaaccagaagctatgatgtcaggcagcattgtggggacaccaatccatatggcccctgaacttttcacaggtaaggctagagggcaaggagtaggtttggcagactccagtagtctgctgtggagtgcttccttcagggtaagtagtgagtgcacgttaagtctgacaatgaagaaaccagaacagagggagagtaaagagggacggaagaaaggaaggaaagtgtggatggagttggggttagtgcatgctctgatctctgggtcattagctctctacctgccatacttagcacttattaatcacaaagtattggctgaatgacttctaaatgatggaacttgtcattaaagaacttatcaacatggaggtatgtggagaggtaagataatctggaagtgctataaggcagcactaaatgataaattgcagagttatgtactgttgatgcagtgtgaaaga

SEQ ID NO: 18140 - DNA, 1156 bp, Mus musculus
cttgtgtagttagaagactgctgaccctgctcttgagtctagctgtaataaagaggcggtagctccagtatggaactatattcctaacattctttggaccacttagcccacactcagactcctaagtggaggttagagttttgttccctcattcagagtctctttttcgtctcctgtcagattacaggttccttcttttaattttaaaaagccagttttcatcattttctgctcagtgggaggagcagagagattaatgccttagggaaaggaggaggagttgtatagttcattcattagagtagccgagcaaggcccacgatagtcctgagagtatccgggcaagccaaaggccacattgggggtatttggtgttggtatttcaatgctcagcgggctgagtatgtgaacacatatgtctaatttgtgtgtgttgtacttcataacattgtaagctattttttgattctgtggtttttggcatctactattatttcagcgataaaatgccacgaaatgtactgtattgtatatcacttgggaagacactaggcggtcagagaagtgtggtggcacttgggtagtacagggcttgacagggccaaagttttgaagatttacctctgggctgagtgaggaagaagggtggcatgaagagtgccatccttcaaaacagttgccacagctccagcccagcactgacacccggctgcttctcgggagctcaaagtctggcctcagaatggagtgacaggcctttctgcagagcaatcagaaaaaatgccggcagagtctgagcccaagagctgtatctgaggcccagatgactggcttcttgactgagcaatctttcagtgttctcaggaagaggactatcctagttgttgccagaccaaagagagtcacttctgactctgtcaagtttaagggacagggctaggcagccatgttaacactaatgctcaagaaaaccaaggaaaggctgcaatgctgttacagccagagcaggagaatgggaaactgaacacctggcagctcccaggatgcttttctgtatttttgcttgagctgtcaaacaggttggagcactcagggtagaatgtgcttagcctgcacatggccttgggttcagtgtctagaaccaaaaaaaaaaaaa

SEQ ID NO: 18141 - DNA, 1217 bp, Mus musculus
gactggcaggaaaggaaggaggaacgaaggcccctatcacgctatcttaccatgccctttgctcaggaggctgggctctagagaatcaggggttcccttgcattgcatgttttccagtattagatccgtttgaataatcatggcttttggatatgattagttttatccatctccagctaagaatcatcagtagtttgtgtatcgctttacctgtgttgacttccagagttagaaacaaagcaaggtgtgtttctccacgaggttcttttttatgggtgtggggcactatgcaaggactgacatgagagacctccacccccaaatcaaagcaacagcagcccacttcaaatcaaagatgaggttcgttccttaaatccttgcctgtggagaacctgtccccggcagccatagtttgtcctttcctggagctacgccccattactgtcttcactcacttcctttctgtgaaaggttgcttagcttttacccttctctttctcaccttggctctctctgcatttgctgttcttttaataaaaatagcaaattgaatggatttgtacaataagtgtttgaaattttctgaaaatccaaagtcaggaagccaagtgtgcgaagggttagtgacgcctctggcaatagctttggcttgccctgggccatactctgtcagcactgaaaggaggtttaaatactatgctaattgtgaaatctcttatcagttggtggaggctccttcagacagccaaacccgttgattacattgtactgtggtagatgtgacagggacacgctggaagtttctagttctgttgctcctgtgctgcttccaagtgtgagtgagaccaatggttgtgattggtaagtggctcacgggatgtttttatttgtagacattacctccatgtcatgtctctgtacagcacactgcagtggtgtgcaagctgatgcaggggtttctgccttccctgtgtgaagtggcttgatttccctccatctggatgctaatgctgtgtcccatttccattaatgagctactgagtaaatcagctcaaaccctgccagattgtctctggcagcagctcctaataattatttatgctttgggaatctttttgtcggcttctagaaccttccgtccactctcagcttaggtttttgatttgtgtaatatatgtatattctttttccttgctgtcgtcctccctgcctctccg

SEQ ID NO: 18142 - DNA, 1211 bp, Mus musculus
gccttccccagcgcatcctagcccgtactctagccaagagctcagcgtggctagctaagctatccttccctcacgccttttcttctcctagttgtccaatagccaataggactcctgcatgccagggggacagcagtatcctcacacctgttaatgagttcaagtgtggtgttcgctctcgctagctgagactataccttgccagggagtctggagtgtgcctcttgaacctgtatatgtggtcccaggctttgggaaatcagggcattaaagaaaacaagagaggaggaggagggaaaaagaaggagggagaaggaggaggagggaggggggaggaggaagaaaagataaaaaagctctgttcagagccccaggtagcctcagaggcctagggtccttaagtttctttagagggaacgcaacctgccttggcaccagatacctccaacttagcccccggtttcagagcccacatagctctgagctcagggcttcactggaccactgatgaccgttcttgtttaaatgcagctcctccaccccagcccactgttcgctcttgtagtagttattgattgactctggtagcaagcagttcttaaataaagatgtgttctgaacccgcctgggcggctggaagcactgcacttctcacctcattaaagcctgcctgcctcctgggcctgttgttcagccagtacacccacccctcccacggccaacctcgaggaagctgtgcacacagcccatacagcttcctccaactagagggaaaagccaggctgggagacctgcaggcagatggaggctgagcgctgctgacatcctgagcaggtttcacctaatggtgctcagcatgctggagtggggtgagttgaggcgtggagccacttccagttcctcggatttcaatacacttgaagtgttgactccctggtccctaaggagtttcccctcctcccccatgaagagattaatgtccccaactggtaaggaggtgactatcacctctgttgttcaatcagggtgacacaaagtggtggaactcctagtcaatttccagccttgacactctccactgggtccatctgactgctattccaggtaagcacacatagggatacatgcaagcagccccagtttggtttttcagtgtcaagtaggtaggacccacgttgtgtctcaggtttgtgtgtgtgtgtgtgtgtgtg

SEQ ID NO: 18143 - DNA, 1189 bp, Mus musculus
tgactttgggggaggcagctagtgttctgaacacagcttcacctttaaaattagctcctaatctaggttaggcaccaggggccactgcttaacttactccatggcctcaagacaggcccttaacttttccttaagcctcagttcacttattcctaaagtggcattgacattcccagctcaccaggtcgtaaaataaaatcagctcacatttgtaaaatttgtgatgcgtagttgtccctgataaatattagagaatgttttttagcagacttttaattatctacccaaataaacaggagtaaatcagtcaataatgttgacttctggtggacttggtgaggttttcctctttaaatatttgaaatactttcatttattcagcaaatgtttattgaacatttactactgagtacaagcacccagccagatgcaggttttttggttttttttttttttcctggtgtgttggtgttggactagtttatttgtgcatcgttcaagcatataacacctcgcagaattctggcaccctggaagtggtcctgatgtggcttcctgggagtggctgactcctagccgaagacctgccttgggaaggctctaagcaatgcagggagagaatgctgtccaactcggagaaggtgagcattttcagggctgacttgatgagaagggcttagggttaaggagctgagcggtgatcattctgctaccttgaagaacttttgaagcagcaaatggccaccaaggaccaccccagccaccagctaaaagaggagcagggagtacctgctctctccttgtcagatgagcatgtcacagctcctttgactgtggcaagaacagaatagaggagaacaaggggagctaggacacttggcttcctctgtgccagcagatgggcttctgcctgtaacaagtgtctgttctttcatgagcccgcctacagccacctctgagaaggcaccatggagatgctggtgtaatggcagggatgctgggccccagggactggctcaccagttgggttcacactgtagctcatatccaggtgacaatgtttagggattcctgctgacccaggaactatgggattactatccgaacacaccatactgtcacttctaacctgggctggaagccagaccttagccacttcctgagacctacttttatttatgagaaagtt

SEQ ID NO: 18144 - DNA, 4174 bp, Mus musculus
ggtctaccttttccaccgactggggtccaagtattcaaacttaagagcctgtggtttatattctcatgtaaaccaccacattccatgaaaagaattactaattactgtgctgcagaaccagtattaggcgttctggacacctcttctatcaaagaaattacttttcactccaggcttaggcaaattcttaggacaagggtagaaggcagccacattctttgtcaaacataaccagaataagtctttagccagttgttaatagttgttctaccctgcagcctcttgatctaggcttcctctcagtactaactgtcttttaggctccaactggacccattaagctctgtttacagccttgaaccctttcttagtccaaagtcttacacattcctccaaaaaaaccacatggtcaggtctttcacagcaaagatccacttcctggtagtagcttctgtgtcttggctactctaaaattgctatgacaaaacatcccgaccaaggcagaatgtacaagaaagcattgagtttatggtttcagaggtatttagttcatgatagaacagttgagagcttacatcttgatctgtaagtaggaggcagagagagaacccaggggatggcatggacttttgaaacctccaagccttcaccttgtgacagacctccccaacagagccacatctcctaatcctttccaagtagttcctccaactggggaccaaatactccagcatgagcataggggagcattctcattcacaccaccagtttgccgaggaactttcctagccatggcttgtcattcattgctcccagttgataatttcactatttgtagcaaactcagtggccaagtccttgctattatgggtcttctgcttgtattgaaaatactgcagctcctgttggggttgctgtgcagtctctctgagggactgataacagacttgtatatccatatctccatggcagtgagaaacggtagcttagaggtaatcctagaagccatcactcacagtccctgcttgagaataggctatgatatgtctagccctggactttagtcatttcctagacatggacctgctgggtggaattgggtcattatgatgtttaattccaagcactgcattcaaaataggatacatgatatagtatgtcagcttcattctaacgtttctcctaatcttttggggcagagtcttgctgtttcaccatgactggcctgggccttaccctacatctcaggctggcctcagctttgcagtgaccttcctgcttttgcctctcgagtgctggaattctaggcatgtaatgactaaatttcttattttgctttttatttaagtttttgttactctatcttggacaaaaagtgcagagcagaggtgtcggattactaggaaagtctccagggcttcgctgttactgtgttccccacagggacttcctggttgttgacgtgcttctgtttactactgtgtcagatgagcgactcagagctcggcttcagataggtgtgactgccgccctcgcccatttaggatgtagtagatttatgattgagggctggaacgggtagattacattgtaccgccaagcatttgtgactgtgtggatatatattcattatttatgtatatttaggtgtgtgtgatactttgcatggtttgaaagaatctattctgaaagccaggatcatttgtaacctttgtgtgtcagttcaatgtaatgttggggcctttgaaaagttgattgagaaattggggatcattcccagttctccgatgttacttgtttagtcctctttagaaagaaagacacttttggaccagctgtttcgctgttttgttctgtttccatgatattctgtgaacctccatggctttagatactgtgactgttattttcctttttgcccaaattgttgattcagtctaaagaatactattttttgatgcctcttacaattcatgcatgtgcacactatagattgatgctacctttgctaaaaatgtcttaagataaagaactagctctttagaacctgcacttcaaagataaacctggaagctgtcctgtgccaaaagtaaagtgtacaatgtttacagatgggtggaattttgcactgccatagggaacggtgagctcgcatcacggggttccttagatgtatgggtagatagttgcagttgagcttatgagaggaactgtggagccctctaaggctaagctgctaatgagtatccaagacaggtggttggtgaacgtgactccctagacctagctggggtcttctgttgacagctcttcatggtttgcagacactatatgttttctttagaggagctgccagctctcccctcttgtgaaagactgtcttgtagacattttgagatcttttgatgtaatgtgcaatcccaagtaatgccattattggtgaatgtagcattgttaaacttttattgtaaattatctctgatcttaccttgatagccttagggttttttgtttttgtttttttttgttatgttttcagagacagagtctcgctatttggtttacctagaatttgctttatgattaggctgtccccaaactcacagatgtctgcctttctaccaccacgcccatgtaactgatgttaccaaaaatgatctcatatccatggtgttgcttatgtgtctttgcataggcgcctccttcagtcccatctaggagcacagcacagtagaagtccatttcttaagtgggcagagtcagagataagctaagagggcaagtagttgcttcagtggtttttagagcttggcaaacgctttactgaagattagcattgtgttgtgacacttgagggccaatacgagcatttaatttgttacctaaaggtgctttgtgttcttaaacagcaagtatttgatgtgtgtaaacatttcccttcattctccctccctcctcaccgtttttatggtctcctatttctgagttagctgcatttggacattgcttttatgccagaggccatctgtcaccttggatgtttagaagtacagtgtacttatgtagggtcctccttgagcctgtcctgagcagtgttgtggttacagaattgcctacgagctccaacagagaggtggggaagctgggagggcacagctgtctggcttcctttgtggaggtgttggtttgtttgaacactaaggaatttgaggttaatcttccccctcttcctgcccatagttttcacttccctttcagtaagaacgaccccctaaaagaaaacaggaggagatgcagcgctttaggccgccttagccagcagcttgtgtcctactctggaagttgtaacctacagtttttctcacctgtaaagccaacacacacagctacccgtttctacctcagtttgatgtggcgactatggaggaacaactcttaaaagctctgactgccttgaagatggaggaagctagtggtcttggtcgactgtgctctgaggtttatattgagaatcctttattctggaagtgagtgcggttctcctgaccgcctgctcagtagaacctgtgttgcctgctttaagtctctgcccacctgcctgtcctttccttgacactaggctcttgattaggaagagttgtctccagatgctttgagaagcacatgtaaatctagatagcacattctaccctgatggaacttccttgcttgtcttgctgtataggaattcattctgtatacacttgagtgggtggcatgagatgctcgacttgtgtgtcgagaggcagtgtcatgacattcccagtctggtacttgccagtgcagaagcaaatgaggggtaataaactgagaagaagggcagcttactaacgaggccagagggaaatgtttccgtgtgtccttatgtaactttttacagtgccactaagttaatagccctgtacatgggtgtttgcactatgtaatgcttttaatgcggttttattgtgtttttgtgtgattaaacagttttcatttcattgtgttttgtcattattggaaataggtaattttgcttatgtacagctaacccattttctgttatctttggcatgatttggggaagtgattaaaagtcattggcagcttttccctaagttgcatattagagtaattgtattcatttctgcttccc

SEQ ID NO: 18145 - DNA, 1099 bp, Mus musculus
tatctacatttctttctttcttccctcccctcccttcccctcctctccctttcttcttcccttcatctcccctccccactctgttctttcctccttttgaggcaggatcccaccattagagcagactggtctggaactcacagagatctgtgtgcttctgcctcctgctgctgggattacggtgtgtgtgcactagcacacctggctggtctgcgggcagccttctgtaaggcagccagattgtcacatagctttcttgaatgtgaagagtaaagctttaaagtgctctatttcattccctgtggccaccgtgcacaacataacatttcctgcataggaattgctgcttttattttccttctggcagttattttctttgaagctatgaatttgaacacctctttctgaatagagaaggtatttagtagccctgtggtttttaagtggtagtgatgtggggtgcagtctcccgggaagcaggtgcgcttgtctaatgcggtctctgttccttcacagacggtggaggtgggaaaggatgatgatcttgaggactccaggtccttgagcgatgatactgacgtggaacttacctctgaggtaaaagatgctttgctgtggccaagttttagctgaatcttagttcccgtgcattgcagaatgtcatttttttcctgtttctgtctgcttttcctagtttctaagatatgttggattcttttttttcttttcttttttttgtttttgtttttgagacagggtttctctgtgtagccctggctgtcctggaactcactctgtagaccaggctggcctcgaactcagaaatccacctgcctctgcctctgcctcccgagtgctgggattaaaggcctgcgccaccacacctggctggattctttacattacatcttcttcagaagtttttaattggaatttgagagaataaaagaataatttgagctactatttatttctactttggagaaagatgatcattctatctgtccctgctaacacaactctggacagggcgtgggggctggtttggcagggcaacacttgatgtgaagcacgaggagctcccgagtcccagaaccca

SEQ ID NO: 18146 - DNA, 1238 bp, Mus musculus
aaaataaatctttgaaaaaagaagtgtacagatgaatgcagtaacttaagtttgtatatgttggatgctggtggtgcacttagaggtcgggcaggagcatgctgagggtgaatccagtcttggctacatagtgaattccaggctcaacaggactgcatcatgaaactatttttcaaaaagaaacacaagagtatcatgttcaaagaatgggattgccacccatttctgtttctctggaaagcagtcattgatattaaataggaaggatatgtcagaaagcacagaacttttctagctttttactcacggagatgactgtagactgcattctgtttaatagaactattaagttctttttataccatttcttgtattttgtatctcatttactgttaaattgcttgtcagctacccttgcatccatccattgtgtagagacctgctgaatgaagacgtgtctactgaggagaggcaccgtgttctctgaacggcaagttaccagttacagagctcatgtttgtttttctctgttaggatataggtactgccattgtttcagacactacggatgatttgtggtttttaaatgagaccgtgtcagagcaattaggtgttggaataaaagttgaagctgctaattctgagcaaacaagtgaagtagggaaaacaagtaacaagaaggtatgtcccagcattcacactctgtctgtatctgtgttctagagtcatctgcaggtcttgagtatttctctatacccagttttaggatttcaattgttagacaaggctgcttcagaaatgagccaagattcatggagaagttcttgctgtgttagggacatgctgcccctctacttcagtgaactcattgtggagtgtttcttttagaaacttttgcttatcaggcaaacctataaatggccttaacagtttctgttacaggagaaaagaatccttgtatttaaagaactttggtagctttgtaactacttcataacaaaattggaaaaagctaatttttaaaacctatgttaaagttagtatgattttctcctatattaagaagggagttagagattggggataggacctggagcttccttgctcttcccaagagcttgagttcaggttctcatacccatgcctggtggctcactgcttggacactgttcacatgcttaaagccgtatgcatacatagaatttaaaagaaattagagctagttatagtggtatata

SEQ ID NO: 18147 - DNA, 1255 bp, Mus musculus
cctggctagcctggaacctgctatatgctgggataaaaggcaggtgcatacttctatgcctagctctaagtcattatcattagttattacagggttgggaatgtttaaaatttcagaaaatggccattttgaaatccttttagaacagcacattcagatgcttttagagttttgtgtcctgaagtgatcatcatcatcatctttttttttttttttttttttggtttttcaagacagggtttctctgtgtagtcctggaactcactctgtagaccaggctggcctcgaactcagaaattcacctgcctctgcctcccgagtacttggattaaagacgtgcgccacctcgcccagcctgaagtgatcttctgttcatagtgttcttgcttgctaatgaaacctaaatgggaggtttgagccataccattaaggtatttgatttctgtctcctccttactgagaataggagctcctttttactgattttacaaagattgttaaggattctgggaaacatcttggttcttctgtattacttacagtcattttcatttggtttctgtagatgaagacttgatagaacatttatctcaagatgagacatctaggcttgaccttgattttgaggagtgggacgttgctggcctgccttggtggtttctagggaatttgagaaacaactgtattcctaaaagtaatggctcaactgatttacagacaaatcaggtaaaagttgcatctgaggggaactggttttgctttgtgttgttttgttcttttactctggctgtagctaagaattcttactggtttgtttcatctgtgtgtatatgatgctcagatgtagtcctgacttttctaacttccacattgaaccctctgcaaaggctgtgttcactgttggagaatctgaccttgagcatgaaattgatgtttttttttttttaactaacattccttccctatcttttccttctacttaataattttagccaaactacaggagacactgacttcttctctgtcatatatactcagaccaggctggcatggagctcagagatgtacttgtctctgcctccccagtgctgggattaaaggtgtgcactaccactgtctggcacctgtttttcatgtaggtagttgagcattttcacaccacatctacatttcttgattttgatatctttgattcttttaaaaaataatttttagtgcatgagtgtgcatgagcgtctgaatgtatgtatgtgta

SEQ ID NO: 18148 - DNA, 1239 bp, Mus musculus
cttggatgtcagagcttttctgtgaaagatccaaggtaaaaagggcgagggtttatgtatctttgagtgcttatatctgctcactcagtctgtagaggttatttttctttagccagtaagtgttttaaaggctacatatgtcgtatagccagtgagatatatgcacagtacaatggtttgcagtgtgcacagtctgatttgatggtacatacagaatagtaatcatcttcatacatggtcaaatagcatgacagagctatagagagaagtacatgaagtgggggatggctgggacttatcctgtcaaagcttccttgaggaagcagaatgtgagctaagctgtgacagtttttagagggctaatgggtggggggcgtctggttgaacaggagggagtcgtgtcactaggtcacaagctggtgttctgtacaattattttttaaagttttaattcatgtgtgtgagtgttttgcctacatgcatgtgtctgctcaggtatgtgcttggtgcccaaagaggccagaagagggtgtcaggtctcctggaactgaagttgcatatggtcatgagccaccatgtgtgcgctgttgtttccctgtaagaacagtcaatgctattcagttgatccatctttccaccccatcgtcaccttctggtgttgcccctgccctttatatatagtgattgcttttttctgagctagcttcctttcctttcctttccttttcctttccttttcctttcctttcctttccttttcctttccttttcctttcctttcctttcctttcctttcctttcctttcctttcctttcctttcctttcctttccttccttctttctttcctttccttcctttccttcctttctttcctttctttcctttctttccttcttttcttttctctttctttctttagatttattatttattttattaattaaattaagatttatttattttatgcatatgagtacactgtagctgtacagatggttgtagttgttggaaattgaattttaggacctctgcttgctctggtcagccctgctcatctggtcaactccactcgctcagtccctgctctctttggcccaaagatttatttattattataaataaatacactgtagctgtcttcagacactccagaagagggcatcagatctcatgatgggtggttgtgagccaccatgtggttgctgggatttgaactcaggacctctggaagagcagt

SEQ ID NO: 18149 - DNA, 1223 bp, Mus musculus
aactaatatcacacagcagaaagaacccaaactatataggctgctcttctcctggtgagcgtgccaagggcggagctgtcagttcagatgctcaagattgtgagtggccaagcaggagccccacccagcacctcacaaccccagtagccccagtgctatagtgttggagaagggctcaccgagaggagaatttcttaggccagaagactcagctcttcaggagaagtagtggttcctttgaccaagccgaggcatagggttagaaaggtcatattggaatcccagatacactgggacctgaggaaggggaggccttgcctgcttctctgtattatggtttcagtaaggcagtttgccccttccttctttctttccttccttccttccttccttccttccttccttccttccttccttccttccttctctccttcccacggcaaggtctcatactcatgcagacttaaattgaccttgaaatcccagccgtcctcctgcctcagcctcccaagagctgggattacggccataccacgggtcagctcttcctcttgttggatgaccagaccaacttcctctccctggctgtggggtcagctgcttctccctcccactgtagttggatggacatgggatcagcttgctctcaaaataggcccagcagccatgctctgtcacctccggccagacccagcctggcatatcccctggctgctgaaggggccctaattatagctgtggggcccccagggtagaagcagctggggcagagccggattgtgccagtctgcggctgctgagtgccttctttgagtggagactttccccaggagtgaggggcagtgaagagggaggctgccttatctgtgacctctgaccttgggggtggcggccctgcctctgtgccctttgggtgtagcagcagtcgggcctagggccagccaggagggtgtggcagtgtggactttggcccagggacagcttcccggaaaggtaacagggtgggccctggctctcttttccccagcccctcagctctctccacctccccacacccaaatctccttaccctgaactcagagggtgtggctgggtgtggccccgtcagggcggaccgtgaagaacatctggccttgagcgctgcttatgctgcttatgcgtgtcttggcctggcctgtttcctttctcactcttctctgaaaagccccttctcttttttccca

SEQ ID NO: 18150 - DNA, 1237 bp, Mus musculus
attagacacctgatctcaggcgagtcccaattagctacagaccctgtaaagcgaagagagatcccaagaggcctcacagttgaccaaaccctgacaggtgttgcctactgccctctagtggctctacttggaagtagtaccatcgggccatcccctggtctggtattgttgacctcagtctgagaaatgtccctgagattgggtcagaggtgagatgtggatcctgttctccaaacctgcaatcatctgtgatcattaaaaaaaaaaaaaacccaaatgtttagtttctgtagacattctgactcaactggcattggtgtgggagctagtcgccagaagttaccaaccccttctgtaataatgtgtggtgacgttgggaagccactgaatggtagcgtgtgggtcagttccctcggaacagcagttctgtgtgccctggctcactctgccgctcgctctcacgtaggctcacggatgctgacaagaagcagctgtgggagaaacgctattactgccacactgaggtgagctcactccccctggttctcgccagtgcacccagctgggagtgggcttgcctgccggacatctatgctctcctgcaacagtggactcacatgaaccaccaagatgccctgggactcctgcatgccacgtgagttgtagctcttccttgtcccggctccagcactgccattacttgacaggtcagctcagggaaagcagagtcgcagatgtgccagcactcggctttcctactctcccattttcctttgtctcattttcccctaatctcataacaccatccgtatccccaggtgcacgtcacatagagtttaccactagatttccatctgcacacgtcacaaggtgcgcaagtgctggcctatccacctgccacacagagttcaactgttgtacatactttggtagaaactttttgttaaacaaataattttgtctgggcggtggtggatcaagcctttaatcccagcacttaggaggtagaggcaggtggatctctgtgagtttgaagtcagcctggtctacagagcaagtttcaggacagtcagggctacacggagaagtcctatcttgaaataaaacaaggctggagagatggctcagcagtaaagagcaccgactgctctcccaaaggctgtgagttcaaatcccagcaaccacatggtggttcacaaccatccgtaatgagatctgactccctcttctgtggttt

SEQ ID NO: 18151 - DNA, 1189 bp, Mus musculus
tcatagaactctgcctgcctctgcctctatacgggaactaacttttaaatgaagagttagcaaggacaaggcaaatagtttctctgtgaccccatttctggagagagaaaagctccattgaagccacatggaaacaagaaaggtgtttgttttgttgttgtttattttgcttctggtttttaatttttttttttttttttttttatgagagagggtatcatatagcccaggttggcctcaaactcctatgtagataaggatagtcttaagctcctgacctacttgcctttccaactcacaggtgctaagattacagacatgagctgccccatccattttctccttaatttaaaatgacaggccagtgaggtggctcaggacttgcctggtcaacttaagtttgatcactgagacctttaaggtggcgggaggcaaccaactcctacaagttagttttttttttttttttgtccttcatatgcactacacaacatgtgcacacacatacacacagataacataattttaaaatgccaaggataaagcagcctgatgaaggcaggagagtagagcgggaaagcaatggaaccttccagatgtttggaccatagacgagctgctggctttttgcctgcagctcattttcttttgaccctttatgtctgacttaaagaggtctatgtactgtacccacttcccacactcctttatcttctactttctctggaattgtattttttaataaacgacatttgagaaacaaagctatcattattaaagatcggtggatgtgcaagtgttcaggtaaaagcatgggatgtgtgtttcggtgccccggtgcaccacagtggacattcttacagtcttcagcttgtaaccaaagcttctgggcgaaagccctgatttggcaggcctaatgggctgggcttggccactgttctggggcgcccattgaagggatagtggtggcaaaaggcaaggcggggagatttgtccactgtggccatattggaaagagtaggaaggggttcctgtgacacacgccccccccccagtttatcctcaggatactgacatgacctctaggtcaaaacaggaatattcagggggtgaggggcagaagtattcatagtaaagatgtcttcctcaaggtgtgatctcttttttttttttgtaagatttatttatt

SEQ ID NO: 18152 - DNA, 2252 bp, Mus musculus
tgtctgagaagccgccaaggaaaggagatggagacaggaacgcacagggcccggaagcggcctggccctcggctgggctcctggttccggctgcccttccttcggcgatcgcacgcctgctcttcggagttcccgccgccttcctctcgacaaaatcccgggaactccgctctgcccgagcgtcggaccaggtactggaccaaattgctttctcagctccttgccctgctccctagcctattccagaagctgctgctttggagccagcttttcgggggcctgattcctaccagatggctagattttgccgcaagttacagcgccctgagagctttgagaggacgggaggaatctgccgctcccacggtgcagaagtctctgagttcactgcggctggactcttcggaagacttggttgtcagttctcttgattggctagaggagggactccagtggcagtgctcgtcctcagacctggagttaaaactcaaggcccaggaaagagctttagactctgcagcgcccactttcctcctggagcagcagctgtggggagtggagttgctgcccagtagccttcaagctggtctagtctcccaccgagaacttgactcttcatcctctgggcctctgagcgttcagagcttaggtaatttcaaggtagtttcctatctcctgaacccttcctacctggactaccttccccagttagggctgcgctgtcagagcagcgctggaggtggccagtttgtgggtttccgaacactaaccccagagagctgctatctttctgaagatggttgtcaccctcagccgttgcgggcagagatgtcggcaaccgcctggagaaggtgtccgcctctctctacagaaggcctgccggaaatccaccaccttcgtatgaaacggctagaattcctccaggctaacaaagggcaagagttacccacccctgaccaagataatggctatcatagcctggaggaggaacataaccttctccggatggacccacaacattgcacagataacccagcacaggcggtgtcccctgctgcagacaggccggagcccactgagaaaaaaccagaattggtgattcaagaagtttcacagagcccccagggaagcagtctgttttgtgaattacccgtggaaaaagaatgtgaagaggaccacactaatgcaactgacctctcagatagaggagagagccttcctgtttctaccagaccagtttgtagcaacaaactgatagattatattttgggaggcgcccccagtgacttggaagccagctctgattctgaaagtgaggattggggcgaggaacctgaggacgatggctttgatagcgatggctccctgtctgaatcagacgtggaacaggactcggaaggccttcacctttggaactctttccacagtgtagatccttacaacccccaaaactttacagccacgattcagacggctgccagaattgcccccagagacccatcagattcagggacatcctggtctggcagctgtggtgtagggagctgtcaggagggaccccttccggagacccccgaccatagttccggggaggaagatgactgggaaccgagtgcagatgaagcagagaatcttaaattgtggaactctttctgtcattctgaggacccctacaaccttttaaattttaaggctccttttcaaccgtcagggaagaattggaaaggccgtcaggactcaaaggcctcttctgaggctacagtggccttctctggccatcataccttactttcttgtaaggcccagctgttagagagccaagaagataattgtccaggctgtgggctgggtgaggctcttgctggagaaagatacacccatatcaagagaaaaaaggtttgttcccttttacatgactaataacttgctctattttgatatggttactatagcagcatgactttgcctctggaggcacagttgtgcacatttttgaggaaggcatctgagctggtgttcttgaattgagaaatactccagtgtgatccttcttcccaatatagagaaatgttcttctccaaatgaaaggtgccagtattagatgttagcaggggtgtcattttggttggtggaacctgaaagttagaaatggttttgcatgtgttttatttgaaagtatataatgttttattttcatggctacagtgtccttattcctatccattggaatccagaggaataacactagcaag

SEQ ID NO: 18153 - DNA, 3600 bp, Mus musculus
acttcttctgtagtgggcacagcgatccatcccgtctagtgttgatgtggtgttaattctaagatcccagaattactaacattggtttttgtctttctaggtaaccttcctggaagaagttactgagtattatataagtggtgatgaggatcgcaaaggaccatgggaagaatttgcaagggatggatgcaggttccagaaacgaattcaagaaacagaagttgccattggctactgcttggcctttgagcacagagaaaaaatgtttaatagactgaggatcgagtcaaaggacttactgttgtacagcaatgttaagaagtgaacagcctgcaacccgtgcccactctgtctcttacttgagagtttcccttaaaaacaaacactggcagctgtccttggacatgtttttaaagaaacaacttgtatctagagatgcagtttgattatttttgggtaatgtgtctcattagaaacaccaactccgataatgaagaatctcttatctgtaatcctctcttttcctatttagttggatgtgggttttgtctttttgagagggtctcactgcataattctgtttggcctaggtctatgtatgtagaccaggttggccttgaagttggtatttccttgcctctgtttcctgtgccaccatgcccagctggaagtgtttttaaatatcctctgcttacctggggtgagagtttaattttgcactttcaaaacgtttcttctggaggcaggggctggtctggtttacatacaggcttcaggccagctagggctatgtggtgagacctagtcttagaggacaaacagaacaaaacagtcaggttactgtggaaactgaggcaggaggataggaaggtccaggtatgcctggaactcagtgaactctgaactcaaggccagcatggggagtttagcaagacctttttacactcagaatggaaaaggaagctggggatatagctcggtagcagaggcccctgcctacatgtgcaaggtcctgggttcagtccccagtactgcaaatagaaagaaaaaacattgtcttggataactataaggtttaagcctcatagtcagttctaactcaaattatgcatgcattgagttcttgtgtgctttttctgttctaaaattaatgggctttatgggttttgtttttgtatgtttttatgtctgttatattttgaggtaggggattgaggcagggtctcactgtggccttgagctcatggcagttttcctgcttcaactgagtgttttggtttgtttgtgtttgtgtttttttactttcatagatttgacttaatgaaggcaaaaacctgttatcaacctaaaagacattgatgtgtcacttcagtggtggattttctccctctttttttttttcccccagagctgaggaccaaacccagggctttgcacttgctaggcaagcgctctaccactgagctaaatccccaaaccaccccccccccttttctttttttaaagacatggtcttatatagtctaggctggccttaaactcattacttagccaaggatggctttgaaagatcctcctgtcctcttgtttggcttgcacatggcatgtgccatacatccagatttttctctgtatctaggtctttttaagatatttccaaggactgcccacaaatccacagtgcagtactttcttgactgggaaagcggggttggtgtgcttttcaaaggcacacaccattatgcccagctggtctgccaaacttaacatatttggtttctgtgcaaactgtccatttggaaggtttctgtgtgttgtagtttcagttgaatgtggctctctgtagctttcaagaatgggtagaaatcataaagcactcttaagtaatcattgcattgtagacatttttttttttaactagggggtatttgggagacatgtcagatattcacttttgttttatgtgtcttaaaaccagtgttacttacaccctgcctcagcactggcacttttcaaacctgtcttggagacactgtaaacttggatggtgcagttctgggttttcatgtgtaaaatgtcaactacaaaggtcaatatccaggtttgttgtgttctaccttatgtagagagaagcaaagcagaaagggcagatagagcagccagaaagtgctagtgtccccccccaaagcgtgcttctagatagtgtgtggatcaggtgtgcttggtttgttcagttagcgtcacctgttgtgcatggttgaggtaatgtgttaccagttctttagtggttacatgcacaaaagagaggacctctgagtcgggtgtgggatgagctttccagacctggcagggtaaactacctcagtttataatctccctggttatttccgtttgatgtgatctaaggtctgcctcagtggtgatgatgttcatccacacacaaggttagtaagagtgcacgaccagaaacgttggtcttatttttgagaacccccatttctgtgtattttatgcacctgcctttagtgaactccagagtgcattaaagagtctggtttagtgccgtgggaatgggctagtttagaagctatgtttggaaagcaggcaagttgactttaggaagaaaagctgtgacagtgtgtagacatttcttttaaaccggactgcagcttaacaacacttgatttcagatgattaggtttttgtttctgagacccagcacctgtatatttaaaaattgttccagattacaccttcactatcaaatgagtaaatgactcatgcctgcagacatgtcctgatggtggcaagaacagaaggatctttgactgaaggagaaaaactgtcattgtcatcccagcccccaggaaagaacacctccaaggcaggcaggcaggcaggcaggcatggtggttctagttgaatacacattcaagtcttgcagtggtgctttagatctgtgtagcatgtgaggctctgtacaggtgggggccacacttctgagggctgaaatgtggcaaccctttatctaacttgaaatcaaaaccgtcaaattttattttttataatttaagaaagagttggggaatgacattttttgagttggccttttcagctcagtcattttacgtgtaacgtggagatttgatagctcagattatatttgtatataattattaactaatctgtaaattgtaataaatatatttgcaattattaaatgctatgtgactttatgtattttatgttggttttagtattatgggacaggattttcagacttagctcagttttgtagaatctgattttgtagaagtgctgtaggcaatttgaacagaaatcttggtcatctaaattgccttcctgtctaattgaggggaagagtggggagaggagagatgcagtcgaaagctacttggatcttagagccggatctttttgaggaggttttaggtagtttttgctaagtataccaatcctgctgcttcagccgctggagagcagatagagcgtactacggagcctggctaccgctctcgacaacccctcctaagactcaagatttcactctaaatctgcagcaagtccttccagccctca

SEQ ID NO: 18154 - DNA, 2805 bp, Mus musculus
ttgcctggtattggatcaggttctcgctggaagtccatgaccaaccaggagaaacagccgtactacgaggagcaggcccgtctgagccggcagcacctggagaaataccctgactataagtacaagccaaggcctaagcgtacctgtgtcgtggagggccggcggctgcgagtgggcgagtacaaggccttgatgaggacacggcgccagggtgctcgccaaagctacaccatcccgtgagcaggccctccctggtggccagaggcggcttgtggctgctgtgagagactggggttgtgtgtgtgtctggtctttgtgtgaggcaggcagagcagccagcaaggatctgggagcagagttgtgtgccatctgcctgtgtgtgacccctgatggataatgactgtgtgcgagactggtgactgggagttgggtataagacctaaactggggcacctgcagcctgacaaacgcagggcaaattgagaacaccacaggtattcatcccgtaggaaggccccttatttgaccatgacaggcactagggtagagttctgtggtcaatgacactaaaacaaaataatattcacgtgccaccgtccaacataccctcgactctgagctttcgagctatagctggcagtgaatttggccatcaggaagcacacgcaagggccagagtatgccggttacccagcctgcagggagggctggaagggctgggagggcacatgggtacatctgtaattgcgaattttctctgcctctcagcccgcaggctggccaggcacaggtgagctcagatatcctgttccctcgggcagcgggcttgcccctggcacgtccactggtggagcactatgacccccagggcctggaccccaacatgcctgtcatcatcaatacctgcagtctccgggaggaaggggagggcacagatgacaggcactcggtggccgatggagagatgtaccggtacagcgaggacgaggactcagagggtgacgagaagagtgatgaggagctggtggtactcacagactgatccccagctcgctgggcccggcccgtcaccgctgggggaaagaccttgttcccatccggacaggcacagccagccttcctgaactatcttggtacttggacttgggtgtggccaggtgatgggtgaaactgcacttgtagatacattcccaagatgggggtcctcctcttcatcacacctctgggcccatcggaggagccaatggcctggctgggtgggagtcatgtggccgtggtggacaaagcttgctgagggttttagcccttggggacaatggccagggaccactggatgtacttcctcctgtctgcccacccactcaaggggatgacagggacacacctgcccccctgaggtcacatgctttgtttccatttcttcttggtccagaccagccattgtgggacaacacacctgccctacaagctcccaggtcacccctctgccacctgggttactttgaactctgcagtctggctgtgctgtcttttgtcttccaagtccatgtgcctctggctactgtgtgtctgtgcgcggcccacacatgttcatcacgccactcttggcagaaggcatttgctgagtgtcactgtgagccaggcacgcccgtgagctctgtgatgtgtgtcttgatgcttctctgggggctgcttctgtgttcctttgtccccacattgctacctctttgtcagtctggtgtctcaggttctgcgtattttctccccatgtacacttctccctcttcctcctccgtctgtccctgtcccaccacacccgctgtatcctctgggtgtttgtagggcccagcctgcccctgggactggcagttcctgacccccatgaccccttccctcccttcagactctgccagtcagttcccacggagccatttttagctcccagggccgtgagagccagcccaggcctccaagggggctctgccctgattcccaacgtgtgtgccgcagtcatgaggatctttttctcagtgacagccctgcagaggggaccccatggcagctggtctccatcccttcttcatgagcttagggtggcttcttccctcccccccccctttcctcctaaattagcttcctggttgtatcccaaggaaatcattagcacctagtcaaagatctggagctgccctggggcagggaaagaccccaaaccccacaaggccaggtgcttccctccccaccgctgttgaccctatttctctccagactgtttctttttatgactgtaaacatagatagtgctttattttgttactaagaagataatgatgaataacttaaccagcatatttgttttctgatgggtgtaataaagaccgaccatttcaggacgtgccctttctctgctgggaggctggcctggccgaattctcgagtctagcgccagccagtcgctgctgccccctggtggcagcatgtgggagcatcaggcaaagtgtctgaaagtaatggctttgaccggacggagacctaggacaggcctgtgacagacacactgctgagggaggcactgcagcagcctggagggacagtggctcagctccccccttcactgaaaggaataagtcttaaaacttcctcatgaatcttaccgtctgggagagggagtcacttggatccattgaaagctgtgggctcattccgcaacagggttcacacacagacactcaggagggctccctgccatacttatctagtgatggtcttcaaaactccatgacccaacacttagaatggggatct

SEQ ID NO: 18155 - DNA, 1134 bp, Mus musculus
ctgtctactggggagggccaggcagcaggcaccctcttgctctctgctcctgtcttctgcaattcagcaagatagcgttgtggagcccagcaggccccccagtaggggtaacgggagagaggtcttttctgtaggttcaatatgttccctagccaatagtactctcccctactgctcatcccatggggtgcaggagacaggagacagagggaagggctctatgttgtatcttagtgtgtagtaggaaacagcagcagtttctcttcccttctctttggtatgtgagaaacaaggcatggattgactgctgtctgcctgaggactgttgaaatgagtgtccaactcaaggtgagtggtgcttggtgcttgggagttttgcagtgtgtagtccgcacgactgtacacttgaccctgttgcaatcggctgcttccgggccctatctaaactaggcgttagactctctggtaggcagatgagaagaggggccttggctagatagtcaagatagtgaacttccagtatggccagcttcttcgcccaaagcctgacagcttgaaacaaaggccttgtatgtaggcttttgtctcccaccagcaggtcccctgctgctggactggctcagctagttgaggctggatcagtttgtgtcacacaacagttttcaaactggctgcacgttgactttcatatcgttccttcccttttcttgagtgcacacacgtgaggacaacttccaagagtcagttctttctgccatgaccctctttgatggatccagggattggactcaggttctcaggcttggcgggaagcagccttcctcctcagccacagcttgcccttacctttgcctagttttagatcagtgttcttcagtgtgacacctcaaattgtgagagtgatttgggctatttggctttttgtttctttttttgttttattttgtttgagacggggtttttctgtgtagtcctggaactcaccctgtagaccaggctggcctcgaactcacagagatctgcctgcctctgcctcctgagtgctgggattaaaggctgcaccaccatgcctggcctgactagctatatggattcttctttcctcggcactgatgtgaaattgtgggagagcag

SEQ ID NO: 18156 - DNA, 1743 bp, Mus musculus
cctcaaactcacagagctcactgcttcctggagtgctgggattaaagctgtgtgcccccattgcccagctcttctttcaattccttaagcctgcacattggcctcactttctgtttgaggtaggatcttcctgtttagcccaggctggccttaactctgagatccttgcttcattttctaaatggcagtgttaacacaattatcacgccatggttattacacttgactccatcaaatattgctacgtgtattgttcactgatcaaactttctctaggaaacccaaatttaatttagtttttctgggatgggagaacacaagatgtgatatgttgactctgtagtgaatcatttattttatcgttgcctctttgttagactgcatgctccctgagtgcatgagtcatgtcctctctgcttccaatgaccaccgtagtgcttcacataaactcagaaagcccagggaacaagaggacccatggtctcattaagagatactttactgaggttaggttatcttttgttagaatagtcagtgctcacgtgcgtttattagtgatggagttcaggtatctctttcccaaaccctactgaccaaagctagataggtggaaggtagattctaagaaatgactctgtttttatttgcttttgaggtgctctacctctataacccaggctgtccgatcttaccttagccttccagtactgggactgcaggtgtgcactgtctcacgcagcaagaactcaggctactgcagatggaattgaaatgtatacttgacaaacactcatttctaaaccctcatgaacttagtattgggagatgctgtattgggccttttcacttgacctagactataggaactatgtttcattaaaacagcgctgtttcgttctgttactgaaagcccagtagacctggtggaagccttcaatatggacgattgaaaatgttcacatagcgttatgagagagagaagtgcctcagtactattcagagccaaactctgaggctgaaagataagtaaatgtctctctctgattagtcacagcttttgtaacactttttttgttgttacaggtcggatcatgctaaaaggagataatattactctgctccaaagtgtttccaactagcagtgaatggtgaagtctgtaggatgttgagaagaccccttgagcgtgtttaaagatgtctgctgcaacctgcatttactcaacttgttttacttgcacattattattaggtgacaataaatgctgtaggaagtttttgttaaaattttacattgtttcattctggtggcaaaatgcttttacctagggtcggtatttaaggtttctgagggcttccagtcccccttgacatttgcttttctcggagcatggatctgtacgttcttgaggcagattaagaattctgcctgcacaggtaagctgctaaggttggtggaaaaggctgggggggagggggtaattgaaaataaacaagttttgttttttactagtgatgtactcatcagttctaagtgcttgtctgtcacacgtgaggccctgttagatccccagtgttacagaacaaaaacccaccgctgacttctgagtactgcgacaccagcacttgtaagtgcaggaggttgcaaacatgcttgtagttctgtttgcttagcaattactgagacactgaagaattgagaatcttatcactaagatgagaatgtggaaagcaggtatggtgtcc

SEQ ID NO: 18157 - DNA, 2781 bp, Mus musculus
gacagagcacaggagaagactctgaactctacatacttgcacacaggcacttgcacacacacacacaccccacaacacacagacactaaaagagtaaagcctaactcagcaattgaccctttctctctcttcctttataggctgttgtcccactcctctctgaggataaacccgtcaccatgtctgagacagaaaacccaaaagacaggtaatgctgtcttaaccaaactccatgccatttcaggtcttgttctctagcaaaaaaaatgctgataagtcactgaacatttacgggttatcccctctaactccaaactgagggccgcacgccctgcggtgtttgcctttactaatgaaaagatactttagataactggctaaattcacaatgtgattccaaattagtgggcctgttcttgtgtgtgttcagaaacacttttcctaaactgccaaggctgtggtcatttaaccgtgaaagaagtccaccgcctgctctaacagtatgcctttcttccccttacagttctgtgctgtcttcagcccaagctgcttcggaacccttgctcccggaaggctctggcccttcctcatcccagacggcaacaaaaccgcgccggctgagctccgcctccacgggaaagcctccactctctgtggaagatgattttgagaaactaatatgggaaatttcagggggcaaattggaagctgagatcgacttggatcctgggaaggatgaagatgaccttctgcttgagctctcagagatgattgacagctgaaacccaaggggataatgaggacacttaaaaaaaaaaaaaaaaaaaaaaccctcaccaaaaactggacttagtttcatctatttacctgaggtgataatttcttttaagtctcaaattttgcccaaatcaaaagtatacctctgaagtacctgtgtgtcctggactccctggggtcggatcttttacatcccttgataaataactgttttgtccacttgctgccattgttgagcatctttgagaagaaagttctgtaatgcccttctctccacctgagactgagctccaaatgaaacggtgcacgagaactcagtggtcctcgaggtgtttgttagtgtgggctagcttccctgctctatttatttatgtattgtcttaattttatcagagtttaaaaatgaagacagctgctaaccattgtggaccaaatgtcatgctaccactaaacaaaagacccactcagtctgtgttaaattgtatgtcttgtatttggaaattcgtctaagctttaaagagggccgggcagctcgagaacctgagatacggacctaactctggacctggtcctgttgtgttagctgttccgtgagcctctgaagagcaatagctaatttattattactgtaattttttaaaggctttaaagtgcctcaggggtcccctgaaactaattttctatttctgggattccctggattctttataagagatggtgacatgactagggaaattctttttttagtatgaaaattgtcccttcaatacctttctcttactggcattgaattatcacagagacagaaaattggtaaatttttttaatttctaactctcccaggaaactccttgcctagtatttatttgatatgctttaaccatgggggggtggacctcaagctgccagtattgatctacagactgtagcagtacactgggctgtactgtcagggatggcaagatgctctggggtgtattggatacctccagtttcttcacttctggattgagttttcttttcttaatgttggtcctcttcacatcacctcaaggtttagacttgtgaaggaacaagtctgatgaggataatagtcttgaaaggagacactgtacagaattggaagaaggaaagaaaagacttgttcattgtgatactttctgtaggtggccagtttgtttctcatagggaaatcctggaccacctgtcatgttggctcctaaggaactgctgttgtaagcggctcatcaagagttgaagttcatgtagccttgttgggaatatggaaaaggaagaaagccacaggactgccagttcagtctgggaagatctggatgattctgcacatgcaaaaatgacttgaagtttctgtatagacgcttgtaccgatccatcttcagctgactgaatgttgtatgatagcccttctccaaagcagaggtggaaggttctggtttcaccacacattttataaacacatctcctgttttgaattggcctataggttgtaggcctcttttgtatataacctctattattttgctttaaaaaaaaaaaaaggtctgttcatatttaatgccctgtattagtcaatgatttgtgttcaacattatttgaaccatttgccattaacgaaagagaaatacttatttgtgttttaaataaaactgatataggaaatccttagttcttatcattataactcaagtgatgctattgttttaaaggagggcagatctaaaagtgatcttaatatccaatgattgagaattttcaagcatgatgatgaaagaaaatatttaggagagtacagggtttttcagtgtgtatgttgacttcttactgttacaaaaacacattaattgttagcagccagagaacagaagtttctacctaatagtagcctaatagtccccagactgaggctgtagcttagcagtggcccacttgcctgctccatgtgaggcctctgtccaacctgagctgtctttcccccagagtcta

SEQ ID NO: 18158 - DNA, 2333 bp, Mus musculus
taccacccttggcagaagtatgcttgcctaagtgccctgtgcacattttatacacacacgttatgagtgaatggagagctcattgttactttcacttaggatcataatggcgcaggtttcctcactggtaagtgatttttcagccattggcattgtagaaatacaaatctctaggtttgtttcgataagagtttttcttacagttacctacaactgaggatgatggaacatttgatgttcctttggattttttacttgtctgtggagagatcatagatcattaagataatgagagcttaaatatctgtcttccctgaaacagagcgaggtcataaagctggggagatccatgtgaagacactggaagaaattcttcttgaaagagccagtcagaaacgtggagaattgcaaaccaaactgaaggcagaagaaccttcaggagccgatgattctccatcagggacaaaaagttcttcttcagtgcggatcaaaaccttctctgaggtcctggctgaaaagaaacaccggcagcaggaaatggaaagacagaaatccaaaaaggatacaagttgcctcacgctaacagacgacactgaaatgaaaaagacagtgagtctgcccactgttgctgttagcaaaggacaaccagaggagcctgcaggaagagccaggtctatgcaggaggtgcatattaagacactagaggaaattaagctggagaaggccctgagggtgcagcaaagctctgagagtagtggcaactcccgacctcaagctgaggctgccccagggacaaagaggctgctccgcatcaccaagagagcaggtttgtatagcccctccaaactgtgtcactgttccagcacagggcagcacctacaggagcctggggaggtctttgagggcttttcattactgggggaactggagtcaccggattcagtagagtaaggtgttgacactatggcggtctgtagttcaacactgtattcctgtaatcttgagattttatggagccagtctcttagctatgaagtttttttccttgtttcttttcattactgtcttagtttcctttctgtggtttgatacaacactgatcaaagccagcccgagttggggagtattatatggtttacacttccacatcacaagtgcattcttgaggaagcaaggcaggaactgaagagagcacctgaggcatggtgcttactggtctgctctccgcggcttgctcagtctgtctttttatatagccaagcaccacctgcccaggggtggcactacccaaggtgggctggacactctacgtcaattaccaatcaagaaaatgccccacaggctagtctgtggtttcttagcttcagttccctcttcctagatgaccagccaatgctaaattgacagaaaagctagccaataaaattgtattcgttaagaaaggttttgttgagccgggcatggtggcaggcagatttctgagtttgaggccagcctggtctacaaagtgagttccaggacagccagggctacacagagaaaccctgtctcgaaaaaccgagagagagagagagagagagagagagaggttttagttcagttcatttttccagagcctgcggctttattaaagcaatggtgttttttttaatatgaatacaggtgtaaaagaagagaaaaaatgtggccttgaagacagtggtgaccctcctcagagcagtgtgactaagatggaggctaatgaggtaagtttgttaccttatgtcctaggcagacctcatcgggtgagtgtgcttttagtttagcttatagcgaatttctgtcagtaattccagtggtacattgattgtggttttaattgctttggttcatgcttttgttgtttggttttgggttttttgtttggctggtttgtttttgagatttttggagacaatttctcactatgtatctcaatctgcctggctcagcgagtctcattccttaatgctagattacaacccaggactgtggttaaaattttctgtgaaatttgtattttttgtttggtttggagtcatttttgttgttgttttttgttttttgagatagggtctttgtggccctggctgtcctggaactcactatgtagacctgactggtttctgactcaacacagatttgcctgactctgcctcctgatttctgggattaaaattgtgtaccaccgtacctgtgggagattctcacagttccctgttagttttctttgttcttacagttactttatctgtgtgtgagctggcatgcctggattctttgcaagagcagcaggtgtcttaaccactgagcca

SEQ ID NO: 18159 - DNA, 2935 bp, Mus musculus
tgccagatttcaagttctgaaacatctggccctttagttaggttaggaactgattcgtttacttctataaaagaaggcacctccagtgcaggttctctggatagctcagccgcaggcagtgttgctgttgggagcaaaagctccttgctccccgctgcggtagcagtagtagatgagtacttcaaagagaagtattcagagctctcaggaggtgatgaccctttggtttactggcagaggaaggtgagcatatggccagctttgacccaagttgccattcagtatctgagttgccccatgtgtagttggcaatctgaatgcatgtttaccacaaatagccactttcatccaaagcagatcatgaacatggactttgataatatagaacagctcatatttctgaaaatgaacttggagaatgttaactatgactattctacattgattctgagctgggaccctgaaaataaggctgttcagagcaatgaaaaagaaatactaccttaatttccttttccttgtcctacttaaaatgggcagctttcgctatattactatatcttattgctgttgttactatatgtagtcgtactatttatccttttaaaaaaatggctgggtgtgttcacagtgcctgtagtcctggctatttgagacactgaggctggattatgactttagcacatgagtttgagaccagcccaggcaacatgttaagatcctgccttacaaaaatgaaaaacctgaggaaatccgaaattacagaaagactgaaaactccacagaggcagtgtaacgatgacaaaatgaaggttaactttgaaaatttcacagttgtaactcagtgtaactaacatctatcaaagtgtcatttgtatcacttgagagagagggcagtgttaatgagaaacacagtgaagcgttgaaggacttaggtatttctggttggtagattgagctagtcattgattagagtaaaaacttcttccactgtggaagattgggtttcagttattatttatataaatacagtgattcaggacttctatgagcacaaaggtgtttagaatgtgttagtgactgcattaacatagtctttccctcccctgttttttaatttctttaaaacccctgacacagcttgacagaatgaaaacccacaaaattgtttcatttttagaaattatagttgcctcaccctggtcagtttataatgtcaggttactgggtatgatagaattatcttttatatttaggattgggtctatataaaagggaacattacaaaacaattagaaaatgactttttggtctttgatttgctttttataatatagtaccaaaaacagggattatataggtgcctttaaaataacccattagtaaaaaacattagatgtttgtaaaatcaaaaaacaagcaagcctcgtgaacgtgcagaccccatgtgagtttcccagagaatatttctagagcttgttcatttttttcaagggtgctcctggtccatagcatgatgttcctaactgcagtttggaactgtatttttaactgagataagcagttgaaactttactgtgttaggcatcattgctgaaatgagtgaactgtctcagtggccctgcaggtgccttcccactcggagagtctgtttctgtgactgagtgggaggccacagagagctgacttttagtaagtctattagatgtttcagattgaataactaatgtaagatcccaatttttccttttttttcattttagatttggggatattccctgcccaaaaaattcctggaaaattgactagtattaagtgtgagtaaaaggtgtccacttttttttaagtcttgattttagttttgtcttggatagtatttggcaagatttagcctagaaagtctgtagtgtttattacataagaagcaaagtgactttgttactgggctggttttgaaactcatttctgtgtattaaaataactttttttttttaaattttaaattcttaaatggtaaatgcaccattcattgtgaagtgaaattttatctcccccaaatttacccttttaccaactggagtgaagtctttagctctaatcatcagttatcaggaagcctttgcagggccagcattgaatgccatgccagtgatgctctgttgatctaaaggaagaagagtaagcatcctgagcatctctgtgcttcccgtgagcatatctgtgcttcccccgcccgcctgcccacccgagctggttcagaatggctgtaatgctgctctgccttcttcagctcgctgccccactctgtagttactctgtaactatacacttgtacctattttggttaaacactccctgacgatgattgttaaacataccatatacattgacaaatatatgtatctatcaatacatccatctatatggatttcatcttgattttgtgactgggtaaaatttagtagcattaacttcatggtactttggtataagagtaagttcactatttttatattgaacccaaatataaaagcttttatattatattttaaaagaatagttacccaaatgttttatttctatacatttgtgtgtgtataagcctgttagtatatattatatggatattatatacataaaacactttatatttttacatacagtatgcttttattatacagataataaagatgggggaaggtttctgttttttttcttaataggtgaagaaatcttgaagaccagaaattggatcttattgaattttggtggtgtttttacttttttcttttttctttttttcatctttttatttttaaattatattgctcagctatggaagatggattttttttaaattctttgaattttaagttcatctttaaatgaacttttgttgttatttttttatttttttgaggagataactaatgct

SEQ ID NO: 18160 - DNA, 1111 bp, Mus musculus
acacggtgtccctagtgcccgtaaacactgccgggactaaatattaaatattatagtcaggctgcagagatggctcagcagttaagagcactggctgctcttctagaagatccaggttcacagtggcccacagccacctgtaaccccagttccaggggacccagtgcccttttctggactccaggggcatcagacatacatgtgttgcacagatacttgtgggcaaaacaaccataaaaacaaaaaaataaagtttttaattaataaaaaaaaatacaaccataaaatggggttccatgttattgttgagaatattcatgttaaaaaaaaattctagttttaaaaaaaaaaaaaaccacattgaattgcctggctttaatctcagcagctgggaggcagaggccagtggatctctgagtgaaaggcagggtctaatctacctggtgagttccagaatggccggggctatagagagaacccctatttcaaaaacaaacaaacaaaaacgaaatgagccgggtagtggtagcaaacgccttcaatcccagcacttgggaggcagaggcaggcagatttctgagttcaaggtcagcctggtctacaaagtgagttccaggacagccagggctacacagagaaaccctgtctcgaaaaaaaaaaaagccaaaaacaaacaaacaaacaaaacgaaatgaaactaaaaatattcatgttaaaagctgggcatggtgtgacctttaatctcagccttcaggagaaagagactggctgaacgctgtgccttcaagactaatctgatctatatagcaagttccaagacagtcagggctaggtagagagacactgtctcaaaaatacagagagagagagagagagagagagagagagagagagagagagagagagagagagagagagagagagagagaataaaggggaaaaagttgatattgccacatacaggggtgtgtggtcctggagttctagcccacaagcccaactctgaggatcccaacaactcaggtccagcagcttgcccaaaagccaaatgcaaaaggtaatggaggagaaagggaattcgaatcagcatcactacgttaggaagacacgg

SEQ ID NO: 18161 - DNA, 1148 bp, Mus musculus
gacatcactgtgacttagtgctggtgggctgacgctgactaactgtaatcacttgatgaagtggtatctgccaagtttttccaccacagacttagtattttctgcttttcatgttctaaacgttatcattaaacgcagccggagagaaggcttcaggggaactatggaaattttgtgaacttgtgttgaaaccaccgcaataatgaagaaatatttagggaagagcctgtgtgattctgtgaccttgctttttggtgtcactcacttgtcttagcatccgtcagaaggcttagtgacagcactgttctgcatgcttaatggcaatttgtctactctcgtcatcctttctgcacacagtatttgggattcacctatagttcagcacatcctttcttcatggtggatttacttattcacccttggaatgaatttatggaaatgtattttgtgaacaattattctgagactactaatcaataactttatttttcattgcccattggcataatgttattgtgtactatataaagtttatccttgtatgactcaaatgatatctatgtccccatatctggttgtgatcagaacgtgcattgtaatgcttattctaagaatctcctatctcaatgttgtttaaacattgctccccagttatctctgattggtcaacagaaagctgatcagccaatgatggggcagaggaaaggatagggttggacttccaatcccagtctgtagaggagagggaagaagagaggaccctccctggaagaaggacccaggagtcaccatgagaacattctggagaatgttccagagagatccagaacaatactaaaatgcaaatatctcggggattttggctggggcaaagccagattaacttagaggattggaatagataaatatctgcccggttattctgccttaaagcttgttgaaaaaaaatctaatagtctctgtctcaattatttgagagctagctgggatagagaaaaactgccactttaacatttgtactaacaatttccccggtcgtttcaggttttagaattgggaactcagccgggcgtggtggcgcacacctttaatcccagcactcgggaggcagaggcaggcggatttctgagttcgaggccagcctggtc

SEQ ID NO: 18162 - DNA, 1313 bp, Mus musculus
ctccccccggagagaccccactagtgaggttctgtgtatgactctgagttgtaacaacctgctgatacagcagagaggagccagagctccaaactggaaaagatcaatgcaacaacaatggctacttgtagctccggctgacagtctcaggactaggccttctcaatagttcttccatgtcctttccagtacttttcccatcccaaaagctgtaggagagaccagctagaaaccctccggacccttggaagttcctcggggttggatttcttttttgccttcaagctttaggggagagttgcaaagatcaatcagagggattacctcactgccaaaaacacaagggaacttgagtgtgcccgaatcctcgcccagaccccgctctttctccccactcccctcgccttacagttgaagctaccagtggcaccattccagtctgcacatccaatcactttctgcatctagggtccaccccatggcacttaggggtgggcacttgcaatgcctgctgttctaaagccattccggcctcctcctcagaatagaccagatactctcggtcccttccgttttagctcagagccagaacttttaccttcccagtctgcagttcggcctgctgcctcctttcttcttggttgggagaggtgaaggaaggtgagattccctgcaacggaatcgacctttggcccgtattttctccctgtatgtatatatgccatatgtaaatatgccatatatgtgccaacaaattgttctacgccatcttttctaatcagcatgcagataggaattttgagtttcttctcagtaactagtataatgagcactggtatttttgtacaaaacaaaaagaaaaaaaaattgacttttgtggtctgcatgacagacatgttatcaaagcaatgtataccctagcgtgtgtggccatagtttgcagttcagctgagcagtgcacccaatctgtatttgcatttgatattatttaagctctatgtataatgttttgcatgtatttatatggttcttgggaggggggatgctagaaactgacaaatctatactgcaaatgtgttatacaactgacacgggaagaaaaggagttttaaagggggtgactttttggaaccaataaagctttttgctgatgaacagaaaccaatgccatgcactgagaataaaaacccatgcccacttgtaatgtgctatcgtctgggtctgcatgtctccactttggggtcgcaccaccagggcttgctggggctgagaatggctttctcttcactacctttggatcaagcacaggaccc

SEQ ID NO: 18163 - DNA, 1274 bp, Mus musculus
gtcccatctgtatgtgacggtgggacttgtcattgttgtgtcagctgctcctaagtatgtgagaacccccacccgaccatgaagaagcaggagcacagacctacctggattcagtcaaaccctgggcaggtaacggtagatccactcctcaggtgtactcgctgtcattttaaagagatggtggcaaacctcttggcatcacccaacccaaaatctccacagcactcccacatgcgccaccacctcctcttgactccaaaattttatccaatgagtttctgccatttacatttacaagctaagctgtgggctcggtgcaagacaaataccctgggtttgtgtttcagtagagtggtttttcttaaaacattttttttttcctattttgaaaatgtgcactctaaggcctccagctctttctgcccttcattctgatgtcccctcaaggttcttatatggctgatatctctctctctctctctctctcggtagttataagaatggaaaggacatggacaagttgagccaactttgaccctttctggccccagtagaacctttcattctgttctagaggcaggcagatttctttgctaaaaatggtctttttggagcaaatgagctggtgaaatatttccctattcttaccaggtcagcacccaccttctgaatgtctgtcttcttgggtatataggggttttgaagtgccacggcaatcagccctaaccatggggcttgtgcatgtggaatctatagtttttaccgtaggcctgagcttccttcttgcccagggaggtagcagaagagtgaatgggtcatgcccctgcctcctagatggttgaggagcctcagaaggaccaggagtcactaaagcagacttctttcaagggtttttgccaaggctctcccagggcaggagcttctgggagagggtaggggggatgagtgttaagaagtcttgggaagggctaaagaaccagtccttcaggatctgagaaacctccctacactttgccccacatcattttctgtctctaaggaggcccctaacttctgcaaacattctaatgttgaaaatgcatagccacaagaggaggctccctgacagcatgctggttcaaggagcaaaaggctctccctgggaagccacctcctcccaccccccaccaccaccccccacccccgttttcatgcaccctcctccagcgtctctactgctgcccagggaagtctgtgcctttctgccccaacactgcccagagcaccctctgccc

SEQ ID NO: 18164 - DNA, 1170 bp, Mus musculus
aactggttcctagctcctattccgcagcagttgcatcactcagaacttgcccctccatctcttctgccatctcttctgcagttacatctcctcctgtgggcagtgagtgagagtatgttacaatgcatgatttactaaagcgaccacaagagagcacgtggcatccactttaaccaaccatggttactagtgcttttcgggtcccccacccacccctttgatcttttgacttaagggaagaaaagaaaaaaaaattctaccctaccccagctaaaaccaggctggataccctggtttcattttattgtttttttttttaatgttggaaagttattaaccttaactattttaaagacgataaccctgttttctgattgttcctctgcattgctcgctgcttctttccttgagttgctttgttttgtttttctttgtttcaccccgtcctgctttgttcctcccctcctcttctaactccgcctcttcagatgtgacattaattccacccccaccacccccccccaccaccccccccccgcaccccacaggactaggaactctgtgtacttaggggtgagggagcctctgcccaggggatgcttagccagggtctgtcctgatggagccagtactgaactgttcactgataacagtctttttggctaccagtgtactgttagctggcaacaaaagttgtaacttagattggaaagaggaagtcagctcaacgagtggtgtcttacctctcagaaatgaccttaaatcaaactctagttccagaaccaattagcgcacatacaacccagctgtcggaggctaaggcaggaggattgtgagtttacgccctcccctccccacttctcattgtttcgtctagtttgattgtccagctagcctttgtatcatactttgcatattccgttttaggaaaccctgtctgtccaggcttaattggcacctgtccggttttaacgtaggacttgctgctccctctggtagattattagacacttgctactgccttcctgtttctggtctatttaccttcccagaacgggaggcagaggggagacagtcagcacggtttccagtgagggaatgtcctctgtcatcacacatgttacatacttgagtgtcccatccatcccttcccacaaccagccctgagtt

SEQ ID NO: 18165 - DNA, 1160 bp, Mus musculus
gatcgtaagaggttattctgggcttcctttttccccctggtgtcctcctactgtgtgccacctggaagtacccctcgctaatcacagagctttggacctgcctgtcgcatcccatgaggctgctcaggatgtccaggctggaaagagtgatgttactgatggagtgtcccaacttggcccaccccaggtgcgaggaattttcaggcctggttagccaagccacagaaggaaggcaaagaggcacaacatgttttggaaggtggctggcagctccggctgtctgcctcgtgggccagggcttaacaaatggccataagctacaaagtgatgtggggcccaggggtggatggctcaggatggtggctctgcttccacagaggctccaaaaagtaagctcctccagcttccaactatttccccaattcagtgttagcctagctcttccaaatgaaagggccccgccaggccttccttcggcctgtctctcctcctcacccagattgtcatggactgttacatacaccgtcccgggtctaaggacaaacttggctttgaagggaatgttgggctcatgagaaacgggtactgggtaaagggcagagtattgttattagaaccataatatcaacagtgtgatccacgcgtgaaagtggctcttcatgaaagtggtagctttctgggcaagcaagcacccttgcaaggaagaatgaagggacacggggggagatatggaggggagtgagcagagggcaggggacagagacctccatggctggctgtgtcaaaggcagggtgagcagagggctctgggtgagtgaggacctcatgccctggtactgtggatgaagatgcttttccagccctccctccatctttcttccattcttctatcactgcctctgccctctgtccctcactcctcaccccctttctcatttctttcccctgctgcccacttcactgtctctggcttcttccttgaactcagaaagaggccgtggcattcctcagctgctgtgctgcagtgggtaaggccacccacagatgtagatgaagtccctctgagctccaggcctctagacccagcagttccctgatcttgggtgcttcagtcccagagaggctctctcttctagagctgagtacaaccccccacactc

SEQ ID NO: 18166 - DNA, 1210 bp, Mus musculus
cctgtgttcatttttgctggggttagaggaaggagaaggaagagttgctatggccagactctttggtggtacttaaactgattttgagcccactcaagtgccagttccacacccttacacacacacacacacacacacacaagcacacatagacaaacaagcacacctacacacacacacatacacacacacacacacacacacacacaccactcacttctacactgactgctgctcacctctagtcatttgccaaattttattctttcataaaaaaattgtttatgtctcctttttacatgtgacccactgagtttaattagtttgtctgtctgtttgtttgtttgtttgtttgttttttggcctgggcgtgggtagaaggttatttactggaacaagggcaacttatcagtggctacactactgaagaaaatgacacctttctccaacaccctttaactgccaataatcccgcagggaaggatggagcctttggggcccctcccccatcttaatcatgcacaggtctacatcacgtccaggaaacatctttgctgctcatcctctggctcttatgttcttttcttctcctcttccttgatgtttcttgagctttgaaagatagtgtactggctagtttagtgtcaacttgacacagctggagttatcacagagaaaggagcttcagttgaggaaatgcctccacgagatccaactgtaaggcattttctcaattagtgatcaagggggaaaggccccttgtgggtgggaccatctctgggctggtagtcttggttctataagagaacaggctgagcaagccaggggaagccagccagtgaggaacatccctccatggcctctgcatcagctcctgttttctgacctgcttgagttccagtcctgacttccttggtgatgaacagcagtatggaagtgtaagctgaataaaccttttcctccccaacttgcttcttggtcatgatgtttgtgcaggaataaaaaccctgactaagacaaattggtaccagcatagtggggtattcctgtgacaacctgaccatgttttgaggaggactgtggaaggactttggaactttggacttgaagatccattcgttgttaagagctctgtcagatgttgtataggagcttggaagataatgttgagaacagtgcagaagatggaggtctggctggtgaaatttca

SEQ ID NO: 18167 - DNA, 1180 bp, Mus musculus
agatcggcagcagctgctcccttggcaatccctgatgctgctggagcaccggtatgggactgggtcttgccagactgatctagacctcagagttagtgacgtgagaaagcaaaggcttcctggaacctgtcctggtgaaggtggaaggtaaaggcaacagtagccagactccacacagaagctgggcacagttctcagcacagctgaccaatgcatgggcccagacagttgggggcgggaccatgatcttcatggacacggtgaccttgcggctgggttgcacaggatccacgtccatgttgtcagaagtcctctgctcctgaattacttttatcattaggcagggagctgtgtgccctgagccctgatatgctccgttctgcttggggacttgggctttctggttcttgatatgcaacatctttagttccaccttctgagtacccagctattatggctcttatctggctcccatctcctcctaaaactgctggccaagcctgaagcccatggcactcctctgttttctcagcctgtctctagaatctaatctcatcaagacccaaggctcaacaggacagctgggaaggagaggcggggttgagatagactacaagtccaaagctgttgttgatcctctgtggacctacggagattcaacacttgccattcagttttcctccttgctccagtcagggactccgacccattttccagtgtaattgtgccctttgtccatgccgtgtgcccagcagcccagacttaggtggaaacagcttgtttgtcttccgcgttcgcaattcctgttggggcccagggtggctgggtgtggttgctgggccctttgtccttccgagccatttgcctgtagtctcccttcctctgctcccagggccgtgctacagcaaagccttggctctgtctgcagagtagtccttcttgctcctcttgtgggctttgtccccagggcatgaactagttttcaggagagaaagcttgtgcggctgcataattgagcaatgtattggctccgtgtgaacacgatttgggggcttgagatacctagggtctcaactggtggctgaagtcacatttattagctcctatctggatgactgaggtggaaccttctgggaaagtttgaggtccacatgggaccattagtttcctgatgacattt

SEQ ID NO: 18168 - DNA, 2017 bp, Mus musculus
cagatgatgctgggcaggagcagcccctcgaagaactatgtgatggccgtctccagctagataggagccacccgaccctggcactctactgttctcatgctgccctgacaacaggccaccgtatacctcaacctggggaactgtatttttaaaatgaagagctatttatacatgttttttttttttttttttaagaaaagaggaaaaaaaccaaaagattttttttaaaaaaaaaagaaaaagaaaaacaattctttaaagggagctgcttggaagtggcctccccaggtgcctttggagagaactgttcttgattgcatctgtgagccagtgtttgcctaggggaatgggttggggattggcctagccaaggtaaaaggggattcttggctgatccccccaggaggtggtggaagggagcaaggttagcaactgtgaatgagaggggtcagggtctgctctgggttaccgtcccagctgggatgcctgtatgcctggtccctctcttactcaggggcattcaagcctgatcttaaataatactacattgcctaatcttctcttttgtttttcggctgagatcaggggcagactgaaaggcctctcctgtcccttctgttctaagcagtctcttgaagccgtgtctcgtttctgagtctacccttgggggcctgaagagcttgcttcccagcccggaatctgtctaaacattttttggagggtgggatgtaaggcaggcgcgcaaagactttggggctaagatggagaggacctgcacaaaacctttgctttgctctgtgctgctttgtatgggtggatagtgaataatttagggatgatttgcaatggaattttgggacccaaagagtatccaatgggggtaggtcttttggacccagtccttccttttgggaaccacacgacagtctgaatgctgctaccactattcctttgagaggtggctcaaagctccagggaactccaagtcctttcttactgccttctcttcaagagcaaccttccccattttttctttcccctttcctgcggttgggtcctggagggccctatttcctaggacaagcgttctcagtcactgtgcaatagtcccaggatgctctgagaccggacctcccagcccctcctgatgccctggtaggttttagggacccattcttcccattcttctaggggttctgactggctggtgggccttgcggagatcttcctgggccacagggagggcacctgtgcactgcaggactacctggtattcttgtagggctgccatgaagagtcaaaccttgggcacagctttagctccttggtgctcagagcacctgtgggggaggttacctctctctctctcttagtaaaatccaaatttatttgtagatgtgtgcaatatttactgttctgggttggagaaaattgggaaacactgggaagaaatggctttccttcaggttcagtgacactgatgagggcttcttagaaggcctcaagtctctcaaactgaaggacagagctagagctagcccgtcaccccttggtgaggattcccttccccgtttctctccaccgccatggcatcctgtgtcctagatttctcagctcctcagtttctgctcaaaggtgctatttaccaaactctctgcctgcccgggcagacaggccccagcttcgcacagccttcccaggtggcttcgtctctcttgctttaaccttaactctgggcccacagacctgagagctgtggcctacaacaaagctgtgaattgttccagatggttcttgtgttttgtccgcacacaggtgcctgccgtttagaagctgcctcctggtctcatgcttaaatcttcaattctttactgtccttgttcactttagaaatgacaaaccctagagctggactgttgagcaggcctgtctctcttattaagtaaaaataagaaatagtggtaagtttgtaagctattctgacagaaaagacaaaggttactaattgtataatagc

SEQ ID NO: 18169 - DNA, 1176 bp, Mus musculus
tactggatcagattgtgaacggttaactctgccctgaagtgggggtgcgggaatggggaggcttcccctttagtgactcatgtcccaggtctaagaaatctaaagtggactgaggcaggctcccttgtgtgtccctataccctccagccctcctttagggttcttttgggggtaaggggctaactgctcaagaaaatcttgatcccctctcttgtctccattattttaattgctttttctggcagcacggtggggacagggcagatttatgagaaatatcaattgcccctctcttctggaccaattccttaaccttgggaaagctcagggcctagtatcagggtgggtgatagaacccgaaatggaagaggacgggaaagtgcctgggctgtgcttgtgaccggcagtacagtgccatcctggaggtgactggagtagctgctttgccatttcatcactgggattctgaacaggcgccaagctaacaggtggagaaatgagccagaactccctgtctgaaaaggatgccgagccttgtgctcagcagagggaagtttggctaatgggctgatcgaatgagctaacatgggctggggcaggcaactacccgtcctcaagcccgctgtttctgtctccctaccagacaggcctctgggaatggagagagaagcagctgagtagaacatgaactagttagagcgagagaacccttggtcctgaatagtggagttatagagaagggccagtcctaagatggaaggagccctacaatctgactccttctagggactctggggctagctttgtgggagagtcagccctgcccctcctctcccatgtgaccctgtcatagtttgcagtgtcctaggtagcacttggggagccaggtgcattcagggtcagtagggaggacaaaatagggggctctacgtgcagtgaggaaaggctgctgtcatggtgtggccctgcctcactgtcaatatctgttttctctggagagtccaccagtgacccaagctctccctgccagcctcctgtgtcaaaccaggtcccttctcagtactgtattggctcagtgctttcaggagtgagtgtgtgagtgagtgtgtgagtgtgtgtgggcgtgagcgggtgtgtacgtaccaataaacatcctggttttaagacaatgtacaa

SEQ ID NO: 18170 - DNA, 1160 bp, Mus musculus
ctcttttggggaagcctgggtggaggctccaggtttcttgactttcatgtctcccctgacatgcggcactggctcctgctaggacagtgaggagggcagctgggcccaggtaagacccctcctcccacatcagaactactactctatgaaggtcaaggcagcatcccccccaccaggctctgaatggcacagctggccgagtccagtgtgtgcatgtccttgtcacacgcggagccctgaacaaagttccttcccctctctacccccaaactccctttttcattctttttctgctttcctaggatgacaggtgaggagtcctggggggctgaggccccagcatgctggagccttcacaattggactctctgttcatgtgtgatgagtcttagattcagacagtcctcttccattccttatccttccaaaggtcactttcgtgagcatctattaggattggccggtctaaagtttctcaatgtgtgaagggatggcatgagaggtttgatggaataaaaggaagggtgatatttacaaacacagtgacagggtgggacagtggctgctgtggtggagagtgtggcagggcagtcatgcttgctctccctgaccacactatcggcctacacagaattcactccatagaccagactgtcctttgaactcagagatccacctgcctcttcccattaagtgttgggattaaaggcatgagccaccaccaccaggctaatgccttctttcttgtagtagaaggatggtagacagttgggtatagcaactgtgtgtgggcaggcagtggggagcaggacgcaggggaaagaaagggcagaggctctcctagttctgcacttggatgcggactatagaggataacttcatttgtctgcttgataataaacatattctattcggtgtacaattttacatatatcagcatgtgcagtttccttttaaaacagaacagctcaatgtgaaaacatctagcaggatatgggaaaggtgtttgagggttgctatcaaaactgaactgtccctgtttgctgtctgtagaggtaatgccttgtagtgcagtcttcttgaggcgagtgacatcatgagtgggaacattaataaaggacctggagaattgcccaagtgatgacctggcctttggggaa

SEQ ID NO: 18171 - DNA, 1161 bp, Mus musculus
gaaaggtgtggggggctggggcaggggagagggtgcagcttgaggaagggaaagacatggggaaaagaccagtgtgtgccgctgcccactgtagaggaggaagaggcgggaagattggggcagaggaacggatggctggcctagcccatcttcctgagcctgagaggagagtcagaaatcccccagtgactggagcattaatgaatctctcagggcaagaacttgatcagccggaagaaaggaacctatggacctaaatgcataattagaccttccctgacttcacatccctggaagggtgtgaatcagaacacagcaatctgagaaaagaagaggacgaggagggtaggagtctcactcagcctggaagaggggcagagcaggcaggaagggagtggagccagcgacagaaaggtctgctcggtggcagaggcaacctgcaagaggtgcgatttctcgttcctcacccagtgctgacagctaagcttgtccatgttgcactgctgctgccgtgtggacagaggggccaggcctacagtgacttcagtgacaatgccctctcccaggaattctccagggtttcatgctgaatcagggagattgtcagtaggagagggtgaaggggagtccccctttgtggtctgtgcaagtgaatgcacctggggagaggctggtgtgcaagaggacacccagagatggtgcgtgcatacatgtgcatgtgtgtgtgtgtgtacatgcatatgcacaaagagtgagacagaaaagtagagggagagaaatagagggagagacagacagacagatagacaggtctctcttacacacacacacacacacacacacacacacacacacacacacacacacacacgagtatgatagagtgtagccagagagattgcccaagagatagatctctcaatagttttttttatcaagtcaggatagtcctttctgaattcttttctgtgtccattcatattttcacttggggtttgctttgcaccttggcttagagacgtagtgggctctgcctagggatctagagtggaacaactctgatccatcttgttggaaaacactcccagggctcaggatcccccggggatgaatcaaccagtgtcactctggggctgcctggaatgtggagacttcgggggt

SEQ ID NO: 18172 - DNA, 2737 bp, Mus musculus
taaatgtgttggtagtataacttacaaaacaaaccttgaggctgaaccaaggtatattagaccatctcatggagagcccaaagaatccaaggttaaattaactactaaacatttaaattacatgctaaatgtgcctttctcttctagtttaccattaatgtgagtacagacatgcggcatcatcgagtgagattggtgttccaggattctcctgtccgtggtggtcagaatctgcgtagtgaacagggtgtgcaagtcgtcctggacccggtgcacagtgttcggctctttgactggtggcatccgcagtatccattctccctgagagcatagttcctgcttcctgtccctcgggatagcttccagtctagtccattagtaatcagattctgtttggaaggggcagctgtattgtgtagctgattagtgatgcacaggctgtttgggttcctggggctcctgttacaggaggtggaaaggttgaatcaagaggaaaaccaactatgatttataaacattttcatgtaaaatttgcatatttgaaaggagaaacctggcctcattttctgtgttaaacctcaattggtgctgttgagtttgttcttcgttcatttatctcagcaaatggatgatctttcgttaggggaaagttaaactcttactcttcatggaagaacgtttttccttacagattagaggaactcagaggcttaaaatggttgctccaatgttgctgctcctcaaattcaagtgaatatttttttcttttccctttacccttctccagaaataaagcaggtgacagggttgtcagaatcttataagattgatttgtgcatcttttaaaaaaaatgctttttggatatttattacatgaatattgattgttttgatgattttgtattttgggtttttgttttattgcatgagacttaatagtgatggtaataattatgtgcccctggtactgttctaagaactttatagattgtgtctctaatccttgtgtcttgcaaggtagttgaaacccttcccattttaaggttgagaagctgaatcattgatttacccaaggccagaactgctggtccatgcagagccaggattctgacccctgtcttttgctacacaacaacttcaaaggccagtttcatttttcgtgtggtacttagtggtacaaagaggaggcagagtgtgaggaaaaagtaaaacaatgagttatttgaatctttcagatagctatgcattaactgaaaggtaaggcagagtttaggaaaattgtgtttacattaaattgttaggctttataatgctaaaggtcatctttaaaaaatacattgcatgttgaaagcagccttcaaatagagcaattagtggcttttctctgccctgtcctgtcctttgatatctttgtttttcctttttaaatcatcctgtgtgcattcaggatcctggtcttcatacagagatgttgacacccttcttagtcacagttcttactgtcactggcatgctctgagaaaaggatgtgggtggggttttgtttatttcttttgctaagaagaaagtcttactgcttcctttcccacctggatgtggcaggagatgctcattaagacaatgctctcctactcaagacctggagttcatcctgtagcgctgcagtccagcctccctgccccacaaaaatagtcctttggagacagggtcttgctgtgtagcccaggctggccttgcacttaatcctcttactttagctgcctggagttgttgggtgagtcaccagacaggacaaagacagaaaatgttctttaaacataaaaatattgtggggtggatacttttgtgagctaaattgctaaatgagtatgttggtttttatctttccccaccccatgctatttaaagaccattcttaagcatctgtttaatgctgctgctgacagcagccgtacccacactgaggggcatgctgtcactggttgaacagatagtgagcctgggtcaataaaaagaaccaccagaatttgggtacttaattaacaaagcaaacaaaaaccctaggacagtaagcctccacagatctctgcagtcagaagctgcctagaggcagaagaaaagaagcacagagtctggagttccctgaacaaaagatgccatggagcaggggaagttgtccttgtggattgtgtgtctcccatttaggtttaccctgagtgggtgaaataaatgtggcttaattgttttctggctcaacttgtgagtttttatgtcaaactccatggtatgatgatagatgctatagcctccctttgaagttcctgctgcctctgctgtggtcttagcacattgccaacacttggtaaaatggttcttcatggttaccatggctgcagtctcctcagcattggctgagttgccttttctggcattattcatgttttgttaatggaagggtgtgaagagtcaaggattgcctttttgtaaaaactagtccacctagagaacgactgaaacttggtaggctctgggtttaaaaactgactaatgtttttcacttcttgatgtatatattcttgttcagagtgtcagacaaataacagattcagctcctctcaacccctatcagaattaatttccttgccattttctaaagatgaaaggaaaattggatatattgggagagagggaatgaaaggctatgttaactgacctcagcttcagcctttataggaca

SEQ ID NO: 18173 - DNA, 1124 bp, Mus musculus
tttttttctttttgcaaatggtattacttctggaagaacttagacttcctatagaggtgtatcttattacgtgatgaataaacatgctagattttcatgtggggtacagaggtctagtggactttatgaactgtaggatgtggtagggatggatagagaacttaacatgtctgacagggaaaccaagtggctcttccccgtgacagattctttttgagcaactaaagcatattacatgatttccaaatcagagacttgtaattctgtagaacctgaaatagtccagatttaaatggaaaactacagggttaccaagatgaagaagcaaaagtcatggataatgtcaggagatggtgatggtagtggtgagaactgggcaaactagtatccaccagtgcaatagtggagtaaagttcacatggaagttggggtcctgggaggctgaataagaacaggcaggcaggtcacatattggtaggagtcatgtgtcatgtttcaggcactacacgctggatgcgtctctgcctttgcggctgcgaccagaatccatggagaagctgcgctgtctccgggcatgtgtgatccgatctctgtatcatatgtatgaaccatttgctgctcgaatctccaagaatccagccattccggaaagcactcccagcacactgaagaattccaaagtaagtgaaacttgctgttggggtttggctaatggattcttgtatggtgggcttgttcttgagtcttgtttgtagcttcttaatggggagggctgtaggtcccaaccattagggggctcatgtaaacttgtaggttcagaagtgtcatttctctgacacatccctgctgtgctggactgctttgctatccttccttaaagctttcttatgcttatagtgtatttcttaagtctctattttaattctatgcactgtacatttgatcactgtagataaaatggttttgatagcttgggctagaaaaaatacttgaatggtaggtgtatactacagttttcacaaaatgcttagtcatgacacaaataacacaaggaattctactgattgtctgtttctaacgtaacctcggcatcttgctttaaggattcaagtatagacatcttt

SEQ ID NO: 18174 - DNA, 1198 bp, Mus musculus
gctcaacattccactctccgtgagactctcagaccggcgagatttctcatcatgctaattagcctggctccatgtcagacaaaactgtcatcctttggggtaggtctaagttgcagagagaagaaagctctcaaaaggagggcctgagacggccaagatacccacgcccttggaccacctactccgcacggaagaggggggggcatagtccccgctagtcctgcctcagtcaggccctcctccatagaccacgccccggagagctccgcctccgggcccgccccgcggcgcattgtgggatctttccgccccaccggagcgggacgcacctctaggtcatggggatccagccggtaagaccctcgttctgtgccctgagcccggggtcaccgcctcagctggttctgggcagtctgccccgcggggctgtgccatacccaccttggatgctggagtctcgctgcacgagctgcgggctgagttcactgctccgcttgcttctgaggttttggcatgctttctcgctggagctcaggatcgctactcctggtcctccacccacaccctggcacttcctcagcgtggcgatcacgcttcctcctctatccacagagcccggtcttgctagcctctctgggggtggggctgcttactctgctcggcctggctctgggtacctacttggttcgaagatcccgccggccgcaggttactctccaggacccggatgagaagtacctgctgcgattgctagacaagacggtaagttgtgaagaagtgggctagggcagagagtggatacttagtttgagggatagcatcgagagtggttggattgctccaaaagacttggcaggccagacctgcctgatgaaacatcttgtcatctatcctctagacagtgagccacaacaccaggaggttccgctttgccttgcccaccgcccaccacattctggggctgcctgtgggtaagaaaaaagggagtgggcttctctacttggcatcgtatgagggcgagtcacttcttaggtggttttcctgctaagaaaaaccattgcccttctgtcaatccttcagcccatgagggaccactcttttagggtgtggcttctgtgcccctacgcatctctaacctccaggcttctctctttccttaggacttattataacccgcctcctatcccagaaaacacta

SEQ ID NO: 18175 - DNA, 1643 bp, Mus musculus
gtatcctaatcgctttaagctctggttcactctggactctcctccagaaggtatcttgccatttctgaacatctagatagtccgtcgttatcaaaatcaaggccttgcccctctttgagttctggtttcagtaaaacagatcctcctgacactgccagaatcacaaatccaggtacacacagtgatccctttaaagtcaggctcctatcttcaggtgggcggcagggctgtggctgtagtcgctgctccaacctgagacctcaggatcccttctggtcatcccaagggtctgtcctggagacatcacattctcttgctggtatggacctgaagtacgtgttttcctctcctccctgtcctccagactggacctacagcaagggctttgttacggctgacatgatccaggagcacctgcctgccccagcagaggatgtgctgctgctgctctgtggaccaccacccatggtgcagctggcctgccaccctaacttggataagctgggctattcacaaaagatgcgattcacctactgagcttcgcaaagcctccctcaccccatgtgtgcagttgtttctagtcgattcttgaataccaagaggccctagggcctttgctgagagcatcagccttctgtgtctcatcccggaatctgggtgcttgcagaaacaacactccctcagctatggtggatgcaggtcaaggctaagtcactcccttgaagcttcctttatcctaactaatgtccttgtgataaaaggtccagatgaggctcaaggagcagtctctagagccagaaagaaggaagtgtgtgtacatttgttatgaggctgcctagtttctgagagcattatggtcacctctgtgtctgtaatgaaagcaatggacagggcaatgcatttcgctccgtgttcagcacttcatccactacttagatgagtacaggttgagtgcgcttatagacacagtcctacagaaactgtaggaagggaattattttccggaattctagacctcagagaaaggaggctggtgtgtgtgtgtgtgtgtgtgtgtgtgtgtgtgtgtgtgtgtgtgtatctcaggccctgcccaggatagcgtgaaatgattactcataacttaagattgctgcctgtacaaagtgtgtctggctgttcaaataaatggagccgaggccctaatgatctcaaggaatcattgtcgtcgtgtctggggtccttgtcctctaatgcttaaggacattggaagggaagggctcccagcacaaaatcttctgggtgttttagagagcttcttaggagctgtgccatatgctgaaatgtgagctgccaccaggcgcagggctcatgcctgcagctgttctgcagagccagagcccagctcctccctggaggctttagaggtggaggggaggaaacagagggggcttttagagtatggatacccctctctatggtcccttaacttggtcagtcttcccttctttctgtgtacccatcttcacgctaatccttcagggtacccggcatacaaaacaaagtgttgcctttccatttggatgagacgtctttaaaaagtaacctgacatcaccagttctgcacagatttggtgactggaccgagttggcctctctcaggc

SEQ ID NO: 18176 - DNA, 2233 bp, Mus musculus
aacttaaaatgaagaagaacgaattactgctttacaaagatacagaattagcacagtaaggacttcagaggagtaaacaaggagagaggagcaggagccagaagactccaggaaaacatcaggagagatttgtgtttgtgaaaaacatgcttaggatttctttgtcttctctcagtatattaattttgaaaattcaaggagcataaaggaggttccctataaagtggccaacatatcagccagtcccctgctgggtatctccaaggctagccttattcccctgggacttggcaccacctgaagcctgagtgaccacctcctaagcaggttctcttcagtgcggtttccccaggaaagctccttttcactacagcccatctaaaggcgtcgtgtgtgttgtaggtctgggagggacgttggagagtcatcccgtatgatgtgcttcctgactggctgaaagacaacgactacctgctacatggccacagaccacctatgccctcctttcgggcttgcttcaagagcatcttccgcatccacacagagactggcaacatctggacacatctgcttggtgagtgatttggatgaggaaaaaaaaaaagtttgtagtgatgcgtgctgtaccactgggcaccattctagtcatgggttgttggtggcgatgcactcctttagttccggcacttcgatctctgtgagttcaaggccaacctggtttacataggagttccaggctaaccaaagaaataaacaaaaaaggaattccaatcttacttgccaaggaatttgtccatggggagagaataaaatgtttctgaatagttgatatcaggagtctggccttttaggttattgttcaccttacttgatagttgattgctggtctttaccacaagacagaagacccagaacatgagggaatggcgctgcatcttggctttggcttcttgctggaacatctgtgtagtgggaactcatgattcctaacttgccactctaaaaacaaactgccaccattcacagactaatacttttgtggcctacgagtgtgtgcttgcctagctccaagaagccctggctttgactcctagcactgagtagactgggcatggtggcacatgcctgcaatcccagtattcaggaggtggaggcagggaggtgagaagttcagggttaccctagctacacaggggttggcggccattcaggagtacatgaaaccctgtcccaaaataaaaatgtcagggttggagagttagctcagtggttgaaaactcgtggttcttccagaggatccaggttcagctcccggcatgcacgtggcattcacacatcctcacacagacacatacgcagacaaaacactgatacacataaaataaaaataagtaaattatttaagagataataagataaaagtgtctgtcttggtttgtctggctggctgatggcagttcacatagctaattcccctgtttactgatagaaacagtggctgcctcggtgtgtgtagtccagatttcctcacgggtggtttttcctttttgtctcgtgcaggttttgtgctatttctctttctgggaatcttgacgatgctgagaccaaatatgtacttcatggctcccctgcaggagaaggtggtcttcgggatgttcttcctgggcgcggtgctctgcctcagtttctcctggctcttccacactgtctactgtcattcagagaaggtctctcggactttttccaagtaagttgaaaggccagccacagcaagagaccatgtgtgttattgtcacatcttgtcccagggctgagcaggcacttggagctgctggaattcttaacggatccctgttgtgcccggggaagtgaagttttctcttctgttgttagagcaaaatgacaaagtttttcttatagaaactaaaacgtcataataagcttcccacgacctcctcaacagatggaaaccaattctgggatatgttttctactgagacagtagtgtcttttgtgaaacttgaggtgctgatggattgctttcaacaccatgtacctaatactagcttatctttattgactggggccaagtggtgtgtggcaagcagtctgtgcttcagaccccacgcaaggcttatcttgttggccagacggtgctagaagcatcagctatctgccgggcactccatggccctcgctcagcatggggctgtttacttgggtagtggttgct

SEQ ID NO: 18177 - DNA, 2767 bp, Mus musculus
ctctgttcaggagtgttcctgggacttggcttgagtggtgttgtacccaccatgcactttactatcgctgagggctttgtcaaggccaccacggtgggccagatgggctggttcttcctcatggctgtgatgtacatcaccggcgccggcctgtatgctgctcggattcctgagcgcttcttccctggaaaatttgacatctgggtaagaaatgactcttagcggggcctgtgatggtgagtgactggcccgggtcagagctctgagtaggtggtgagagagttgggtcatgaagtatttaagtgtacattgtgtctgaaggaagaggatgggcaagatcagccctggtgtcagagtttcttataatgctctagaacaagtatcatttttatgacgtaaacagtttttatggagaaagcagaagaggcaaatgtttcctccaactcctctgtcctaaaggtgggtctctgtttgttcccacagttccagtctcatcagattttccacgtcctggtggtggcagcagctttcgtccacttctatggtgtgtccaaccttcaggaattccgttatggcctagaaggtggctgtaccgacgactcccttctctgagcctccccacctgaggggtggaggagggacttcccaagtgcttttaaaaataacttctttgctgaagtatgaggaagagtctgagttgtctgtttctagaagaaatctcttagagaagtcagtaccagtgacatgtcagctcactgtcccagcctccgtccgggcagtacacttcccatgtgcattcccggcagtcacctcggcaaggcaactgctgctccttcacagataggacgtgggagctcatgttgagattttacccattcctccagccattttgggaaaaaaaaaattatgaactgggattcttcagaaattatgttttgttttttcttgaagaaaatatcccccccttacccccgtccttactttgtaacctggctgataacgggccatccatttttgtagcacacttttcagaaacaattataacctggtcccatctttctaggacaaacaaagccacgccttgatgtagcccggctaatcatggaagtacgtccaggcttcaaataacttgagtttaaatccttttttttttttttcttggcagagtaatgtaaaattaaaatggggaagatatttaatatttaatactaagctttaaaaagaaacctgctatcactgctatgtatcttgatgcaaagactatggtgataataaaagaaagtatagacaacgcttggcattcaaagagttaactgtgttgtctccactgtttgcacacaactcctgaggctcgaggtttctgaggactcagcttctactgagatacaaatcggaatcataccagcagtgagacgggtgtggtcagcgaatgagcataactcagttcctaacctctcatctctaatacaacttagtaccatacagactcctgattagtgtccctcagatggtagagtgtgtgcctagcacccacaaagccctgggtttcgtcaccattatcagataaaccaggaatggtaggtcatgcctataacaccaataccaaggagattggtatatacatgagactgtctcagaaaggaaaatcactgtgttaccatagtatttttggtttttcgagacatggtctctgtgtagcattggctgtcttagaactgaccctgtagaccaggctggcctcaaactctcagagatccccctgcatccacctcccaagtgttgggattaaaggcatgtggcaccactgcctagtatagactatgagagtctccagtgttgaggcataccctagaacttagttttagtaacactaccttgttggtgctagagaatcattcagttactgctcgctggagagaaaccagggaaggcggcatgtgattgtgctctcagagctgagggctcaggcaggtagatcactgctccctacgcagcaaacctgcatagttgactagtttcagggaatcggacagtgcttccagaacaattcttgagtgtaacctcccctcctcggcctgaaatctggctgatcaggtttgactgttagtgctaggagagcatcaggggtggagcctgccaccctatcggtctgccactcccactgctactgcctgccttctagcggttccggagccgacttgaggtcacctgaaactggactccaaggatgatttggctggaatgggcccctcccccttcttcataacccagtgtctctgaatagtaaaattgaaccttgatcaaactgatgtcttggttccattctttcccgcgccgcctagttccctcttctcttccagattccaagatgccttccaggctagaacccagacatgtgggccactggccggcctcaacacttgagggtattggcctgaatgtctgtactccttcatatacacccacccacctacctgcagaagcccaccttgtttactgtgattgtctcaccaaagagtaacttactatttcgtgcctttgtgaattatactgaacctgattaagaggttcaattcattgggtagtgtaagctggtagtgactcagcacataaggggggggagggggggagccaggaatcacacagtgtaactgtataacactatgtacaaagtttcaactgaggacaagtgatcctttgaagaaacaatttagcccagcatggtgatacacgcctttaatagcagccgagccagaagcagaaaagt

SEQ ID NO: 18178 - DNA, 1383 bp, Mus musculus
tgcacctacgtgtctgcctttgggaagtcctaggtcttattgtgcctgtcacttttctggtggcataatacatactttagagagtgcttcttactttatctatctatcgtgtataatctaagttctccaaagatctgaatctgtgtgtcagaacagcacagaatctaacacatagtagttgctgaaatgctgactgaacatactttgaaagctgaaatgttatttatgatgataaagtgaagttcttgcttcagaggcaactacaaatgaaaattatttcaattttaattaggataacagatttcctctcccatgtttactaaagttgcagaaatgaccagacaaaaattcaagaatggatgcagttctgaaaagaaggccaacatgtgactcatcatttattaaacactgtctctgttcttttttaaatttaattttatttataattcactttttatactccatattccattccctgctcctccccatctaccctcaaccgttccacatcccatgcctcttcccaccccaccccaccccatcttagttctttttaaattgcatataattctcttcctgtatctgaaaagactgttttcccagaactttcttcatatttctgggagatgggaaataacagtaatggaggacaggtagcacaaaggagactaagcaaggctgcctcgagtttgtggggaagtaaaagtctgtgacgtgtgaatctacattaataggtggattctgaagagccagtctttgaggctgttatcaactgggtgaagcatgccaagaaggagcgagaagagtctttacctgacctcttacagtatgttcggatgcccctgctgacccccaggtacattacagatgtaattgatgctgaggtaagtcacataaggcgcttggcatccagaaactccactaactctgcagcctagctactcaaaaccagcagctttaatgcaggcagagtcacctggttcccttccgcaggaatggtggaatgataaagctgggaacgttataggcataagaaatgtttattgcttggcaagtcacatctctgtcacaaatgaaaatccataattttatttaattttgtactgtgttgttgtctttttgttttatgtgcctcttatgttttataaaaaactgtgtactgaaaagcataaaaaacaaaacaaacaaaaaaaccctgtgtattgaccgagcagtggtggcgtacacctttaatcccagcacttgggaggcagaggcaggcagatttctgagttcaaggccagcctgtctacagagtgagtgccaggacagccaggactacacagagaaaccctgtcttgaaaaaaaaccaaaaccaaaacaaacaaacaaaaaactgtgtac

SEQ ID NO: 18179 - DNA, 1254 bp, Mus musculus
ttgagaggccaagaaggaagattcatgctgtcctcacttaggaagacattgttggtgcagagatttgaataagtggctggagctgaatggaatgtaggtgaacccagaagatcactgaagtgtaaattggaaggctggaaaggacatgttatttgatttcacagtctttctaatgtaaaatgttgtaccatcttggcactggagacttgagagattaacagtggaaaaggttagaataagagatgctgtaaatgtgcagagttcaatatacctgtggtaaactagaaatatctgtgattttacaattgtcttagtccctgccagggctcctatagcagtggcagtttggtcttcaaatgggtgaaaagaccatcttcctggcgaatcaagtgctaccacgttactacgcctccacactatttatttggggatgggtggggtggctgcagcctagtagttcaggtacgtgattactgccctgttgtttagggcacacttccactaaggagtgcttaagactgctgtgtgtggtatgttcagttttcttcctgctatatcttctgtacctgtctttacagtgtattttactcatcctgaaacaaaataatcaaggacaattgaaaatcttttgttagtttctataccttcgtatagaatggcagttctaggcacctctgtgtcgtggtgaaactcttgagttactggtatagcaaataggagaatgtggcagcctaaactgggctacactttccttttgctctggaatcccacttttcctctttccttgaattgtgtttgctgacagagttaatttcctttgtatttttttaagaaaacattaaaatggactgtctcaaatggctttaagagaatttgtgggtagtgctgccttcagcagacatgttgaaggacatctaagctcaaggtctttcatctaccctgtttaccttatgcctgccaacaagctcagctgcttctctggcagcatcagtaaaatgtttgcccaaatttgttggatttattgtcctttcacactgtgaatctacatgaaaaagatgcaggagcgcatgaggtggcgcacacctttaatcccagcactcgggaggcagaggcagttggatctgtgagtttgaggccagcctggtctcacagagtgagcttcaggacagtcagggctacacagaaaaaccctgactcaaaaagcaaaaagataaagcagcagccttgagcagttttagcacacatgaattttag

SEQ ID NO: 18180 - DNA, 1713 bp, Mus musculus
agtcgtctctgtcgcaccttgtcctaaagccctttcccctgttttggaacatggaagaacatgcaagtactctaccagtgtagcctggtccctggcactccgcctccatgccttgacccagggctcgcttcttcctctcaacaagagcagcattcatctttttagccatgatgaaaggaaataagatgtttactcgctaatcgttgaaactccaccttttctcattctagaagccaaatgtaataaggtgcacatctgtaatcctagtttttgggaggtagaggcaggaggatcaggagttcaaggccaacctcagctacatagcctgggccaggtgagacactgtctcataaaacataaagcatacaagtatttgagagttcattcgttgtatgtgacctacttgtccacagtaatttattctttttaaaagtaaaacatttacaaatgtcagtatttaaacctattcagaaacacattactttagacacattttcaattctcttcttgagagcccttcttctgggttgatagtggcattttatagtgaagatgaactcgacccttcttcctcagatcttggtcagctttctctttttattagctcctagctacttcagtctctgcaccaggctctcttggaatcagagtagagagtatacggtatacaagaggtcggcctcagccagataacacatgggttactaggaaagacttttttagtggcactgccaccattcattaaatataggttgcaagggccttgggattgtggttcacttggaccttgtctataccgaccgagaatgcaaaccttgtccatggagatttctattgttacgggcttggtgtcaccttttcttattagccaacttaagtcttcaacgtgatttccagttgctctgtcatttctcatctggagtgacctggtagcttaaaaggactctgtataaccaggttcaaatacattgccatcatcccttcttctggggggcctacactgagataagtagacctcattattcctcataatgtcagtgcttagcaagtgggagcagatcaagagttcagggttggcctcggttacatatcgaattcaaagccagcctgtaccacatgagatcctgtttcaaatgaacaaacacatgaaaaaatcaagtaggaactggagaaacgtctcacagttaagaatgtttgctgctctctcagaggacccgaattcagtacccagctcccagcaggaggctcccagctgcctgtaactccagttcatgccccttctggtccctgcagttgcctgcccatgaatggcgcacatacagacaagcaggtgcacacatacaaataagtaaataaaaattttacggattaaaccttgtcatctgttttctgggtgttcttcccttgctgaagcttttgaagggcttcctctttaaagtccctcttacccatgtcttgggcaaggttttactggcaccctgctcgcttccttccccgcccagagtctgaatgggttctaagcgcaaaggagagaccatgttttccagcaaataggcaagcactcctgagtgtggggtttgcaagagaacaactgagacagcccacccgtcaaaaggaacaacatagaagcctctagggacacatgaccactcacttcacaagtcaaactaggcttttaattctgccccccttttaaatatcccagaaacaata

SEQ ID NO: 18181 - DNA, 1209 bp, Mus musculus
ttgtatatgtgtagatttctgtgcaacaaccctactttccagtaaatagactgaactgttggatttggtcaaatgcttaatcccctcacagactaaacaatcccgaaaagcacttgcactttacacagtgtctaggataagcaagtgctcgaagagttattgctctcctcattactctatgtgtctgtccttgctgctccttgtgttcaaggtgttttctctacctggagaatcctccaatttcagtactctgcttctcgggttttactaagcaaatctttcgtgccaaaatatatgacgtgattgatggattgtaactctgttctccctactagactgttaacttcttgagaggaagaattctgaaacttcagaggttaactgaagcattaaggataaacatcccaggcggaaggcccctgcccctcccggctagggggcggggcgagacctggctcggggtggcagcagggacttttttcctcgccgtggcggcggaggagcactgcgtggggtagcggcaagacgtcgtcggaggaaggctgaaaaagccctaggtgttgccgttgctagtagaagtcggacctgtcgcccgagctgtgcgtctgcacgggtttcggacggagcggagctcgctgccgcggttgcggagcctgccctgtgctcgcccctgcccaggtcgcggtgatggagccggccaccacgctgcccccaggcccgcgcccggcgctgcccctcgggggcccgggcccgctgggagagttcctgcctccccccgagtgtccggtcttcgagccgagctgggaagagttcgcggaccccttcgctttcatccacaagatccggcccatagccgagcagactgggatctgtaaggtgcggccgccgccggtgagtcagccagcaccccggatcctgctcgcggctgggggagggagcgaggacgcgcggcccgggaggccggaggcgcgggggcggggagcggtcgtcccgcgggcccggtcaagtttggggtggctccgagggtcggagatgcggcggtgggaggaaggcgcgggggcccccgtcccgggtgggatgtgggccgtgaggaccgcgggctccggcggggcggccggagggggctaggtcggtgcggctccgggggctggtgcgctgcaccgcccggcagcggtgcgggctggagtggttggcagccgccggggtggt

SEQ ID NO: 18182 - DNA, 1152 bp, Mus musculus
ggcgctactgggggaggggaggagccgctgggccggtctggagcggctggttgagtggtggtgggggtgcaagggtcggggtggggggacgacactttgaggatggtgggggcaggccaagcggcgggggccctgatgctcgcaggtcctggcggacgctcccacacggacttggggccggactgctttgctcccggcgcgggggggggggggaggcctggctggggctgaggtggagaggctgtgcttgtaggggagatgtcagacgagctcttggagatttcatcctggtccctagctttccctactcggccttcccggcgggggctctagcgcctcgagcttggggggctctgaggggtggggtgtccccaagacggccctaacggctgcaacgtccgcggagagcccggcccactccttccccgtccccgtccccctccccgtaccccctccccccgcagccggaactggatgcgctgcgacaccccaggtttttcgcctaccttttgggatgacctgagtctgagttggcctaaacgaccgttggaccggccgggtcggttggaaaggtttaactgccttgcctaccgtttaagaattttctatctttccctgctctcaagtgaaaaagacccccccccacgccttttacccctttctcccttaaacttgctctatgtaatggcattttgatttaggggattgtgtacgtagacgttctagaaaagatgtttgcgagagatccctgaataaagccttatcctttcactacccccacgaaagaaaaattaaaacacagataccatattttagttgctcttggacaactttgaaagcagaaatgaaatgcctcagaaaataactggccaggtcagctagtatggggggaaatgtttggaaatagattcatttcttctggtgaaatggacagaggcgatggaaggtttcttttactgtagaggcctgcagaagttacacccttgcctggttagacctagggttttgattctgaaatgtggaccacgtttcaaacattgagcgatttagctttatcttaatgtaccaggaaagatgaatgtgactgttgcatgcttgcattaatgggatttttatctagaaattaggaaacttgacaaagttattagaaac

SEQ ID NO: 18183 - DNA, 1160 bp, Mus musculus
ctacagatggttgtgagccaccatgtggttgctgggaattgcttctggaagagcagttggtgctcttaaccaactgagccatctctctgctctgacattttttcctttatattatatatgggctgtagagatggattattattaggtaaagacactcaatgccaaacttcatggtcagacttcaatctctggaactctggtagaaggtgagacttctgatttggacatttaaggtatataatttttcccactcctgttgtttctgggggttggcgcatgttaaacacctgcctagctttactagcacccggaaagccgggtattggggctgcctgccagtgcttagatggtcaaggtctaaggtcatcctccactaagcgattaagaggctacctgctcacatgaagaccctgtcagaacaagagaagacaaaatgaaaacagaaactcacaaaatgaagtaacaattcaaactcttctgctctctgtaggtggacctgtatgtgtgcctcttatgtggaagtggcaatgacgaggaccgactcctactgtgtgacggctgtgatgacagttaccacaccttctgcctggttccccctctccatgacgttcccaagggagactggaggtgtcctaagtgtttggctcaagtaagtattaatgactgagagggagaactactttgggaagattttcctttgcctgtgggttttagattcatcgataataagtccatgaacaaaacaaggcttggaagtgaatgggaaaggaatctttccaagttcctcagtgtatatatgttcttcagatacattttactcctttaatcaccatgttatcaaatgcaattttttaacgcatgttctttgtaggaatttatgagcacttaaaaaacttggatgatttcatatgacatagaaaccgtattaatgttgtagtgtgaattcatgcagatttttttttccatttcttgctccatgtgtgtgtctgtgtctgtctgtgagtctatggtttgagttgcaggacctttgaatctgtcacagtgcatgtatatgtgcgttcctctgtgacagggtctctgattctgaagctgtcacattcatatggtgacagctatgcttcagctatctccctatctcccctacccatcaagcgctagtg

SEQ ID NO: 18184 - DNA, 1379 bp, Mus musculus
ttttatgttttctgtatagctatagtgtaacatgagaagaccacacaaggacaggttattatggaagtcagatagcttccatggtgttagataaatattaatatttaaatgtttaagtatttaatacctgtgtagagatgacctcctcgttaaatggtctgaatatgcaaacctatttgactccattgtgttggcgagttttatagtgcatctgtaacctcttagtgttttggttattcctttcggtagcattatttggctatcattaaatgtttcattctgagagctataatatttcatctacttactaatttttattttggtaagtttaagttgatttttatagtttaaactcttgaacattatcaatccccttgttttcagtaatgaagacatttgatcatgaaaataaatgaaggttaaaaaattgtatttgataaaatgtattttatttgtaccactggaataatctcattcttcagacatatttgatttttcttatgtagactgaatttaatgaaaaagatcttaaaaatctttttaaaaattgcttttgtgactgttggctagatagattagtcatttgaaagtgtcacctggaaaacagcttttcttcttcccatgcaggaatgtaataagccacaagaagcttttggttttgaacaagcagcaagggactatacacttcgtacatttggagaaatggcagatgcattcaaatctgattacttcaacatgccagtccatgtacgtagattgatttagaccttaaacatttttttgttatatgtgtgtagcgggtgctcaggcaacactgaacatgtagaaatcaaagacaccgtgtagaagttggttcttttctgctgtgtgggttcttgggattggactagagacatttgcccatctgtaacttacgttttattttatgttacttttttgcgatcagacatcatttatgtagccgcagtcagcctggaattcactctgtgaaccaagccagcctacagggccactagcacacatggactaattacaccttttgtttgtttgcttgttttttgttttaaacgaggtagctggtgaggaaagagttaatatggatagtgtatagacagtttctctgcaactccattactggataaagaaaagcttcattttaataacagcaaacaccaatatgaagtcctacagttcctgtagtccagcagttgcaacttaaagaaagacagtatcacaacactggtggaaagctcgctgtgtatcaagtaatgcagcgtgtgctgtgtcttgcacccttgctgtgtctggtgcactctgttgtctaatcttagactgtaaattttactataagactccatggttactccttgtttatttag

SEQ ID NO: 18185 - DNA, 1199 bp, Mus musculus
gagagcagtggatcccctggatctggattacaggcccacgtgggtcctgggaatcgaacccaggacctctgcaggagcaatcatttaaaaaccccctcaaactgttattttactttctttggcctctctttgtaattgtggctaggttcatgatcagtgaacatgaatttttaactttttgcaagacagggtttctctgtgtagtcttggttgctctggaactctctctgaagaccaggctggctttgaactcaaagatacccctgcctctgcctcccaagtgctaggatcaaaggcgagcatcaccactgctcagctaattacagttcttaactttaaaatttattatagaaaatggagttgttgcctggatagagttattcacctgtgggaaattatgaacagatttttttgcttagaagtttattctgtgatttccatctcttaactagttaaacagtttgtgaatgaaaaaattcctcttttaatttccttgtacttgcagatggttcccacagagctggtggagaaggagttttggcggctcgtaagcactattgaagaagacgtcacggtggagtatggagctgatattgcttcaaaagagtttggcagtggctttcctgttcgagatgggaaaatcaagatttctcctgaggaagaggtaggctccagctttcaggacttgtgtgaggtggagctctgtgtcgaaagcacagccttggactcgtgacatcctcactaagaacagcagccttgaggattgttagtgaaattctgtttggctagcttgaagtttgttgttgttgttgttgttgttgttttttttttaatttttgagtacacggttgctgtcttcaaacacacttgagggggcattggaccccattacagatggctgtgaaccaccatgcagttgctgggaattgaactcaggacttctggtagagcagtcagtgctcttgattgctgagccagctccccaccccctgaagtatttaattaaaattactttcagcacagccttaactactaaatttatttgtttgtttgtttgtttgtttcaagacagggtttctctatgtagccctggctgtcctggaactcactctatagaccaggctggcctcgaacccagaaatccgcctgcctctggctcccgagtgctgggattaaaggtgtgcgtcaccaccgcttat

SEQ ID NO: 18186 - DNA, 1254 bp, Mus musculus
tcagacacaccagaagaaggtgtcaatccctttacagattggttgctgggatttgaactcaggaccttcagcaaagaatagtcaagtgtccttaaccgttaagccatctttccagcccaaggctgaagcttattaaagcttgcaaactagtaacaaatattccagccttaaaacttggtagggtttcaggttagcactgttgtttgaggaatagtactaacattaccagttaaactccacattactcggtaactcattatcaatatatctttttcctaaaccagttttcaaataagttacctaatgtgatagacctttagagcacaacaatagacccagggctctgggaatctgagtctaatttagggttgataagtgataggtgttttgacctatattgtattatttggtaatatgatattgtaagtcagaagtctttagaaattaaaaaagactatgtcattttcttgtgccctgtgtacagctgccattgggccgccagtgtgtggagcattatcgcttgctgcaccgttattgtgtcttttcccacgatgaaatgatatgcaaaatggcttctaaggctgatgtattagacgttgtggtagcgtcaactgttcagaaggacatggccatcatgatcgaggacgagaaagctttaagggaaactgttcggaaattggtaagatttctggaagtccaattccatgtcattaactgtgattttctaagtcaagttgtgttttctactactgttttaagaagcttttccacgttgtatttaatggctacagagctgccgggagccctcctccggcctggagagggtagtggtatagtcacagagtaggactctggtgatggctttaaagtctgagggccccgggctttcaagctctttaactgtactgaaaagctaaaaactttcttgctctttctcagggtaaaaagactgctggctaaggtgattaacacttacagcctaacaaaggattaagcagtgtggcctttgttctagctcagcaagaactgctgggctctaactgctgggcctgctagtaggaagttgctggaagaaattgggacacttagagaggtggttatagagtttatactaagttgtaaaaagtttcctatgaaaactaaggggaaagccaaaaagatcctaagcggggactaagtgtggaaaggcaaaaaattctctctctccttgtcctcagcacttatacatctttcagaatacatgatcacatggta

SEQ ID NO: 18187 - DNA, 1193 bp, Mus musculus
cttggaaaggtatgttgggaggaggttgtagtaggggtagatgtaattaaaatacactggtagccaggtgtggtggtgcacgcctttaatcccagcacttgggagtcaaagagaggcggatttctgagttcgaggccagcctggtctacagagtgagttccaggacagccagggctacacagagaaaccctgtctcgaaaaaccaaaaaagaaaaaaaaaaaaaagataaaatacattggtgcaaaattctcaataataatggtagctaatttctgcaacttgaaaaactattcttgacctgtggaatgtggaatttacaagttaaaattgtgtataaactatatgttttccattctcagcaaattcagagttggtatttggtcttctttaacctcaactctttccagaccacagaagtccttttcagtgatcatgattaaaatgaaaaatctgttcattagcattttttactttgtcttgtcattgttgatttaacgtgtaattgtcagaaattattaaaatattaatgtaaaaccaaccaaccttccttccctccctctctccctctcttcctttgtccccttcctccctccctccctttcccatttttactttgtttgtaaagtatgtgtgttggtagaaggccttagatctctggtggcagcgacaggtacaggtggctgtgagctaaggtcatctgcaagagctgtgttcattcttcttaatcctagagtcatctttcaagtgcctctatgtatgtgtcttgaagatgctagggatcaaatccagggctctctctgtgcattgtaggcaagtgtgccagtgtttttacttttcctttgtgatagaaagcatgtgtctttagctcttcctctctgtgccccaatctttctgtaaggtaagtttggtgtaaggttgctaacttcagcagtattcatttatcaacaattttattaatgctcaaatagaaataagtggttagacttgaggacctgcctcatccaaagaaggattctccttggacaagtagaataatgtgctattattatttttagattatttagttctttttttttttcatgtatgtgagtatactgtttctgtcttcagatacgctagaagagggcatcacattacagatggttgtcagcaaccatatagttgctgagaattgaactcaggacctctggaa

SEQ ID NO: 18188 - DNA, 1154 bp, Mus musculus
ttctgcatgtgcacgtacaatgatgaaagccatacctgctttcaataacttgatcatttgaaatgagtgaacttgatatgcagtgattagtgccattacggtttttttattgttgtggtgaatttcttcctagaaatgatcttcctagtcttttggcatctataagaaaaatgcagtttgtggctggagagatggctctgtagttaggagcactggctgcttctctagagatcccagtacccatgtgccagttcaccactgtctgtaactccaagggatccatgacaccaggcaggcatgtggtgcacatacatgtgcgtgcaggcaaaatactcatacacataaagtaaaataaatcttaaaaataagagagagaaaaggaaaatgcagttgtgaaatgtctgtgcagttggaaatgtctctgttttgctttcacagaccacggcattctttgagtagccttgctacagcagtcaaagagatggaggagatccccgcctacctgcccaatggtacagtcctgaaggattctgtgcaaagagccagagactgggttcaggatgtggatgcattgcaggtaggttgaaaaagaaaaacaacatcctgagtctgtctgtgctgttagtgtgatttcctcctacctggacaggcctgggtaaggctttcagagtttgacagcagtgagcagaagaataggcaggcggaagcaggagcaggaggctgtagtcctcccaacctggtgtctgtggcccttgatgctaaaggttcagtagctctcagtcatgtgcagtctcggcctgcaagctggcttcttagagctgttgtccctcatctctgtgttgtttttggctgagatgtttggtgtgtgattgttgtgtgtgtggttatttttcttgagtgtgttcacttgtcatttagttcataaatgtattaaagcctttttaagatttgttcatcatgtgtatgactgttgtgcccttatgtgtgtctgtgtgtcatatggatgcctggttcctgaggaattcagaagagggtgttgggtcccctgggactacacttacatgtggggcctgggaatcaagcctgggtcctctgagccacctccccaaggacagttatataaatctttctttgacaatttccccaacttcttc

SEQ ID NO: 18189 - DNA, 1126 bp, Mus musculus
tttctaacccatagacctattcgtgacttactgaatcagaatgtctgggatgagaaccaggaaactgtgtataagtaaatgggctttccacatgattcttatatgtgctgatgttttaagaaacattgggttttctagcttatattttaatttcctgagtaatttgtactgacttgttttaggaagtcactagtgacaagtgaattggaataaaatattatctttaaaagaatgcaagtcaaactcactctagtacaaatatttctgttgagataaatttctttgatactgttcatagaaaccaatgtgagagaccttataggtataaaaaatttatagatggatataaataaacagataaaagagataattgtgtcactttttttatcctttggagcctagcattaagtgtttgcccacccttgctgaatttaacatgttttagtcatggagtcattgaccatgagctacactgaagtatacttttcctattttatgtagaagtatccttttcttaatttattaggcaggaggacgtgtgccagtgttagagacactcattgaacttgttgcaagaggccgatctatcccagtacatctcaattctttaccaagattggaaatgttagtagctgaagttcatgcatggaaagaatgtgctgctaaaacattcttgcctgagaattctacatattctctgttagaggtaagtttgcaatgagcttgtgtgcaggaactttgatctctagtttgaatgagtttatagcaagcaaaagtgacctcattggatctaattgtgagtagtttttaagcaacctttgaatgttttctggcttcatttaggatatagttgagaacatttttttcattaggttttgtgtatgtgtgtaagataagtctctctgttctcagggattcttgaattgtggcagtcttctgccctgcctcttcagttcagggcttgcaggtgtgtgcacctccgcagctggctgtgtaacagtttctatttatgctcaaattagactccagtcctggctatgattcaccacctttgtttcatgtgtatggctggcttgcctgcatgtatgtctgggtaccatttgtgttcagtgcccatggaatctaa

SEQ ID NO: 18190 - DNA, 2062 bp, Mus musculus
cagacatagtcttttcagcgaggtaaatattctaggcaatatatgtctacaggttggactttaagaggtggtgcaacatgttaagtaattgctgagtaaatagttgtatttactatgtgcagaacagagtgttgtgtctcatctcagtagggtctcaccatagaccttgttggcttgcatcttgctgtcctgttcatttagccatagtagattgtaacttagccagaggcagagcttgctttggactggaatgcagataggttctactctgtaacctatctaattagctttttaggatcatgagttgtgaaggaagggatagttctgtgacagtgtctttgttggccttttcagatggcaactcttggggaagctcgcctacgagagatggaagctttgcagtctctcagatttgccaatgaagagaaattgctgtcacctgtccaagacttagagatgaaagtctgcttgtgtcagaagactccagccactcccatgattcagtgtgaactctgcagggatgctttccatactagttgtgtggcagcacccagtatttcacaaagctcccgaatctggctttgtcctcactgtcggaggtcagagaagcctccattagagaaaattctgcctctgctggcctccctacagcgtatacgagttcgtcttcctgaaggagatgcactccgatacatgattgaaagaaccgtgaactggcaacatagagcccagcagctgctttcttcagggaatctaaaacttgtgcaagaccaagtgggttctggactgttgtctagcagatggccagcctcagcaggacaggcatcagcaacagacaaggtgagcctgcactttgtgggatactgtggtctgcatagctctgtggttctgtctggtgtggccattcctgagaccatcccctaccggccccagcattcacgacactggcctctccttttaccttacctgggttctgaggaaatccgatcatcaggcttaggcagcacaccatcttgctagccctgcttttcctgttttgagcagaagtctcagctggcccagaatggtttttgaatttactgtatgtgatcttcagctactgtcctgcctctatgctggggctatgggcggcatgtgagactgtttagttctggggcctgaaagtaggacttcatgcatcagacacttgaggaagccaaccgaattgcacccccacactgaggagtctgtctcagacatgctatttctgttgtacctcttctgcatataattctacttcattatctgtaagtgtatgcatggttagtttatgcatatacatttttgcttggttgaattttctttttcctttcatgtaagtcccgggctggaaagggaaaccgccacatgcctgtcctttaagggagaataatgtgtgcagagttcagatgcgtttacacgcttgtgtgcgtaggcctctgtggagctgtctactttggttttttgagtcggggtttcttcactaaaatccaaggctgaccgaccagtgagctccaaggacctgcttgtcccctattccatcgtgctgggactaagaacatatgctaccataccgagcttactgtttttgtctgcttgcttgcttcagtgtaggtgctggaaatcaaactcaggtgtttcatgcttatgcatgaggaacacattataaattgaaatgtcttccctgttcacgatcttcttatggagaggtagaaccttctaccagttaccctgcaggtggtcaggttcccttggctcctgtgtgggggctgcaggaagagtggtggtaaggagagtgcagttagaatggcagtagtcagttccctcctttttctttagatttgttatttatgtgtatgcatgtttgccacatgtgtgcctggtactgacagaggtcagaagaggacactggatcccctggaactgggtgctgggaattgaacccaggactctactggaagaagtgctcttaactctgagccaacccctacagcccctttaattttttaaacagttcctttgatcctgtgagtcctggttattg

SEQ ID NO: 18191 - DNA, 1153 bp, Mus musculus
aacagcctgtcctacttgagcttttcctctgctggcatctgagtagcagcacctgatgaaatattgcagagttccgtgcacttcttgaccaggggtgttctgagaggttaatttgattgattataaagggaaaggacaaagttgtgactggtttctgagacagggtttcatagaaccatggatgtcctcaacctcctgattctcctgctgttccctcccaagtgctaggattacaggggtgtgccaccatgtccagctcatgacggttacacgccggctgagtaatttgtcgtaaagttacacaagcactgaaaggtggtaggatcttctctctctggggtcaggctgagttaacttggaaagttggatggctttgtttccatgagagtgggtttggctgggttttaggtgctagaggagacttactgaaaaaaagaaaaaaagaaaaaaaaaacccaaagcctcctactaaggtgtttgtcttccatcaggtgtctcagcctcctggcacaacatccttttcattgcccgatgactgggacaacagaacctcatatttacactctcccttctctactggacagagttgtctccccctccatggtttgtattttattttgtactattcctagatgatacaaggccatctggcctagggttttataatagatgatctggcatcctaaagagcaagtatggttttacatgtgtgtaccatgagcattgtggaggcagaggcgggatttgggctacaaagcaaggaagacatattactgtacattttctaatgttgatcatatttgaagatctataaacacaaaggatacctattctgatttattttgactacatttaagttagtcctgtgccatctagcaccaagcaccgtgtattcagggcagatgctaagtcatggacgaccttgtttgcgattctggaggatattgaaagtcattcatattttaaatctacctctttccattcccttatgggtggccttaaatttaatctttagtcaaaattatctcttttttaaacatttgttttttattttaattttgtgtgtatgggtgttttgcctacctgtatgtctgtaccatgtgtatgtggtgtctgtagactgtcagatctcctgggggtggaattacagaca

SEQ ID NO: 18192 - DNA, 4962 bp, Mus musculus
atttggtaaaatggacggtctgtgtatgtcttttctctgctgttactagcaggccgcattgaagtttggtatccccagctcgccaacagtgctgagcgaagggagttaagctggctgtggagactgaagctgtggagatggtagcagcggttaggatgcagggttctcatttgcacgtttttctttagttcagttttggtaatgggcaaatttctttagttcagttttggtaacgggcaaactgagagctaacactgaatttgccatctcccacacagaacgattgccttcgagggaaacgagatgcaatcaacagtcctgagaggaaactgaaaaggcgcccagaaagagaaggccttcctagcgagcggtgggatcgagttaaacacatgcggaccccccaaaagaagaaaatcaaactgagtcaccccaaggacatggacagtttcaagttagaaagagagcgtagctatgacttagtgcgtaatgctgaaactcattccctgccctcagacacatcctactccgaacaggaggactctgaggatgaagatgccatctgtccagctgtgagctgcctgcagccagaaggagatgaggtcagtgaggtttgggccatagaggacgcgctttcccctaactcagaaaccctgtaagctagacctcgtctccttgggtctttctcttctgcttgtctgctttgagctgatctgagtggattgctcagttctcccctcctgataatctctgcttttaacatcgtcctgggtctcctccttttcttgaagaaactctcgttcttccttttatccttctctcgctcctccagctttcaccgtcccggcgctcagaaggtgggagggatgctgatggagtgagtgcccttttgcttactgtcacagggcagcactgtctaccccaaagcaggcacaacctgaagagtgactctgcctcccagctacactcctgtggttagctgttgtgccagaggccccagtgcggggacagtggcaaacggcctgcccgattttgaatggcattgtttcctctgaaccccccatctccctgctctttgtaaccaggtggactgggtccagtgtgatggcagctgcaatcagtggtttcaccaggtctgtgttggtgtctctccagagatggcagagaaggaagactacatctgtgtgcgctgtactgggaaggacgcaccaagccgaaagtaaaaacaaaacacacactcacttcatgtaattcaggactccaataaagaagatttcctcaatctcagcaaagctacaggactggggtcgagccagcctgtacacggtgctatttctattccttatgggatcatttttccagaactctttgaaaaaaagaaaaaacaactaaaaaaattttgacacttttttgtaatttttttccttaaaagctgtttgtggttgttgaagtttaaaatgctgactgttttttgcaggggtctctactgattacgaaggtattggagtttgcacctttttgtgtacagcaaaacattgtacttctgcctgggatatgccggcttaagagtccaactcagtttcagagcccagcaggggcaccagaattccagtaaccctcacagagcagccgcgctcctttgtctgtcaccacattggggggattttaagtttttactttggggtttttgttcctttctttctccccttttcctttctggtaggctaggtttatttatctcagcaataacttctatgttggtttcagtggctggaattaaaacaaaacaaacttctaaacagtgtgttggtgctttagcatttggctcatgtacagaaagcaaatgtctagtttctggtgtcactgcactagtgatttaggaagagactgcgctgtaagtaatcgcccgccacggctgtattttggctttctccctactcagtcccccacccccaccctttttttttttttttttttttggtagaatgtatcaaatgttgcagtttatattgtggaataataaatccttggtcctattctaacactagactacagcttcttctgcccttccacctcgtgggcctgcagaaccagaagggttgcttgcttctgcttcttcccaggcaggcagccgcagaagtgtgtttgctctaggagactctgtagccttattctctgggtgggcctgtgccttcatgccccactaataaagaatccctgtctttaaagaccagagccagtcctttaagccatgttctttttcagtaagccctcagaatattggagtggtccccaaatcactccagactgtaagacagctctcctatggaatgcttttattgtcattgaattgacagggaagtttggttgagatgtggtccatcatcttagaggctcagatctgttgtatcagttgagggggaccttgggcctgcctgggatttctctgccatctatgtaatttcatcagtctctctggttgtggacagccgataccagtttcccctgatctgcagagaggaagacttccagtgagcagaacaggctcttgctcacttttctcctaagttgttgcaagctcttgttttcctcactgtctgtagccataagcctgatggtgggcagagttagcagacctttaataaaacatcaaaaagcagtttgtgaaatagcgaaaatttaaatgtactgtcccctatgcaatccaggtaattaaatctgtttaagaataacccagtggtctgcagtgtcctgcagtgctgtgatgtctcttcttgtctggggatgaaagtaagctttgaagagggcattactgagcctggggtgcaccttagtgggagagcacaagcaagactctgcttcctatgcgtggcactgtccaaggaagtaaatatgtgtcaaagaagatgggatgctgctgaaacccagtctgatggctgagaactttcacccattgagatgagccctctgtgtaggcctggctgtcctggaactcactctgcagaccaggctggcctctcacttagagatccacctgcctctgcctcctgagtgctgagattaaagccatgttccaccaccaccaccgagttccctctgggtcttaatggttgttttgcttattcatttgaattttaatggggtccaatctagctctgtagccaagagtgaccttgaacttctgaattcgttctgaattcttctgacgatgtttttaattctgtagctaaaacgtgtgcatcactgtgcccaatttctgtggtgtcagggatcaaatgtgagggccttgtgcatgccaggcaagcactctgccaagtggactatatatgcgccctcaccagcttttctttgtgtaagccttgtgtatcatgtgtatctgatattagcagatttgctgatatgataggagatagaaccatccccttcccaagtgggaatcatggtttgtttgtatgtgttgataccaagtctgaaatgtcagctgtgtaaaatgaaatgaaccctgggattgcttcagctttgccagtgcatcctaccctgtgcagtaccaacactgcacacactgaagacatccagtttcaactcaggccacccgtgtgcctgacagaagctaaggttttataaaaagaacacattttactatgttagctttgaagcttgctgataccttagagtagtggttcttaatgagttggtcacaacccctttggcaaaccagtctccaaaaatacaatacaaaaatacaaacagaagcaaggttacagttatgaagtagcagtggaataaataactttatggtcaggaatcaccgcaacctgaggaactgtgttaaagagtcacagcgttaggaaggctgagaaccactgccatggaggaatgctggataaatggagaaagaaggtaaagtaaaatagccactgagtttctaccttaagaggccctgcaggagagaggactggagttagcacctgagtcaggaagacgatggcagattgggcagatagactagagaagtctactagctagaccagagagagtgaagttccagttttaatggcggacaaaactacaaaccttcattctgtcactgagcatggaatcccggattttgcctcagttgaaggtccacttggattaagtagcatgagcctatataaaaatcaaaacacggaaagagaggggttaatagcttctggtttggtagaatgactaagatacatccaggctgcccaccgctgaaagtggggttgtaatcccagcacctaggatgctgggtcaagaggactgtggggccgcagccatcctgggggacaaagtgcaaacagtgttggtgggtgattagtgtgtgattagctgaataaacagtattcatttctgtggccgtggtagaaactgggcctctcagcagggccgtaccataagtaaaagtcccgtggactctattatctcccaccctaaccaggcttctgcaacaagcacctttccccacgagccattgccagccctgaggccttgtgcaatggatatttggcagacttagaagacctgcttgtgtcttgggatggacatggagaagtttttggtgcccatggatgttttactgggcccagtcctgcctagggttgttcatgtaatttgactcttaatagattcctatatacatgaaacaggaggtgtattggacagcaggtattttaaatgggcacaaagcatgaagccagagctgagcagtagtagctgacataagctagtcagcatatattaaaatgttctgttgagctgggatgaaactcgggaaaaccacttgccaaggaccagagagaggccttaggtttggtttccagaaacatcagaagaaaaggtttccttctgccacaatgctgcagaaatagaatctggaatattgcttgttgaagagtttcggaagagagcattgaagaccccatcgtcagcatgttatgggct

SEQ ID NO: 18193 - DNA, 1194 bp, Mus musculus
agtttaatcctttcctggtcttggccacactgcccctgactctgtccctaagcattctgaagccttactggtctttgtcatctctgtctcagcacagacagataacagtctttaccgtgtaagattggagactgtgtactttccacttttaaacatctataccccaggcgggaccagcagcctccctgttgccgaggtcagactgctgctgtcccctaagcccaggtcctctagagggaacttaaggatgtaagacagtccttatcatcccaggagggtagacccccatccgtccatgtgactcagaaactccatgtccttctcccaaacccaaaagagaataggctgcaaccccttcatttcgagctggaggccagagctccaaaaccaactcacctccctccccaacattgctgacccttgggggctccctgccccgccccgcccaagtccactaaaaataaaaaacaaatagaaatgctccccgcccccaggttgctttcagctcttttctttaataaggagacgcagctcattacaaaataacaatttgacaagagatcagacaagaacaacagagtccacataagggaatggagagagcattgccaagcagagtgggaacggggagggctacacacgtccttcttaggaagacagggagggctcctggcggggccagtgtattccaggggggacacagcttgctcagcttctgccccagttttgaaagtttctgggcccaaggttttcagaaagcaaatcaaatccttaggtgagcaggagttagggcagaatggtcaggcttgcaggtcctttccctgaactcctggctgctgaggaaagctgggggtgaaactgaggcccacgcactgctcccgccaccttgccagactccgttctgctgctacagttcccaatttcagtttctgtggagactggagatctccagccagccccaccttgttgccctggccttgcccaatacacttgcccaattctttctgaggtcccctgtattagtaacatacgactggcttcttggggggggagggggcgttctgtgggtgcccaagctgccccagccctgtctacccatatactcattacttgccatactgctcaggctgccctgggagctgaggtgaggggcagagcctagtgttcctcagttgtgagtggccccttttcacc

SEQ ID NO: 18194 - DNA, 1207 bp, Mus musculus
cctggtgacccagcgcctggctgcccaggtctggcatttcctgactggaatggggatgtacagtttgtcccagtgtgctctgtctcttgctcctcatcgctctccccgtttcccaaagcacttctcccatccaaattgggaatctgccagaatgacattttgttattttgcctctaaaatttcccctaatgtttccaataaaattttgcttgggtggccccttaaggtgtcaccaagatgctaaccgaggcccctccaaaataagcacacctcccccttccttccctctcagccccctccacacgccttaggccttgcttctacacttggacttgatggtgctcgagggaagaggttttccattaatcagccaagagtccttgaggattttcaaatgccaacagcatgtcattctgcccaccacccacggctacccccgtctactttcgaaactccctggctgtgctagcagccctcaaagacaaggtttggcttataggtcagcacgacccctctgtttcagggtcgtgtctgctcattctatcttttctgaaagatgtgactggtaccggctgaaggcagaagtgtttcctcagcacaggctggacgagtttatttgcatcgtgacagccactcagccaagcaggagagaagatccacaaaaggtccaaccatgaggagtgagaagagcctctgacaggcatcagagctgggatcctgaccaagggacactcaggctgccaccagcttgactctctccagagtgcgtgtgtctgtgctgttctccaccctgttctcctgagaacttgagcagaaggtacccagcctatcctaggataggggagactatgtgaaagcagttgtagtaaaggtaccagaaggcacagggtacagggagaagattcggagaggatgcacccgtccaacatggccacctttctagtcagcatcccttgagcccctggcagctcagccctcctatggctggcacctctcctctgcagggtcagtggttcagacccagctttggttttacgttttcttccaggcacgtgtgctccgctccaatcctggtcaccacttcagcactagcattttgtatttcctctctctacccttcacccatgcttgatgcaccgagtggagctgttcgccagccgagttgtgtggattaacctcagtcaactgtaaatacacctggaggagg

SEQ ID NO: 18195 - DNA, 1422 bp, Mus musculus
cagctccatcccaggctaggggaagagctgtgcacattcaagggcgttgcctctgaagactctgaagaatagctctgtcttggagccgcacctccttgcgtctgcctagcagtgggatgtgtcctcaccctgcttgccaagcctcagcccctgagatgcaaggattgctcagtgggattgctggcagcttccactcaggaagtccaggagcagtctgtgggcctcaggagagtacaagaaccagagtgaagggcctctccaagccatgcccctgtggggctctgctctctggcccctctgcagcctttgctagcagagacagctctgaccattgcttgcacaccttttcagcggagggccctgtccacatccatgcccagggatagctgcagctcatctgccattctattctgaagagaagtgcaaagcctcaaacaatatagactccctcaaccccggaagtgaggcagctttgagggcagggtactttaaagtcctcttggcttaaaattctgtgactttattcaaagatgaggacttttttacacttagatttctgcttcaaaaattgcttaactttgaattttcaggatcagtcttgcttttttcccaaattcaggctaatgctggcctgtcagggtcgacctcccctccgtgttagaaagtgaatttaacattgaaagcgactgagtagtggtgtgattgctttccctcctggtggttatgtaaaaatattaccaagctgcagaggtagagatcggagctgctgtgaggcctaggcccgccctagcgtacagtgggcatcctaggaaaccggctgctgctgctgctgctgctgctgctgctgctgctgctaggtttgctcagcctcagactctctgcttggcaccaactcatttctagtctggagctctgccctgggcagcaggagagccttcctcaggctgctgtgggaggtactcttcccaggagacaccatgaccacagcacagatgcacagttggggcttggatgtgaggaaagggacgaaccctggggctgggtgcctgcatgctgtagtgggtaaaaggcagaggaaggtgtgtgcatgtggaacagggtggaggtcggagcctgggagaaaggaagccaggcttctgcacctgcaagtgtgttctgtctcattgagttcgtccctcagctccagctgagcgagattttaatcagctcctctaatgggtattgacactgctcggagcagtcgactctgtcagggacaactattgattgcttgtgttctgattagattggaaaaatagatcaacttcattatagcccagaagctgtcactgtcacagctacaaagggatgaagtggtctctgagggctgaggagaatcagttggcctcctgacaagccagagagtaggtgaaagttgtggcc

SEQ ID NO: 18196 - DNA, 1137 bp, Mus musculus
gaagctagaggatggcttaagggtcagcctgttgttcttatctcctatgtgtctgcttacaaagtggttttctgtactctccaagttgtacaagtaatatgcatctataatcccagcacttgggaagctgaggcagggggatcaggaatttgaggccagctacatagcaagaccctctctccagaaagagaaggcctgggtgttgagtgctccagtttgccttgctcccgttctccactcaggcccctgctcctcatgagaagtggagttgctgcaaggaggcctggggagagccggggcggaagctagactaggggatggaagcaggccagagacgtgagagcatccgaggacacttggagcactgcggtgacactgcctgggtggtggggactgctttctggtggccacatccaggggagaggtcccttcctagaagccaacaggatcagtgactgctgggtagagactggagatgaagaagagtacttgtggactctcaggagtggcaagccccatagaccctctggcccagtgtccctgtgcctccctgctgccataactctgacctgtggtcagccgctgagagctatgtctgtctgtcttacttgaacttcaggcacctctattacattttatactaatagaagctgggtctgctgcttcctgccaggatagcacactaggtgtgggtgtagtggtctctacttacctagtccctgagtccctcctcagatgttgtgattttgatgcctgtcacatcttgactaccatcctctagagtctaggcaagcagccctctagcttatcatgcctcagcatatataaaatatgccatagttctagcacacagttaaactgctagctcttgtcgatgatccagtgctgatgggtataatgtggcattttgtcctttggttcacattaaaggacacatcctttaatgcctcattgtttgagggttgctagtgatgtggaccattctaacactacctctgttagtttttcatgaggacaccactgtcctttttggtggcccttacaaactttgtgtgctcttaaacagaacttgtaattcagggtccctagtacaggatgggaacagtgtctcctctggcactttcagcacatgtaaga

SEQ ID NO: 18197 - DNA, 1253 bp, Mus musculus
tagttagggttttactgctatgaacagacaccatgaccaatgcaagtcttataaaggacaacatttaattggggctggcttacaagttcagtggttcagtccattatcattaaggcaggagcatggcagcatccaggcaggcctggagcaggaagagctgagagttctacaccttcatctgaaggctgctagcagaatactggcttccaggcagctaggatgagggtcttaaagcccacatccacagtgacacacctactccaacaaggccacacctccaattagagccactccctgggccaggaatattcgaaccatcccagagccaaagccaacacttggcagagccctttcctacttcgctcacattccctgtgagcaagtcctcactttctccttagagatcccccgggttctatctggggatgcagcctagtggagagtgcctgcttggtatgtagtgggccctgagtttgatccgtgtacatctaaaaccaaaactctttccattttccgttcttcttctgtagtgttatgttaactcaggccctgccattgaacctgtggctctcatatccccttctttcccctccccccaaggctgtgctctgctgttagcaccaggtcactggcgcctactcagacctgagactgtgctccatgaagtgtgccccccccagctccccaggaagcctcttaacgccttaactctcctgtggtgtttcattccttagcccctcgaagaataacaggttttctctccagaagaatctttggcatctttggtcttgaatattgattatcagtgtgtacatcttcccagaagattctgctcaagatcaaggcttcttcatctttatctatagtatccagggtagataaaacaaaagtaaggtgggaaaatgaccaaaatgaatgagaaggagagtgaatgaaccaacgcagtgccagctaaactaggaagtagcaagataccaaatgaataggaatttagcataataaggcacataactgggagtcataacccagttccatttttcacgcataaccttaattcagttcactaattatttggagtacccaatagagtaggcaggatgctatctgtcaatgctgtgatgacaaagaaaaacaccacattcttaggactttatagagaggaggttagcattggacagatagaatgttttctctgctgttggacacagatgtgcgctctgtatgcctgtgtctctctctgtctctctctgtct

SEQ ID NO: 18198 - DNA, 1223 bp, Mus musculus
ctgatgctgtatatgtttttcatgagaactggttacatcatttttgagtgttcttatttatatacttgaagtatagtatatctttctgaaaattcagttggatcctaggagtttgcaggcatgaggactacatgcccgccctattttaccccataaagcaaggtcccactttgtagtataggctagtcttaaactcagcacataggccaggctggcctcaaccttgaactcctcctgcctctgcattccaagtgctcggattacagctgtgggcagcacacccaccttgctccccatagtatttagaaagacttagtatttccagaaatgcaagaattgatatgtaggaaatcttgacattgctcttgttgggaaatggagaaacttacggtcctaattatcataggctactagggtgtgaaattaataataaatgaaaaatgaaacatctcatctgcaccatatttaaaaccccaaatatgccttgctgtacattgaacttaagacacacagtacaaagtgatatcaaattgacagagataatattgatttttgccatgcaggtattttattagccatggagccagtgtgggtattgtgaacagtgaaggtgaagttccttctgaccttgcagaggagccagccatgaaagaccttcttctggaacaagtaaagaaacaaggtaacctaggagcctgagcagcctgcagaggctctcctcacagtgccccttccagaccgtgatccctcttccttatcatgtgacagggcaggatgacttctgtccgcagagcattagtcgtcattaccagtgtcatgttcatcttagtaactcacacgcacaggccagatgcccggaggatgaccaggctttccttgtctttgctgttctgagcttgtgtatccatcctgtagctagggttggcctgaggaggatcgtggactgttccatggactgttctttctgagtgtgtaccttgtattatctctgttgcacaggatagcttgaagaaaggctgggggacacagtatggccaaatccacactctgactttgggtcatattcttttccccgggaacctgcaggtggtgctgtgaactatttattaagacctctgaaggctgggcagtgttggcacacgcctttaatcccagcacttgggaggcagaggcaggcagatttctgagttcaaggacagcctggtctacagagtaagttctag

SEQ ID NO: 18199 - DNA, 1218 bp, Mus musculus
gggctgaccagcaacctttcatcagaacatcaggtgggtttccaccaggactctcccagggctctgggcattccagagacgatcaaggattagacttgaattcgaagacttggattcaaatcctgacaccgccaccagcacgtggcatgttcaagtcacttgacctctcgaaagctttagctgtcacacgtaggaaaggaggccaatattttacaatgcacaggacattgcaaaagtcacactcaatgcagtgactctgcacagtgctttggagcactgttgtgcttagcttatgttggccgtgcctttcggactcagcacttggtgttagctggaatgtgtctgaaggggtcagggagggtgctgcaggggcgggggagggggtgtcactttacagtgctccctgctgtgactcatcactccactaagaatcagaactctcaggcactcaggacatgactactgtattagtttcctgtggctgccatgacaaactaccacaaacttagtggcttaacaaaacagccatttattcttccacagttctagaggtcagaagttcaaaatcaaggggttggcaggactggttacttctgtaaggtttgaggctgtctgtattctcttccccaccccaccccctgtctctctctttctcctcacatctgacagctgctggcaacccttgccattccttggtaagagacatattctccagtcacagcctccattctcacaaaacttcatttttgccttataaaaattctcaacattggttggagagatggctaagaacactggctgctcttcagaggttctgagttcattcccagcaactacacggtgcctcacagccatctataatgggatttgatgccctcttctggtgcgtctgaagagagtgacagtgtactcatcatatacataaataaatgaaccctaaaacaaaaacaaaaacaaaaaacaaaactcttatcattggatttagtgcctgacctgataacccaggcggacatctggattctttcactagattctttcagcaaaggtgctgtgcccagtcactttcataggcaccaacagttaggatgagttgggcatgtctttcaggaaacatagacagacagcatggcttcctactggcaagcttcatggcagagggcagaggtctaaatgaagttttctgacctttctctttcttgcttctttctcttcctgcct

SEQ ID NO: 18200 - DNA, 1241 bp, Mus musculus
gctccgcgcgtggagggtcacgggacgcgcggccggagcgtgttgccagggtgccctagcagcccagccccaccccgagggctctgcctacccttgctggacgcggaagccgcggccctttggggcggggggaaggtatccctagaggcagaggagtcagctgaggtcctggctctagtccagactcctccccggaacctgtcccgggcctgccttagcgttggggtcccgaaagcatggcaccataaagggagttgggagactccacttggctcagaagttgcaagagtaggtaccgaggacccgagaggatgagctggaggggcgccatccacctggggacaggggagagagcagctttggagactcagcactgggggaggcggaggagagaggggggtgattgcagttgtatgtctgtgccagaggagtggtgaagaaggagttaaattttctctttaaaaaagaggaagatgagctccctgggcgtgagctgagctgcagtaatggctgcagcctgtatttccaagctaggcaagactgggcttatgggaccaagtaaggcttgggacggggacatagttccccccccccccccagaacctaggcccgttcccaaagatgggttttccaaggactgtgaattcgccagatataggctaaagatgctgatgtgcaggtccgcaaagatgtgagaccaccagcttcggtaccaccacttgcctgtattgtattgttgcccgaccctgaagccccatagggctcaatatccctgcaaggggagccttcagagggacttaaaggtgatcatagcatgggcgctctctcttccctaaatatgctccgccattgacctctggaccttcccctactcagtgacccttcttattccacgggcctctgctgatgtttgggacatgtttttctgaactaacacacatttgcttcctgactgccatgctgtgtccctaggaccaaacaccctggttaggcttggtgttgacttgcctcttaggctgtcagagcaggaaaccaacacccggattcccacctgtctcttcagacctaggtggcttggtttggggcatttgggtctgggagatgtttttgtatttctcaaaaggagaaactagctgtttggactctgccaagacaccacttccagtccctagggatgtctttctcagcggcgtgttagtatagggatgcagagacacctaggtgggttcaacttcctggcc

SEQ ID NO: 18201 - DNA, 1174 bp, Mus musculus
ttttattttattttattttattttattttattttattttttggtttttgagatcaaatttcatataacccaggctgacctcaaacttactatttagctgaggctgaccttgaactcttaattcttccccctccacctgaattcgggggttttaggaaccctgcagaacattgctatgccatctccatgaggagctgtgaggcaggccctggacccacccctgtggatgactgtacatccagggggctcagaggactttcaaaatccagctgcagttctcagatgaggattccctgctattccttgtcactgggcattgggccttcagaggcaggggagtggctcgctcatctggtacacctggagcacgtcactgaggcttccaggcactgactgagaactgatcatctcctgctctttgtctagtggtcagagcccctggtctctgtatgggactcaagcaaagtagtctactacctggtaggagacaaaaagctgtggtacaggcacacgatcatcaccctcagcttccaggtacatcaaccctctcctgtgtggcctccatctgtctctcctgctcccacctgtgaccgtgacgggaaggtgacctgggaggagttagggctggccttatttgaagcctgtgtctactttagattaacccagagatttcaaacacaatgaatgcagggagagaaaaataccagacattgaaaggaattatgggagctggaattattctcagctcattctgtaaacattaacactgttactctagacctggctcctctcccccagaaagctctcagcccagagaggagacacacatgtaggtaaataataggctgtggattatccatggtagaggataacagatgaatactaatatgtgttgcattttgtgggtggtgaatttagtcccaacccacctattcagacatagtctatttatgtagccaaggctgtcctagatctccctatgtagaccaggatggcctcacagagatccacctgcctctgcctcccaagtgctgggattaagggtgtgcgccaccactgcccggctcctcatttttaaaaaacattttactactactttgataatctctgctttcctggccatgtctcttgtggtgagcctcttttcctgagaagtaatgtattctaactcaact

SEQ ID NO: 18202 - DNA, 1234 bp, Mus musculus
tgggaagtccataccgagccactttgtccttgggtgcagcaggcagctaggaggccccagttctgggtgttaccctagccctgccccctcttccacttctgagattggttagagcaggtattccagtcccttctttgctagctgtggctttgtgtcttttatatcactagcttggagcttttggtgcggggggtgggggtgggggggggtggagctgggggtggggggtgggggggggtggggtcacagctctaagcttgatccaggctgccattgcaggaacctggcttaactgttcatacctcccaggcccttctcacacagggaggccttacaactttctctcttgtctcccctcagacatcaccctacagtggcttattcaacactcaaagtcacggagaagctgagactgtggctcttcttctgactagggaccacagtcacctaacctgaagccgagctccccgcccaccctgttgtctctccctaagcccactcctcctcacccagtgtggggagggccctctggggctcctagagccctattctgctgaggtttcaactcctgtttttattgtaaaataattgccctctccccaagtctggtcccctaacctctctcccttgctctctttttcccttcagctaccccactcccctccctgtcaacagccctggccccgcaagccctctcctcactctctgccccaccctcctcttcccctttcaacactctgttattgtcctgtgtgtacagtatatatatgtatatatattttaattttttaatttaagcaaagactaagatcaaccatttgatgctgcaggggccaatcgggacctgggaggggcaaactggaaaggcagagagagatgcagggtcgatgtggggcaagttcatatgcagaagaggggagactgccacatagggcagtggttgtccccatgtcctgtaaagtatctctgtctcccagtggaggacctgaatttgaaggccagcaggagcctccttttctgtccccagccttgatagggccaccaggtacaaccaggtctaagagggaggaccagggtccatgtcgtcccagcaacccccactgtcactgttcctggccccaggtcctgcccctacccagggtccccacctccacggcccatctcattttctgttctcatttcacagagttgtacaaggagagaactcagcatgggagggttggttctttggttt

SEQ ID NO: 18203 - DNA, 2216 bp, Mus musculus
actcagaaatccctcccaagtgctgggattaaaggcatgcaccaccattgactggcaggagagtctttttaaattaaatatattttttcaaactattgagacaacagcttgctctgctgtccaggctagcctcaagtgggtggctcatacttctcctaccttggtctttataatatccagggctacagatagtcaatcccacagtcacccagctgagagtatcaaacggcttctaattgacttttccaagtgccgcaaccgaatgttttgtttttgagatacagtcttattatatagtccttgtttgctattgaacttgctatgtagactaggctagcctcaaactcacagagatctgcctacctatggggtgctgggattaaaaatgttattcttctttttttagcgccatctgctcgcggcgctgcctcctgctcctcccgccgccgctgccgccgccctgagtcactgcctgcgcagctcccgccgcccggctccgcgtccgagcctcctggaacgacatttggagttcttacaagatggccgacattgacaacaaagaatagtctgaacttgatcaagatttggaagatgttgaagaagtagaagaagaagaaacgggtgaagaaacaaaaatcaaagcacgtcagctaactgttcagatgatgcaaaatcctcagattcttgcagctcttcaggaaagacttgatggtctggtagacacaccaacaggatacattgaaagcttgcctaaggtagtcaaaagacgagtgaatgctctcaagaatcttcaggttaaatgtgcacagatagaagccaaattctatgaggaagttcatgatctcgagaggaagtatgctgttctctatcagcctttatttgataagcgatttgagatcattaatgcaatctatgaacctacagaagaagaatgcgagtggaaaccagatgaggaggatgaagtttcggaggagctgaaagaaaaggccaagattgaagatgagaaaaaggatgaagaaaaagaagacccgaaaggaattcctgaattttggttgacagtgtttaagaatgttgacttgctcagtgacatggttcaggaacatgatgaacctattctgaagcacttgaaagatattaaagtgaagttttcggatgctggccagcctatgagttttgtcttagaatttcactttgaacccaatgactatttcacaaatgaagtgttaacaaagacttacaggatgcggtcagaaccagatgattctgaccccttttcttttgacggaccagagattatgggctgtacagggtgccagatagattggaaaaaaggaaagaatgttactttgaaaaccattaagaagaagcagaaacacaaggggcgtgggacagttcgtactgtgactaaaacagtttccaatgattctttctttaatttttttgctcctcctgaagttcctgagaatggcgatctggatgatgatgctgaggcgatactggctgcagactttgaaattggtcactttttacgtgagcgcataatcccaagatcagtgctgtacttcactggagaggctatcgaggacgatgacgatgattatgatgaagaaggtgaagaagctgacgaggtaatgtttaccaaatgagcaaataattcactgtataacacattgaggaacaaaaatgagtgattaatgtattccttataatcattctgtgatttgggataaattttggaaactatgattttagaattctacagccaaacaatgtatgtataaggtttcaataaataaattgcaaaactcaaaaaaaaatgttattcttattacctgggttttcatttgttcaagacaaaaatcttcaatacagacacaggctggcttgaattaaaactcttcttacagccaggcagtagtggctcacgcctttaatcccagcactcaggaggcagtggcaggcagatttctgagttcgaggccagcctggtctacagagtgagttccaggacagccagggctacacagaaaaacctgtctcgaaaaatcgaaatatcttcttatctcgacctcttcctgcttccagcctcctaaggcctttacccacaatgctcagcttctgagtgtgtgcatgcatcacattaaggccagagtctggatggtcaggtctatccttctctatgttatccctttgagacggcatctctcactgagtct

SEQ ID NO: 18204 - DNA, 1436 bp, Mus musculus
gcgctgggcagagatcgtgagcacacttagctttagctaacatttctgtgtttcctgcagacttgttctaagaaagacacttgagagaaagaatagaaattgacagctcagctcccttgtctctgggccacaaaggtgaactagctcagcgttgctaaagtcccctctccctcagttcacgggcctttatgaaaagccccaggacatagccagaaggcacagagaagtaaatgtagaagcaggtgctctggccataattacagatcaccgcggccacaacaggtgaggagagggaacactcaggcagagagggccagctcagcacactggggctgggaaccaatgcgaacctcagaccatagcatgcctcttgcctacacctctgaccacctccttcccacgcaggtattactacaaacgggagatcctggaacgggtggatggccgacggctcgtctacaagtttggcaagaactctagtggctggaaggaagaagaggttggagagagtcggaattaaggatcggggctggacccaggacctgactcaggcatgaactccagaactgaagccttcctggaaggacaggcaggcctgatggcccccttaacatggatgtgttccctgtgttgctgtagagaggaagaacctgttgggcgtgccctctgcagtctcctcaagtgcagcctttggcctctctcctcgccctcttggaattacaagccccagggtttgaaccaacttgttcgataactctccagctgtgactccagttccctcccgtcccaacatggactgcaaatgagacccacctgcagatgcctggcctcagccaaggaggctggggagactgtggcaggagactgcagggacggaggggacagggttgtgtcctcggtacttcctggactgccttccacctctctgctcagtactcaggctccacagacgggggtcggatcatccctaatttatgtgctataaatattccaggtgtatatagagagctattttttctaaagcatttcccctccctgctcttctccactgagtgctggtggccagactgatttttttttaggccccctaactggaccagcgagaagtagggtgattccaggaccccctcttcccccagaggggtctcctggatcccctttcctgtgaatggaggctccaataaagtgccttctgggctttttctaaccttggcctgagctctctgtgtactgaaatttgggactctgcattggataaggcatggagacaggtggaagaagatgttaagcatgaagaaagatggggtggggggggggctgggtgttgatgtatgcagctggagggtcggcaggaggtcgagaaaagagaaaaaaataggtgtaggcagctgacaactgaagaaggacccatgacttcatcctagtgaggatgtggg

SEQ ID NO: 18205 - DNA, 1172 bp, Mus musculus
gttagggtgacagggccttcagaaggcaagtcacctgcctgtcagctcaaggctgtacatgtagtgagtgcttaattgctcgttgtcgtttcattatttgagggtgtcttctaattgtgacaagatgggtataaaatagtatttatcattgtgacatttgtacatgtgttttggaggctcagaaatgcaagaagagtctttaacccttggcattctgtgtgctcatagtgttaccaacctgagggttaaaatctcagcaccaggaaggcagaggcaggaggatggtgagctcagtgccagcctagctcacaacagtgaaagttagcatcacagatagaagccctgtacccactcaacagcagcttccctttatccctgccctcaactgctggcaatccactgtctaaatttgcctgagttacctcatttgcatgtgtcttagggttttattgctgtgaagagacaccatgacctaggcaactcttaaaaaggacagcacttaattggggctggcttacaggttcagaggttcagtccattatcggtgggaagcatggtagcatgcaggcagacatagtgctggaggagccgagagttctacaacttgatccaaaggcggcagcaggaaactgtcttcctcattgggcagagattaagcatatataagacttcaaagcccacctccacagtaacaaacttcctccaacagagtcacacctgctccaataaggccacacctcctagtagtgccactccccatgggccaagcctattcaaaccatcacacatggaatcgtatagactcatttcgtgcctgtccttaattcacttagcataatgtttgcaggaccattcatcctgaaaattctttaatttggtgcctgaatgtttccttgtaagcattcaccaactgggattaattcattccactgttgacaggaacagttgtctctagcatctagctacggtgaattatactctggagtgcaaatgtctgacttcctactttggcttctcttggatgtctacctgagactaagattgctagctcatgtgataggtctatctttaactctgaggaactgccaaattgttttccacaaaggccttaccattttactattcccaggagaaatgaaagagagttctctttctcctcaccaccatgctag

SEQ ID NO: 18206 - DNA, 1196 bp, Mus musculus
ggtcccatggcagccagaagagagtttgaggtccctggagctgggcttgcaggtggttgtgagctaatggatgtgggtgctggaactgaactcaatcttctgcaggagcggcaagcacttctcgccactgagccacgcgagcataaagcacagtgttcagtaggaagggaggctccctgatggctttcacgtctctctcttctttgtgatgggctcagtagatagcccaggctagctccaaagcaaacttacttaactgtattttaatgtaaggcaaaaaagacatttaggttggttgtttttcactcgttttgtgtctgaaacaggtagctttgcagtttggggaggactgttttccacgattgactgcagtatggttcaaatacgaggcaaagaagacccctggaactccatcactagcggtgccttaacaggagccatcctggcagcaagaagtaagtgagcactgcttgttgtgtgtgctttggcttttgtaatactgaggttgaacctgggccttggacgtggtgagcaggcccttacactaataccgttacgtagatcatcatttggacatattgtctaagcccgttgcttaggaggacctatctgcctttaagtaatgaaacttgtcttgaatgccagcactcaggaggcagagatagacagatctctgagttcaaggccagcctggtctaagaagcaagttctagaacagccagggctgcacagagaaacaatcaaaatatggaacctgtaatctatgagtctgagcattgctttatttggtatagaatgaatatggtgctctgaaaagttagtaagaataaaaaagtatgggattggtgggtttttaaaaaatgtattactattacattatgtatgtaatacatagctcagatgaccttgaataccttatcctcctgcctctgctcctctgtactgggatggacaggcgagcgagtgccccttagagaatgtgcatttctgcagtggttagagcaatggccatttattaccttggtaactgatagaatgccaaactctttgtatgtagttttctaagttctccaccgtgttcagctgttaggaataaagatcctctggatcttaagggcagagtgcaaaccagaatgcctttgggcttagactagaagtctacatttttttctcgtaaaagaccagacattaatagt

SEQ ID NO: 18207 - DNA, 2111 bp, Mus musculus
tatatttaatatgcctcttctgcacataaccacagagtctgatattcaaaggtatccctatccctcaggaatcctctgaagtggttgagttgtagcccttgaatttacaacatgtatttttctaggacagtaaagcgatctttacaaatgaatttagtctgcatactctaaggtgtctcaacacctccaccttctgtttcttccttccagaagcaaagtaaaaaacagaagaaagcatagcatattttagcatcctactgtgatttggcaagcagctcaaaaatcttagagaactggtatttttcatccaaatatgtttaaagagtcagtggtacagcgtgcggaggatggcccagggttcggtccccagtactacaaaaataaggacatcctgcagtggggttccctcgtattatgagttgagaatgggtgaagattaagagcagagtagttgccccatgctccctttgtttggtagtgcccgggtctgctgctccatttttaatagctggagctttttctttggggtgatgctttaacaaaaaggaaaggggatgtagtggtcttgagctccacttaagcagaaggcgtataaggcctttcctgggaccaaaggacttggcagcttgttactgactgcgccaccagatgtccttagtgctcaaccttgagttcagaagcactaactaaagtttccacttttatttttaagagcctaagaaagtgtgtatagttgtcttctggctggcggtgtggagaccagtattgcctctgcccttgctgcttttcctcctgaagttgaagttcctgataaagagaaatgataacatacctgtccagtggtacccaaaaacaccacagtaagagctttggaacctcgttctatagttgacctcaaagtcaactggatttggtgctaaaaacagtagaccattccacatgattaagttgtctaatggttttgtcacattagagtggtaccaggttagcagcactggcctgctgagtttgaggaagcttggagaccccagttcatatgccgacagtgatgtgggttcattctaagcctgcacattagaacagttcccagtgtgtagtgccaaaattagtccaaagggtctgtcctgttctcatggttcacttttggtaggagggctaagctcctggcttaagaaaacttgaaaagcaggtttgtaggaagccatcctggccaacatacataactgattggaagtggaggggcttctgcaccctggtggacagatgcttgtgttttcagagcaattaactcctgcaacagtgaaatctcccatcctgccgagagactgttcctgagagcaaggagaaagttctgttggtgtgacgaagttgaactctggctcatattttatctcctatgaaagccaacttcatttgggaaaggggtgaggcagaccgttgaagactaagaaaagaccagtgaactcatgagaggtgtgggctccctatgatcaaaggtttccaggttgtgggtgaaacactggagagctagaaagcagatgagattccaagaaagagttgttccgctaacccctgactaagacgcatgaacctacaacagatggttcgaaagcagatgactgtcagcggggaaagcagtggctggggctgagagaggtggtcattgtgagctaggagctaaagtggtgagctaatgaaagcaagcctcagctcttgttagctgtcctaagtaccccagagaagtaaagtgagcactgaccagccgagcgacaagtcagccttcgtgggagaacgggggtgggtctttactgtggagatgagtgggttgatttatgccaggacatttgaagccatttgcaaaagaaactgacctacacaaggaaagaatgctcatcaaatcttagatgacaggaaacccctgggaagggtgacatttaggatccaagtagatcaagtataagaaaaggagtttggcgacagtatttatcgggaagattaaagatttggagtactgtgtacctcattaaaagtactgagtgttaggagtccaaaaaactccagtgtgggcccaggttatggtctaggatactgcagattttcctccacctctg

SEQ ID NO: 18208 - DNA, 1239 bp, Mus musculus
ctgccctcttttacatttttccttctaagccaaagtctttgttgccacagatatttgttgccaaatagggtaagagaaagtagggccaagatcaccagaaagggagaacaaacacccaaaagactagaaaatgagtctaacattgaaaatgagactagaaagtaaagagaaggcaaagggttccttagaaagctcagaggatgtctgtctgaagtggaggcacccggtaaaggcaggtgaaaaaaatttcaattaaccaaagaaggctcttcctgtttcaccttggcaatgggagctaaggggaaatgtggtccctgacagaatggctctaggacttcctatagctctcacagcaatgctctttggttcagtgtcttagattgaatcttcatttaacctgaattagtctcttccaggcaaaagtccagtgtacatgtctcttgtgctttctctgctttcattaaaatgtttcttttttgaacagatagttggctttttccccccaaagttactgtatagattctgtcagtacaaggcttcaaatgaggttccatgctattttagatggggttctctgccctcagacagaagtcagctttgtgaagaaacaacctgtgttgatcgtggttccgccaagcagggaactcaacagctgtttgtttgtttgctcttttgatcacactgtcaacttcaaagtctttcattctctgcattaatcttacagcagacctcattatcagtaccataccatcattgtcattggaaacagtccttcatcaacttttgtgtaagttacagtttttggtatgatacttttctcagagctgtacaatttaggcagaaatgtcctttttcataccccactgttgcctcctgcaaattagggtggctttttttgtttttgtttttgttttttgtctttaaaatgtgaagcttactggtttaaaaattctgggaacttagagaagagaatgtgtcctgtccattctgttttaaatcttgtcttagttagccaagttagtctgcaagtcatcttgcccaggagactcttaaacaggcatttgtactagttgaactttcaacctcctctcttaggtgaaagaaataaacttttgtagaaaactcatcttaagatatgtgtagtggaaactcttggctgacttgctctaaggccctccatatagatctaaccttaggctaatctctgttctgggcatcctctactgtctcgctgctgag

SEQ ID NO: 18209 - DNA, 1151 bp, Mus musculus
ctcctgtgacctcatcctgcctccctgcatcccagctcctgtggcctcatcctgcatcccagctcctgtggcctcatcctgcatccctgcatcccagctcctgtgacctcatcctgcctccctgcatcccagctcctgtggcctcatcctgcatcccagctcctgtggcctcatcctgcctccctgcctcccagctcctgtgacaccatcctgcttccatggcatttctctaagaaggaagataaaaaagagcaaactcccacccagcagccagtttcccatatagctctgctgcaccccaccccacttcctaatgctgttcggtttattgcttttaacaaaacaaatttatagtgagttccaggccctggtggcttcctttcctccccctccctatcctgttttacacagcactgctcatgtaagagtctgtttctcaaatgcacggcattcctcaggtggaggatgggcaagaatgttcactttttaaaacttactgggtagaaaaatcccaaaccaggatatgtgtgtgtctgtatgtttgtcttattttcttctcatttgaccctcaccattccagtctgtccccttttatacctgatgtagaaaaggcagaactgaatctggaaagcaaattgttgtatatagttgcggtaacaatcacgaagagagctgggctgtcccctcagtaattcattttaaatgaaaaaaaattggttgaaaatgaaatccatgccttggccagctgaaatggccttcctccatcgccactgaggctacccttccctgggtcctctgccgaccaggcatgtctccatccagcagatttcatctgtttgctgccatttgcgtttcaataaagttatctcctgtattgtcctctggtttctctctgcttggtttctgtgtccatctatcttaatgcttggtatgctatgacaaatagctcgtggtcctttgcctaactcagaagcaaaccccacctgcttttaaattaccccaaccaaatgctaataagcaggagtctttacttctgttttgtgggcaggagagaaccctactttgtacactgtggacagttctgtcctgcattatttcagctgcagattatatgagcaaaagcaatgtggggagggtttttatttcatctt

SEQ ID NO: 18210 - DNA, 1176 bp, Mus musculus
caacaacctttggagggcctcagctccaggagaggctcgccagagtcccttgcacttggggatgaagaccaataagttgtgttcaatgtgtttgtttctcagtccctgcctaagcactaaaataaaatactctaggtattggaggctgctaagggacctgatgtctgtgcatttttctgtctctgtccttctctcttacacacgagcagtttgttgttatcttctggggctctgtggaacattatttttgatacctgctttctggtaactcgttggtgcttgtttctgtctctgtaaatccttattccagtgtctttcatgtagtctaatcatttggaaggtagaggctggcaaggaaggagaagggggtaaaagatcatggagagagcccacaagaaaactttcttggttggtaaacatttgggtcttgagttaccaaccttctaatctgtctattctgatggacataagacaaaataatgatttttttcctccccttttcattttgtgccgtgtggtttttctagtttacaagagtcgatgtggacttcatgtacccatctccttcctgatggctctcaaagatgagtcatgctattcacaggagtgccacccccttccaggactctgaggatgaactcttgtttcctgtcctattccagaaaagtagttaggctctcacaccaccttccatcaccccagatggaacccattcccagcagccagcctgggcacagaggacacatgcctgatgaggtgatccaaatgacattaatgatcttttttatggcataggggtttgggagaggaagttgtgctgatcacaaatctaatccagggttccagagttaaagtgactcagatggttaatcaaagacccttctcattctgtagccttccttcccatagtcctgtgcactagctaaatcgaagctggtaaactggctccgtgagccaacagcccccgtggtaagaactgaaatggctgtaacaacaggttggctaatagagatggataggatggatgcaccaacagctgttggtaccttgtttttccttcaactgttgggtattgactctagggtttctcataacactcagcaagtacccaccactgagctttctctctagcctttatactaagttgtccataatggctctgaattcagtaaatat

SEQ ID NO: 18211 - DNA, 1804 bp, Mus musculus
tacctggaagctcaactgccgtcctccagcatggtagatctaccccgagcttcatctcggactgggaggaaaaccaaaatactggaaacacctgcctgtcttatggcctgttagggccctcactgcactatttggatggtagccactttgcctgactgaatcaagattccctagctagcccttattatttgtttttgacagatgaatagtcacttataggagatggagcaaccgtgtgacctgcttcagatcagaataaaaggctcaaagagtttgacttggtggccaatatctgccttccaaagagatctacgtcttgcagaagttgccctcttcctaacccacactccttcatttgacaagtacttactgagtatttaaccgagtaccagtcactacgtttttaaaaaagacaagacttggtccttaagttcaaggtctaggaggcaatgttaatctcctttaagtaaccatccctttattatctggaccttgaaaatcatctgagagatgcaggtgaaggccaaggagtcaattaaaagaagcctttggttagatctccaatatgttgtaggcagaaggttggggatcagtttaaatgaagcctgaagaactgtggaatcttgcttgtcttgagtgggaaaatctacttctgtcatttctggaaaccagtggaaccaaattccaggttgagctgcctcatgggctaatgtgttagcgctctgcagtgcagggatatatactatacgtctggacctgagaatacgctcttcaggttccttagtagcacacgacgtaccagaatctataccaagattctttaggcaaactaacctgggccattgttccacccaaccaaggaattacgtgcccctgactcttaatagtctattttcatttagatcctcaagaaggtctagcttgtcccttttgtacccatccacccccggcaaaagcttctatattcacctggtagccccagggatgacagggtcctctattctggagactgttattgctactgctgctaattccacgagctgtgaagatccccaactcagctgcaaaatatgcaattctgtggtgggaagaggctgactgtccgaggatggtgctgaaatcactgccttaaggtctttgctgtgcagaatgagaaggcccccccagagctgggtgttccaacttagaaggaagggaagactggataggcctactttggacataggtctcttctgaaccctatccaaagctccagtacatggcaaggctcagacttttgctaacatcctaacgcttgagcctttcaccctctttttctggtgctgcccagccagtgccttctgacacggatgttactggctacttaagaagaaggaaagtaggaaatgccttcttccattccaactgcctcagactacagagagagtgtctctgtggtaactatggataccatcgagaattttatttgggtctgcagcaagttgattctggaggcctcgcatactttgacttcatttctattcctgggatccaccaccctcttctctcagttgactgctgcatttagttcaggcctcaaatagctgtcctccaggaagtgcgttcccatctagtgaagtgctctcgaagcctacactttccttctggagcctgggaccctgtttacagttgcacatctgggcccctcacagtaggatcaaccatctcaaaaaaaaaagaaaaaaaaaagggatcatggttcggtggcaatttcggaaggttgagcctcctcatggtgctataacccctcgggatgctcatccag

SEQ ID NO: 18212 - DNA, 1158 bp, Mus musculus
tggttcgtgtgcatgggttacaatcaggattgaagcagttgtcacttctttatgaaccatctctaaactccatgttcttagacacaccaaggatcagacccatgatgatacaggattatagggtttggttggttgggttgggttgggttgggttgggttgggttgggtttccctgtaggcaggacctagcacccccctctgcattcacccatgtctgcctctttttagatggccatgctactgaaactccaagaagctgccaactacattgagtcaccagatcgagagactatcctggaccccaacctccaggcgacactctgagggcccggcagtcactgtcaccctggagggcagaaggctggcttcagcatcattagctctcctctgccctcttccttcatagctctggctcaccagcctcgccaagagaacaggagggaagaagagggcaggaggagggatgggttctcggtgctgaacctttgagaacttcctactaggaattggagggggtggagtttgagaactccgtgccccttaactacatttgctggcctcctcttacgacttaggagaaaagatgattctggtcttttcttcaagttttgtttcacctacaaactcttgggctttctggggagggattcggaagatataaacagacaaacaaaaacaaacaaaccaactacagcagttccaagctcgttctcacaaacacctctgagacagtcacatgtgggcaaatctaagggaggcaggaagctctacagactttcttgcaaacccttcccagttctgtcgacactgccaacaacctccccgccagagacctggccagagccaagaaaagagaagcatgtggtttaacagaaaaacaaaacaaaacaaaacaaaaaatatatgtgtaaatcaacctgtagaaggtaaaaacggcaatggaaaagatgaagctggaaggaggggcccagttgccaagatggaacgagagctgccagatcttgccttctggatgacaagaggggacattgcaagatggctgccagtctaaaacgtcaccagaccacaagagtaacatcacagccttcgaagaaaggccacaagctgtctttctgccctctaactgaacatgcatgaaaagtcaataaaccctacttt

SEQ ID NO: 18213 - DNA, 1220 bp, Mus musculus
cccagcccagcatatagccttgacatctctctccctggaatctgctctcttctagcttcggagttccttcaacaaagccttcagtattaaaaagggtcccaagtcagcctcctcctactctgacattgaagagattgccacacctgactcctcagccccatcatcccccaaactccaacacggctccactgagactgcctccccctccatcaagtcctccacctcatcctctgtgggcaccgaggtcaccgagtaagtgctcgctccaccagccaccctggtaaactgttggctggagctagctgtaagcccacagaccctgacacatgccaccatacttatggcctttccctgggtgtgtgagacccatgaagggaccctttctgatataccaattaagagtctatacacagaaggaaacgggactatgggccagacatgtcagtatcctctacgacacagtgcatctgtgggatccaggctgactcttgctttcttacaggacccctgctcattcagtcccccacactagactgttccaagccaatgaagaggaggagccagagaagaaggaggtatcagaactgcgctctgaactatgggaaaaagagatgaagctcacggatatccggttggaggccctcaactctgcccaccagctggaccagcttcgggagaccatgcacaatatgcaggtcagtgtctgggcagagctgcaggagagaagggcagggccggacatctctgccaccctgccacctgccctgtctgttctgcccacagttggaggtggacctgctgaaagcagagaatgaccggctgaaggttgcccccggcccctcctcaggctgcactccagggcaggtccctgggtcatcggctctgtcgtcccctcgacgttccctgggccttgcactcagccatcctttcagtcctagtctcacagacacaggtacctgcttggggagaacttgtgtgggcagagggctgcgggggctggggagcgtggttcactggcatccttccacctgtggcatccttaaaccgggaggtagtggtgttgagctcaatgctgtcagtaagcaggagcagttgttaggattttagctctatgccttttgagctggggctcccggctcctcttggccatacacaaggaatcattgtttggaaaggagaatagctgcaaacttgaagtaagcctggggccttaaaaccga

SEQ ID NO: 18214 - DNA, 1243 bp, Mus musculus
aaaagtgtttttaggatatcatgatagcaactcttcctctctttcctaccctctttcaggcaaacctgaaggcaaagctacagacaagggtaaactcgcagtgaagaacactgggctacaacgctcctcttctgatgctggccgggaccgcctgagtgatgctaagaagcccccctcaggcattgctcggccctctacttcaggatcctttggttataagaagcctccccctgctactggcacagccactgtcatgcagaccggtagctcagccaccctcagcaagatccagaagtcctcagggatccctgtgaagccagtaaacgggcgcaagacgagtttagacgtgtccaacagtgtagagcccggatttctcgcccctggagcacggtccaacatccagtatcgcagcctacccaggccagccaagtccagttctatgagtgtgactgggcgtggtggacctcggcctgttagcagcagcattgaccccagcctcctcagcaccaagcagggtggccttacaccctccagactgaaggaaccttccaaggtcgccagtggtcggagcactccagcccctgtcaatcagacagatcgggaaaaggagaaggccaaagccaaggctgtggccctggactcagacaacatctccttgaagagcataggctccccagaaagcactcccaagaaccaagcaagccaccctccagccaccaagttagcagagctgccaccaacccctctcaggtacccacactgggcaatgacttcctcccctgtgtctccagccttaaactagatgtggcatggcctatccgttgcgtctctagacctttgtttggatccttcctccctcttctaccatttcttctctctgcttgaaaactcaccttgtctctactgttccgtgtgtcttcagtacccgtgcatgtgattttgctgtgttcagccgcacattccccagatgcacgtgttgtctcccttacgattgaagatgctataagtcaggtgttgaatctccttccagttggtttatcagcagcagcagcgtaaacctttagctgcataggcagccagaaaagaagggaactagaaaaagattgcctgttgccctgtaatttgttattctaaatattgtatttcatcttcactcctctcagggccacagctaaaagctttgtcaagccaccctcgctagccaatctagacaaagtcaactccaacagtttggatctaccat

SEQ ID NO: 18215 - DNA, 1168 bp, Mus musculus
cctcttccccggcttccttctccgcatttctttccctttcgccctccgctcgcccccttgctccctccccttcctctccccttcctccgcggtttcttccgtcctcccccccattccgccccctcctctcccggcactaccgccccctcccccgccccgtgcctgcagacgcgcggatcgtccatgcgctcctcgcaggcagaatgctgggcagcagcgtcaagagcgtgcagcccgaggtggagctgagcggcggcagcggcagcggcggcgacgagggcgcggacgagtctcggggagccagcagaaaggcagccgcggcggacggcagaggcatgctgcccaagcgcgccaaggcggcaggaggcagtggcagtatggccaaggccagtgcagcggagctgaaggtcttcaagtccggcagcgtggacagtcgtgtccccggcgggctgcctacctccaacctgcgcaaacagaagtcgctcaccaacctctcgtttctcacggactccgagaaaaagctgcagctgtatgagcctgagtggagtgatgatatggccaaagcacccaagggtttgggcaaactggggcccaagggccgcgagactcctctgatgtccaagacgctgtccaagtctgagcattcgctcttccaacccaaaggtggctcaaccggcggcgccaagaccccactggctccgctagcgcccagcctaggcaaacctagccggattcctcggggaccctatgcggaggtcaagcctctcagcaaggcgcctgaggcagcggtaagcgatgatggcaaatcggatgacgaactgctttccagcaaggctaaagcgcaaaagggctcagggactgtgccctctgccaagggccaggaggagcgggccttcctcaaggtggaccccgagcttgtggttaccgtgctgggcgacctagaacagctactcttcagccagatgctaggtaagacttgctgccccgccccaccccgcccctggttttctcctggccagctgcaggaagaggtttgctttccccctttctcccttctataccgatcactggccaggttaggaggggtattactgcccagatgtgcagagctggcctacctccagctgtgtctggctaacgtgtgtcttaaagatgtcgctgatgggag

SEQ ID NO: 18216 - DNA, 2132 bp, Mus musculus
atctactgtaaaggtgggtagctccacttctctctgaagatctgaaggctggaggaggctggagaccaagcgactatgctgtcgctaaatgaaccagccctcttgccttccaatccaagggagaatgagacttggccagaatcagatggaacacgggccagggatgagagtggagcctaggatcttaatacccgtctagtgaccgaaagacagcaaacgatttactccctcattgaaataaaggggacacggttctcctcactattgaggctaggagcacgatggagacggggaggtgggcactgatggactgtcctccagagaccaggcacaaggagtggtgggtggagttactctgaggacaggagtacatccttacccttctctcctctctgcaggatgctatgccaaaaactttgggcccaaaggttttggctttggacagggagctggagccttggttcactcagagtgaggctgccaccgcctgcgcaccctgcttactcctaagcttttcatcagcggtccattcccaagccttggacacctccgagctcctctccctcactcagccccgctgcacatcactaatgccttggacttgggtatctggctttttgtggctcagggatctgcctgagctccttccccacgaagggtttcctcctgcctggcatttgataccattacctttaggagacatctgtctagtcgcccctttccagagaccaggtccctttccccacaccttaccctcctctgtttctaggctgaatgtccactctctactggccaggacacctgagcccacatctttggagaccaatagagcaaagcaggagacctggggcagggaggcaggaccagaattggcctagggagggttatggtttttgggtcccagagagtctcctctgagtaggcggctgagttcttggtgtatctcagtctgggaagtctccatgagaggcagggaggtgcagataggattgtgggccatcggaaggagctctttctctggcccttgcctttgaatgtggaaatagtatcttttcacttaggaatggagaacaagccagttcagaggaccccaaagtctagagattgcctgacctccttaggcatcaagttcccagtttgatgggcaagggagatcctaatgaataccttgaccaagtatttgcatttatcagtggtccagatcttggagtggccaattctagttctaaccttgggccaggtggctgaaatagacagtttctgttacagcatagcccagggtagagctgtgttctagccactcctgagggttcctctgaaccccaagtcctcactcccctccaacccagactcagacccttctttcttcaccctacctttctctagtaaccttcactaccttgcccaccccatccaggccccaaggtcaggagcggggggggggggggcgagggaggggaagggccgggccttgatgctccccggaactgaggggacaaggctgtacagctgtttgctgcaagggctgtaggcatgggctgttgaagctgatttatcatctgatcaataaagcaatttagaactgaactctgctttcctgtctgtctatgggggcccggccacaccctggagtcagcgctggatcagaccagaacaatctcagcaaggcctagtagaaatgaaccaaaaagaaccactctggaactttctatggaatgtttactttttagtatcgattctaagggaaccaaatgaccaaagaccatggcctcaccctgtttgcccaccccaggatgtgggaattttgtggacttggcttttgaaaggctcaatttggtcccaacaatatgttcaacacttcagcttttggaaagccccctgtacagagaaactcagccagaggaacgtcctgtatcaactccagaagtctcacttcttggaaaagtgtgtgtgtgtgtgtgtgtgtgtgtgtgtgtgtgtgtgtgtgtgtgtgtgtgtgtgacattggggggaggcaaaaagctgtctgtttttctcttagggcccaacaaccaggtacacggaagaccaggcgtgggaaataggcttgtctgaagggttgtagtgttgttcatcgtacccagagctaggct

SEQ ID NO: 18217 - DNA, 1258 bp, Mus musculus
tttccctaacactcacagaccttttttttttcttgtcaatcatttcccaaacagtatagtttaatgacaatttatataacattacattgtgttaggtattaacaataatacagggatgactgcaagcatatgggaggtttgcataggttatatgcaaaactacacccggttagagaaagaagcccccggattttagtgtctgtggcatgacctggatggaacctgttccctgtggataacaggagtggtcacattatttccttctgttctggtgtagacaggttgagaagacctggtgtgaggcatgcaataaaccaaccatcctaaccactgttcttgctttccagcttctctgtccactttggttggttgggacctggctacatgtgatgagccagaagctatcaacatgaggaagataaacctatcatcatggaaggagccaaccagccagagacggagagcagaagccagtaggggctgagcatgaagattcagttcctggacactaagactgttgttatatccagctcagacttgcgagccacaggcctggcctccagtatcatgacttgggccttacctggtccagcccttggttctgggttctgcagactgctgtttgacctctggctttgagacatgcccaaagaagggctggctgttcttcatggcgtgctaagccagtgcctcagaactcaggaggccagcctggggtccagaagatgaccaccttaccttaggacagccactggactcagcttgtggaggggggtctgctgggctggagtcctgtgcctggggggggtctcctgctgcttaggtccttttgggacccccccgcccatctgtaccctttctttgcacacttcttccctcacccctgttgccctctcctcacttcggtgttgggcctggagggggtgggggtggggtaagggttggccctttaccatttcatgcttattccagaatgaagaggcccagttcgtgggcagtaaccacgctgtctactgagtgaaattcttttaagtacaggacacctagagctttggaacatctcttctctagtccacaggccctctgaaagatgtaacttgaggggtacaagcactgtacccccagtagacatggcctcatcggccataggaaggaagggccccagtgtgactgaagaatgtcaagtcctgcagctgcctcttctgtagagggtgactttgtccctactaacctgggaagtgactctagtttccaggta

SEQ ID NO: 18218 - DNA, 1099 bp, Mus musculus
gaggttctagccccaccccaggtaagttgcaagaggaacaagcagaagtggcttcaaggtcaggcatgtggacctatgtggacatgggctctgtgacacttggcctctgggtctttgaagccttttccttcccaccttctagatgttctgtgtccttcctgtctttttttgttcttttctatccaatcctggacccgaggtcctctcatgctcatcaggctgtcccctacaggacctgccactcccttagctaagggcagctgaaggaggacttttgtggtcatttggcacttctgcacccacatccagtataacactgaattcctacactgctatgatttcccaggaatcgtatgtaatagttctgagaaagtgagtcaatgaatctatacattgcttccaaacataaagtgtacataaagatgactggaggtgaagggcctcccagacgacatccccttccggaaccccaacacctatgacatccatcggctggagaagatcctgaaggccagggagcatgtgcggatggtcatcatcaaccagctccaaccttttggggacgtctgcaacaatgccaaggtgccagccaaagacaacatttccaagcgcaagagaaagagggtctctgaaggcaactcagtctcctcctcttcctcctcttcatctttgtcctctaacccagagtctgtggcatccactaaccagatctccctcgtgcagtggccagtgtacatggtggactattccggactaaacatgcagcttccgggcccccttgattattagacctcagagccgaatcaggacctcaactcaaaagactaaaggaaaatgtaatttatgtacaaagtatattcggatatgtatcaatgccttttagtttttccaatgatttttacactatattcctgccaccaaggcctttttaaataagtaaagaaaatgaaaaagaaaaaaaaaaagatgtcagatgacggcaatgtcttgtgtgcattctgtggcttggcatagttgtgtagggacagcaacaaccaggcacgcaacaggaatggatgagtcttacccatgggctgttaagctaaagctagaatgaaac

SEQ ID NO: 18219 - DNA, 1267 bp, Mus musculus
tgaagccaatattcagtccttctcctgagacttaggaatggttagggtgagacctagacttgagccagctctgctggaattgcttgggccccagaagatgctcctgactcttaaagacaccaaagctttctggctaggcacaccattgaggtcttcagatgaccaggcaaggccctcatggagcccacagcccttggggaattcagactttagaagtgctcactggggtacttggttccatgccagactttaaggatccagagccctgacccctccatcctcattcagatcgtttcccttcttattccaatgcaggatgctcgcaccatggcaacagccgctgcgtccattggaggaccccgggcaaacactgtcctggagcgggtggaaggcgctcagcagcggtggaagctgcaggtgcaggagcagcggaagacggtcttcgaccgacacaagatgctcagttagatggttgccatgattgcatcagagacctgggccatggctaccagcttctggggctcactgcagtcttccctgggtcttcccttcaaatgcccatggcgtttatccttctccctctctagaaatgtactcgactgttataacgagggagtgtgattgggtctctgtaggtctctggggggtagaggggaggggagggaaggcagaagggaacagagacatttgaggtggccacatgattgggtggaattcatccctcctgtcttcaccattcctcccagctccacatcttaaggatgcttacgggagacgaagctgtgtcatcaagagctcagtgggtgcgaggaaagtatgatccagcgctcagccttcgctctaggatgctgtggtccccattcccagttcctccagtgccagtactttagcttggcctagccccagtctcaggaactgttgtggtgcccctgagcccacagtcatctccagagtccacctggaagcctgttcccctctcctcggctcctggtccaccagtgcatggcagtgcccatgcatgccggcatattcagcagctgtcaccttactcccatcccaggaggccgtaaggcctcccacctctcccctgtgactgcagctgctgagccataaagttggaccatatgacacaaggccaatggggaccggagtaccatggctcctgtccttggatggtctcttgtccctgaatttcattgtatcatgcatggagagaaatgtttgtctttctgttgtctatacatcaaagaagccattaaattgtttt

SEQ ID NO: 18220 - DNA, 1199 bp, Mus musculus
cctgcatacttcatccttgtcctcagcctccccttggagctgagagctgctggatgctgttcctccggagagtagagcaccatgtgcaacctccggatagcactgcttggaggaccagggttcagcaagttaaattgcagagcttgtttctgctttagcaaattgagatgctcttgaggcttaagcatgtaccatatgaccccagccatgctttcctccctatcacagctctacaatgaagagatccttgacctatttgacagcacccgtgaccccgatgcccgacaccgcaggtccaacatcaagatccacgaggatgccaacggtggcatctacaccacaggtgtcacttctcgcctgatcaactcccaggaggaggtgagcatcttatacatgggcatctttaaaggccagagccctacagcacgtggggcctgagtcctctcctctgcgtctgtccccagctgatccagtgcctgaagcagggcgccctgtcacgtaccacagccagcacccagatgaatgtacagagctcccgatcccatgccatcttcaccatccacctgtgccagatgcgcgtgtgtgcccagcctgacctggtgaggtgctcttgagggcccaggagctacatgatctagggatgtctcagggacaggacaaacaaacgtgggcctaggctaggaactccagaggtggggcttgtctctatctctcagtttttatttctctccagcctctcgtctcatccatgcaatggagtgagacagagtaatgttagtgtgtcccagcagtgtctgctctcaggtgctgagcacccatgagggttgctgctgtgcaagctaccctcactctcatggatggtggtactgtggggcggaaggctagcagaggatcaggaggtacggtctgagtgagccgatgtcaccttctgctgcaggtgaatgagaccgtgactgggcttccagatggagccgcccccacaggcactgagtacgagactctcactgctaagtttcacttcgtggacttggctggctcagagcggctgaagcggacaggggccaccggcgaacgggccaaagagggcatctccatcaactgtggtctggtaggcaaactgagagtcaccagccccaggagccagatggcacagactaagacaggccatatgcttcagtggctgcccagtcgttctcttt

SEQ ID NO: 18221 - DNA, 2315 bp, Mus musculus
tagggaacatcttcagcttcttttcctttagttgttccagaaacagccttaaaaccagcctgggacaaaggccctcccttttcaattagcgtgaggaggcagtgactccttgcttctccccttggtgctgtggactcagctgctgggatgaggtgaagtcagtgtctagcgccccctactggaacaactctgaatttatagaactgggccatgagaggggccagctccgttcctcccccggcttcccctgcccttaaactggtccacacttactctattgcttcactggtcttatgcatcctggtctcattccgggatccatgagcctcagccccattcagaggccgtggtgacttgtggagagctagcatagcgccactgtacttagctcttctccctctagggcgagtacgttggtgcctgtccatgaggccctaggatgggagagttaggaactgataaggtcagaccctctctgaaccttcccagagctgtgtctgaagctgaaactaagaagattgtcccgcttattggtggctccagccagacacggtgttaagtctgggtaagtggatatttagaacggagcaccggaaaagcagatcacctggaacctggaccgtctgtctgcaaagaccagaaatcctccttcccctgctcatcctgggagtgttaaggaacatccttagcactcagaagtgaccacatcttctccttcacccatctccacctaaatggaaagcccggaccttacaccctgtaagaaaacccagaacccgtctgcatggctgtttacaaactacagaaacacgtgagactttgtcccgacccctcaggctgggccgccccagcccggggtgcctgtactgtatgtatagctgcaaggccagttcttgcacaaagtgtgtgtggtcttacagcccccgcgagaggtgctcaccggcattaccccttctgccatttctgatgggtcactacctcatggcggggctgctatgctgtcccagcgagtgtcattgactaaacttgaaatcggagctctgagctcatcgtcctgagccattctgagctgtgttctgggaacgttggagtccctgctcacccaccctttcggggatgtccaaggtacatagtcaggggcaggaccccagctccactcattgcacaagcatccttcttgtcggaagcacaaactggttgtaatttgagcacaatagcaggtctctgggtagacagtatgagcaaacttggcaccaggagatctttcccagatgggcttcgtcttaggttagaccagggctgcccgtgtctgtgaggttagaccaaggctgcccatgtctttggctgacgcactatgtacactgggaactattaatttactccttgtgcccctcctaggacttgaggcccaggccacatctgtatcctgtgggggtcctctctagacctgcacaccccaagcctttaacaaccagagtatagctggtacctgaccctactgagcctgaagagcctggacccagactcccatctcttgagctaaccccgacatccttgcttccgatattgattagcttccatggaaagtgtctactgtccccactctcttaggtcttttctgtgcacagtcctgggccaggacccatcccagtattaaccagttcagtgtttggtcttgttggtgagacttggtccgacagcagccaactcaatgcacatgctgcctggagcagcctttagagactgcagaggaaagagagagaactcgaagaatgagaggctgacccagcgcagcccttgatgtggtcagagtgccaccacagctacttgaaaagggacagctatggacctgggagtagcctcccaccgttgctccagctgcaggcctggaatggtcttaggctgtgtggcttgggcaaagggcagcttaaagcacaaacaaggagaagatgctgtcttgctgaaggattcttctgctagccattgtggtggtggcgccagcaggaagctgctgagaaggcaggacattacatctctgccctgccctctcccagttcctggaggcctcccttggagtctgggctgggtgcagcaggcacacccccttggctgtgcctggtatgtttgtgtgggcaggacttgccctgcaggagcggtgaattccttcccaccatgtagcccaaacctgccacatctatccctttgtcctttcaaataaaaaactgcttactgctgctctctttgctgagcacagtggccagttccccaacagaccttcttgagcccagccctttcacctcctgactcccaggtct

SEQ ID NO: 18222 - DNA, 1216 bp, Mus musculus
tttccctatcaaagcagcctcatggctgtcacctgagtactgaataaagaaaagtcaggtgcaggacattgagagaactaatgaacactgacctcgcctgtcttcgttcttccatctgtacatccagcaactgagcggaatgtctagtgtctaaaggtgtgatgtgaatattgccacaaagttcattgctctcagtataagattttactttattaatgcaagaggaatacagatatatttctttagtctgcagatttttttttattatggtgcagctttttaaattatgttttaaaattatacaaatgaaaaaatgccattccataaagtttggagatttccatccaccttactgaaacacaagcgttgtcatcgttggaggtcaaattaccatggtaactactcagttaaatctgccaaatccttgtcatggtaaccagtgtggcctgtcaactcctgctacttaccacaacttctaaagttttcctctcagtttctcagttttgtttaggaggactattgtttgtatttggctgctcacagccagagtctccttctttgatgtgactcatggacactgttgggcgatgtgcagtgtgtagtgtgcttcctgtccactcctgagcgctgcagatgatccgtcaggcttgctcgttcctgggggttacagtgtagttcccctttcatctgaataaaagcatggcaccaactgacgctgattcttcaataaagtgcgtgttgtcttgtcttgtgtttgataacgttatttggactcaggaaaatacatcatgaagttttcttgtctcagcctaggtttaaatttagtaattgaatatttacctaagtaatttttaatattaaattatgcttgaatgccttttgaggtggcattgcggtgttgttaagtttctgtgctttgctctgaagtatctgtctctatgactctcacatgtttatgttccttatacacagtcacactggctctagtgagttgagaattgtgaggtgtgagtaccactgcgtcttcagtgtggctctgagcccctctacacagtggccagttctgtaccagtctctagctgtcacttgtgctcagtttattcggatgaaggcatgaaataaatcctgatagccagaacaaccctcatgcataactgtgcgctcagacactgcctgagctcttttgtaagatgctcagtcctcagccaagtggttg

SEQ ID NO: 18223 - DNA, 1306 bp, Mus musculus
taaatattttcttcatttcttgtggtccaagtaaaaaatattgttattaaatcaatatttcacaagacatacttagttcaaaatagtaaaatatttctaacatcacatagcatgtcattagtatattgacatgcgtgtaactatttgatgttatagatttagcaggatttttttagtatatttaaaatgcccttccaagcttacagaaaataatattataaggtaaaattcaaatattgggggctggtgagctggtgagtgtttgcccacttagtgcaaactagggacatgtaggaagagagaccctcacttgaggaattgcctccagcaggccagcctgtgtggatgtcttggggcgttgtgcttgtagtggctagttttatctcaatttgacacaagctcatcagcgaccacctggctgctggtcctgggttctataagaaagcagtctgaaggaaccaataagcaacattcaccacagcgtctgcatcagctcctgactccaggttcctgctgtgtttcagttcctgtcttggctttcctcaatcatggactacaatgtttcagacatttggtgtatgtgcttggctgaggagccaatggggcgaagctaccatctgtgggattatgactgaacgcctctaatcctgcccaggcagcgccgaaggagcctcggttggccccggatagccgggtcccgtccgtcccagctcagcggggtctccccccccctccccccccgccgggcgtccggaccggggtctggtgcggacagccattcgttcatcttgggaactggaaagggggccgccctctcgcctgtcacattgaacatacgttcgtgtggaacctggcgctaaagtataagccatataggccctctcctccccaacttcctctttggtcattgtgtttcatgacagcaatagaaaccctaactaagacattaattgtctcttttattctttttgaattgctagttgatggagaaggggcagtccactgtgggctggctcacccctgagcaggtggtctgtatagggaatgtaaccgggccagccaggggagcaagccagtccccagcattcctctgtgtctctgcgtcacttcttgcctccaccttgattgggctcctccactggccttttttcctcaatgatggagtaatgtggaagtgtagaacccctgagcaatgaatgaagccctagattctaatcttagcaacatacacacaacacacacacatacacacacacacacacacacacacaccctttaggagtgagaggagggcctcaagtgtatg

SEQ ID NO: 18224 - DNA, 1201 bp, Mus musculus
aaagcccagagctaagagagaggaactgaggtgcaaacaggtacaaatcagagacattttccccaaacaccaagatgctgtccacagctgtcatcctagatgctgaccttggggtatgtatttgggtcaaggacatgtcagggacaagtgcgagacactgctctcttcaagtttctggaaagccttctgtggtggtttgaaagaaaatggttcccataggcccacaggggcggcaccatcaggagttgtggccttgttggagtaggtgtggtggtgttggaggaagtgtgtcactggaggcgggctttgaagtctcagatgcccatgctaggcccaatgtgtcccacctgctcttcctgctgcctgccaatgcagttgtaaaaccctcagctacccttccagcaccatgtctgcctgcgtaccaccatgccattcccaccatgatgataatggactgaacctctgaactgtcagccagccccaatgaaaagttttccttcagaggagttgccttggtcacggtgtctcttcacagcagtgaaaccctcactaaggcaccttctctattttctgtcatatcagggacagctaactttgatccaccacgatcctgtcagtgaggggaaaggggtgagaacctcagcattgtcggggttctgctctaccaaactgaagatgcaccccattaatgtctccagagctgtactgctagctccggtcaaatctgcccactgtggtgatctctctgtgatttcctctgcggctttcagagcttttcctctgttgtttctgaatgatctccctcaggttctggcttcctacgcagaggactccggctccaagaggaagacagctttgaaggttttttttgtgtttgttgttctttttttcctagaagaattgagtttaaattgctcacgtagacatccatttggataggaggatacggtggctgataaaggccacaccctggggttgaaaaactggtggaagggaccgggatctctcatgacaggaagatctgtatcgagtcctcaacaacctattccctgtccatgtctgcttttcttcttcttcttcttcttcttcttcttcttcttcttcttcttcttcttcttcttcttcttcttcttcttctccttctccttctccttctccttctccttctccttctccttctccttctccttctccttctcct

SEQ ID NO: 18225 - DNA, 1200 bp, Mus musculus
tttggtgttacgaaatagaatattataatgttaagattccaagttttttagtagggaaaaaagtcgtaatttctggtaaaacttaaagcgttatcatatttcctgacttttaaggagtgacataagggagagttagtgtgataatatttgtgaattgtttcattattgattgtcagtaattattaaaagattattaaattattgagcaagaataaaatcattagtaaaattgtttttttctttttacttcttaaaaaacaggaatgttgtgagttcttactctgatattcaggtaagattggttctattttatctcgttttaactagatagagtgcaacgataaacattgatgagactgttttccctaaattgttggcgcgagtgaaggggaaatcttgtgaactgaacgtgcacgttaagttttagctaaactagcgggtttctcagctaaaatactgcacatcctgtcactgtaggagattacagagagagagagggagggagggagggagggagagagagagagagagagagagatttcctctttttttgaaacagggtttcactgtgtaattctggcaatcctggatcttgctctgtagaccaggctggcctcgaactcagagagatctgcctgcctctgcctcctgagagcaggtattaacggtgtgcgccagctctgcctggccagcaagattctgaagggtaccctggagcacgcgtctgtgaaagaaacaagtagagcaaaaaccaaaagtggcaacggccacgcaaatcgttaaaagatcatttctttctataagttacctaagcatgtgtgtaagttacaaatgtatgtgaccatcaactgtgcttgcttttctgttacttaatctttttgagtgagtcaccgtaggcccgcctggcctgcttctttcttactagagctggctggaactgggaaataaacagagagccacggcggccaccggcatgaacgataaaagctcccggtctcattctgtgttcaccctggtgatgacacagaccaaggtattttttattgtaactcaatttcactttttagttaaaatataattacattatttacctcccttccatcctccagtctctcccaggctgcccccttcctccttctcaaatgcatgacctcttttcctgtaattgttattttacgcacacacacacattactcaact

SEQ ID NO: 18226 - DNA, 1182 bp, Mus musculus
ttatgtaaagtctagcttgacttttaagaattaaaaaaaaaacaattactcatacattgcccttctcttgtgatgcacgattaaaacatttgtttaatgtcatttttaaatttttaacattattttactttttatgtgtatgggtgttctgcctacatgtgtatctgcaccctgtgcaatgcttggtacccacagaggccagaagagggcgttagagatccagagttatagatggttatgagctaacgtgtggatgctgggaatcaaacctgtgtcctcagaaagagcagctgatgctctcggctgctgagccatctctccagcccctaatgtctgtagtatgggattattctaactgcgatgagtgctgtggtcagacatgcattttggctctaatctgtgtggtttttgttagttcagccaaactggaactccatgaaactctccacgatgattcaggaagccaatgccatcagtgacaaatttaaaaagtgctatatttttggcaggtgagtagcttttacatttattgacctatacgttatttttttttttttaattcaagttgctctgaagtctatgtagtagtctctttctaggaaagcacagatatcagaatccctggtaacaggctttaagattccatgtgtaagagtctactgggcttccttttgagttgaaatcttgtttttcagcattccatgttattccatgttcattttatgttggtgggactaggggttgaatccacggcctcacgtctgctctgcatgtgctgtgtcaccaagccacaccacccaatccacacctcgattttaaaaaatcattttgctatgctgtatgtgtgtgtgcccctgcttgtggttatatgcaccgtgtgcacacagtagccgttggaggccagaagagggcgccagggccccttgaactggagttacaggtgcttgtgagccagacagtatggatgcttgaaaccaaacccaagtcctctggaagagcagaccgtgctctttgccagtaagagccctgtggggtgttcatttgttttaggtttaagcatttttttctttctctccagacatgatgcatcagacaaaggccgttctgatacctctgttcgagttcgtaacctccagcttgggatctcaactttctggagcctggaaaagtttgaatctaaac

SEQ ID NO: 18227 - DNA, 1260 bp, Mus musculus
tatgcagagctgctggccatcattgaagagttggggaaagaggtcagactgacgtatgcaggaagcaagagcgccatggagaggctaaaacgaggcatcattcatgcccagagcctggttcgggagtgcttggctgaaacggaacggaatgccaggtcctattccctggtcggtctgaaggcccatctcactaacccgtggagatgagaagctttgtgcaaaatggcagtcatttttctaccacagtcattaagctctgaacccacactcaaaagattgggaggacattttgcagtaactgacgatgtgcattttaagtagttaggaatgacgcagctcttttttctttccaaacatttgaaagatgtttgtgaagccacttcacagcaagctattgtttgtccccaaataccagtgtcccctctagcctccctttggatacacatcaccccagttgccgtcctttccctgagttcacctgcctccaagttgagtgcaaaccacagcgcctttgctcagtagctggcctgcctgtgtacagtgtagaccctgcttcatggagcttctctgcctaagcgtttgcatgactgagtgctcggaagtcaatctttaaaatgcacagaagaaagagccatttacccaacctcccaagcaccctgcagatgtccatcctgaggctgtagatctcagttctgtgtttactgtgagcccatcacagcatctggaagaaaacgactggaactattgcatctttgtatttattacttgatgtaataaagcttattttcattaacaaaaagaataaatacaatcaggattgcattatagactcatagagggcactgaaattgtaatttcaaagctgggttcatgaaatgaagaagtgtactttttcttctttctgggagtcaatcttaccacacagatcttgtttgcctggaacttgaagcttgcaggagagtagttcttgtgcctctcactcctgagtgctgggattagaggtgagccaccgtggcctacttttcttcttactgtaactgcaagtctgagccgacctagacaagagcttagtgaagaaagccaattaaacacacagcagcacccccttgcagaagcttgcctccacctgagggggcagcagtgagcagaggcccagccaaggcttcactgttgatttagtttaagacttgcaccactgtgagagccaggagtccccatctgggtctgattgtcagtggtaaggtgggaaatgccatgtgc

SEQ ID NO: 18228 - DNA, 1165 bp, Mus musculus
cccgtcctgtcggatgtgtggcagcagagtgaccaggccattctgagtgccctgtcctgtcctgtcggacagagaggattggtttccctttccctctttggccactgggtttcctcctgcggttcactctgtaccggtcattgctctggaagtaacacttctgttaccgagttcatacgctgtgaagtacgcggaaggattcttcctgagcgctgagcttccttgaacttactcaagtaccaaaatggcagttttcaccttgctgtgcaataatctttagtttctccatctcttatcccccttgttttttttttttccttgcttttagacttggtccagctgagcagtgcggtgtggcctcaccctgtcaccttgctgcctttgcctcctgaatgctggggttacagtcagtcccccaaacccaagcccaaacccagctagtgtctatctttcaaactcatgtctgtcctcaaaaatattgtgggtatgcttgtaagcttatttatatttatgctaaataatctgtgggactgtgttcgagtgggtggtgcagaaggcattgctgtcagaatcatgtgcatgaaaagtgttgtaaaggaagtgcctttaataaatctcatgagctccagaaccgcctcctaatccaggacctttcttattgaattattttcattcacttcatcgtgatttaaaaaatgtcactgtggctctgcctgtctactacatatcaattaaataggaaacactagattcatgctaaaatcattgtggccactgtgtcgcttttcttgcttgttcccttctagaggtggggaccgaatccaggtgctgtcactaagctaccacgtagcccctcctttctccctcctgaacaatgtcccaccctctgggttggctggacatggatcagccttatttcccagttctctgcttggaagctgggtgtgcgttttatgcactgaacactgtactgcaggccggtgagtaactacaccaccttaaatgaggcactagctgcttccttcctggttcctcatctgcagaaggaaaagtcccaccacttcatggactatgtccgtgggcactgggtgacagagaggaaggagggcgcttgcccagtagcagatgataagccaatggtagtctcccttctgtaacgagcagc

SEQ ID NO: 18229 - DNA, 1115 bp, Mus musculus
aaaaaccatcctctttatccacctgtaacaaggctgtaattccattaagtgattctgtgaatgtcttctctagtacagtgttaaaattaaaaacccaagtgtttggttggtttcagtattagaaagtaagttcaattcacatagtctattgaaatttggggtgtgcattattcatggcctaaaacattctcttgtttaagctattactcaccaccttcacgtctgggtttggtatttgttcttaacttcttaaagttctgggccttcttgttccttctccctgtcttgatggtttcaattttagagtgatttatcatctagaagataattgattatgcattttatatgtcgtaagacattcaaatactaaacaatagggtaaacatccctgactttgcttttctttttattttgttaacaaacccaataccgacttccacgtacaagctatacatagatgtcaaagggttgtcatcctacctggtggcagagcttgtgtaacagataagagtgtgtattcagtaatgacatcagaactctttgtgaaattgcagcctttaatgtacattttgaaggggtgtattagtcagtattgtacagggatcttgtcatcaaaacttgctatgaacgctaattgccatttgaagctactgataggcagtggctctgctctaaaccactttttagcaattgtattttttcctgattatattttttaatgtactttgatgtttatgctgatgagtttttatgtacttttggtggtgtttagtcttatgaactcttctgacgtcagaaaagtcccactggttgtttgcagtctcattgtgtaatcagcctaccacaggcttccatgtataataaagtaattaatattgtgcaagtgtaaaacacttctgttataaaagcagtgtttggaaaataagaaattattaaaaatggttacaaaatactagttaattcccttttcccaccttccaccttttagctttagttagctaaagggtaccaacttgtcattgaaagatttttagaaatgtgtttaattcttttaatacactcagtactaaaatgtctgtatgtcttattaagtgcagtaagttctgttgggtaca

SEQ ID NO: 18230 - DNA, 2848 bp, Mus musculus
cttgctattaaaaggttaagaaattgagttcatagctattagagggaaaggtgagattgtgatatagaagatgcagtaaaggtatttgatgtaacttaaaagacagaagctgaccatgtgtaacacctgcctttttagtcccagcactggggaggcagaggcaggtgaatctcaaatccatattggtctacagaataattttcaggccagccaaggaacagtggaaccttgtctaaaaataacttttaaaaaaggttgaacatttcttgagatgttaaactgctttaagatttaagtgtatgaatattgatgaaatagtgaaaacaggaaagggtagaatgcagattgtatttatatgtgttctatacataatttacagtgagcattaagcatggggctgctcagtagaaggtagtatagtttgttgtcatagttactcctacacttggttgttggagtcgagttcctaagggacgtttcacgaaatctactatgactccagttacttgattttctgaacagcttgtttccccagatttgctggagctgataagaattttcaaaacccacttgccttgtctttttgcttttcttttatgagctgtatatgaatttgatttttgaatgtcttttgtttttaagactttagagtatggcctatgaatacagatagtttagtggaaagaggtcttgcccaaagcctgtagattgaatccttatctagtaccaagtaagccagcttctctggaccccggtaataagcactaaagaggtggaggtatccagatcagaagttaaggcgcatctctggctacataggaggtttgaggccagcccaggctactcttgtttcaaaaagtaaaaaggcatgagacatgaagtagtaagtgatgctgtgagttctgttgcactacagaaattcaacaattattgaccaattgtttgtgaggtaatttttaagtattgcaaacgtgatataaacatctacctcagatttcatgtactgcactagttagggagaagttcttgtccattttcatattgttctcattcctgataaacagcattttataattaccatttgtatagtgatttacatttaccatttgtatagtgtatagaggaagagggtagctgctcaaacctctaatttcataggtcctttttagaagaacttaaagaagggggaaaattttcaactacaaactatttttagagtaagacatctaaaggctgtcattttctgagtttagtggtcttcatgttttctggtgatacatagtgataagattccgttagtgcaggactgctagagctgtggtggggtccccagctgcttgaggagtcagatgtcatttgctctcctgattgtggagagaaggatctgggcagttgatacctgcttggacctctgagatgctagagttcctgagggattttgaggggaattatgttggtttttttatgtccttaatgtattgtttagaatgtacagcattgaaggtagcaccttgaaaatctgttgtcttgcccttaattttaaaaagaaaaactaaggaatttgagactacttagttttaatgaaggcatacactttcagaattctgttttcttggtttttgctttacatatttaaatgtgagtagcttactaaggttctgaaatccttaaaagcttatgcagtgaaatactacctgacagttctgggttcacagattagttgagcccacagttggtagagccagtcctccctccctaagagcacattagtggaaatgcatctgcacttagtttacaagtccgtcaataagtatatatcttacttacagagacatattaagaatctcttccttagaagatgcctatatacctaaattttattgtacaaataaaaagttaatgcctgaaatgtaatccagtacaaatttcttcatctgtagcttatctcatcaccatctgtggaatgcatttatttaggttatatacagccttggagttcagtgatatgccagtcaaataataagttgtgtagagtttgcacacttgcttataaccacctttcaaaaaactttcaggcttgacttgttttccatcaacaaaaatgttagcaagataatagccatttatgaaggttctttcattgtacaagaactatttgtggatatgtactgacagataggcaagcaagcacaaccagcccatacctctttatgtaacaagagtaagactatcctcaacgtagcccacgtatgacgagctgggctgaaatgtactgtgagaaagaagacttgaagagcatgctatattttgaaatgggtcattcttacgaagtataaagaaatagctaaggaaagctgatgatttaagacgttatgctcccaaggagaacattggtattgtctctgtgtttaagagaataaagaaagagtgggttaattgggtaaaggtcgagtattaagtggtatctcctaaaattaaggaacaggttttgaagaagcaaagggaatagaaatgttaccacaagattagtagggaaaattatccaaaagggtaaaggggatcttttgaaatttgttctttgtcgttcagttcagactaattgtggtactttggtttgttatgaactttagtactattgtggaacaattaataaataactcttcacagacagctgtggtgaacttgtgtttacattcccgagctagaaaaagacgattaacctctgtttatatattcaatctgttctttggtaaatcatgacacaacttccattggttggtaggaattttaaagttacttaattttcctggtcagtcaaaagtattgattatatgtagccaaataaata

SEQ ID NO: 18231 - DNA, 1181 bp, Mus musculus
atcccaggctctaactttctttaagaagagcatcttttaagtattttcagaaactatagtacaacatttagaagaaaaacattttaaattctagtccttttaatgaccaagctccaatgacagtatacgttaacatgctggagccaaatgcccagtattattagattaggatctctgttatgcagaaaaatgagactcaaggcctacagatgtgtttctgtttctgttgtgtttattaaggaattggagcatgacaaggtaacacacactcagaattccaactcttgggagtcaatggcggaaagatagctatgaacaggaagcctgtgaacttcagtgaactacaggccaaccagggctgcccagtgatcctgtgtctttaaaccaaacatagacaaaacctggggtatgccgtgcaatgagccaagcatggtaatactgtgacctgcctgtaatcccaggactcaggagcaggagactgaagcaggtaaattgagccttcgctacatgacttcagcctgggctaggtagcaataccatgtctcaaaaaaaaaaaaaaaaaagacaaaaattgtttgcttgggacatatatatggacgatctcatcctgtgtctaccttgttaacaactatttcctctgtgtgtgtggtgcatttgtggtcacgtgggggctttaggggttgtgcatgtgtgcgttagagcatgtggaggcaaggggtttacctcaggtatttttctaggttattcaataccttgtgttttgagactgggtcttttattgagcccagaagtcattgatttggctatcctgactggccagtcagcccaggagatctcctgtctccacctccccaagtgctgggatcgcaggcacacaacaccacacctgacgtttatttgagtgctagaaatcggaattcaggtcctccagtgggagtttattcccacatcccctctttttagtttttttttttcttttctttcttttttctttcttttttttttttttttttttttttttggcttttcaagacagggtttctctgtatagccctggctatcctagaactcactctgtagaccaggctggcctcgaaatcagagatccgcctgtctccacctgagctgggattaaaggtgtgcaccaccacgcccggctttttttaagttctttgaaacag

SEQ ID NO: 18232 - DNA, 1176 bp, Mus musculus
tttggttttgttgttgttgttgttgttgttttttttttttttttgagtcaggatttctctatagccctggctgtcctggaactcactttgtagaccaggctggcctcaaactcagaaatccgcctgcctctgcctcttgagtgctgggattaaaggtgtgcgccactacacccggctactaggcttttctttacactaatctctctctctctctctctctctctctctctctctctctctctctctctctctctgtgtgtgtgtgtgagtgtaatgtgtggtgtgtgtgtgtgtcggccatggtcagaggataacatatggagtagaaattgtctctctcctgctattatgtaggtcctagattcacactcagcccaccaggattggtaacagaagcctctgtccggccaatgatctatctatcacctcacagtctccactccattttaaatactgacttcttgccttctcgctcacgattacttagctatgccatgcatacagaagacatttccaaaaatgaacaaaaaagaactgtttttcagctctcaatggtataattatcccaccctcactcataatctctctctctctgtctctctctgtctctctctctctctcccctttggtttttcaagacagggtttctctgtgcattcatggctatcctagaactcactgtagatcaggtcagcctgcaactcagagatctacctgcctctgcctttcgtgtgatggggttaaaggcatgcaccaccagcatggccttaatatgatcagatttttttttatcagatatacctatatgatttttaactcattgcttcctgggtcatttatactgcccacttatccaaccagccctgaaacttcgttaatttttctgagggtgtttagcatctctcccttcccacacttctctccccactcctcctttacctcttcttcttctttgcccactttcacagtgctcactcacgctgggtaaaagttctaccactgagctacactcccagccgggcgtccctcttccagtccgcagtgacactattgccttcctgtaatccagtgttagttacattgtttttgtcatggctgctccagtttaacaggataaaatatcagaagcctggcaagctgtcacatgtctataattccatataggaagtggaggca

SEQ ID NO: 18233 - DNA, 1194 bp, Mus musculus
tggggaccatttttgcccgcatatacttacacaaaaaatatttatttttattttattttattttatttatttatttatttatttatttatttatttattttgtttttttgagacagggtttctctgtatagccctggctgtcctggaattcactttgtagaccaggctggcctcaaactaaaaaatccgcctgcctctgcctcccaagtgccgggattaaaggcgtgcgccaccatgcctggccaaaaaaatttttttaattaaaaaaaaaaaaattggacttttaaccctggtgcttggtaggcagcaagtttgagaccagcctggtctacaaagcgagttctaggacaggaagggctgttacacagagaagaaaccctgtctcaaaataccaaaacaacaaattttgtatgtgtgttttgcctgcatgtatatctgagtaccacttgcatgcctggtgccccgagaagctggaagccagtgttggaactcctggacctggacttatagagagttgtgagccaccactctgggagtgaatgctcttaacttctgagtcatctctcctgccccccatatatatatacacttcttaaaataattttcaaaaattttattcagtcttggacagatggctcatcaggtaaagatcatgtaaaatctgtcacctgagtccaattcctggaacacaagttgtcctctgacagggctggagaggtggctcgtgggttaaagagcactggctgctcttgcagaggagctgattttcgttccctgtactcacgtggcagctcacagttgtctgtacctccagttccatgagaatctaacaccctcctctggcttccataggcactgtgtgtaaaccatgtatgtacatttacatacatacacatttatatatgttcatttacatgtatgtaatcaggcaaagcactcagataaaataaaaaatcaagtaaattttaaaaagtcctctaacatctacacagatgccctccccatcctgtgtacatacacaattataatgctttttttttccattttttattaggtatttagctcatttacatttccaatgctataccaaaagtcccccatacccacccacccccactcccctacccacccactccccctttttggccctggcgttcccctgtactggggcatataaagtttgcaagtccaatg

SEQ ID NO: 18234 - DNA, 1105 bp, Mus musculus
gagagagagagagagagagagagcgcctagagcttgctatgtagggccaggctagctttgagatcctcctttctgcctttgcctcccaaggactatgatctatcaacataatttaaagatgaagtattctctaaagcaggcaccaggaagagcctttgaaacatgttattccaggtgtggaagggcacacctgtaaatcttgcagaggagggtaagatctatgagttcaagtccaacctggcctacatggacaggagtacacagtgaggtgaccccccctcctcaaagttatctcatctataatcatgaagtgcttatggctacatatctacatgaagtgcttatggcgttctgcctgcatgcgtgtctgcgtgagagtgtcaggtctcctagaacaggagttatagatggttgtgagctgccatgtgggtgctgggaattgaacttaggtcctctggaagagcagtcagctcttcactaattactctttagagacagggtattgtgtagttcaggctggccttgagcactgtctccttagtgctgggatcctgggctgtcctaccaggcctcctgataaatgaacttggtaacagagaattgttgatgggttagcgtttagctccgggccaggcattacaggcctccatacttgctagagaaatatccattctgcgaggatgggaaaccttgggctattctctgtagcttttgttcctttctgtctttctatttacctgctttgtttgaaatataaattgaagatgctcttaaaaaaaatggaacagtttccccattggtctctgtttaaattatttactgccctttcgagccgtatcttcattgaactatgttaaaagtattttgctgaaatgtttctttatgttgtccatcgggtttaatagacgtcccatttaataagctctctacctgtaaggatagactatttgacctctatgccctgctactgctagacatagtataagattgctttgtgaaataaagctgtcggtaacatcaacaaaataaaaaatgatcgtattccaatactctccgctgagtactctgacagcgctgaaatatggaataaaattgaaagtagatt

SEQ ID NO: 18235 - DNA, 1197 bp, Mus musculus
cagcacttgggaggcagaggcaggtggatttctgagttcaaggccagctttgtctacagagtgagttccaggacagccagggctatgcagagaaaccctgtctcaaaaaaaagaaaaaaaagaaaaaaagattgtgccttcatgtaatttacagataactgagggaagcaggtattcaatactcaattcatgaatatcttagtaattactcatataattctaatatcgcagtggaagacagaggtagcaggtaggtactggaaggaatttgatctagcaagacccttgaggaaatgtggagttgtatctgaaagatgaagtccagcatcaaatgggagctgagcctgttcttccacgttcctgggacagggaagtcagtgcctggggagatcactcaggtcagtagcagccccgtgctagaggagactggggccacacaggcggacctgtgtgggctgtggaagggagttccaggttcatctcccagaccagaagagtttgcagcagggagaggggctaccatttgtttctttgttgctcttcttactacagtgaaaaggatggatttgatatgggcccaaggtggatgtgaggagcgggatttggggccactgcagggctcaggtatcatagatggaaaagctcaagacagaggatggcagtggataggggtggtgtggaaagattcaagaggttattgggaagcagaattgaccaaaagcatgaatgaattaaagagaggacagttgttccatagtccctgagctttgattttggagcttaaggaaggtctgtattgatggggaccgtggataagaccagagtgggtctgccctgggaaagctgagtttggagttgacattgtgggtttaatgttgcataaataaataaataaataaataaataaataaataaataaataaaataaagttttaaaaaaagtaaattcctttagctggacttttataagaattgaattcaagaagagttaggagcgggcatgctcaatacctaccattctctcatgaaaccgggttttataggcgcgggttcatttattcctcgtccctcatcattttatgtttaagagcaaatgcacttaaaaccactgtttggaacatcgcttttactaaagaggggaccactctaccatcagtgtaattgcttcggcactgtcttcatgtagacagacttgtg

SEQ ID NO: 18236 - DNA, 1183 bp, Mus musculus
tatgtcagacacataggtggacaatcaatgccgactagtgtttaaagatagctcgaggtcatctggccccggaaactgcaacattccagttctctgcaagcacacagttttgatcagccaatcagtgttgtcgcgtctctaatacaagcgtgacatttttttctgcgaacatgagctcacaatttggaggatgaagtgaggtgctgctaggagacactttccgtgggcgttttgcagagacagtgttgttgttgtctggtatggggtgtggcagctttcccatcatatcccccccccccccacacacacacacacataggaggctgaagaaggggaaaatcacgtgagcccaggagtgatttctgtggtggacagagcatccccttcttgtattgttttagacagggcctcactgggcagccccggcttcctctaactccaattgtttctggcaatgctgaggacctgcgggagggtgtggtcccaaggggtttcctggggggggggggggggggaggagcgttgctggtaaagtgtaacaatgtaacaagcagaaagttgagactgcccgttggggttgggggtggaggattccctctgacccggaaggaaggaagggtctctcagtgttctttcctgaagctggcagcgcactgaggtagtgtgaaggatgggtggacttttcatggctcttggcttctttttacccaggggcctaggtagcaattgtgtccaggttctaacgtggacctacaaagtctttttaattcaacaggcagatccttagatgaaaagtctgttaatctgcagggtatctcagtatgtcatgggggcaattagcatgaactaccaacacggtcttagtgacctacatagctgtggaaacattcattgtatattcccagtggtcgttaaggagaaatcctgtctcaaaacaaaataaaacaaaaacccaaaaacattgtggagtgttggtgcttaatgcctttaatcccagcattcaggaggcagaggcaggcggatttctgagtttgaggccagcctggtctacacagtgagttccaggacagccagggctacagagaaaccctgtcttgaaaataaaaagaattctttttttctcatgtaatctattccgattatggtttcccttccccttgttctgcccagctccttcgcacct

SEQ ID NO: 18237 - DNA, 3676 bp, Mus musculus
aaatagaaatacaaaaggaaaatacagccaagtgaagtcttgtctttcctttttccttttttcaatgcagatgtgaagaacctggagaacctgcagctggtggaaggtgtccaagagcaggtgaatgccgccctgctggactacacggtttgcaactacccacaacagactgagaaattcggacagctacttcttcggctacccgagatccgggcaatcagcaagcaggcagaagactacctgtactataagcacgtgaacggggatgtgccctataataacctcctcattgagatgctgcatgccaaaagagcctaagtccccacccctggaagcttgctctaggaacacagactggaaggagaagaggaggacgatgacagaaacacaatactctgaactgctccaagcaatgctaattataaacttggtttaaagacactgaattttaaaagcataataattaaatacctaatagcaaataaatgatatatcagggtatttgtactgcaaactgtgaatcaaaggctgtatgaatcaaaggattcatatgaaagacattgtaatggggtggattgaacttacagatggagaccaataccacagcagaataaaaatggacagaacaatccttgtatatttaaactaatctgctattaagaaattcagaagttgatctctgttattaattggatttgtcctgaattactccgtggtgacgctgaacaactcaagaatacatgggctgtgccttggcagcccctccccatccctcccaccaccaccacccccacccccacaaggccctataccttctgacctgtgagccctgaagctattttaaggacttctgttcagccatacccagtagtagctccactaaaccatgatttctggatgtctgtgtcttagacctgccaacagctaataagaacaatgtataaatatgtcagcttgcattttaaatatgtgctgaagtttgttttgtcgtgtgttcgtaattaaaaagaaaacgggcagtaaccctcttctatataagcattagttaatattaagggaaatcaaacaaatctaagccaatactcccaacaagcaagttagatcttacttctgctgctgttgctgaaatgtggctttggcatggttgggtttcataaaactttttggccaagaggcttgttagtatacatccatctgtttagtcatcaaggtttgtagttcacttaaaaaaaaataaaccactagacatcttttgctgaatgtcaaatagtcacagtctaagtagccaaaaagtcaaagcgtgttaaacattgccaaatgaaggaaagggtgagctgcaaaggggatggttcgaggttcattccagttgtgacccgagcgtccccaaaacctgggatgcaaagacagtgattctgcatatggcctggaaagacaggaaagccagtctcctacaaaggggaatggaagatcctggcctctaagtcatagaccaaagtctgctgtagaacaaaaaaaaaaatactggagggcagagatagcaaaccaagtctccaaacaatgctgtcagtattagcatgcggtgccgtgggcatggaaaccttgccttacttcctggtcctaaaagggagctgtgcagatgtggatcaacatttgttgaaaataaagtattaatactttaaaagtcaaataaaatatagtgtttacattctttaggtcctgggaggagttgggggggggggactctgataatacagatagtaaaagcagtaatttctttaatgttatttttctggttagtaattatttttaacagtacttaattactgtatgtcgtgagacactaaaatcaaaaatgggactctcattttgtctttatttgttaagattaccagcagcacaatcatttgtagaaactgtataaaaaaaatctcctggtcccttaatttttttccacaaatgtttctggctttggaatagtttatttatattgtatatcatagtttcaactatagacaattacaatgctaatttattgttccttgggttcccctttgtataaaatagagccaagactgaagaaaccaaatatatgtgtttactatagcatgtcttcaagttagtgaaacatagttcaggggtatagaagggtcttaatgattaaaaccatccacttgattacatgtctcaaaactcccacaatccatctgtagtttatttaatatccattgtaaatcatgtgacttacaactttttcttggttttaacgcattttaacattgaagagtcttacctggttttcctttccaaacattgtaagttgtataccaaagatattagtttattacttcagtgtgtacaaaaaaattattttattacatttcttaatggcctctaatatccatccacaggaaggacgcacactagctgggttgggattgactctcagtgttatcttcatggttctagggaggagaaaaagtcatcagtcaaagctcagatccaaagccttaaaccagacagagacagggctgctcctcccgactaaaaaccaagtggttaaaggcacatgagagagactggagatgtcagtggttaatgagagagctctatcctggatgttaatgtgactagaaggatggctattttgagggtttttgacattgaaaaaaaatccatgtttccttattttaaatatatagtactcccccactgactattccacctaaaaattgtagcttttaccctgagcatggttagagaaacaggcgacagtcacatccataccaaggacagaagcagtttgagcaggtgtctatatggtaccctgcatccggggccctttgggaactggccggttatctgatgtcagtaggtagccagtttgcaacttagccagctgcctcattgattctgagatttcctaataaaggcagactaaagacgaagggtcttcacctgagccgggtttcccgtagctggtctctgtagagagacagtctgtgacgtccgagtctttggactgtggctcctctgcatctctcttggacttgtatccatgcggtgttccgagtgtgaagttggttacttgttgacgttttcttactgtatcagtgaaacacacattgtcatgtcggttcttgccatgaatttctcaatgaaatggattttttttccagtatttcaataaatattgatatgtccacctggtaactttttaaatcctttatgttgtccttgtgttgcatgcgagagcatctagtaattaaataacacagctaggaattcaaataatttcacaatgaatgtgctcattctgtctcccgaccttccatctaagactccatatgtcaacaaacaactcagaatattcagtctacaggccacagttccagtacaaagtgtcatttactgaaagcagctggcccagaattctttttgtctaccaaccactgtcctaaggtgctttttattaaagcctcaaaccaggcagtggtggcatacacctttaatcccagcattaagaccagcaatctctgtatctctgtaaaatggaggccagcctggtctacaaagcaagctctaggacagcctgggctacaaagaaaaaccctgtctcagaaaaacaacaaccaaaaaaaaaaaaaaaagaatcctcagaacagtgtttaaagccctt

SEQ ID NO: 18238 - DNA, 1192 bp, Mus musculus
agaagcaagtttctgcagcttcattgctctgcaaaagcgacaatgcgcaaattagcattgctaagcctagcaaagggaggtgtacttacatacagcaagtcactgtaggagtgtgccagtcccttacagcctccaaattttgccccattcattaggcaaaggcgacatttgagaacagtagagagaggtttaaaagacatttgaggttaacatttgtatggttcatgtttcctttctgatctgttggtttttggttaacagtggtcactttaaaatgttaaccaaaaaaaaaaaagttggaaactgaaaaataataaagcacatgtttattgatgcacaaagatgctctcctcatgtttaaaagtactcctcttcaataccacttgagtaaacattattttatattttatctgatatctggccaccaaccacatcagcaatgcttttcagtgcagcagcattaaaacctatattgggaaattaatagggcatgtgttcatgtttctcttttttttttttatttcagtgtctcaatttaaaatggtgaattactcctatgatgaagatctggaagagctatgtcctgtgtgtggcgataaagtgtctgggtaccattacggtctcctcacgtgcgaaagctgcaaggtttgccttttctgtgctacctaaaaaagatagaacggtttgaccaaacccatggaaactcttcaaagttaaacctgtttgtttctttctttcttttttcaactggaaagagtggggtggggtgaggtgggggaagtgtcatagagcgactaggacttacagtatgtctgatttagttccaaaggcaggtaggtgcctatgctgtagaaaactgtcagactggtggctttaaagtagtttattgtggtgcggtgctgtatctatagggggacattctaacagtcctaaatattgattttgcttgacttatatatatttaaagcatccttgttaaaaggaaacaggacagagtacaacccaagtgtgttttaatttgagaggaatctgtgctgcaagttggaacatttttctttagtccagaagacatgaaggtctgatttcccaactgcatgatttcatcctgatggattctgaaaataattttaaaagatttttttttaatcaaggtatcaagaaaccagattttagtttctaattgaacaatttt

SEQ ID NO: 18239 - DNA, 1234 bp, Mus musculus
gggaagtggggattgccctggcatattttccccaggcataaagcccaggatggggtatttattaggacactcttttagggtattgaaaatctgcaggtttgccccaattcgggattggcagcccgccctctcacggaagcggaggatgtccccacccccaccccctgcagctgcctacagtgcttatttgaaacaatcaatacaaagagaattttttttaagttttttttttttttttttttttttaaccagggaagatcactggctttaagttcgtgttttgttttgcaaagcttggtctacaaggtgcgctgaagttttgtctttagaaaccgggctgttctttttaaaacaaagcgctccgggtgagggcgtggagcccaggaaggaggtgggggggagggccagaacccacccagtaggcaaaacgcattattggctcaactgagttttgcagcttcacctgatggaatgttcaagtgggaggggtggaaaaattagggaagtcagagcttcagagttgataaattcgtttctcttttcccttgggctgtcacttcccttcaggggaagaatactttaaaacagagatctaggactcttcccgggcttcagaacgtagtatcatcagttcaatacaactagatacctaggaccggaaaggtaactttactcaattctttttctttccttccttcctgcttgcttgctttttttttttttttttttaacatcaaaagaaaaagagagaacagaggaggaagcgttaaattttgttactaagaaagatgttttccaagttctttgctaaattgggcgggtcgctccaagcttcatcttctcaggtgcgtgggacagcagtgtctactcctgtgcttctagcgctcagaaaacttcaattggtcctggatagtttggctcttctcccacccccatccccggctcagctgcagcctagagtggattacaaacgcagggaggactggcgcttcttaggtcaggtcaagggcaggcttgctctccgtgagcgctccaccgagcggcgcggcgcgcaacctcgggaagggagaagaccggaggagaacttgcagttgcatcctcgtgggtggggagtgcgagaccgcctcagctccagccagctgggtgaatgggggcgcgcacggccccgggaacgccgaggctggataaaatatgccaggcctgcgcttctcgggctcatcaaggctgcgggagc

SEQ ID NO: 18240 - DNA, 2430 bp, Mus musculus
ccttctatagctagaatagttagcactatgaacagtgctgaaggattatgctgttcaatattaaggaggctgattttaacttttgctttgtttcgttttcagctacgacagctagttaatatatgcatcaacccagatccagagaagcgacccgacatcgcctatgtttatgatgtggcaaagaggatgcatgcatgtaccgcaagcacctaaactgtacaagatcctgaagacggcaaccaagataacttaaaagtgtttttgtgcagatcatacctccccgcttatgtctgggtgttaagattactgtctcagagctaatgcgctttgaatccttaaccagttttcatatgagcttcatttttctaccaggctcaatcaccttcccaatccacaactttgggatgctcagatggcaccaagaatgcaagcccaacaagagtttttcgtttgagaattgtttcgagtttctgctgatagactgtgtttatagatagtcagtgcccgatggtgaagcacacacacataggcacatgtccagagcgatgcagaacctgaggaaggacctgggcatttgacttgtttgcttttaagtcacttaatggacgttgtagtggacatgattgtgaacttctgatttttttcttttaagtttcaagtacatgttttagttcttagcattagagatctcaaatataattcttataagacatgcagacataaactttttgagaaagatttaaaatttttagtttatacattcaaaatgcaactattaaatgtgaaagcatagaggtcaaaatgtgagttggacactgaagtctatgttttaatgcctttgaaagcctttttttgtgtgtgtttaaatggtataaatgaacccattttaaaacgtggttaaggacttgtttgcctggcgtgatagtcatgtttaacatgcacaaggctttgtgtttttattgtacatttgaagaatattcttggaataatcttgcagtagttatagttcaatttctttacaaatctaaatacacttaactcataactatacactgtaatgcaagcatatattgttattcatatattgaagttttgatcagttcctcttcagaatcttttttatccaagttactttcttatttatattgtgtgtgcatttcatccattaaatgtttcagattttctgagaatgagttccctttttaaaatatatttggtatgccaacacttttttaggattgaaaaaaaatttttttaaatgtttgggtcattctaggtgcatctgttttctcttgttagaaagaaaaggtgtgtgttaaaatgtgcctgtgaatgtcgatattgtttggcagggttataattttagagtatgctctagagtatgttgaacagcgtgaagactggcccttactgaagacagaactgttccaagagcagcattcccgttgagatgctttggagtaaagtactgtgtatgacgatgacagacattttagttaagggggtgaaaaaaaaaggaggggtatttaggaaaccctgaggtggaattttggtgaatgtcttcatcttaataccagccaattccttcagagaattgtggagccaaagaacagagtaatcgtggctgttgcagaacacggtgtgccatggtagagcattgggaaggctcatcctgccggtgggtcggtcagacagccctgtgttggggagcttgtactctggcccacagagctcctgggttgattttcttacagagtattctttctacagttattttcaagtaattgtaaattttcaaagtaatatctcatcttttaattcactatgtatgctgtcgtagacaaaggaaatctgggtttttttttgtttttgtttttgtttttttttgtcttgaaggctgaactgggtacatcccagatcttagtggctcataggatatacccagaggcatgaagaaatggcttccggtgaccatttgtgttgtgttatatccattgtaatgtcacaggactgattgagatgaaacatccccttcctacaagagttgttttctttccatatttaaaaacatgaggttctgcctggcagtgatggtacacacctttaatcccagcacccgggaggcagaggcaggaggatttctgagttcgaggccagcctggtctacaaagtgagttccaggacagccaggactacacagagaaatcctgtctcaaaaaaccaaaactaaatgaaaatacaaggcttctccccttgtagtgactttgctttatgaatttgtctcaaaaaaaaaaaaaatagagctggagggcttactggtcagggatggtcactttaactttgtacaagaagaaactttctttcaaatactttaagtccctcagttcatatccaccctcccccaccaaaataaagaatccattgtgtaga

SEQ ID NO: 18241 - DNA, 1157 bp, Mus musculus
gagccctacccagagatgagacaggcctggcctgggtaggtgagttgcttccactgctcagagcagaagaacccaaggccgagagcttgacatttgaagtggtgttagtctgtcacacctgcatcaggtttttcacagtagaaatctagtttctgtggccgacatttacatattggcataacaagctacggatatggaccaagggtagcagaaaggttggcagtgttggtgagggtgtacagggactgttgggatggggggtgggggtggggtcatgacagctttgccagtggtgaactctttgcccatgcatattctcagtgtaactactttttccccagtgactatcccacccccatcaacagcttggactaagtatactgttagatgctaatatcaaagttatttaattgacttcatagagtacacgatgaagccttatcaagaagaagatgtcaggtggcagtgtcatgtcagccatgttccttaggtttctggattcatcaagccaaaggggcaatacctgagagcacagcccattttatatcagctgtaactctttaaggtcccttcttatgtgctgtgtgaattgtttcatctgctcatacctcttctgttaagccaagatgtagtttaaggctagttattaccctttgtgcaaatggggttgagatgctccaaggtgaggatcagtctctcactgtttgttctggggcatgaaccccattgccacagaaaatgttcagttccataggaaatagaagccttgtttgctctgataatatgccctagctgtttttatacccaattcgcccatcccagttcaaggctgctgtttagaaagtaggagctggaaggtaatttcccctgactgtctcagggtagcttctgtgatgctgaagaattcgactcgcataggttgtcactgtaacttgtcaagattaacgagctaccctgggctatcaacgtgagccagcatttgctctaaaatctccacctgttcctcgagtctgtggatcagcatgctatcattgacatagtgcatccaagtcactcctgagggggactcttccatttctcagaaactgtgcatatgacagaagtcaggcctacctgtcgttagtccggaatcctgtcttggaaacctcagccacttg

SEQ ID NO: 18242 - DNA, 1099 bp, Mus musculus
taataccatgatattgttatgtcttaagggtgtctcagaatcaagttggacagcactttaccttcgtcctgacagacatggaaagtaagcagcgatttgggttctgcaggctcacatctggaggcagaatttgtttatgtattcttaggtgagtaattataatcaaaacatggctacaaaatagattgtgtctttgtccagctatatcatgcttgagatctcaaaaaataaaaacaaagcaacttttcttaattttttaaaaaaaattctttacttgttcagtctaaatccaaggaaggttagaaatagtctcccttctgtaccacatacagagtaaatcgctttccagtaacataattgaattgttcttaaaagaaagaataaaggattagttattgtgatttatttctgaaaatcaaatattaacatgggagttgtgatatgtgtaagtaggacaacacttagtaaagttaagatgcttttttctgtcattgatacacatgcagcctttgtgactcaattgtggttttaaggcaaagattgcaaacttgtagttgggaagaagttagagaatattgttaggccactgggtgttttaaaaagcttaaaagatgttgttaaccttatacattttaggaagttctatgtaaaatttatattcctaatttctttagataaatagggagggatatctgttcattgtaaatctttcctatcccagtgaagatgataagctggaaatagaaggggttttaggaatgtgatgatcttgctagattttatggtggcagttgaaataaaaggcatttaaacttagttcctgtaagatgtcattgtaaacaaagaatccagatgtaacctataaaaagtacaattctttataattataatatagatactgccaattctagattcaacagatgataacactcaatttatagtttaacatcttgtgaggaaagcattgtttattagtcacttttgtatggatgtgatacaaccaaacgacttatagaaggatgggttgtattttggacttagggtttcagagaaagaaataagtcattatcatcatggtagggaaatatggcagcaggca

SEQ ID NO: 18243 - DNA, 1163 bp, Mus musculus
ttctggaagtgaatatttatttattggtgtttccataagttcatagttttggatagcaaatacattttaaaatttcagttattgaaagattatcttcattgttcttttctgaagagcatacttgttacaaaatgtatttactatagttcatcatagaaaccttaggagctattttatagactcttcaaatagcctgcttttatttttcagtctacataaataatattttgaaaatacatgtttttagatatacttatatatatgtaaccttttggtaatatattcttttttgtgctaatacttgtgagattcttaccctgcttctggccaatttcaaaggctcctattttgggagcctcacttttgaatccttaaagttttttagatctgccgtgtcatctgacactctcccccatttaccaagtccagaatggtagtctgtagtcttcaatagtcaatgtttttttcttgtttttatttcaaattgtatagaacatggaatgtaatcttttcctcctgtgcttcatttctgctaactagcactcctgtttcatcacacctgacataactggactcccaacgataccggagagtgtaagtgtctgctttctacttctaaaactgttctgttacaaatgtctgtgaccaaggtggtcagcttagggacaagcacatacacttagctcctgagcatggctgtctgtaatgtgaggaagcgtcaaggcatggcttctaccagtgggaaagaatgataacaggaaaattttgccctttgcagtcatcttattaaatggcccattgaattttcgacttcctctttgtgagttggtttaatccttagtgtcccggttgttgatggcctgcttttaatttaatgcataggcattttattagatttgaggatattgtaagaaataatgcttattacattgttaattgtagctatattggaaatactttgtgcatctcaaaagttatacaaataggagcactcacaaataagtagaagtgatagatatcttttcatgttgtttgataactgcgggaaaggaaaagactctctttagtttttcttagaacattaaaataaatgtgttataaaccatcaaatgaaaggaaggtcagcaggaagggtcctgcagtcactgtattgactcaggtgg

SEQ ID NO: 18244 - DNA, 1210 bp, Mus musculus
tttgtcttgtaagatctctgccttttacaggtttgagagatggatctcttatgttcttgctcaaaaatatttcagccttttggctctttacccaccatcctctacacattctatgcattataatatttgcttcagacagaccctaagaatgtagctcatctctgttttgttgttgtttgttttgtagtggaagtctaacaggtgtagtctaacaggtgtattgccttgaggaatcaatcacaaaggtgtatttgaccacagtagtaaaaaggaagcctgctccgatgtaaaacctacatgttttctttaataatgaagcaaaggcctgcgtataaatccaccttctccattgggtacaaaagatggtattattagaagtggcattcattaaaaataattaaatctaatactatctgctgacataagcacagtacattctactgtcatttaaaacattatctactctatacaagtatttctcaaacgactgctaaatgtataaaatgttttcccttgtatccatgtgtatggtagttcaaacagttcttctccctcgtgcagagaaacctgaccgagtactttgttgccgtggatgtcaacaacatgctgcgactgtacgccagcatgctgcatgagaggcgcatcattattacctcgagcaaattaagcactgtaagtccttcacacttgcgcctttgactaacacatattgagtgcttcacaaaaagacctaaacacgtctgcacatttagaactgtgctctgtgtacttaaaagacaatatctacatatttttaatatatggtttttatctggctcttgaagtataaaggcctgatttaaagaaagcttcgcagatgcattaagtcaagttaattatttttccttatcaagagaaaaggtgggtttttttccccccttttaaactctctggagttcattttagtaccttgatcatgtagagaactcttaagagctattatgagatctttattattcacttgtagctttttccattggagctacttgaatgacactgtgggccatgataatagctgctcctaaccaggtaatagcagattcatctttgtcgcctcgcagggcctaggagggaatcctataatagttctggtttggaggagctcttcaggctgataataacttaaaagtcaaagtagcatttttatcaattgcgggttttatggcactta

SEQ ID NO: 18245 - DNA, 1206 bp, Mus musculus
tgtacatatatacgctgcccctctgaacagacatttccatcagagctttctgagtgtgactaagtgggagatggctgggatgaggtgcttgtgaaacactttgcaggaaggcatgtgtgcagggtgctgctggtgctggtgtggtgctgggggaggagggggagagcagggaaaggagggggagaaagaggaataagaggaggaagaggccttttaaaaactctcagcactatttcccctgtctcacagtttccctctttttccagggaagtgtgcacccttttctggctgagcttagcagcctttgtcttttaaaaatacacagttggccttcacttcatacatcaggaggttttatatgacagccatggcatcctgttagtggtgcattcagttaccatgcagattctaccagcttggctcctacaatgctgctcaccacagcattgatcttggaggatttctggtacctcaattaggttttatatagaaggatgatgacttgattttgtgctattgattataaacatgaagtttaagaaaagatctatctgtctgtctgtctatctactatctatctactatctacctacctatcatctgtctctgtctgtctgtctgtctgtctgtctgtcgtcttctccgttctttgcccaaactgctgctgaagataacttgatttctgtatttgtatggtttcttctttttttaattcttatgttggagtttggcagcatttttcttttgatgtgtgccctctggttataaactgtcaagcacctgactgtagataccgaactcaacattttcacagagaccttgtctgttttgataatcataccttactacttagggctgacttggtcaatgacctcatccactcctgcatcttccccagcagagacgcctagatcctgcttctgcagctccttttctctgacccctggctccattccagctgcccactgtcttagttaagggaacgatcacttctcatggacatttctttcagtaacatatattgatcaccaacatctcaatttgcataagatattatcagtatcatctctgtaacagtgcatagtgtgttagtcatcgttatgagcaaataatttaaaatgatttaattatcactcattatgttataagtgttgttgatgtctaaagtagatagttgaaaaagagatcttttaaaactcaggcaaa

SEQ ID NO: 18246 - DNA, 1155 bp, Mus musculus
tgtatttactcaacgtttttatataacaagtgcccattcatgtatagatttacaaggagaatacattttgagtatagtttattcttagactgtttcacgtatgaatactggcacctctcagccatctcccagtcacttttcatctcccagtcagtcactgaggcccaccaaggcaccaccaaggctttttccacaaacctgtctttgggattcacttccgtgagtttgtgtcatctgtgtgatgagggacttggagctctctgttggggcctggtgggctcagttacaagtgcataactctcctagaatctgtcagtagtgagtgagcgagtgagtagagtagtaagcagggcctccggagcccttccccttccagagcccactgcagaaagggccagtattgtgtaggcccagtctgggaaaccagggtacttttttagaatatgggaaagtgtctatatattatgatgtctactgtttttttttttctaaaacacctctataaagtatattatatattttaaagcaaaacatgtcaaacaaaatactgcttaaatcaccatcctctgactgtagtttgagtgtacacaaagccaaaagtaaactcacaacccatcctgtgtctagtaacatgcctgtcccactgtcagtaccttctgttttagtcatggtagtctagaggacagagattatagatgaaactctgtccgtgcctgtaatacttatcctgtgttgctgtagtttgtctcttttgcattcctgccttcacctttgtgaagcattccctagtttcctatgttccctagcccccaatgtcattgaatctgcagtatttttctatgactgtgttttcccattttgttaagagtatattgatcatttgttttgtgtcaggaagaatcactttaaatagttgaatttcagctactttcatagggctgagaatcttagtgaagtaatggctagcaaacagaagatatgaaaaatacttaataagtggaaatcagagaaggctccatccaggcaccagctcggcttctctgcattcggtgatctctatggatgttgtcctgggcagtggcactcctatgtccacttgctgagagtgaccctctgccctagtgtcagcttgggttgttgggagagctccactgg

SEQ ID NO: 18247 - DNA, 1170 bp, Mus musculus
taacagatcagccaatcaacatgaacattttacattttagaacgtctaatgaatgcataatatagcattttcaggtacaaatgataaatcgttatttgaagatcttgctcttgagagtgaattcctcggatcgagcactgagaccatctgaaaatgtcacaaatgcaggaacttgggccccaacactccagaagctctggagatccagagtctgcatctttgcaacattataaaccacgtaggagatgtgatggacaactctcgatggttcttttaaaaatgtgatagttgccttgtggatgcatggtgtgactgttcacctatatatctatttccagctactactggagaagctaggaagtgttgattctttttaaaatgctgctttgttctttttctccttgttctaatttgtcaggttattggatgacattcaaagctttgaaaacatatgtctaagtatttgttataaaaaattacattgttcctttaaaattattaaagagacatatttcaaatcagtaactcaacttattgtcaacttttctctccagacacacttgaaaaggcctcataagagcctagatggtaccctgtatgatgatgatgatgatgacgatgacattgaacgggcaagcaagtgagtccagcactgcgggaccctgtgcagtggcatggtctttaggcactagtaaagttcatgtttgctccctctcaatgttcaccaacaaacagaaatggcactcctttcaccgccgtgaggaatgaggcttaggacaggggcagggcatgatagacttgaaatgtcgtgttcttgggaagcagagttatattcagaggtgtccaaggagtgggaaagatgacagatgaacactaggtcaggttgtcaccccacactgagagggacaggtgacatggggacagtggtaacagtccagtgagccaggggagggcttaaggtgaaggcaccatcacaggaaggaaggaggtttagaactgtttcttgatacaaagaatggagaattgtataaacttcatttttttaagcaattttaagatacatagtaataaaatggacatcctacatatgaaataaacctgtctacataggagaatatttattcttctccaaaacaaataagaaaaggacaaccatatagaatatgaatg

SEQ ID NO: 18248 - DNA, 5786 bp, Mus musculus
gtagttactgtactaacctggctgagcatgaactgatcaagatgtcaaaactgatggaaaatagcctgacactgatgaaactgttaacccactaattgccttaatcttccagttatgctaaacatacagatgacgcgtgatgcaaagcttgaaagaggagttatcttgtcctgcagagcagtgatgcctttttctaccatgaactaagctcaccattcttttccagtttcaatgcactctagcagaaataatttgctttttatgaagacatgtagccatgttttccaagcaacgtgaatgtgtatatttacctttcagtgaactatattaagtgctgacttacaatgtgaagttaaaagcttctgcttacaaagaagcccctcaatggtcgatctcatgtatgtgttaaccatggttcaccgcccgaaagccaaatgccctgcagagtccagataggctgttgtcctcttctcttaactgacgtgctgtgaagatgctcatagccttaccttgtgtttgcttttttaaagaattaactttgtattttaaatgttcttctagatttgtagaaaaaatgcaaagatggtactgagttgctctctgccctggaccctgtctctgctgttgttagcatcctatgttagtgtgctgcatttgccctatcattgactcgctgtgtggtagtcagagctctgactgttccctgctgtcccctttctgttcccttatcgcctcagcgttctagagtatgttctacgatcatgtcttctgaggttcctcctcaccctgggacttcactttcttagtttgatggctttgaagttatcaggaatattgttcagatgtccagctcctgtactgtatatagtatttttctccttattacaccgaggttatccagctttgagggaggagatcacagaagaaaagtgccgttttcagcatctgaaggggtgtgctgcaagcatatgccatgttgtgttgactttgaacacctgctggggttctctattctgagtgtgtcccctgcaggcaagcaggaggggtgcaggcaaagaagagaggaagggcaggcacaatagaattatttagggcagagaagtatcaaaatgcatcctttgtgattctccgtggatcctgcctccctcatgattactctagctttggagcacacctgagagcacatgcagatccctagatgtgcaggtagtgtgtttgaacacgccatggttctagtctatacatcctcaagtgtgatgattacttttcaaaaattgtctttttttagtgaaaaaaaaaagtttgcaaaaccattgaagaattccagtaaggccatactctaaagtatttacttaaagaatataattttagctagaattttaggaggtttatttaacatagtccttaaaatatttacacaggtcttttttttttttttttttggtattaagtgctttattcagtcagctatgtcactagaccatgaatacactttcttaaaactgaaaaattaaaagttaaacagtataagctagtacagttgttcctggttgccttccagaagttaaaggtaactgcattgctgaagatatcatggacttcaaacccaggactgtgttctggcctaaaagcctcttccctggggactagctttcataatactgtaagaaactataaaaacttctcagagatggaagcatccactactacactgtttgacacacacaggtcattttttaaaactgcattccaaaatataactaggtagttttacttgaggtaatggttccctcttttgtagtggatggtggagcctgtccttctgaggatgggctcactatagaagggaagatttaatccttgtcttcacacaataataatatgcaaggttgtgagattgtgcctgtatgtgttgttcattagtcccagtttactgaaacaacaggagagtacacatggaagagctgatttcagcgggaagtggaaaagttattgtggtagtcacactgctgggcaggggttcccaccagattcctcaacagaatggagcgcttttaatgccatttttcaagtgaggtctctttttcacatcagaactcattgtctaaaaaaatgagagcatcctgactgcagcttaaaacactggcttccagtctacttccatggtaatcccatggccacaggtttgtggctctctaccttgagtcagcttgtgagatgttctactgtaacactagactatttggaaacatttatccactcacaaataatgtcctaagccacgaaagtgatctgtgccttatgtaacaagcaaaaacagctactttatgttaaaaagaaaaactgtacacattatttttaaatgtccagaaaactggaagcaagtaggtgcttcgcaccattaaaaccttgagtatttgaagtcagcttttaaatgacacttcccagtattatgatggaaacagttgtaaaaataagagaccatcaggtgagctctgaaattttaaaaaagggaatataaatggagtatttttttgttttgttttgctttgcccaaaccaaatcaaatataagttccctgctattgaaaatatgtgtttctgtttgcactgtcattctatatactgagcaccaacaactggagctcccaaaataaatctttcagacaagctgcttctgagcgatgagagacttgactaactcacagctctggctcccgaatcttgtgctttatacgcctctaaaggaaccctgatctgtgactcatcgagtctccctcaggctttgcatccaggccaggtcaggggctaaagatagaaggacaaatgtcggtctgcagttgtgttaaagtgaagacgttgccgagtaaaatgcatgggtgattacctagtcttgccaatcttactatcagcttatggcatactgacttttccaattcagagttagtaactccttcactgagaaaatatttattgacttttcaggagcaaggtataaaaattaaggatgtaagggtacgggaggaaacaattacccagctctggggaatcaattaaaagggaaaggaactgtaggtgttaaaataataactaataataataataataataataatataataaaaatacaataaggatgtatttgcttagatggtactcgctcaagaatcaacaccgagagatgctttttaaaaatagctgctttatttaaagtatgttcaaactacaaaatcgttaactcttttagtaattatatgagccactcactagaatgctgctaagatcccaccctaaaggacagattcagaggcactgcttggctgagtccttgctctgaccatccacacgacctgacattgtccctttgcagtactgatggccgtttcccccagttcaggagtaacttagagtatataaaggaagaacctagtcatgttgctgggagtcccgattttacatttaaaaaaaaaaaatcttggtaacaacattttctagggagccttttttttcttagctaatggtgtgactgttattaagatgctatgctgatatctaatggtgtgacccaggaatgcccatgaaatacttgttggttaaacaaagggaagattcctggtcaacagcaaatggctgtggacattcttgcagtcaacagctgtcccttctctgctcagatctccagttcaagttcatcactttcatgagtaaattgtctcctgagaacttcaggttctgggttggtgtcagtgagtctccaatctgagaagatatttgaaaatcagaatgaaagttcaaaatggaaactgaaccccctaaatgtaggctctccccaggcatctcttaatgttggtagtcagttttttagcagtctgattctctgagcattttccccacgttgaggccagaggcctattagtgtctgttttttaaagcttccaggaatagaaacgctttgcaacagccagttgatgttaggatttgtttataaaatagggaattatgtatattgagacagaaatattttattttgaaacataggattttgtgcaatatttttcttgcattgtttagtttatataaatatgcacatctgcttttctggcagataccttaaggtcatgtctttcagtatttgcctaaaactgtatgtagcaatgttctatgtgatttcagaaaaaaaaattactctttctattattagtagaagtgttcttgtttatttaaaataataatgtggagattgcattattgtatcataacgaactgcctcagccacaataaatatgcaataagaaattcctgttcctttgattagtattgacaatactgttactttaacagaaatgtttgtggtacagagtgctggttctatctgtgttcatttaacagctactctgcagcacaagaatctaaacggtatatttatgtgataaccatgtgtatgtagattatgacatcctttgtgatgagtctttgttgaggcttgtaaagggcattgccaatactttttgattgtaaattaatttttttgtatgatgtatagtttgtttagccttagagcttctttagatttctacttttattatacttgaatgaggcagaaagcactgtgggcagtttgtaactctggatgcaatatgcagatataccaaaaataaaacaaggtactgaacagcagcgctaatggaatgcgttataatccaggagttgtgtttttcaagccacattttagtgaaatgaagtaattgaagatatacagtcttttatctagacagtatagtctcaaatgattacctcttcaatgtgtcaaaggtgtgtgtcctttttaacttctgtatcagtccttagctgagcctagaggaccatccatcctccctcctcggaccacatgatgtctaggacagaacaaatcaactacattgtgcatattaggtgcactgtctgtgtgaagtcactgtgttttagatagagtagctttcataggtaattttgagaactctttaataatcatataccaaaaactaaaaactaaattttttaaatgagttattacttagctgtgcctaaaatctcttagacataaaggccacatgagggactcaggattgaatgtttccaaagtttatgttcattcctttagctaaagagttgtttgctcaacatataaccagtagcttaaaaaacaaaactaagcaaaacaaaacagaaaaccatgagcagcaagacactgagatgtgcttcgtggtgcttgccctcgagactacagtttatcatctctggacttaattacgattgggaagatgttctgtataaaattattgtttggaagttttttaatatgcaaaataaaatgttgaatgaactctgctttgccataaagtacccaataatgtcgctgaaaataaaattggtcacgatcaaacattgtgtgtggtgatggctcttctaactaaccagttgtcccctgtatggctaccggagaatggctttgaggactcagctagcttcatctcttatcctgtaactgctgcagtgtaaacttcagcctcattctttctggttgccctgtctgggtgccacctattctgttcggaaccatttatcagccttccggttgctgtggcaaaatgactgacatggtaacttgaaaggatgagacgaaaggtttactgcagcttatggttgcagggatattagtctgaagttctctgcgatcaggcagagtcatggcagtgggatcataggcagggggctgctcaccccagggcaaagagcacagcatagtaa

SEQ ID NO: 18249 - DNA, 1198 bp, Mus musculus
tcccgtcatcattcagaacagcaataagaaaatcctgcagtgtcccaaatgtgataagacatttgaccggataggtaaggctaacccctttcctagccctagtcacttaccccttgtgcctctcctacaacagtggtaatcactacaaactaaactttggaaggaatgtttaagaagagttctgaagggaacatgctctgattttcggcacatagtttaccttgttattttaaatttgttgtgaatcagaaataatttggtatttacccttttgtgttttcttcattttctcttaacagggtacaggttctgtgtttgggagaaagactccagactgtcagcagttattctatatagctttgacttaatatacctgtttaatcttagcagtgctagtagttttgagttacatgtacattgattatgatactgctaagtacattctgcacataaaatgattaaaacaactttacataatctgactttgtaaaagaaatcatgcagtttgatatatgactatcttgtgctgggttatgtatgctatttgcataggttaaattttgttttataagatttgtaatcatttcctatcaaagtaggtatagactggctgtacagtgaacatttttttttgcttttatgataccttttggatgtatttctaaggatacttttcagaatccaatttaatggttattaataattttactctttcatacacagagaaatgaaacaacttttgaataacttagtcaatgggaagactatatgtgcacaagaaacttgtcagtcctggtagtaaatggtcactagcgctctcagtatgaggatatacacagagagcagcttttgggggctgaggtacctgggaacatttaatctttcctatacatgtaagactttgtactccctgcttatggtatatacaaactttaattagcctgatttgacttggaaatcaatgagcaagggtcagttcactacgggcatacagccagcttgggaatggcttggatgctatccagaggggcttacttttatctaatgaaactgctggggatggggagcttaaaaaaaagagaatgacagagttacagccagatcatcttggcttcagtgtgaagacgaagttaggtaaggaaatgagaaagccaaggaggcaagaaggaagcagaggggcaaaagccatgctgcttgg

SEQ ID NO: 18250 - DNA, 1156 bp, Mus musculus
agagggatgcaagccagaaaagcatttcgccatgctttagcatccgttataaagattcagtcatattatcgggcttatatatgtaggaagacatttcagaacttcaaaaatgccacaataaagctgcagtcaattgtcaaaatgaaacaatcacggaagcagtatttacaaataagagcagctgcactgtttatccagcggtggtaccgttcccaaaaactggcctcacaaaagagaaaagagtacatacaggtgcgtgaatcctgtatcaaactgcagtcacactttagaggatgcctggtcagaaagcagttgaggttgcaatgtaaagctgccatttctctacagtcttatttcagaatgagaacagcgaggcagcgctacctgaagatgtgcaaggcggctcttgtcattcagagtttctactgtgcctacagagcacaaatcagtcaaaggaagaacttcttgcaggtcaaaagagcagctatttgtttgcaggcagcttacagaggctgcaaagtacgccggcaaatcaagcagcagtctacggctgctgttacaattcagagggtttttagaggccacagtcagaggatgaaataccagactatgcttcagtctgctgtgaagattcagagatggtacagggcacagaaggttgcttatgacatgagaattcaatttctaaagactagagaggctgtggtttgcctccagtctgcctaccgtggctggcaggttcggcaacagctcaggaggcaacatgaggctgcagtgaagatccagtctacgtttagaatggccgtggcccagcaacagtataaactactaagagcagctgcagcagtcatccagcagcatgtgagggcacgggctgcagggaagaggcagcacttggcgtacatccagctccgtcatgcagctctggtgtttcaggctgcatggaagggaaagatgctgagaagacagattgcccggcagcatcaatgcgctgccctcatacagtcatattacaggatgcacattcagcgcaggaagtggagcatcatgaaaaccgctgcccttcagattcagctgtgctatagggcttacaaagttggaaaagaacagcgccacttatacttgaaaacaaaagcagctgtagtaactttacagt

SEQ ID NO: 18251 - DNA, 1753 bp, Mus musculus
taggtctgctaaattaataaatttcaaaaagggttttatctactagtgttcttacatagatttgtcaagaaataaaataattaaactaaccttttcctgtgggagctgccgggtagagaggagcgtggccttctcctttcccgtcatggcttgtgcccgtcccctcatatcggtgtactccgaaaaggaagagtcatctggcaagaatgtcactttgccagctgtgttcaaagctcccattcgaccagatattgtgaactttgttcacaccaacttgagaaaaaacaacagacaaccctatgctgtcagtgaattggcaggtcatcagaccagtgctgagtcttggggtactggcagagctgtggctcgaattccaagagttcgaggtggtgggacccaccgatctggccagggtgcctttggaaatatgtgtcgtgggggacgcatgtttgcatcaaccaaaacttggcgtcgttggcaccgcagagtgaatacaacccaaaaacgatatgccatctcttctgccctggctgcctcggccttaccagctttggtgatgtctaaaggtcatcgtattgaggagattcctgagctgccgctggtggttgaagataaggttgaaggttacaagaagaccaaggaggctgttcagctgcttaagaagcttaaagcttggaatgacaccaaaaaggtctatgcctctcagagaatgagagctggcaagggcaaaatgagaaacggatggcggatccagcgcagggtgccctgcatcatctataacgaagataatggtatcatcaaggccttccggaacatccctgctattactctgcttaatgtaagcaagctgaacattttgaaacttgctcctggtgggcatgtgggccgtttctgcatctggacagagtgctttccggaagttggatgagctgtatggcacttggcagaaggctgcttccctcaagagtaactataacctttccatgcataagatgatgagcaccgaccttagcagaatcttgaaaagcccagaaatccaatgatccctccgagcaccacgcaagaagattcatcgcagagtcttgaagaagaatccactgaagaacctgagaatcatgttgaagctgaacccttacgccaagactatgcgcaggaataccattctttgccaggccagaaatcacaaacttcgtgtgaaaaagctggtagcagcagcttctgcactggcaaccaaatccgagaaggttgttccagagaaggggacttcagacaagaagccagcggtaggcaagaaaggaaagaaacctgtggatgccaagaagcagaagcctgcagggaaaaagatggttgccaagaaaccagcagagaagaagcctaccacagaagaaaagaagccagctgcataaaccattaaaaattgttaaattccagagagcaagtagagacagcatatttcaataaatcaaacatgtggtgacaaaaaaaataattaaataattacactaaaagtgaaatgttgtgttaaaggcagagagatcatgagaagtaaagggagagaaaaagcaaagcatagagaaaggagtggaggaccccaaacacccacagagcagcaaccttgcattcttacactaatacttacatattccaaaacataagaagaaaaaccagatagagttgaaatgacagcaatctacttattccaatcgaatacagttcttggcactaggtgataaatcaagaaggccaaaagtaa

SEQ ID NO: 18252 - DNA, 1158 bp, Mus musculus
tttattttatacttgaataacccattacagaaacaaacgtagaatcaaatataaaataaattgagctttaaagtagtttaacgataaaggaagttgatgttgggctttgaaaagttatttgagaatttttacttaaaagagaaatatagtagaatgaatttgggagctaggcaaacctgatgtgatttttcttcaacatttagctgctaattgcaaatgtgtagagaaccaaagttagattgcttctttcactaatggattgattgattgatttaggtgtttttggtggaattagatgcaggccagggagttggattcctttgctaggatggtgtgagttgacaacaggtagaatccaacttgtacaaagaataaatcctggagaagaggcagtggaagggagaagatggcacttctgtacactgaaagcttctataaagttggggagaaggggggattgagtgggaggccagtaccaaaatcattttttaaaatgcatctcttttacaatgactaacttgaagaactgagagttgactgctgggtgctagaaaaaaggcattcttgaatatactgatggtaggaaaagatttgatattctggagaacttttctttgacttctctgagctgcttgtttactgaatttgttctagacatggaaagagaacttaagatgacaccaaccatcttctgacagtgaggttagttaaatgctattctgattcttatctaaatcttcctgcttctctttcattgttagcatgaagtggttggtatgccttatgtttttggtggctaggtttttttcctcactttcctaccaattcctgattatgcagctgctacccagcaatattccattttcttcccagaagtgaccttatcttttcttgatagaggaaacaagccatggacttcaagatactgtattgcttaagccttgaatatacctgcgagcatcttttcttcctattggtctagtgtccaactcattagggacttgtatttctctacaacttcttcatgtttgcaggatttgccatcttttgtttcttgtatattcattttgtcaccctgtagttacacttttgtctcttctatgttcgttttgtcaccctgtagttataccctgtagcacacatttgtttgggtctttt

SEQ ID NO: 18253 - DNA, 3455 bp, Mus musculus
attaaagaaaactcaactttgtttacagagtttctcagcatacaaattatccttaaattatgtattgaataaatttcctccatagtgaagtagtcaacaactcaaacctgtaatattttaatgtaaaattacttgttaggactactgcaaaggacatgaactacctaccacctttccataaagatgtttggtatttgttcttaataactgaagtttaatttatagcggagtttggttaaaattagtatctactctgtgcatggtttattttctattttaaatttgctctgtgtatagtcaaaggcttctggattatacagtctttaactccagtaaagctaggaccgtgttttacgtggatcttgaaatcagactctttgtgtgcactaggatttcttgttttatttttaagatttaaaaacaattttttcaaggtagcaaggtaatgagtttcgtggtagcattttgaggatccatgtcatcgttcattgttcttttcctagccccggctctctctctcctcttgttttcttcttctttgctttcacatgtatctatttctttctctttttctacctcaactcttcttagtagctcttcttctcccttctgtatcatagtctttgtttcattacctatacatagacatggacataaatttaaaaaatttaatctcaacattgtgagcccttaagtaggtttatgaaaattttaatggataattataaaaataacaaaaaagggaaatgattcaaaaaaaaaaacaacacacacacaaaccatctgctctgctctacaagtcagtcattattcttctgtgactcagctctacagcagcacctgacccagtgctttgcgcattcaggcattcagtagctagttatatgtgtgaatggatgatatgttttcagcataagtccattaacacagctttgactttatttgatcttacaaactgagagcacagaattacagggcatgtgaagaaatagataatttaatgaaaatgaagtatgtgttattaagttcagcttcctataagttattagtggaagtactcctgccagctttacttaaaggagggttctctgttatttataatctcctaagttacagtaagaaaaattatatagtttttaaacagaagctcaccaattggagaaatagtaataattttcaaaagtttttcagaaaaaaagtttttttgagaaaggggtaagatccacctatttacattgttactggaagtagtaccagcgttaaagatcttgttttctcctcttttcatctatgtatgttttctgtgtgtatgtgtattttttgaggccactctttgcactagaccatctcttacattggtgatattggcctatatccccaaatgacaaaatcaaatcttatttatttaaggagtattttgctgtttaatatttaaacaacatttaatatatttcattattagtattatagcttacagtttgtttcctgtttgcttattgctttactaagtattttttagcagaggcagaacggcagcttatacaggaataaataattcatggtgacaaaaacctcaaatctttttaagttcaaggaactattattttctttgctgtgcagagtaggatacaatttaattattaaaagaaaagcatagtatgaattagtttacacaaaaaagttttcacctaaggaagattcactaataagtattgaagagacttttacctaaataaaaatttctgtgactcttaacccaaagtgatgagagtgctcttttttttggaaagtgggcagggattattcattacactgatgagctatgcaagattttttgacattttacagttactgagctggtcaaaattagtcatttagaacgtggctttaaattacgttggattttgtttgtcttactgttatttgttggcttgaaaataaacccagagccacctccatcctagggcaagcacttcggccactgacttagactctgaaccatgagttgtgaaattattaaagtacagaatcatagcgaaactagagaagtttatttttgattttagtcccctaccccagggaaagttcttaaagaatgagtgtgagtgatcgtatatgtacacacatacaagtcaaaagaattgccattctgttgagttcaaattcatgtagaatgttgagaaaaaaaatgagataaaatctatagaaatttgtttttaactgaaaagctggtggtggttttcaaatgaatgaaatttacattattccccttgaaattactgaactgtgttcattacccacttgtgttttattttcacatggcgattctcttcaattttatagtaaaatggagaattgactaaccttgacttagagaattggattagggatttaaattaggtcctacattttctggtgtattcatgccatgttttgaagtgtgtgttggccctaacataggttctgcactaacatgttggcagaaaaactaaagaaaaattgaagatgtacaacagttgtatagataattctttttaataagtacacagtaggttaattatgatttcaggtcattgatgttttagggattgtgtgttaggaactgttcataagagtatcttggaagttacaaattgccatatactgaaatacagtaagcattctatatgaataaagtttgtggactacaactagttttgtgccaaaattaaaaagatgggattatatgtcaaaattaaggaaactttccaagtattttgtattctgttaaattttgtttctattttaaatgtaagtaaagctacttagcctccaacttgggtcagacttctgaataggtaaccttatttccttccatggtagtatccaccgtcactgcttgcgtgatcattaacgagtgatgtttgtgaagcagagcagttcctgaatagagcttactttgaagtctctgttttctgatgaaatgttcccatactcatttcattttgggagctttttaaattgtgagctttattttacatacaacagtttgcagttaaaaatcttgggaatatacctaccgccccttaattccccctaaaagagtccaaacaaaacaactacagtgtgtgtgtgtgtgtgtgtgtgtgtgtgtgtgagtgtgtgtgtgtgtgtataacatacctaatgtatacctaccaagaaggcagaagtattgtgagtttgggatgttgttgtctttctgtaaagtgatttaatgggatttgtcaggcatagtatttctgttcaggaaataaagatgtttactttttggaaccaatgagttaaatccttttttcagttaataagttaatttctagaagtcttcataaaggcagcaggttttatggcctactgaacttataattgaagtatgtcgaatttcttgttattgtaatagtattaaaaccatatcccagtattttacatataaatat

SEQ ID NO: 18254 - DNA, 1157 bp, Mus musculus
aaatttgtgttgtcattataacccattattgtattttttccccccagatacatggtaaagcataaatcccacttgagattctgaatcatttaacccctccttttctgaaaccttggattacgaagcatggatacagcttgatctacagactgaaagcaagcttatgaattcatcaagaacttgcaaatgaagaaggacacagagtagtcttttataagaccttgtttgatgctgtgtgcttcaaaggggcaatgcctcccatccatacaagcaaacttttttggcttacaaatatttttttaatattagccttctagtctgtaatggaaattgtatattttgatagaagttttttctctattggttaaattagcattacttaaaatttgttctttagaaataaatacaggttataaatgtgtgtatatttaggagttattaggctcttcaagccatcttgcttctgatttttcattgctctgtggttccttttactggaaaatactgtcatgatggtattaaattttagactatagaacttcaaaaccctatcaaagggaagtaactatgaaatcagttgaaagtcagcctgtgtgtatccgatgtctatactaactcatgtttaaaaaggaataatgaaaaatcaagaacaagtcttcagtttcagttgaactgttcagccttttcaagatttcttttgtaaatgaatacatttaatgaatgtacattctctttgttgactttgatgattttaaacttaaagtgatatatttctatctggaatatgtttccacttgaaaagaaatcttaaaaaacaaagattaaagtgaaatagactgtagtgatttttacttgggaagctacagtatgatttggggggatgagtgtgtgtcaacatagttacagtgtaacttgaacctcctctaagtctgactatgattcttattttatatgcgataagattttgagtcttctatttgtacacatgtcaacttgggacttcttatcttccattatccctaaataatgataaattcccaggcaccaaagaacacatttgcttacgtgtctgaaaatgaaacaagataaaaacactggtatttttatgtgtgtgtgttcaatgtggtataaaatataaaacctatattttaacgtag

SEQ ID NO: 18255 - DNA, 2333 bp, Mus musculus
aattaatttcatttctgctggtttcactttactgtatatttgtattattaaaagtagggttaatattgttgactatgcgtaactgctaaattatatcagtgaaatcattacattgaaactgtatccaaatgatttctcaggctttgtttgaagtgtaaactccagccccattatgaccaaattagacttaaagatagtgaatgaatactaatgaagaaagctgctcttgttgcactgttctaaataatagaatatatatttggtatggttggtgaaatagcttttgttattatttaagttacaatttcttattgcaaatttaataatgaattctccaaaggaatgggatgaatggagttatatttgaaagaattggaagaaaagtattacaatctgcttctaaactatttgttttattacaatgacatttatttctataattggccaattgatggatctttcaggtatccagaattatgtctgcgtaaaataaattatagttatattaagagccttaaagtggggaaaaaggactcttttgactgccttaacatatgacaagctctcttttccagacatactaatttctttagggtctgttaaataagtaatgccttaagagtgtgctaatgatctgaagagtagagcttacagggtcttctagagcttttaattctacataatgaatttaagtgttaggtattatacctgattgcacattaataatttgaaataagaaaagaataatctggctatgctgatgtgtaataagtacatggctgcaacatcagtatattttatggttgcttaagattttgtattgttttgtataaccagttacccagaagctggacttcctggccataatatgacctccaaggaccatgttgcatatttaacactggatgaaaagttcagttgtatagctccaaaaagaactgctttttaagggaaatttttgaggcaaaaggcaaatgttttggttcaaacctatgagcaaagtcatttagagaattgaagatagtattaaaaccttgagactcttgcaataaaaatatcagaccagtgacttgtttcattgcattctcattttgcatttgctttgccgttcaaagcagaaaaatcttacaaaaccgaaagaatgctttaaaattgtcacgctggtgcttaaagatctattatgcttgatgtataactaacttgtttccaagaacggagcctggggaaggcttataggcctttcctagtacttgtgattattgattgtcaagtcttccaagtttgcaatgtaaataatgtgtaacaatgtgacattggtgttttctaatgaggagtggatgaatgcttcagttattacttctacttcatgataaaagttttcaccaatactgagaaatcttgatttttgtaaccttgcaaaataacctattacatacaagttgattgtctcttacctgaaatgcttggagcctcaagtattttaagattcttttttccaattttggaatcatctgcagatgtataatggaatacctgggatttgctgtatgagccttgtatgtgtcatgtgacagaaaatcatgttttaatggacttgctttggctgtgactttgcaattggtctatggaactttccacgggcattatgttaacactctcaagtttccagttctggagctttctaaaattttatatttccaaattggggatgcttaacttgtaagtcattccagatgtggagtgggcactacacaaactgtttgtcaccagtttattgtagaaatcgataggtgtaccaaataaattgtatgcatatcaaataactgtcttttaatcattttttaatcattttttaaaacatgaattttaaggttataatatgccttatatgtaaacccctgaagcagtcggttacaactcaaaagataaaaaaaaaatctttccataattaatattatctttttgatgtctctgtgtgtgtgtgtctgtgtgtgtgtgtgtgtgtatgtgtggtatatgtagttgaggactcttttccagttgagtaccatcacaggatgaagaaaattgattttaatcaaaatacaaatgtttttatctttggtgttgtgtttgagtatatgtgggaggcgggggaatgcatgttacaacacaagctgttggttctttccttccaccgttatgtggggtccaggcatcggatacaggtctttaggcttggcacaaatgcattaaccttctgaaactgggttttgctttaacatatgctaagtaccataacccccaaaactaaaaaataaatattgtatcctttaagctaagcgatagcacag

SEQ ID NO: 18256 - DNA, 3124 bp, Mus musculus
agccacttccctgctagacacagtagtgagaaatgtcatcagtatgtgcatgatagaaatgcactttggcaagaacaggagaagacagaaggaaggagacaaaagttgagcccaaaggtgcatgtactcagctagctcttgagaagtcttcaggatactgtagcttcctctgtagagaacttcgttttaatagacactgtacaatagtggtgttttacttcactgaatcacacctttgttctgaaagtgtgatacagagtataagtagcctcacatcatgtcacttgtatgagaagtgtttcttttcttaaatgtcttcattggaaaacgacagttttaataatgtccaaatactctgaggtgcactagaccatgtgactgtgatggaaatgaacctcaccaggtaaatttttatacaaaggggtttaaaaaaaaagacatttggttaaactaaattatgaatgaattttacaaattcagagttttctaagatcatatgaacaacagctttcttattcaatgaaaaagatgttttccttcagatgtttcatttgtacttgttaggatttgttactatttgggcaaaacagggtggaaatccctaagggacttgttgagtttatataggctgaggaatttgctttgtagccttgtgttggctgaacaacaacagtgtatcatgtacttccgctttcctgggtgtttcatgtatgtaactcccctgtccataatcctgacagtgtaacaattaaaactctactgtaaagacatagattttctgtacccctaaaatacctttaactaattttcatatttttctaatatttagtctgaagtctttcatatttttgccccctatgcattttgtgtctagtttcttttttgatagagtagagaaataatacagcaagctagatccttctagttcaaaggcaattttagagtagccatatcaaccaatcagtgtatgtagaaaatctaagaactgattttgtacaaattaaacttccttttcaccatattaaaatacattcttttcttgagcaattacatgttttcactgggaagcttagcatgagaatggcctattgaaacaccagtagtttttctcttgattcagtaatggtatctaaggtagtttatactaaaacgctaatttttatgtattactctttaaatattaaaggtttactgggggcttataaaccctttcaaaactagtatgtgtaggttacataaccttttaagtgtttaggggagtgaagttcttttatttgggagagaaaggggctttgctagtgtgaggatttatgtacatattttctttcctaagaaatttagtctcagagaataagaaaatgttcccttcagatgatttgagttaatgaagtttcatatgtagccattcctcctgacagtaacaaattttcagtgttattagcaaagatagtatcagctccagttctaaacaccattgcttctgatgctgttctggcttgaccactgtcacatcttaactaattctgatacattaaagtttcatgttcaagttgaatttaaagctttaaaccctagtaattacatgagatctattgaattctttaaacccaggatctaagttttaatatgatctaacttattatgaaatttacatgccatattatataaaagcttttttcttatttttaatgctacttagataatgcttttaggcaagcagagtatatctaggagctagtatttaacccataagggaaataagggtcacctcccggcagccctcctacagtataggtaaacctaattaaagagattaaaattgaatacagaggccaagtgtggtgatgcatgcctttattcctgggaaacagaggcaggtagatctcttaagttagaggccagcctgctctacatagtgaattccagaccagccagggctacatagtgagaccctgtctccaaaaagaaaaaaaggtttaagaggcagaggcaggcatttttctgagttcaaggccagcctggtctacaaagtgagttccaggacagccagagctatacagagaaaccctgcctcaaaaaaccattaaaaaaaaaaaaaaaaaaaaaaaagtcccaacagatagaaatcttatcttcaaattgcaaaacttcagagtagaaagaaaatttagaaaaaaatgtatttgattgataaccagaaaccagtctggatcttctggatgtgtgtgtgatggttattttgttttgttttgttttgttttgtgacagggtctctctccatagacatagtcctggctattctagagctcactgtgtagaccaggctggccttgaacagagagcctcctgcctctgcctcccaagtgctagggctaaaggtgtgcaacactatgcccagggtaaggctggatggttttggagaggggtctgcctctctactcagcattctggcttttagtctctcatccatgggacatgttgactttgtaagagaaacagtagaattatgaagccttttacctaatttagacgttaggaattgattaggaattgatgatatgcatgattactttaggaacctgtgaatgtgtgtgatttgtttgtttgttttgatttggagtaattctcaaacacaattatgtctctgcagcctatgttgctatggaatctagccacatagcaaggcattattacctcattaagcataggataccctcaagtggtaaacaagttttcttttccaaattaccactagggtgactcttaagtaaatagtacggaaaatactgctttaaaaagcaatcttaagaaaagtaaatgttatttcctagatactatgtaaatatttctaggatttagttgttactaataacacaaaacactaatcttttcatctcactgtttttgattagtggatagtccacgtattaaaactgttacttagtaactgttttcagggtgtgttaggaagggatatgctagtaagtagaactactccatcctttggagcttcttggtttttttttcatgtgctgtgtcattatgaacaaccagttcaacatatgtggtaaaattctgctctcctacaaattcatgtatcttagtctcagatcatagaagaaca

SEQ ID NO: 18257 - DNA, 1174 bp, Mus musculus
gcatacagttacggagttggaaattttaatgtgaataatcggaatgctggtctgaagaactgagagtcaatctagaataacatgttggtttacgtttaagagtatacagaaattgttttaactgtgtagatcacagaggagctgggcaaaaggaagcatgatctagtgtggttacctaaaggtagcttatggagcagccagcaaagtaactaaaatatggtgtaatgaataggcaggcagtgtagagatcttaggtaaaaaggtaaagccacgccaaatcagataccatattgtatagattagattgcctggaagtcactggggacttactctgaaaaagatgtggagatcaaacataattaaaattagtttgtgattaacatgattgtgcttacagtatttagagttaagatagaatgaatgagatgactctttttgaaaatggtaagtttgtgggtgattggcttgacattaagccctggggtacagagaaagtagagtcagcagttaggtagtatttcaatctcaggttgcatgtggaaataccttctcctcattctatttggagcaggaatgcatccagaacatgctacactaaaagaggagttctcagggctgccaaccttacagtagaggttgagtagtagtatatttctcctacagaaagagaaaagaaaattagcaggagttgactgactgtaggaaagaagagtcaaacgtgcttctggcttgggtggataaataaagtatcatttgaagaatagacttgataggaaagaaaattagatcagttttggacattacagaatttgaaatgtttacaggttaagtgataatttttcctctcaaaatctttaactgtcatttaaaaagttgacgttcagagatagtggcccaagtttattttgaaactaatgcagtctagggctggtggtatagccagcctggttaccgaagcctgatgactcctggaccatggaagaaggagctgaccccttctgaaagccacccactcgtttgtggcacatgtaccttagtattctccactcacatacacaataaaagaaagaaattagtggagtccgtaaactagctgctgttttcagtttcacatgtacagaaaacttggaatttgaaaataatttaaagttagacattttagtaatataagtgc

SEQ ID NO: 18258 - DNA, 1158 bp, Mus musculus
tttttgcttggtttttttgcttgtgtatatataaggtccatgtaatctgttgagcatactgtctgatggcaacactacggctatctatggacagcatatacttgtattagagattgaagtgagagtgggatgagcgttgcagaatttcagtctacaagccatctagaggagttaaagcttgggcagaatacttaaatatggctgagttgagaagagtaagttcaggaagaaggagttaggagggaggacaaatgattttgttgtagttatctgttttaggttaggctggttggtcatgctgccttaactggacttgtttgcagtcttaatggttactaaatttctttgactgtctagaatcttccacacaagaattttatcaagttcctgaaagtagaccagaatggaaactaaaagtttatgccatatgaaatagaatttgaagactacttctgtttggagggtatatgatcaactaaaaaaaaaattaaaacagactcataatactcttcctttttatattttataggtaattaataatgcttgtgccactcaggctatcgtaagtgtactactgaactgtacgcatcaagatgtgcatttaggagagacattatcagaatttaaagaattttctcaaagttttgatgcagctgtgagtagccttcttaatcttgcaatgacctatttgtgattgtgcttgttataataggctgcttttcaaaattgttttagatgaaggggctggcattgagtaactcagatgtgattcgacaagtgcacaacagttttgccaggtaaagaactgtatgtgtgtctctctgtctgtctgcctagcatctatctgtccctgactctctatcttacattttctgtctctcatttttgttgtatttgcttttgttgggctcttactgttttctttactgcaggcagcagatgtttgaatttgatacaaagacaccagccaaagaggaggatgcttttcactttgtcagttacgttccagtcaatgggaggctgtatgaactagacgggttaagagagggcccaattgatttaggtaatttgtcttctgttctggtatttactttggataaggaaaaaacgattttatattctcccttatgttagctgcaggtctgcttaaattttgag

SEQ ID NO: 18259 - DNA, 1178 bp, Mus musculus
cctaatactaagatggtgcacacattacctatgacttaattgtaagaacatataacaaattacacctagtttaaaagaaattaaaaattcaaattcatttgaggaaatggagtgccttacaaacgggaaaggagcagtggatggagcatctgctagatgggatgcagtatcaacttgggagactgtgttccccagcacagacttacccctgccatccatcctcactgactaatcaaaggcctcaagaaaatgtagttaacttcaaattagagctgctctcattagtcttggcttcagtagtgtgtacttacagtagcagcggtgtttatcttgtagaccttggtgagttggttttcacagcttatgtttttataaatatccttggaataggcttctttttttttcctatagaagattgttcagagaggactttaaaaaaccaatttgctaagctgaggggaaaatgttgtacctagaaaatacttgctacttgttttacattctttattatcgggagggatcaaatcttattcctcatactgtttatgagaatgaaggattttaaattgaatgatagaatgatagaatcagaaaatgtgttttattttcagattgaaaatatcagaaggaagcataattacttgcctttcattatggaattgttaaagaccttagctgagcaccagcagttaattccacttgtggaaaaggtaagtggtttcttggtgactattcaagctaggttagggtctccccagtccatcattgttatgaacatgaatggaggtaaaatatctggggcttttgtagatttattcttttgcttagtgttttgcattgtgtagttatttttttgcctagggttttgtattttgtagttttattcttttgcctgctgttttgaattgtaagagaagtaatgtagcctggtactttaaaacaaaaacaggtatcgccccactactgtatcagcccataattcttaatgtttacaacacaggttgttctgtattaaaacagtttttttctttaaacaaaaataaatttttattgttaataactgaaataataagtttttttccttagctaattttgtaaaattttgccttgataccaggatttagaactagaatggacattgatggggataaaagaatagtttggctagcacacaggtt

SEQ ID NO: 18260 - DNA, 1323 bp, Mus musculus
accaatctgtagaagacaaggcaatcaataagaaaaatgtaatatataacaaggccttaatatataaaatctcagcagacaaaagaacatccaagtacagaaaacaggtaaatcatttgcaatagagatagtgtgttcaggttaaacatcaccgaaaagttagaatggtgaagacttgaagaagatgggggtatgagtcatataagaagtgctttctctggggaatcaaaatccaagcagaaggtaccatgaatgcagaagtttggagcaaggaggatgcctgaagtatttatagggctgtcagaaggccagtttaagaataaagggtaatcagtagggagagactgtgggggttatgagatatgtgggttttgccattgggcaaagaatgaggttagaagactgcagtttagagtctctttaggttttcagatatttcttcacaatttgaacacttgacagttgtccctttaatttatttgaaatgctaattttttaaaaataaaggttcacctctcggtgcaataaaataaataaaaataataataaaattaaattaaattaaaaagccatctgttttgcggcatcatggctgccctccaacctctggtgaagcctaagatcgtcaaaaagaggaacaagaagttcatcagacaccagtcagaccgatatgtgaaaattaagcgaaactggcggaaacccagaggcattgacaacagggtgcggagaaggtttaagggccagatcctgatgcccaacctcggttatgggagcaatagaaaaaccaagcacacgctgccccgcggcttccactagttcctggtccacaatgttaaggagctggaggtgctgctgatgtgcaacacatcttactgtgctgagactgctcacaacgtgtcctctaagaaccgaaaagccgccgtagaaagagcagcacagctggccatcagagtgaccaatcccaacgccaggctatgcagcgaagaaaaccaatagatggcttgtgttcacgttttgtatttaaataaaatcacaaaatctgaaaaaaaaaaccaacaacaacaaaaaccccaagaataaagaaagggtaaagtccaagataggactgtctatataatatgcagtcacaattttaggctccatttaacattattaacaattcaaaaacagacataagaaacctttgttttgtattcatgcaaaattaagtataatacaaatgtcaacctcgattgcctcccagaatatgaagataaggccttattgctcaagaaataatgaatttcaggcacagggtttagaggagacaaatgggcactgata

SEQ ID NO: 18261 - DNA, 1209 bp, Mus musculus
tggagccctgtgcagagaggctctgcatgcccaggtggagaggtttgcccagcaggctggcaaccaggttgatgcctctgtcaccctttactatttcaatgcctctctatacctgctcctagtcctcaagggtaacaccagtaagaggcatcgagatggtcagaagttacaggaagctgacactatgtctgagcccaaggattcagacaaccagactgctagttgctttagacttgaactttgtgactcgggtgtatttggcatcattggaatctcttctgaccaagcatatcagcccactcatggtcgctgtactcctcagcatcttctcccaatacctggtaatctgtaagaaactgctccccatcctggtccagcatgtggctcacccatctcggtcccaccatcattcccaggcatgcttgatgcgccagaagaccctgtctgcactggagctgagagtatgttttgaggatcccaagtgggagcaactagttactcataggaaaggccacccagactctgcagactcttgaggaggcacaaagcaaggaggagcaccagagggagctatccatcttggagctgctgaacactctcttcaggacagtcaatcaagagaagctgtctgtggacctcactgctctcttggacatgtttcagagcaagcaacagaggctgcagcaaagcctgcagcacggaaatcactcgtctgtctccaatcgcttctatggtctgtactgggcaggccatgaggatcctaggagtccagtgtccaaggtcagtaaagaagaatgccaaagatattcctagccacacatagagcccgattagtacaaagcagaaaaagggggattcttgccggagatcaagaagcaaaagaaacttaaatatgagggcaccacaccagaaaagaatgctgtatcacaacaggatgcagtgacagagggtgccatgcctgctccactggcaaagaccagattcccagcacaagcaagaagaaaagtaagagggtgaaggccagcacaccattctagatgaatggagtatctgtggccaagagttgggctcccaataaccccacccaaaacccctgccaagaacccaaaactgcagaataaaaaagagaagctgtcacaggtgaatggagccactcctgtgtcccctgtagagcctgaaagcaaaaagcatcatcagaacactctaagc

SEQ ID NO: 18262 - DNA, 1140 bp, Mus musculus
acctgcagggttgcagatctctttagctccttagatactttctctagctcctccattgggggccctgtgatccatccaatagctgactcttttataaaaaaaaatgcaaacaaacatgtgtataaaacatacttatgataatctaaagactttggtaaattcagtcactcagtcacatgttggctactccctaaaataaaggtgttcttgacacttaatcataaattgaggagaaactggagtcaaataggatttaaatctatctttttaacttattaggcaaacaatttagcttttgcataaactttcatgactctgaaaataaaggatgatgttctcgaggttatatgactattgtgacagatgtatgatgtgagtgaaatcttggatctcttctataaaatattttatgtggtttttttctctgcgggattgaacgggtctccgtgtcctgctttgagcgctgctattgggtgctgtgaggggacctcaagtaagctccatttttgaaacatggatgcagtgacttatgatgatgtgcgtgtgaacttcactgaggaagattgggatttgctggatccttcccagaaaagtctctatgaagaggtgatgcaggagacctaccagaacatcactgctataggctacaagtgggaagaccatcatattgaagaatattgtcaaagttctagaagacatgaaaggcatgaaagaattcatattggagagaaaccgtatgaacgtaaccaatgtggtaaagcctttgcaagtgacaatcatctccaaatacataaaagaacaaatactggagagaaaccttatgaatgtaatcaatgtggtaaagccttttcacaatggagtactctccaatatcatattagaagacataatggagagaaaccctataaatgtaatcagtgtggtaaagcctatggacatcacagtagtctgcaatatcataaaagaacacatactggagagaaaccttatcaatgtaatcaatgtgataaagcattttcacaacacagtagtcttgaatatcataaaataacacatactggagagaaaccttatgagtgtgatcaatgtggtaaagcctttgcatggcagtctagtctcaatatacataaaagaacacat

SEQ ID NO: 18263 - DNA, 1175 bp, Mus musculus
aaagacagagtcaccactacgtcacgtggagtccgctttacagacttaaaagcaaggttctccccattagcagccagttgtcaaactgcgagctaagagcttcaggagtcagtcaggactctgctcacgaaggaactcagcactgcatcctgccagctccaccgccaccactactgccacctccgctgccacctctgcgatgctcttccgagctgtgctgctctgcgctgccctggggctcagccaggcaggtgagttgcgccccgaggcgccctgggactcctcaggctcagaccccctttctagcagtgtgggcctggctgtgtattggcaaagagcctggactgcttaagtcctgaggaactgcaacccactttcaggtttcttatttgctaaaaaccaatagtcttaatggcttacaggttgtcattatggtaagacaatctgatcaatacttgtgaaaagcatagatgtgggcaactgaacaagagtggctgctttgaatacctgttagagtttttctatccacagaaaaatccagaatacatttttaaaaatatatttaaaatgctaaaacttgactgttttaattttattttctttacactaaattttgactattgcactaggtcgatccattttaatatttaaagggatgcttaataattctagtctgtgtgtccgagttattttaaaaatgttggtaatgtgaactatgaagttaggtcctctgtgtttcttgcttaagaatacaaagttgcttgctatttccataaacagttgataagacagacttaattaaaataatgacctttttaaatctgggtctacctatgtatttgtcaaacttatcattgtaaagttgacccatagtgacagaattaaatccttaagttaagatgagaacaaccaagagtaactgacaggatatcttatttttttaatgtagcaaatccttgctgttccaatccatgtcaaaaccgtggggaatgtatgagcacaggatttgaccagtataagtgtgactgtacccggactggattctatggtgaaaactgtactacacgtaagtttttcctggggtatcttcctttggaatgtggccacatgtgtaaccatcattctgtagatttgtgtcctatgggggaggggcctgctcattcttcctcctgctt

SEQ ID NO: 18264 - DNA, 1820 bp, Mus musculus
attttcaactcactaccatatttttctctaagccaccactgaattttagtctgtacatatccatatctgtccattttgtagtgtgtgcatacatgtgtacgtctctgtgtgtagttgtctaggccatgttagctcgtctcagagcctaagggtcagtggcgccttctttcttttgctcatcccactgttatgtattgcttgcttccctcttaggtgtgatcgcagcactagctgttgcagtgcttgctgcgggcatctccttccattacttcagtgattagagctccctgatcatccagaaatcacggatcaacagctacagaaaataacgacatcaatgtccacctgcactgaagctagcaagcagctctgctacgttaacatctgttagatgtgtttctgacttacatgaaaccaccagctgccttgtttagccctgctttgattatctggcccaggtttccaaaagtaaactgtgcatctaaatggagttgcatgtaacaaatcactattatgtattttcagaagggtcaaaatgtgagctatttaagagtttagtgctttcaaaaaaaaaaaaaaaaaagtttagtgctattgaaccggatcacacattgattagaatattgaaagtttaagcagacagtagtaactatagcagatgtatcactaggcattatcttcatcctaaaggacttttctaatatgcacccagttgccgtagtttatagacactgtttaaattggaggccatgaatattattttaagcatacacatggactgtggtttcttggatggcagatccagtagtagcactgcagaatgctgtttgcctcaatccagaaaagagagaaatgtaaatctgagatgctatcctagttagggaagttaatattcagcagctcccccttgtagttctgtgtagctagctcctggcagaaataaactagaaacactcctaacttaggcccaagactcccataagttatgatcaagcaatatttcttcctgattctatatcatgaggtacaagatgcagtgagactgggagaaataaactataggaaaaacacattgaagtcatttcccaaggttcacgtcaacaatgtagagagtaacaggtgggtagagccacagtgtgggtgaaagccaagtagtgctcctcagaatgaggaggagaggaaactgtgggctgtttagtgggagtggacttggctgaagagaccagagaatggaaggtagagcagcaggaaggctgggaggagtgaggagggacaaggtctaggaggaccaggaggcgggaatgggagagaggcagcacttagacaacaggtttctgcacactcgttaccaaacaggcttataattgaagaaacaaacaaacaaacaaataattcacaagtgaatcaagtatgaaacaaggttcctaaaaagccaaagaggtgataaagatgcccagctaaggcaactcagtcacatgcatagtagaccggaagcaacagtttacccaagaaggtggtaaaatctcttcatagttgtgagggcaactgaaaatcagtgcaaagtgaaactcagaaacaaaccgttattacagaactgaaaaaggatggtccttgataagaagaattcctcaagaagcaagctttgaaagtgaagtgttaatgagcagacaaaacgatcaatattgtaaatctaaagtgttatttgtatacaaaaatcataatgaagtatttaaagaaattgtaatagaaattgtaaacaaatgtaacaccgaataaatattgttaatgcaacattaatgtggaattttaaaataggatat

SEQ ID NO: 18265 - DNA, 1153 bp, Mus musculus
tgaatctcataggaagaacttgagctgctttttctgagaaactaaagataaagaccagctctgcgtggtgagaagggcacatctgtaatcctagaaggccaaggtgggaactggccattacaggacagcctgggctacataacaagatcccatttcacgaaaggaaagggaaactagatgtctcaaattattttaaagatatttttttcctcactaaccccagctgcttctccctctcgagtgttaggattatggatgtgtgtcattggacacagcctaaagataatctatctttaattgtttactcacgtattattactgagtgtttgtgtgcgtgcatgtcatgcacaagtactgttatttccttagccattttgtaggcccagaataatatgtttctgatgctactatctaagcccaaaagtaatctgtcgttgaaatatgaaagtgaatactaaagtgatgcattttgttgtcttaattctccaagttttaaaacactaaacttagagttttctaaaattttaacatgccttcttgtagatttattcgacgagaaaaagaaattgctgaaactaggtttgaggtggctcaggttgagagtttgcggtatcgacaaagagttgaacttctagaacgggagttgcaagaactgcaggatagcctgaatgtggaaagggaaaaggtgcaggtatgtccatacaccaagcttaaagaaggaaagctcatgtgtttctaccacgatacactaatttgagcactcatcctaaagttgtaaatttagcatctgtccagtattgccgagttgtgtggtgattagaagctctgttgtagaggtctggtttggaattctgcttccataggattagctcgatatgctgaacattgcttagcttccctcctcttagtctccttgtctgtagatgagaggtaggattgagattgtgcatgcgaatcatctggactgtagtatacagtatataaaattccagctttctaatcttttgcagctgctatatataaataccttgtgattcattctaaaataaaagtctagagtcattctagatagaatagattgaaactaagaaattaaactaaacacaccatggtaactccaagcactggtggctctcaactcactgctgagtcc

SEQ ID NO: 18266 - DNA, 1282 bp, Mus musculus
tatctaaggttatcttacagcaacttcaaaaaaatactgttttgattttttttttttttttttttttttttggacaggcaggggtggtgggggggggatggtttgagtccaattgtttctctgtattaacagccttggctatcctagaaattactttgtagaccaggctggtctccagctcacaagagatgtgcctgcctcctgagtactaggactaaaggtgtgcaccactacacctggcatcactggtctacttttttattatatactatataaattgtgtgatgtgaatattttataattcctagtaacgaataatattcatatatgaacaagctcctggtaaagttaatttacattaacttaaattttttaggataatttacctatttttatgctggagtaagtaataaacatagatctgtctagagatttgcttactgagatatagatagtgagtgtaccagaactaatatatagcatagggcaggatgtaatgctaactgtacatgccatttaattgcataatgtttctgatgtctggttatatttatatgcttattttaggtgtgaaagatcagctgactaaagaaattgaagaacttaaacaaaggaacggagctctagatcagcagaaagatgagcttgatgtccgaatgactgctcttaagtcccagtatgaaggtcggattagtcgcttagagagagagctcagagagcatcaagagcgacaccttgagcagagggatgagcctcaagaacccactaataaggtgactgccgcttgcgcttccatgacaaaccacttgtgacttgtgtatattttatttggaagtgcctggtttttaggagtctgttagaatttggactaaaatttcaaatatacagacagttgataataaatagcctaacatctttgttcagtggacgtttgggtgtaataaacacagaagttaatccttctcttctttataggctccagaacagcaaagacaaatcacactgaaaaccactccagcttctggtgaaagaggaatgtgagttctagttcttttatagtctgcctttaaagttccaaaagaatcaggtgatgtagttttcaaatcttgttatcagtatgctttcattcctatgtctaaagctgtagtgaccagaaacaccttgtggcttagtttataattggtttataaataagataagctcctactcacgccttatcatgttcataacagctctaaaagtctaggctggggttggagagatgatggctcaccactggctg

SEQ ID NO: 18267 - DNA, 1158 bp, Mus musculus
gtttacttgatatgtgggataatagcatttgtatcaatttctaaggtaaacctaaggattgatttataattacatgttgatcgtgtgacacttagccagaaagcttcttttaggcaagttgtcatagttataaaatgaatgtgtttttaaaattggtgtattttatttcattagatccaaaaaaagatttggaaaatcaagtgttagcatgttgtgcattatctgtattcttatggtgttaagttttgttttgttttgttttctgcaccgaaagttttgtggctattagtagctagtaaagaaatagaagattttaatattttcacattcttcaaaataactcatttagactgtattaacatcataaatctagtaacccagctataataattaccagtcaacatggagaatatctttttatatccatatcttagatatttctactgaaaatgaattttgccgtttccttctacaggtataagccatgcaatgggaggaagaggaggaataaatagagggaatattaattaagtgatctctaaactgtgacacatgtgaataagattgacgaatctgttttaatataatgattgtcaagttgagaactgttttgtatttaaataggtatgctcatttcaacattctttattaataaaatgtatttcaatgtcaaaaagtatcactgttttcttcatttcattttgatgactcttctttgtcaatcagttcaaggacagttgtaccagattttggagagggtctgccctgaacgtgtggtaattgctcttgctgttcttgtaggcacatcaatgttatagtattgatctaaataaaagagaaaacatccttttaattaaaaagaaagtaaaacatttaagtttgtattgagtgttgtattcaaagtcaggatcatttcaatatcaaaagtggatgtcattaactttctgacaaaaaataatttagaatgatggaaggaataacttttcagcatccttcaggtaatattaggttcaactctaccttttttaaataaatatttaaaatagacaatttaaaagattttggctttaaccattttaaaaatgtatttcttagaaattcatactatagaatcataggcagaataatttagataactggtctttcaaaattaagtgt

SEQ ID NO: 18268 - DNA, 1181 bp, Mus musculus
cccttggttctgttcccagtgttgtatataggaaatggtgtctttacaaagaattttagttttccagggctgggagtatgtgcctctgataaggaagggggattgagttcagggccagtctcagctgggttctgaattgaaggccagactgggctatatgagatgtctcaagtgaacattggtttaattttgagagtaacggatggacagcagccaaatccctacatgcctctcttaagccgcttgctgtataggtttggaaagagaaagatttcattttccttccttccggaggaatgcgtgtttgacctggaaaccaggtttaggttgttgagatgctcactactgggtgatggttacaaagtcataggatcaaagtcaggctgaggtcatccgtatcctggaccagtgttgtttgagctaggattttgtgcaataaatgttttggtgtgttggtaggatagaatttgggtatgtttgaaaaatacataacattcttttttgaaacaatggtttactgtgtactgtgattgtccttgactttactgtcttgtgtatgaccaggcaggcctcaaactcaggaatctacccgcctctttcccaagtgctgagattaaaggtgtgactcaccataccctgcttgaaaaattttaagaactatttacatgtaaaataacttagctttcttttttttttctgtttagccaaatttataaggaaaaatgattcccaatggatatttgatgtttgaagatgaaaattttattgaatcatctgttgccaaattaaatgccttgaggaagagtgggcagttctgtgatgttcgacttcaggtatttaaaacttaattcatgaccttttgttactaaaaaagtaaactcataaaaccataagttgtgcccccaccccctaaacaggcaattaatgagatgactagggggttttttgttgttgttgttttgtcttgttttttgagatcttatttttttacgtgtatgggtgttttgcctgcatgtatgacttgtaccacatgccacatgtgtgcagtgctgtggagttgagaagacgggtaggattccctggaactggatttacaggtggttaggagctaccatgtaggtgctggtcccatggaagagcagccagtgctcttaaccattgagccaactttctagcggtga

SEQ ID NO: 18269 - DNA, 1290 bp, Mus musculus
ggtgggtggggtagatgttgctaactgcaacacaaagcttttgcatattgcatattattaaacatgctgtacatactttttgtgtttggaacggaatgcaaagatgaaggtctgtttctgtattcttaagacatctttggttattttactttttgaaggttgatactgtaaaagaataaaccacaaattgattgggaacatcatttcaagaagtccctgctcctccacatttgttttgccgatttgcacattaaatgactcttccctcaattctgtcttaagaggcaagaggggtagggtttacacgtaggcagttgggttttttaagggccccttttcaataactggaacactctataacaagatacttatttaaatagataacaatgactatttttgtttttattaaaagaaagttgacatgcctaccaatatttagtcttttatgattacatttttataactttttatattctcagcagagtgctttatctgttgaagtaaaatgtgacagattcacattatcaaagcagagtggcagaggaaaggatgcagagtggctgtttcttttaaaaaatgctcagaacgcagacttcaccatttgccgcagctgtacctttttttctttcctatctgagagtgcagtatcgatgttatttggatggagttgctgaatggtaacagtaattcaaacccaggtttgatgagttacttgacttactgaagcatttaaactgtctttatttatcattaaccaaacaaatgtaagtggaagcctttgattgaaaacaattaaactgtattgggtttgtgaatgcaccccttttcagaagtgttttgttcagctttcttacctggattaatactggttggggtggctcggtgtctgtgtagtgctacacctaatttatggtgcccaaatgagcaaatctaatgcttgctgcagatacaaacacattaaaggtactttgcagtaaatccttgcactgtgggatttaatgtccaaatgtttgtcactcagttcattacttataacggagggggggggtttgtttttctctgtaaggatgagtttacagtattagtagaaaatactcatttgccatatctgaagtaagggatggtgtgaagtttgtgtttcacataaactaagccaggtggtgttggcgcacgcctttaatcccagcacttgggaggcagaggcaggtggatttctgagttcgaggccagcctggtctacaaagtgagttccaggacagccagggctacacagagaaaccctgtcttgaa

SEQ ID NO: 18270 - DNA, 1253 bp, Mus musculus
cctagaccgcacagatagatacctgcctgccgctgcctctgggattcttgactgttttgtgatttacttcttttcccctagggaaagattaaccattggatgccgccagctgattgagatggaatgcaccatgcagcagtgcagtgcatctgtctatatggaggccagaagcagagggtggtgtgaagacatgctcaacaacaggccttaagtttacagcaggaacagcatctctgtcttcataagtgacacagtaacttttaacctggttgctttttttgaaaaaaaaaaaagaaaaaaaaaaaacatttcatagatacaaaaaccaaaatgttgtattgaccaatctcattgaatctagtgtagtataaactgtaccccagctcttctggagttgacaatacttcctacctctaaggagaagagagagagccatcttctcagtgttcctgaggcaggaatcactgtgacacgatggcagcccacagccttagtatctctcctaaccctgaatgtgaacacatgaccagacactgccaaaccccaagacttaagacatgaccatgccaccacattccacatgggctgctttcatgaacaaactgtcatttatataaaactggtgggaaaacccaccacctctttcagggacatgaagtagaattttgaactagcaccttctctgtagctgctttggcgatgtcatttcctgtgcgtttccagtaggaaagagcccctctgatgcttccccttacatgtgaagcgctggatttggggaattgaacggcagtggcagctatttgccctacctaaaactcaagtgtttaattgacttagttacacattaagttggaaatccttgtttactggagtgtattatgcttttgttaatatattagatgaaatcaaatttgatattctataatgttaatttatttttaaaacagcaataaataagttattttagtagcattttgcttttccgtttactcccaaatactgtctctgaaatgagtataaggtgtgattataaaagtctttccagtagaaagattggttatggtacaggtactgctcagctgtatggttgtgaggtgagaaaacctgcatgttaaggtttgtggggagatgagcgtccagcagggccatgagctcaggtaacgcttcagcatgtcaggaagttgtcctcagtttttgaccaagggcattgttacattactctggctggcctcactcctaggtcagtttggcct

SEQ ID NO: 18271 - DNA, 2345 bp, Mus musculus
acagccagtggccagttcaccgtgagtatttgtcaatgcctgttgagctccttggctagtggtctgggtgggtctggtagggggggagccctgaggcccacgaagcaaagccgcagattaatgactccgtgatgccctttatctctcctgctgtgcacgggatcctgtggccttttgtttatttagtctcactgttactgagcaccatgcattttcataatcttgcctctttttgttttaggttttaaatggctccttttctttggaattggtcagtgagaaatactggaaagtgaacaaacccatggaactttattatgcacccaccaaggagcacaaatgagcttttaaaagtcaattctaagactgaactttttatagtctattcctttactattaaagatgtaccattgttactttcatggacagacctgggatatgttcagttttctttctgagccagacttgtttacactattagattaccgtctccttaatttaaagacagtactttgtggaaaggactctgtgattcagagctcccactccctccatagacgctctaagttgttgcttacagaaaacggggttcctctggggaggagactttgaactaggagttttttgtagttctgtattctttattttttccttccattttttgatattttcagacagtgtctcattattataaagccctggctagcctggaacttgctgagtagaacaggctggccttgactttggagtaatgctcctgcccaagtactgggattctgcctggcttaagattcagttggccatcagccatcttttcccctttcaaaagttttttagcttaaagaatgttagacaatatgtattctgatgttttccccttgaagtcttgtatatttatagttttctatacaaactgtaatatcttcatgaagaccaaggctcaaattactgtgcttaaaacaattctcataggattattattttcatggtattttcttacataatatctcatttaaaggaggttctttatgaacttggtgtccattgtcatgcaatgttttgtttttgtcatgtgtttccactataagtttagaatttcaggtcacggggaaaagtcgaataaagttctttgagaacgtggttcatttacaggtttcactgaagaaagagaagtttaagatggtgaaaatatgtgtattcctctgtacatttgagagtttactgtccctttattatgtatgtttgatgcttttctctattaaaataccagagattatggagatattttgcactttagccttgatgaaaagtacaagatatgttcaaagcttcccctcatttcttttcttattaattcaagaataacatgacacagttaaaaatagaaaagaaaggttttgtttgaagagttctttgcattctgagttaccatgtgtttataaatttagtgctctgctaaattacactctgtagaaacaggttaatggagtgtgaacattgcattgacatagaatgggacagctctgtagaaggatgtcagcaggttgggcagccattcagaagccttagttttgtattgagaaagtgttggtagtctgggaaccacaagactttctgctgaccagtcagacttaatgtcttagatttcatttctgtcccgatgctacatatgtctctaagtttaaattctcacagtatttacaaagacatgtttgcattgaaaaatttaacccaaaggggttttgatagaaggaagagacttccggtaccattgtaactaaagtgtcagtcattttaactatttatctgtcagtttagacagattggggccagcttgatgctttaatcttgagccgactatgaaaacttaaaggcttattcaattttttaccattttactgaaaatatttgaaatctgtttttacagtttttttggtaatctgtgccataagatttgaaaaccaccaaaaattatacgaacttttatatccaattccttttctggggtaatgttaagttgtatagattattaatgcatgttcgctgaatataactcttgttttgtgatgtgattgcttagactttattggtgacatattagattagtggttgtattaaataattaaattctccttgtggttattgaaattttatctaagcagaaagttatttgtgactataagctttgtgcttagagaatgtatgtgtttttatctgtctatgggagcacataaactatttgcatcatttagtgaagttattagatgtgtactcctttgccaaataggtaattggtagaacattgtgtgtgtgtgtgtgtgtgtgtgtgtgtgtgtgtgtgtgtg

SEQ ID NO: 18272 - DNA, 1374 bp, Mus musculus
atggagagcaatgaggtggcccaggcttctggggatcaagaagtgctgggaggggaggatagctcagcccttggtatggatacagagcaagtcaatgatactcatgagcatgcttgtcagtggctggtggaggataccctgagcactgacatcctagccgtacatgattttgatgtgagctccccagagcagccctcagaggagtggtaggaacagtttgctagccgtttttcttttaaaactgtcagcaaggggggtcttagttatggggtatccttaggggggttgcatgtgacttgctataaaagttatgaaatatttctttgatttgaatggtgaagccagaggaaatgtctagcgggtgtgagcgctgagctgtctttgaggagctgaagtgctccctatgaatgatcgctttagcattttagtagaaatggggtaggagaactggagccttgggggtgaaaggcagttcaaggggctccagagaggggccagtgtaggagcagcaaatgacacctcaatattctcttcaccgaaacatggtacacatttcgaactgcacttgaaggcattctaatcaagcacgtgaaggactccagccacaccacccactcagtcggcttcactgtctcttgtccacaatcaggccacacgaaagaggaagttgggaaccaggcgtccctgtcctgtaaagtacccagagccactcacggctcgtagatctcaggtgatgcagagcagaaatccaaggtgaaaggtctgtgcagcatctatctagacctgttcctaatcctgctatcaattccttgttggttaattttgttggtttatattaattaatcaccttttaaggaaactcagatggggcaagagatttcattggcacaaattagccttgggctgtacaaagtgcttggctaaatgttctagctcaaaacctgccaattacacagacattatttgaacagctaccgtatgctctgttcgtcacagtaataaataagagatcaggtgctttgcttcatataaattaaaaggctcgtgaaaatttagtctagaagaaaagagtatttattccaatttttaagttttaaaccatgctggctttcactcttcccattcacaaggttctggtttattttctgagggagggaaggaattaatgaatgaaaaaaggaatgaataaagctatttaagtttaccaaagactttaccaatgtagaaattgtttgatcattcaacaaattgttttcttaggttccctatcaggccccaagcctggggatgccatgatggaaacaccagtgttccttctttctgaaggaaacagaaagaaattcacctctaaaatagattgcaacccataactgt

SEQ ID NO: 18273 - DNA, 1228 bp, Mus musculus
tgagtagattactacctctctgcgatccctggagttatcctaagacatactctgatttctgtgtgattgccatggctagtaacattctaatgattgtttgacagatctctagtcccatcaaactgtggtggaactaactgtcccatcggtgaactaactgcacagatggttttctcttttctccaaatcacatgaaatttggtgtttatttgggcagttcttgcataattttacttagccctagaccatagttactctaaggcttctagtaacaggttttgcatgtttgtactaagttaagtttgcacagtaatacagatgatataatatgtaccagggccgttcctgcttatgatatctgattctcagggtttatcctggctactctggacaatcaaactgttgtatgcagaacatgttcttttgaagacctctaaatattacagatagaatttgaaagagctagagagcaccctttccttcagctagtagattccacctaattctacagtcactttaagttgggtttcctgaaataggctttttgtttgttttgagattgtttccatatgtggctttgaactctctgtagcactggctgacctcaaacttgggcatcagcctctcaagtgctaagattagggctgtgcaacatcacactcaactgagtaactttcatcattaagccataagacctatttttaatttttatgcattttaaattcattactttggagctccagatttatgtccatctactccccctttaaaattttattttacaaagtatgcacaacacacgttgtagtcatttttagaaatgcagttccaaggcatttgtctctagaacaggggttttcaacctgagtgttgagatttttttgggggttaaaacaccctttcacagttgttgcttaatgtaagtatcagatatttatattaaaattcatagcagtgcacaataacagttatgaagtagcaacaaaacctgcctcatggttggaggtccccacattgtcaggaactttattgcatggtcacagcgttaggaaggtggagacccactgggctagagcactgtcttcccatctgaagctctgcagtaggcttttctttttaatcacttgttcatcaaaaagaataacctagggacagaatgtttatggagggtgccaggtcatctgtgagtgtgagtttgagtttggaacagacgtccacagctttcagt

SEQ ID NO: 18274 - DNA, 2821 bp, Mus musculus
ccataggaacctggagcacgctgtgttagagctgaccactgaaactgccccatccaaagtggagactcacaagccctcagatggcggtatccctggccagggaaagatgactgcccactcctgggtagacaagaagcaaattcagctaatggaacctgggaacagagtcagtgtcgctttctgattgaagaaagcttcactgccttgggcttggggaagatttgagcgagtattgtggcatctcggctttgctgccttcacaggaactctctaagtgacctacgggttctgaagcagatgcatttacggcaatgacagtttctgcgcatcgctgttacatgcttcaatcagtgacaaatggccaggacgacttgatttcttttcctctcccaacaatgaccttagcatttaaccaaagctgagcccagtgtacttttcccataggtctccgtaaagacctactacggggccatggagagggtccggtagatagtgtggaaatttgttgcttactgctcggggtaaatagagaaggagaaactgtaatgttgcaatatcaacttcccgttgggggaagctatgactactctagatggaactcagcattaggtcctggtggggtagattggaagtcttttctagttcatttctcttaaggtggttcctctaaccatcagccttactccatccattttagtatgcagtttgagatggaaggctcgtctccaagccctgctccatctccctatcttatagagccatgagaaaccatggtagtagactgtagtcccggggtgactactgtctttctcctttgaagctggagtctgtcacattttctgttaaatcatgggtttaggtttgttttgttttgttttaacaaatactccttccttctaatgtggacttgaaaattagtctctggtgacctgtgtaaaaactatatagccatataagtaaaagaaaaagattttttgggggtgtgtgtggcagtctggagctggtcacatttaattatttttggttttgcttattgatacttctacattgaaatcatggttttattcattttatttatttttgaacttgttttaattgcttctaaaggaatatttgagggacttcattcctttttaccatggcattacacagtaacttttctctacaacgtggttttgaggtactgaatgacttaggttatctatggagccatgaatgacagcagtgctgtgctgtagttgtgtaagttcatgtcttaggtcccaggtaagcgtgcccttttataagggaataaatacctgttttcaaaaggtccaaataaatgattggtcagtgagtgatgaatcttagagaattccttggggccggggtagcatggcaaggccttcattaactcgtagttaaacctgacagcaaacatgggtattttagtctctctgcatgggaagtttggtgtgagaagatagaaccgtaatacatagagtatacagaaggggagatgtgcttcgttttatttcattgcaaagctgccaaaatagctgacgcttaattacttgacttgatttctaggactggggcttggaggaagggaacagatgttccttggcgactttgattacagaagccttctatggattgattttgtatttgtagctcaaagccattgttgactaaatcaaactctgctaagttatcaaagccgcatatttttttcctttgagaacttaagggcatgaaggggagcccatggcacattaggaaaagccagcgactgccacttacattcctttggccactaggaggagctgttgcccttcattaaggcacctattgatttgtttaggaaaaccaaatcctttaaagaaataaatttaagacattttacttactaactagaaggaataatactcagttccccctacttaagaaaagaggaatacgttcagcgtcagaacacaacattctaactgagtctccatccatttttgtatttgacatactgcctgccacaaagtagtcttttgagttcactaggaaattccaacagcatagatttttaaaaaatttttttttcattgttgttgatgtttgttaaaaacctttcatagatattttatttacttgctgaagattcagggacttctgagaccctgagtttagaaacatctggtctacctcagttaaatgttgactgcttagaaatagagctgaaatgatcaccacagccataaaattgtttgactaagaaagatttatataatgtttacaaacctggaatcaagtgcggatattacctgaaagctaaaggttagctgttaagagcaagtatttaattcaggtatttttcaagttttaaaacttgtttaccaagtaaaattaggtattttttttcttcacataaaaactccattgaaattatatgccctaatttgcaatattttccccataaaatttaaatgtgaaagaacagtaatttactagatatgttttgggtggggtattttgttaagtaggttttcttttttctctttaacctatgtaataagcttccaaaaaaagtataattgttttagaacaaattattttgtaattttccttttcctttttctttacagtattagatacttttaagtgaaaaattatgcactctctgacttcaatttcactaatgtaattattttctcgggaattcttttagatctaaattaccatcatattaacttttcttatacaaagccagcgtttgttctctcaccagactccatgccagatccatcataagaaagctcagcctaagtaattcaaatagtgcttacaactt

SEQ ID NO: 18275 - DNA, 1177 bp, Mus musculus
acgacacgtgccagggccagccccagcattgctcatcattcccactcatcagtgtggccttgactgtgacattgcagctgctccactgggacgtgatgttaccaacctggagagttaaaagtatttttcctcgggttgtctcaggtgtagttactcctggtaggctcccggccctgagccgatgagcaagcaatatgaaggtgaaccagtttctcccctccagaggcctatcacgagggggaaacaatccagaagggccaccttagagacatcgcaggaccctatgggatcacatcgcagtggtagccagccagctccaggcatagaagcttccagaaaacaatgagaacaaaattcatccttgtctgggcacagagagaaagctatccaaggagtcgtccatgctgagaggacatgtcttgcataggtgggccatgggaccttcatgccattggaccttcatgggaataggggtggagcttagagtagcagagagaagcgcaaaggatgagaacagggtagcaaaccaggctctgcggcttcgctgtggattcgtagactgtgatggagttgctgatatgcctctgcacactccactccgcgttgtccctgagagcaagatgtgatcgttctcaggatggggattgccttcctctggaaatacacagcagctggctgaaaagattcatgcccaccatcctctctccccttcccaacttctcttcctgcctctaaaagctattggagttcaagggctttacctgggctcaatctcctttggagatttgtgggagagagggctgggtcatcctgacctgtctttagagaaatgatggctaaaaatacctcttgggacttaggttggcctagacctggagatgagagtgtaccctaaaataaatattcagggagtggtgaaggcttccctgtttagcatgtggttctagccaagttcgtaacctttgcatagccttcccctgggttaggtcactagcactgaccagggaggcagccaggcctctgctagggcacaagtgcatacctgagtctcgcccaggaaagaggagctggggagcttgggggtgggggctttgttttgttttgttttttatcataaagtacaaataagttgtgtgcaaatgcagactgtgcacagtggctgaggaccttgtggggc

SEQ ID NO: 18276 - DNA, 1126 bp, Mus musculus
ggcctgagccttgcttctcactggtaacgtggggctttggacatgggatggtggccacggtgagcctagtttctctgcttgaaagagccacaattgattgaaagcctgttgtaacctaacctgactcccggaagtgacaaaggaacaagtgagcagtaggttgttccgcttactaggactcttagtgcaggattaagcttgtagcattggcttttgctcagatgcaaatggaagtgtgaccacgtgaccacaatcattttcaacccctccctcctcacttttttttctaagaaaataaacattttgctgtttttctgtatccttgtcttctcccattcatccagttcagttaaagatgaccctaggtgtggaagctaagtcctccttcacagggacactgatgattggcctaaatggctccccacccttctggagacatcgaacatggtttggaagggctgtgagtggtcagaggagatgaggcgacaaccccgtgacttcttaggagggctggaaaccactgtcaacctttcactctgttaacttatcagaacacgctgttttctgagttcccccttcgatgtgttatgtgagccttgccccttcattcgtttctgtttccagctctggtagtgtgggttaaaaaaaaaaaaaaaaatgtctgcctactagaaaacataggacatccacgctggtgatgttacttggagaagtgaaagccaaaagcccctggtggtggggagtgttgactgtgtgttcagtagagtttatttttccatactatatgaagagaatgatctcttctcaaagacagaagtaatatttttaacaaatattgtcacaagtaaatagcaatcaaaaggagaaaaaataacttttgtatttttttaatcgtgtttgatagctttgatgagggttctctttgttactttcaggggagggcaccctattaaatgccacgccagcagtcctggattgagcttgtcctacacacacacacacacacacacacacacacacacacacacacacacgaatgctgtgtttttctcagagggttgtgaatttcaagggtctcacgatcagccacactgcctgccaccttggaagatggaatagttacaag

SEQ ID NO: 18277 - DNA, 1178 bp, Mus musculus
gaaattgtgaaaccatcctttatactctgagagccagggtttaggctgtacaggagggaaatgtgctggtcttgtttattttactaacaatgtatctttggggatgaaaactgaagcagtttctgtagtctgaaattacttttgagtcgtttgtccatattaccttgggggtgtttgcctatgtagtttgagattatatgtataagataagagttcattattttggctgtgagatgttattagagttatacctctaggtctgggcactgtgaagttagctactaggcagacataggaccacaatattggtggtgttaaaatgaaacctgtgatcatagaacatttttatctaaagaaaaataaaatggtaaaaccattcactttaattgttaggaggaaaaaaaacctaatctgtcttaggtttgttttccattagggtctctttgtttttaacaatagtcagtgctagtctagccctcctagactttcttcctccccctcctccaaatatcttattcagcattaaaatgcatgtgtattcttcccgaggttaagctgaagtcattaaaaattgattagtttggggctggagcgaggtctcagtgatgaggagcacttctgcttagacatacctgagttcctagcaccctcacggtggccacagcctttgtaactccagttccaagggagccagtgaactcttctggcctctgctgggcacaagacatgcacccggcaccaagcaaaccagcggtacacacaaaatagttaaaatgtaaaagtagggttatgagttagcctttaacatctccgtcagcaacaattttttaaaaaatattttaagcccataattaaaaagtgagatctgtagtaaatggagactagtctgtatacagataacagtgggaagattatctaaggtttggatacgtttgtcatcttttcagttcttttgcttttttgcctcaacattgcaaatctccctccttctctgtgattgggtgagccatgaacatcacactttctacgattgggtcagctgtgagcatcacactttcactgttgctagttgttttctgtgcctttcttctcagcctgttagcaccattctccttgaatactttcatgcactgtgtctgatcaaaccaaaacttaactgagagaaaaataaaattcct

SEQ ID NO: 18278 - DNA, 1149 bp, Mus musculus
gacctgatgcagaggccatggaggagtgcttgcttagtggctttctctccataattttctcggcctgctttcttatgccagccatggtcacctgcccttgtagtgatcatgtaccccagtgggctggggctttccacatcaatcattaatcaagatgccctacagacttgcctacaggtcaaccttacagaaacatttccttagttaagatcccctctgcccagatatgtctaggtttgtgccaagttgacaaaggccaactagcataacggggacatgtcagatcccgagaggaggaacaaggaggaaggaaagtccctcttccctgtgcacctctgggcaaacaccacagatatttcttcatcagtctaggtgaataccaggtattgtcatgcacttccctgtgtgatgtgtaatagcacaggtctgacagacttgcagaggacttttgtagaacatttgacttgtagagtgtctcctcttgccctataaagcccaacactggaccagaagttaataactgctcattgagtcaatttggttagatgctaggaaatcggctttgggttgtaaatatcacattggtcttcctatgggaatttcactgtctgtggttcacagctgatggggtaaaccaagtggacaaggtctcctggtggtagggatattgttagacatgcaaaaccaaaagcttagccaggctatcaattggcagttcgctgttccaacctcacgtttaatctcacgctctcgaatagctttatgtagcgtctgctaaaaccttggagtaccgtgtgtaagttttatgctctagcaactaaatagatagttctggttactggtgtcttgatcatcctgccttctgctgtgtggcttttacttccaaatggagactttccctcccagagggacgagagggactcaggaggctttcgaggctggttatggtttacaaggtttacaaagctgcctgaggtaaagctggggtctccccagtgtggggcatagccttcaggagtcctcatccatgctggactgggcccttgagtcacccgtacatctctaagtaacccctttctcgtgttcctcacagtaagcacaataaattcattggttcaccagtggggacttggggagaatcatttcttt

SEQ ID NO: 18279 - DNA, 1203 bp, Mus musculus
gataagaccttacattcttttaacttccattatatccagaagatggtttatgtccatatatgtatatatattttatatgcatatatttagtgaatatttgttaaatgaaagaaaatattgagccattattttcttctctatttaacaattccgttttgattttcagtatttagaaatgatggaattagatataggagatgccacccaagtttatatagcattcttggtttacctggatctcatggagagtaagttgcttgtttatattggtttgctattggggtgtgggaggttggggcattgggttgttatgtagggttgttcacatataataagcaaacatcttttcatttattattaattttgccagttaattttacatttctttattgatttacattgggacttactaggtcatggaaaagattagaaaaacaaagagaggaggtaatattacgagtgcagtttgttcagctgagtattagaagtttagaatgcttatctttgcttttgaatgagtgcatatgtccattcttgatgctctttcaggtaaaagttggcatgaagtaaactgtgtaggaataccagaactacaactcatctgcctccttggcactgagatcgaaggggaagggctgcagacggtggtgcctacacccatttctgcttccctcagccataataggtgagcgaggacttttgtcctagtttaaaagatccttgcctgttagactctttgtggattttctttctttcttgtttttttcttcacttttataagttctttttatatttttgtcaataatctttcattggttgtatgttccagtttttaaatccaccccgtgacatttttaaggtacgctttaacaagtaacatcataatttgagtataaccccatgcacccatcctttctttcatgatcaccattgttgtgcctagcttaaggtgtatttcctgcttggcattctaagtaaaggtttttaatttctaaaaggtagcaggagatcctgtgtttgaaaaatgacagaggaggaaaagggcttcctttctcctgaataacctctgtccccctcattttcaacagagctccccgacatttaatcagttaccaccccttggagttcccagcctccacagtgcagtcaggccggagtgtggttgttgttggggatcacggcttcattcccaggccctctgtg

SEQ ID NO: 18280 - DNA, 1213 bp, Mus musculus
ttccagggcaagtagtgggtgagccctactaccagtttccagccttctttccgcttgcctccagatgatgctataagtgtaagtgtgctacttcctgttagcatccaactttcatggcctctcaatctctttgtggtgacccagggtccggagcaaggagtcttgctctatataaatgtatttacacaatataagcgcctctttggcacaaacatcccatttccttctggtaataaggctgcctggggaaacagtcccaagtcagagacaggcctccagcagcctctggatgaaatactttcatcagaaataaggtagctgccttagccattacacaagtgttcactggaacatttcccatgatttcccgaggacgtcttcagtgttcttcaggtaatggggatctcagaagatttggttctgatccaaagacacagtctgtgtttcagctcagtgtttttaagaaagaaaaatgccacatagtaaaagaaaaaaagtgtttacttcgttggacaaaccaaattgattctcaaaaaatgaccggtgcttgtaaaaagttattacaaagtagttccgaaaccaaccacctgaatgtgcgtggccgagagggaatcagcctgcttgtctttccctaagatgccaactccagagtcactgactgaggtgagaaccagcgcagaaactctataaactgctgtttttgatacctgctctttttgttttgttctgttttgtaaaattatgataaacttcagaaaataaaatgtcagtgttgaataatttttttcttaattgaatacttgtaactctccagttagttaaggagaagggcattcagtgtagctgtctgtgtggaagagtatgaagccacgtgatgagagcaggtagggagaagagccactaaggatgccagagcactgctgaggccttggtgtgactctatccctctgggtcttagcaggacggaccagtgacctagaggaccaaattcctgtagctgtcaaaggcactcccagcttccaagctccccttgttacacctcagacctgtttctcgcgcctgcgtgctcagcaactctgtttttcaactgcccctgactgattcctgctttcctcgggttaggaccgtggcttaagtgaagctaagtggttcctattggaagtcgtcaagcagtttagcacagcaaccaccttagaaacaagagggagcatgc

SEQ ID NO: 18281 - DNA, 2938 bp, Mus musculus
ggtccagttccatgatgcatcctgggccctccgctctggagcagttgttaatgcagcagaagcagaaacagcagcggggacaaggtgccatgaaccctccacactgaggccacaggagcaacccagggaatgaaggctccataaaccatggcatgttgggtttgcaggactgacccacacagtctctgcaggtggcagctctcttgtctgtttcttgctgtcgagagggtgtaagtgttccaccagcccgctgagtgtgcacgaaatgttcgcagtgcaacaaaaagaaaaaaccatcaggaactctcgttcccccggggctttccggagggagagaggagctgctgtttgtcccactcggttactgatagcacgcctctcaccttctccaccgcgcatgtccccaacacgtgggaagtggaagctgagaagggaaggcagatgggagaaaccaataggaacttctcagtccttttttcctctttggggaataaaataggaatccattatgagtgctttgctgactgagaatgtagttgaaattattcttaaacatcttttattattactctcagtagcaaaatatcacactgaattcttccatacacaggcgtatttctagtcagtgtggagcaaagacagtcccgtttgctgctcctgtgagaggtcagtggtgacaggacagggaactgacctcttaagccagtgggagtgtttcatagggagggtacaaggcctcttagaaggttctgggagaggccttcctccagcctggaaactccagcaggaaatgcccttcactctgtaggtgctcgagccccaatagaggatgcagtgtgggtagtgctgctggcctagaccagcagatggctgctgtacgatttcaaattcatgtggtggattcctacactttacagtagcgtagcaagcagtctcagaaggcaggctagttcattcacggcctggaacccattttaataggtggatgctttcagtgtggttctttttgttgagttggtttttgtgtccccatcctgcttcccagcctcttgcatcagtctccaccctttagccatatgctgtaccgtagtcattgttttcttcctaccgtgtacaacatctcaccacgaaacagcagcatggggccagcacttggggcccaaaagcctgaagtctgaagaggaaggaagcggcagtgcaagcgtcactgcagaggagccgggctatgcccagtcacagctcctggccttcacctcgaggatgaagttgaaggccacagagacagatgcacactgtgcacagaagaaaacacagcagatgccactttggagagggcaagagaaaggaataaactctatttgataatttatattaggaggaaagaggactgaagatgttctgtgtaggaacagaagaacggacagcatttctgttagtcatttcctggaaaagtaatattttaatgggaaattatggaaacaatctaaatgtccaattgctgtgctagggtagggattattttctgggaggtgtgtgtgtgtgtgcgcgcgtgtgtgtcccacacatggctttctactctcccagagggcaagggctaagtgtgggaaatagtgtggagcttagctgaaggacagctgtagagcaaagcacatccaggagccccaggtgtcactggggtctgggcagccccgaaatgagatggggtaaggtattgctcattgctcttcagaaagagtgcttgaagccccaggcttactctattgctcttttagtttgacatggtatttggattttttttcttttttctttttttttttgtttttttgtttttttgttttgttttttgggttttggtttttgttttgttttgtttttgaaaggtctgaaagtgaaacccttcactaaatggcaaaagaaactgtctgtgctgctccagtccctccctgtgtccatctttgtcctctccctgtcccttccctgctaccttcacccagtttgtgtatgtaagctctgcattcagacagctgcagcattccgaggttggaaatgtcactgattcttgcaccttagaccagccaacaggtttaccagttccctccctgcagtacccacttcccagctatagccccagtctgcatgagaatttggtgtttggaatgtttatgactctctcggcggggttcctcgccttgccatcctcactgtggggtaatgaagaaggggaggagaatcttcatcaactggttttgtgtaataaactttcgtgttttgttttgatttgatttgatttggggttgtttttcccccctgtctgtctgtctgtgcaagatctgcagctgctgaaatcagctttgcctttaattaaaccgtgttctctccaagcagatcggtgtgtagaggatttattctaccttaaaggatatagcagtaaaaatacagcttagaacttcaactgctcacttgtcagcaagaaacaaaaatggccacaactgggtaggcttggggatgggttttgcttttcttagcatccagtgacttgttctagaaatgctagcttaaaatgtctgccatagctggacagtggtggcgcatgcctttaatcccagcacttgggaggcagaggcatcctctggcctataaaagccattgaatctgatgaaagccaacagtgatggctgtgatctggggggtggttgatttctcttcctgtttgtccatctgagggacagaaagggctgtcattctaagagttccattctccttgggactggatggtgtgcttcatgggaacctgattcaatctgccttttctttaatgcagcttaagttttttaatgagttgtctgtgtgtaccttcaggattacatataaatttgctttaagcttctggaacccaagcaattaataaaggaagaaccctttattaattatttttcca

SEQ ID NO: 18282 - DNA, 1192 bp, Mus musculus
tgctttttttgtataaatttttgcttatgtgtactctaaaagtcagacttgtgttttatttaataatttgtcaggactctaaactaaggactctgttctctgcgggctcaccgaggtttcgtgctttggttgcacgtgtagtggacaaggagattgtggccatgtgcatttggacccttaaaaagtcactgtaattcactctgaatagagatttgaatttagtgtggctattctttgtcactagctgaagaacatttccactgttctggacatgtatatatcaatatcgttgacaaattattttacacccattaaacgagacttggggaacagtatgcagtagtgcatctctcacacgtgttttcgcctatgtagttttgaaagtgtctgttgatttacatagccttgaagatggctgaggagtggggtgatgagtaaagagtggagtccttggagatgccgtttttgtcatttattagtattctaagttttcttgtataagaataaaatctgattttttttttttttttttaatttacagcatttggccctggctaatttctcttctaaatagtttccatccccgtgaagatgatctctcaaatactaatggtaagaggtgcctaaattgtgtattgtctctctgcttcttcatcagtaatgggaggttgaaagccagggagattgggtttttggtgaggctttttgttttccttttaagagaggctctgacttctggtactgatgaagtgactagatgtgggtaattctcctgaagtacccctgatactcattagagtagatattcatgacccttacattctatccattttcttccctgtctcttcatcatttctatctgtttgggatgtttgtttggttttaggtttatatattttgcatgtgtgagttttgcctgtgtgtacacatccacactggtgtccacagtgacagaacagaggcttggattgcttggaactagagttatagacagttgggagggggtgccagaaaccaaattcaggctcagcaagtactcttatctgctgagctgttttaaggaaacagttacctacatatctcacagaatttagcacatacggcatagaagatagaaattgccaatggatctcccatagtattatagattatattgtccacatgatagtgcatgatcttaggacatcctcct

SEQ ID NO: 18283 - DNA, 1168 bp, Mus musculus
tggttcttggtaactttagaatcttaacttttctcctttaggtcagccttacaatcagttggctatcttagcttcttccaaaggagaccacctgaccacaattttctactactgcagaagcattgctgtgaaattccctttcccagctgcctccactaatctacaaaaagcactttctaaagcactggaaaggtaggactgacttttccaagagaatttgtgtaacgtggagtcttaatcgctcaaattttgttgtttaggaaattgtagcaatgatctctagtcatctttaggtctaaaactacagagaacataattattttgtgcacagtcacgtaattttacccagtatgtggtttcttgtagctgagtgctgactcatctgagttgtagctgtgaagctagacctggacagaaagaacccttttcttgtctattggatgatgaagtaacttgcaagctaaacccagtttaagggttttgcaaattttgctgattaagattgattcaagtttttctttcatttcagccgggatgagttgaaaaccaagtggggtgtttctgacttcatcaaggcctttattaaattccacggtcatgtatacctgagtaagagtttggaaaagctgagccctcttcgagagaagttggaagaacagtttaaggtttgagttaaaaaccaaaaatgttggtcatctcttaagtggggaagcttaaaatttggagaacattaacttattattttgtggtgttaggggatggaacccaggaccttgcacaagctagacaattcccccacttagctatgcccagagggccagacttctgtctagtccctatgttgctatttaattatgaattcatagcaatagttaaatctgaaatatatgaagtccttgcatctagctttcctcttgctatctgaactatatggtatctagtcattgttgaaacagccttctcattgaccccctgccagttggcaaaacggattgaagtataaatatattaagaagcaagacatgccgggcggtgatggcgcccgcctttaatcccagcacttgggaggcagaggcaggtggatttctgagttcggggccagtctggtctacaaagtgagttccaggacagccaggactacacagagaaaccctgtcttggggggcaa

SEQ ID NO: 18284 - DNA, 3308 bp, Mus musculus
ctgggaagagtagggtttctcagaatttgagtccctggtttcagatgatcgtggtcttgatgctgtgtgtctgaccagtagcattgagtgggttctctgccaaccaggcatttgcagagagcaaaaaccctcggaggtcatgctaaggcatgttcctgttggtgagaggaaccacacaaggcaagactaagtcctgataatctattcttttttttttttttttgaaaacatgctaagaacccacttgactgaaaagatgctttgctaattggcattatttattgcccatttggctcggagctataagtccaggatgatctgggagaatgcagtttgttaccctgagaattcatgatccccacacactccacctgagcttgccaggctgtgcccaaagccctttccttcttgcaaagcaatcagccttgtttctgagctggccctacctgtctcctgcagagcccagcagtcaatgccctgggaggtctccctgacacacaagagcagtctctcctgtttctccccatttctcctcgatgtcctccccttctctctacctctgaagacagttcaagactggacaagatactcgtgtcctgcctggagagctcgtggggaatgatttttgtgttttgtgtttgcctttcagcctctggctcttgggtttctggttgttcatggggaacagctcctgagtgtcaggctacattttaatttctaacatcaacatggcccaggtgggactggatcaggggcgatgctttttgccttggctttccctcccaccttctccgctgacttcaggaggaagaagctgggtcaacagaagcgcataggccatctccagagctgtggcttttctttagactgtagaagtgacctccagagggaggagattatttctataatcgagaagtccagtgtttgactaaaagtcatggaaaaatagagaaaacttgcatgacccatctgctcccgggttcttatttgaaaacaagggagcagagacccagggagtcagtgtcttgtccaggatcactcagtgcatcctgggaagtatgatgagaagatgctgcttccctagacaaaagaaaaccaggagcctgcggggagacatgggtgacatgggcgacatggggttttgaaggctctagagctgacatggctccacaagagcagaccccagcaaggctacttccattttgttcctttggttcactgtgtttctgttctgaactcttgttgagcttcattcagtccatagcctgggataaggaaccaggttagcccagcagcctcagggggcaacaggcagctcagaacagggaaggaaggagaggtgagctaagaaaagaatcacacagaagaagtgcatttctgggaagcaggtgggcagattgtatcttgttaaggcgtgttaaaaatggtttccccttaacagaggtgagtccccatccgggtgggattgtccattcacttctctgtctctttctcccgttgttggatcaagggtaggggacccccccccgtaccccccaaccctgcccctaaggggagcacaatgtgactgtgacctgccgtggccaacaccaaaaagacagtttataagtggtgcctcaggtgtcatcagggtgacttgggtctgtctttggggacccattgtgagagctagcctattactggcatggcacagagatggtaataaagacacaaactgcagtgatcccatcatttactgctgcctgccatttttaatgtccccgccattttttttaaagcagctgatagaacagagaggacaaactttaataaccctctccttaaggaatgaggctgggcctccctggattaattgtctgagccacacactccccatcccaggtagcctctgggcccctggctttcactttccttgaatgtacattggaccagcaagggaagtctcttactgaagtgcctgaattcacagctgaagtcttagagacactggccttcctgttttggcttggctacaagttctagtctccagtttcaggatctctaaaaggattcatgaacactctattcaaataagtgggaagtaaaacttgataatcaaactgtatcaaaagccagaggattttagggagcccccaccctcaccctcatccctacccccgatgttctcatacatgcttgtaggggactgagagaagcatgtccatgtatttgtgttcctatttttaaaagtaacgcaacaccaggtgtggtggcacatacctgtgatcccagcactgagaggtggaggcaggaggaccaggggttcaagcccagcctctgggcacagaagaccttgtctcaaaacaaaagcagcaatgtaaaaccaggatgggacagtctcaggacctctcctcgtgttacagcaggagggctacaaagagtggaggtgggaagactttatagcgcatgtaggtaggacaccttggagatatcctatggtaatgaggatgggtgtactctgccacgctgatccaacctgtactgtcctgtgagctgactggtgaattccactcttgatgtggtttctgtgtagtgtgcatttggaagtgtcctagtagcctgttctagttagttagactgcagccctttcccatcaccttcagtggagtcccagggcacacagctcatctcgatccttgtgggttggaatggggaggaggaagcttttttttttttaattttttaaaaaatcatatctgctaatttaagagtgagatttgctttatggaagtcaactcaataaaaactgcattcgagttgcaaataccatttcacagtgaaatatttttgagtagagttctgttgctaggatagtcgtgggcaagagttttatcagcaaaatgtttcaattatgttaataaatcagacaatgctactagagtcttgtgtctttgtccagaaacttccctgtgagtcactctgaaaagtaatcacttcttctgcctactgttatttggtgggagagaacagttgtaaaaccatgcccagagtaagtgatgtcctgcctagtccagctgatgccacatgtgacagaaaccagaggggtcagtgaggaaggacttgctgtcacccctgacaacatgagttcaatccctagaatcttcatgactgaaggagagaaccaatcccagtgagttgtacacacaccatacatacatacacacacacacacacacacacacacacacacacacacacacaccatgattgcaggaagaactgatcatgcatctctgatacttccttcccaagccaacctagatctgcct

SEQ ID NO: 18285 - DNA, 3121 bp, Mus musculus
acgaaatgaaggccagcgacctggacaggaaggtgtctgacctggagagcgaggctcggaagcaggaggcagccatcatggactataaccgggacatagcagagatcattaaggatattcacaacctggaggacatcaagaagaccctaccaaccggctgcttcaacaccccgtccatcgagaagccctagtggcgagagggctgtaaggcagtgtccctgacaggggaccctgtgaggcctcggtgccttgacacaaagattacacttttcagacccccacttctctgctgctctccatcactgtccttttgacccaagaaaagtcagagtttaaagagaagcaagttaaacatctttaaccaggaacaaagggttttgcctaataaagtctctcctccacttctgtcagcaccctaccggaactttcccttgtttgcctgaagtcacggcatcttccaggggcctacccacatcatgtgaaccttttaatgccagggcagacccagccccctcccctctctcaacaccagcaggacctatctcagtactcatgtttctatgaaggaaatctttggctcctcatcgtagcattgagatggccagtatgtccgctctgcatcttctgcctcctctttgaaaggaaataaacatcctgtgccaaaggtattggtcatttagaatggtgatggccatccatcagacatgctggctggctgagcataggacacagagccatcgtgggtgacagcgtagttacatgtgggtccccaggagaacatggctcaaagatgcttagggtttcctcctgttttcattgactaggaagatgaatgtttcccaaatcctcaggcagctgataaaaagtctggatgggcagctcgcacgcaccactacgtgaggtagcttttgatatttttataagcaggacttaatgcagaagaaacagatgtgataacccactcaagtttttttccccaagtagtactaattcttgaagctttgttagtgttagtcttggaactgttggtaagatatctgtcaaaacagttgtcctctaaggtcttgaccaatgaaagaagagcaaatctccttttccccatattttctgggaagtggctgtaattgggatgtaaccgctctcattaggattccatgagtgcatttctttttctctttttcttggagagagatgtgacatttggcccttagctccattctcttctgatgtttccgttctttctagaactcttcagagcacatcgttgtttgccaggtcctggtggcaaacacccgctctcagtgtttctcaaggctgccaaccccatctagttcctgcactttgtggctctgcccactccaagcctttcctctgtgtggagagggaagatccatgcgtggcatttcctagtgggcttctcaacctctgatcctcagctcggtggtctccttaagaccacactgtgacagttccctgccacacatccccttcctcctacctacctgcctctgagattcatatttagcctttaacactatgcaattttgtactttgcgtagcgggggaaagaaactattatctgacacactggtgctattaattatttgaaatttatattttttgtgtgaatggattttgtttatcatgattatagagtaaggaatttatgtaaatatccccggtcctcctagaacggcactgtctgctcacgtctctgctcagttgtccctctcactggcacaggaacctgtaccatgcctggtcacgtcgtgcctagtccccagtgttttgctccacctctgccttgtgtttgcagcaccttcactgtctgacgggaagcctgctcacctccacaacctgaccgaagagggccctcttccccgtggctctgaccatctgagctgcagctcctcaaggttctcatgcctgccccggagcagtagccaagctgacagggtaaagggattaggaacgtttgtttgtggaaccttcccacacgggtcagttttctaagggagcatgtgatgactgaacacttgagggcatcagcaccgtgctactgatgacagaggggaggctctgttcagcctgtctccatctcggagattgccacaaaatctcagcttggcatcctccgaggccttttgtgccacggcagaggcgtggcctcaccaagttcagtgctgattggctagttcctctattccgagctcaccaccttaacattttggtcacagttgcaagaaaatggctgaaacagaccaccaccagcattctttgggtcaactccactccagcaggcccgaggcgctggtgggtggggtgttttggtttgttttctccagcttttgtggtatatttttaaacagaattttattttttaaaatgaaagttatttacaagatgataccttattacactccttcgacacagccattgctttattgtatagttccaataacctgtattttatgtaatgaaatggacagaatggctgctgtagaatgcggggtgccgcacagaacagattgttttatccctcccccgcccccgcccatggaattttcctttgattccaactgtggcccttttcaatgtgccttcactttagctgtttgccttaatctctacagccttcccccctcagggagggcaataaagcgcaacacttggcatttttttatgtttaaaaagaaaacagtattttatttataataaaatctgaatatttgtaaccctttatatcttgtgtggcctaaatgcggtgctagaacatgaaatgtttaaaaggtttaatgaatggatgtctacgtatagtgcctcggactggcttgagaaccactcagtgctatttgttatttgtactggggcttgaatttaggtccttcagcatgctaggtagatactctaccaactgagctacatccctggctctttattatcattattattattatcattatcatcatcgtcgtcgtcatcatcattatcatttgttgttttaccttcttcaaattgtggtcttcattgtcatccagaagttagcaaacttctctttacagaactagattgtgagtattaactccgctcttagcacaaaagtggctcaggagcaaagaga

SEQ ID NO: 18286 - DNA, 1190 bp, Mus musculus
atacttaattctttgttttaaagaaacatgcccagtccactgaggggctgattcgtgtgtgataaaaagaatcacaggcaatataaacaaggagggttggcaggcacactagctgggcgtgggagctttggtgtcagctggcctgtttacatccctgctccacgagttagcctcttcatttgtaagaagagtgtcatgctgcctgacacacagttgacactaaggcactggctacagtgtaacatgctgggactctgcttggagtggcttctcaaataggaccctctcagaaacagatgtgcattcctatgacttgagacctggaaaacctgcacggggctgtctgttttcttccttttctgagatttcacccccgttgttattttaaaaacaaaaccaagaaagacactgatttttatctattattaaacaaaatccaattgctgttttgtggaaggtttttcttctctgccgtttagttcaaatctgtctcttgcactccttttagattttgatagacgcgtgaacgataacaagacagccgcggaagaagctctaaggagaattcccgccatcaaccggaccatagctgaagccaatgagaagacaagggaggcccagctagcgctgggcaatgctgccgctgacgccacggaggccaagaacaaggcccatgaggcagagaggattgccagcgccgtgcagaaggtgagcacttccatcttctccagctcctgcttgcacatcgcacacagaactctctggaaccatccctgtctgtttcttttcttttcaatgctaatgagaataagtacaatgaccgaagaaagagaaccaggaagaggactttctactgtctgggtgttggattgagttgtgaagggggtggtttttacatcatagtccccgcccaccaaggttcctgctctctccctgcataaacgttctctagaccctccatagagctgctgtggccagcactacagaggctgtcttcactcacgctaaagaggcatttcttcaccgggtgtggtggcgcacgcctttgatcccagcacttgggaggcagaggtagcctggtctacaaagtgagttctaggacagccagagctataaaagaggcatttcttcaggccggcttttttatgttaccgaaagattagagcttgttttaaaattaagtgttttga

SEQ ID NO: 18287 - DNA, 1171 bp, Mus musculus
cagggagggggggttggggaaggtaggggacccagggagccagcttctcatggatagagcattctgcatcttgactagggtctgggctgcctaaagctgtgtagtcatcaaagtacagaaaacactggaaaatcactaacatatacctggttaaaaattgtttttttctttccacagatttttgccccctgtctttcactgtcacattttcatttaaatgtaatgaccttccatgcttgttacagaatgaagcaaataaaatcaagaaagaagctgcagacctggaccgtctgattgaccagaagctaaaggattacgaggacctcagggaagacatgagaggaaaggaacatgaagtgaagaaccttctagagaaggggaaagctgaacagcaggtcagtttgacttgccgctggctgcatttcttgaggcgacaatttaaactgctcaggtgggagcctagcgtgtctagcgcgtggcctctccgtacgcttcagtctctgggctgtgactgtgagggggcttgtctgttagtggcaaagtctgaccccggaaggtttgtcctctgacctgccttgcatttgcagaccgccgaccaactcctagctcgagccgatgctgccaaggcccttgctgaagaagctgctaagaagggacgcagtaccttacaagaagccaatgacattctcaacaacctgaaaggtacgggtccagtgacagcagcatcttctgcatgccctccaagaggcagtcactcttttgcttttccgttttgttttgagcaccattctctcagaacgaaagagtatggtaattcccatagactatttagatgcagtggttaaccatgctcttttaccgtctttacttcatcctctacactctgtgtgtgtgtttgcatgtatgcatatgtatgtatggttgtatgtgtggatatgtgcacatgtgtgtgcagacctgaaatcagacttcaggtattttctttgcaggctctccacttttatttattgaggcaggatctctcaacaaacctgaagctgaagtatttgaaagaaaaatcagggtgcctctgtcttctcattcctttgctcttcactgaagaccaaaagccacatgtgggagagtggcctccgattagatgaaaatgtcaccatagtctgcctgcttagct

SEQ ID NO: 18288 - DNA, 1159 bp, Mus musculus
ggcccaaggtttatgttgctgactacacacatggttttgtaaattacttgtgttccaaagttagttgcctgcttccttctatcccctccctgtgctctgagatatctttacttcctacctcatctggcctggaactccaatcctcctgcctcggtgctagggttatgggcagaagctaccacagcacacccaatcaaaaatcagtttttctaagaaaatacacatttgtccctgtagagttttgtgccactgattttcttagaaaatactcttttctcagttacagatgctttttgtaaatggagctgcccaaaatgattgtgaagctccaaatgggactttgcagtgttcctagatctctgtccatattaggatgtgtaaatataacaaagtgttacctaaacgttgcttctttccctactgaacagtctgtttcatgtctattgtttatctttcctcctacatgtacagtcataaacaggaagccgatgacattgtacgagtggcaaagacagccaacgagacttcagctgaggcatataatctgcttttgaggaccctggcaggagaaaatcaaactgcgctggagattgaagaacttaaccggaagtgagtgtaattggaaagtggctcgcggtcctgttctgcgaagaatcaagtgctgtggatttgggggatatcctcttgcatatgaggtttctcagcgctgtggatttggggttacgctcatgtgcatgaggtccatcgtgctttcagagtggtagtgtgattggggaggggatgtccagccacaccaagctccgtagctgctcaggatggtaaccagcctagccatgcacttaagagtcttcatttatggaaactggagagaggaaattccagtgcagtggagaaagtgtgctgagctgccaacctttacctgggcctaaagggagaatgtgcagactgaataaccctatctagaagcttagggaccagaagtgtttgggacttgagagacatagtttttgaacatttgaatacataatgagattatggattagatccagtctcaacacaaagttcacgtgtgttccctaacacatagcctaaaatgtagcatcgtatttgtagtgcatctgcagtttgatagcggccgtcaaatgggagcaggtgtgaa

SEQ ID NO: 18289 - DNA, 1219 bp, Mus musculus
gaggcaggtagatccctggagctcactggccagcagctcgggttgagatgcaagtctcaaaatataagggagatctaggcacagtggcacacacctttaatgctgacacagcagctctttagagacctggacctaattccaggtaaaggtaggcagagctcttgtgagtttgaagccatcccggtctccatagtgagttccaggccaaccagggctgcataatgagactctgtctcaaaaatacacacacacaaaaataaacaacagaaattaggtaaacggtggtagagatgaacagatacccagtgttgacctctgacctttgtaagcatatacatgcacatgtatgcacacatgccacatgctgcccatattacttcacaacctagttttccttttaaaatgtctatcttgcctgctacatggacttagctatttaaaagtctcataagtgaatttttcataagtacacatgatgatggtacagtcagtccgagttaaaatgggaattgtctcctcattccttagcttgtgactgtcaccatgaaggatccctttcactccagtgtaaagaggacggccgttgtgaatgcagggaaggctttgtgggcaatcgctgtgaccagtgtgaagagaactatttctacaatcggtcctggcctggctgccaggagtgtccggcttgttaccgactggtgaaggataaggtaagctgtcagtagggcattcactcattcattcattcatttgttcgttcattcactcattccttcagcagacatgaagtagaaactcaagtctactctaagctccagagaagaaatggtagacaccttgaacttgctctctcttctcagaggtgtatgttctagtgaggggggagtggccagaaccgcatacataggagaactactgagaaaagtgcctgaagggaaggaataggtactaacaaaccatgggaaactgcagagcctctgtaaggaaactctcgtgattcgagatccgaaggataaagaggcgggagccgtgtgagggggagtgaggcaggcaagcgcctggaacctggaagctgcccagaccctgccctgggaggaactttgtctgtggcaggtcatataggactatgttgactttaagtggggagtttcggggactatttccaaattcagtagagatgtacagaagtcctttacgaggagtgttgtgactgctgtgtgaa

SEQ ID NO: 18290 - DNA, 1340 bp, Mus musculus
gcatgacttgtggcttaatggctttgggcgggctgcacactcgtcagagctatacaatcctctttgtgtgtttgtgtgtgtgtgtgtgtgtgtgtgtgtgtgtttgcgcgtgtgccatacttcaactccatgagtatcctgtaccacatggttgtcttggatgtctttttctggttgccattcccatgaataacctaagctgatagttttgcctgcactcttggggctggcttctcacgagctacccagtggtgatgagcctctggaagctgggaggcccctcagtggctctcttttccacaccacaaacaggcgctgggtacttggatgatgtcaccttgcaaagtgctcgccctgggcccggagtccctgcaacgtgggtggagtcctgcacctgtccagtgggatacgggggacagttctgtgagacgtgcctcccagggtacagaagagaaactccaagccttggaccttatagcccgtgtgtgctctgtacctgtaatgggcacagtgagacctgtgacccggagacaggtaagaaggcctgtggccagtgctggacctgccagtccttttgccattagcagtggcatccattgtcttcttgttactgtactgatagtgtatctccactctcgcaataggtgtctgtgactgcagagacaatacagccggcccccactgtgagaaatgtagcgatgggtactatggggactcaaccctgggcacctcctctgactgccagccttgtccctgccccggtggctcaagttgtgccattgtcccaaagacaaaggaagtggtgtgcacgcactgtccgactggcactgccggtgagtctgccttgctcctcatccctcagagttctctatggttgtgagcattgacacagcctttttccctcgggtgacctcacaaccccaagatggaactgcggctgttgttttgctgtgactaagagagcagaaactgagtgctctgttcaaggctgtgtggcaaggcacaggtgagctgggactgcaacacagctttgtgattccagatagaactgtcaccacatataatgtaatttctcataaagtaagaacccaaactgggctttctgctggcttgtctggaattgctcatgtgaaatggcaatcttaaaattctgtctctgaatcacccttccagcatctcagagtcagtcactttacattgggaacatctatctatctatctatctatctatctatctatctatctatctatctatctatctatttttaaagattttgtttatttattttatatatatgacaagtatactgtagttatctttagacataccagaagagggc

SEQ ID NO: 18291 - DNA, 1196 bp, Mus musculus
ctggctcccgcccctcccatctcgcttctctggcccaccgccctccaggccgcccccgccgccgccgggagtcgctggggaggacgcgtagggcggggagcagctcctggcccgcgtgagctgccgaggaggccggccttgggttttctccaccgccagatcccaccccgccgggcagaccccacccccttctccttcctcctggggcgcgctctcgagtgcgcgctcggaagtcgggggtcggcgcacagtgcaggctgcgcaccgggaggtagcggaggcagcgcgatcttggctcggacgcccacccatcggctctgcgtccggctctcggcctccagcccggtccacagcccggcctcggcccgcagcggaggatcggcctcgggatacgccgctaggcgagtgcagcgcggcaccccagcctttgccgagggcccgcgcgcagcgggatgacgggcggcgggcgggccgcgctggccctgcagccccgggggcggctgtggccgctgttggctgtgctggcggctgtggcgggctgtgtccgggcggccatggacgagtgcgcggatgagggcgggcggccgcagcgctgcatgccggagtttgttaatgccgccttcaatgtgaccgtggtggctaccaacacgtgtgggactccgcccgaggagtactgcgtgcagactggggtgaccggagtcactaagtcctgtcacctgtgcgacgccggccagcagcacctgcaacacggggcagccttcctgaccgactacaacaaccaggccgacaccacctggtggcaaagccagactatgctggccggggtgcagtaccccaactccatcaacctcacgctgcacctgggtaagcgatgacagccccgtccccactactcgctcacggtccagctccggggccgcatccatggagccgctggtccggcctgaggggcctgtccagccgcgtgctgacggtctgttctccagcgtgggccacacacagaaattcctttctccaacttctaaaattcatctcgctttgaacatccggtgagggccaccatgtcccacgctagcatctctctctttttttcttactctttctagtccaaccggattctcgttccgttgattcttttctatttcagcagttaggattttggaccaacacccccccacccccttttgcaccctgag

SEQ ID NO: 18292 - DNA, 1201 bp, Mus musculus
catttttctggcaattgagtgtactacgttatcaaagatgtattccttccaactcatccatttcaccctctgcttgttggcttccaccccctttcactccttagcaatgtgcagctgagtccttttcctcagggaagaaaattctaggttttgcctatgctggtaacaaaaatgttggaaagctgtggcaaagccattggcattggcatttttcacatgggcaacgtgtgaccaccagttcttcccaagccagtacctctggtcacacataggttactagctccaaaacttattaaatcaattatcttgtaagctggaccagatggttgttcttcagtgacagatcttgagagaggggaccagaggatcagaaggtaaggagacagataagtttgggacctggaggtcttgcacaaactatgccttattccaagtaagcttattaaaaagaaaacatctaccagaagctatatttgtggggaaggttttattaaattaccttaaccaatgcaggctatttggtagaatgagtaagaccacactctgcagtgggatataccacttagtatggttcattactatattgtggcctacattggggaaaaaaaaaaagagtatagcatcttatatactctttccaaggtagaaatggggcaaagtcaacagaaactgtcacaataggataaagtcagaaggaggttaatcaagcaatgtcacacaaaggaaacacaggggcctcaggagctttgtggactgagcacagaggccttgggactgacactcccatctcctcaggaggaagagcaggaaccttggttcctttgaggccccagccccagccccagccccaactggtcttgctcagtctcatcctttgtcctttcttcagatccctgcaggcctctgagaaatccttgggtcagtctggctctcaacaaccttgccagtctgcagataaatgagtggtggtattgaccacgataagcagtcagggagagatgctgtatgttctgtggggcctcagatgagggcttccttttttatactttgaacaacttggaagtggccttctcgggtacaaaactgtgcacagtaaagtgacctgtggtgtcatgtgtagacatttctccagtcttgtcaatgctgatgaattgtgatcacccaccagggttagcacattcgtgttgtgactttgtgcatg

SEQ ID NO: 18293 - DNA, 1167 bp, Mus musculus
tagtaaatattagttttgttattaatttttttccaattttttattagatactttcttcatttacatttcaaatgctatctgaaagtcccctgctcccttccccacccactcccacttcttggccccggcgttcctccctactgaggcatatacagtttgcaataccaaggggcctctcttcccaatgatggcggactggaccatcttctgctacatatgcagctagagacacgagctctgggggtactggttagttcatattgttgttccacctatagggttgcagacccctgcagctccttgggtactttatctagctcctccattgggggccctaatattagtttttattttggagttctttgatgagttcagggatagaggcagtatcctagccaacagaagattcagtccacatttgaaggtcttctagcaagaagacttaaactgttatactactcttgtttcagtgtgggagatgctgtctgtaccatctctgctgctacctgcttcccagaaccctttatcagcgaaggaaaacgcctgggatacatacaccggaattttgctggaaacagattttctgatcacgtggctcttttatcagtattccaagcctgggatgatgctaggtaggagtttataggcaactctgtaagctatttgagtatgtaattcagcttgctgagcctttgagagtgaatgctttttctcttttgtttaggatgagtggagaagaagcagaaatacgtttttgtgagcagaagagactcaatatggctacactgagaatgacttgggaggccaaagtacagcttaaagagattctgattaactctggatttcccgaaggtatttataaactggtcattgtgtctcatgttggtaactctagatctagggggctaaaagcagaataaaatcagtgataattcaaagatagtctgaattagttgtaatacccattctcaattatatagaaagaaactcccctaaaaagataatttgtgagtcatggcaataaactacaggtacaggagaatatttatgattctcacctatttgaacatacatatttttatatgatggatgagacacttattcaactttgtttatagcaagttgagttccaactggattaaactttgtgaactggagtgggcttaa

SEQ ID NO: 18294 - DNA, 1124 bp, Mus musculus
agttaccatcaaatgctcataaccgtggttgttcataataacttcccagtaaatagtattaataacttgtacgattttttttggttgtttccaaaatggttggcactgggacctgttggaaatgatggcttcgttttattatatttatgtcttgccttttgctgagtttggggccgttttgttgttgtccgtgcttgttaataggtaggatcggtaggtagtagccatagttagaagtgttagcattaacttttttccttactcctctacttatcagttaaaagataccctggctgtgaaagtaaagtcaggagccagttttcagtcaactagtctagttttgtagtcaataggaaaagttgtgtggtatagactaggaaagggccactataatacccagtttttttatgcaaagatttttgttatgttgtcatgtttgacttttctacttctaaattttagactagagacccacatgacaccagagatgtttagaacaccattgcatgaaattgctctgagcataaaacttctgcgtctaggaggaattggccaattccttgcaaaggcaatcgaacctccacctttggatgctgtaattgaagcagagcatactctaagaggtaagtgctactttcttggtctgtctttacctgacaaatcctatttaatgagtgagtcagatacagactgggtggggagaactttgttaagcattatgcagctatgcatcataatttccatgaggaacttgatggctgaaggggtgtaaataagtctcattcagtaaacatttaatgaactagagaacactaaccagaacatggattactcctcacctgtagttaatattttaagtgtgtgtgtcttagaggttgggctttttggtttttgtttttatctcaaatttgttataaaagtggtgtgtaaaaaataagggtattgagttcagatggctctgcatttaacttggaatcttgtactcaactacttataggatatgtgggtacttaattgctgatgctgctactgtatcaatggctatagtccagtttgcatagaacatacttttatagcatcttttgtgttaggtaatccagggtttgtttttgttttttgacttg

SEQ ID NO: 18295 - DNA, 1273 bp, Mus musculus
ctaaagaattttaattatgagaatatctgatggagaacagttgtttaagttgaagcacagcatgaataattgacattgcagggttgtttaattatttgtgatatcttagtgactattcaaataattccataatcaatgatggaactgttgaggttatatactccagtatatgaagtctttgtgttgtgttgctgtatgtcagagtacctggaaaattattagtctaaatggaatattctccatcacatttacatgagatcctttaattcagttcaggaccgttaatgttgggtattttatttgaacccagactttgcaaacacattactaacttttaaaacttttaacttaaaatttgttcatttaaaggaaagtttcatatttatttgggatatttactgggggagacataagacagttatgagctgcctgacatagatggaagtaactgatgtcaatctctgacagcatatgactgtcacttgtgtagaaaaagacatttagatgtcacttgtgtagaaaaagacatttaagagccgtaataaatgaccaaaaaatcatgttcatttttcttctaggcaaattgcaacctaatatgtggtgacgaatatgggccagaaacaaagttgagcatgtctcagttgaatgaaaaggaaactccttttgaacttattgaggcgcttcttaaatacattgaaacccttaatgttcctggagctgtgttggtatttttacctggctggaacttgatttatactatgcaaaagcatttagaaaataattcgcatttcggtatgagtattttttttttagattgcctttgagtattttttgcttttgtcctggatgataatgtctgttgattaaaaccatttgtaaagaacatttgttttaaacttgcttaggttttgtccttaacctttgtgtttcataggaagtcaccggtatcagattctacctctccattctcagattcctcgtgaggaacagcgcaaagtgtttgatccagtaccagatggagtaaccaaggtaaatatggcatcacaaggagatcagatgtgatatagatgttaactattaataaatgttccaagagctactagggaaatgctaaagtatcaaaaattatagaaaagtctttccatatttgatcatttttttctttttaatcctgttgctgtattgttataagcagaaagtttttagtgtaaatttataccatttttttttcaggttattttgtccacaaacattgctgaaacaagcattacca

SEQ ID NO: 18296 - DNA, 1124 bp, Mus musculus
ccttattttgtgtgcatttacaaagggtatttctgcattggtagtatatatcatgcacttagttgctttatttgtaagtgcacacaaatttggatttagcaggaaacttgtagggcagtgttactctgcatttaactatgaatgcacattttatttaaagtatattaacagcttaaagtgtaaataaagcagtcttcattcagccatcaaaatggtatgtgggaattgtttagcaacacttgagttcatcttaggcttagactatgaagtataaatgtgggcttgcagaaagaacattagatagccagacatgttttgcctgtgaaagagaagacattaaatccaagaatgtaaaagagaacaacttctttacagtaagataaatgaatattacgcctacatttctgcataaacacctgtatgtgtgtgcaaggttgacattcttgagcatgctcacttagagatttattttaaaacattcaaaaatgttgggctggaacatcttaggggaagaaattgactgttagaatggtcagaattttaagtagattattagaggggctgataaatcttaactatagttagttgctgtagggaagttttatgaaacggatttttagtagcataatttaaagtttcttaatattctcaagatatatgtggtttaacctatctgttgacagctaacctttttttttttgtatatttgagacaaggtttctctgtgtagccctggctgtccttgaactcactctgtaaacaccaggcttgcctcaaactgggaaatcctgcctctgcctcccaagtgctgggattaaaggcatgcaccaccatggccccacgaggcagctactcttaactaaaaataaattgcctatgtatataatggaaatagttatatattcttcctttattaaaatttcaaacttgataaaggtcatttctatcattttactattaactgagttaattgagacttgaatatataaacagaccctttaaaaaaactgctgtggctgggtggtggtggtggtgcatgcctttaatccaagcatgtgggaggcagaggcaggcggatttctgaatttgaggccagcctggtctacaaagtgagtttccagtac

SEQ ID NO: 18297 - DNA, 1184 bp, Mus musculus
ctcagaaatctgcctgcctctgcctcccaagtgctgggattaaaggcatgcgccactactgcccggctgcctgcagcattttgatgaagcagaaatacttcagtccttgtattttaacatacagcacccataaatacattgctttggcatattttaaagtggctattctgataaactctgaaaggattaatcctgtaacactgcccttacgtaagataaactatcaaaaaggagatccatggtggcatgtctctaaattttgccttcagaggtggaggcaagtggactgcgttaagtggtgggctagcttgctctacaaagacaaaggcaaggagacataacttccagaaaccaagctggttagcgactgacaggaaattatgggcctaggccagcagatctcgcgcgacctcaggtttggcgcccggaagtggttcaagccccgccccctcggggcgtgctggctccggagttggcctaccgcgcaggcgcgagtcgccgactccgccccctgggtcctgcagtcggagccatttcgccgctgcttccatgcgggtgaggtgtgttctttcgccgttctcgtggaaggttggcgctgcgaactcgcctaagaaggctgtgctctcgggcacggaaaagcggaggagggtaagaaagggggcgttgcggccccggacgcgggctcattgctgcgggccgacgccggcctccgcggctcagccgtggctttgttgtgaggcgcgggcgggcgagcgtgtgggggaggggcagcgcggcgggtacccggatttacgggccgtgggcgcctcgcgcagcggagctcccgtggccctaggccctggggttccttgcacagactggccgctctcggaggcctcttcctcactcggcctgacgggcggcgggtgtctgtaatcagttgcgtgtaggggtagcggctcgacgccacccggcgcgtggtggtggggggtcgtccgcggttctaatccgggacacccgggccccgtgggggtgcccgctttggggtccggggcttcgctgcaggtcctcccgctccgcactggtgacggggcatggctgggtggggcgggatgaggagcaggtggtaggaaaatgaatgcatgatttagtaagtgatggcggaattacaccgcgcaacgggatagccccgctgtagataacgg

SEQ ID NO: 18298 - DNA, 1207 bp, Mus musculus
tgtgaacagggctaactgagaagtcttactgggccctgcgctccttggaagatggggtctaaggagggaggtgggaggaaggagacttccggcacaggggccagcactcatgtccagcaggtgagctaagggagagaagtcattgaaaaatccatctaggagcccaaaagactagctgaagtcaaaccagttctctttgtgggtatgaaaatggggaaaagtgtctcctacccctcaccctggtggaaggggagccttgtgcttctttcctgttgacatgagatgcccactgtagttaggggagaagcccgtcaaggaccaagaaagctctggaacagaagttagctcagccaagggagtattgcagatgtgcggggagggctgcctggaaggatggggccgggggaaaccaacttgcctgcctatcacttctgagtcttaccgaacaaactttccaagttgggacttccagcaccagccaccgagacggagacctaggttgtttccctctgcacttgaggtttctccgggagagaactcttttaagtataatattgtgttctgttgtgttgtgccgattgtctcgctgctattgttatttattgtggtttgtttgcctgtactgaagagcctcagctggagctgctgcctgatcacgcctcctccctaccagactctacctctgcaagccttgggaatcactgagggctgggggggggggggaacgggacacgggactccccactgtgttaatatttatttattgttaacaaagggagctgggttcctttatcagcagtgtatgtgatcactgtttttctgtttgagcatgttatattcttgtaaaaaaacctgaaaataaaactcaaaaataatatcccaatatttcccaggacagtatggatgatatgagggtccaggggagtatggagggcctgtggtatcacagctctggtgattctgtgggatggggatacaggacggggtgggtggctgaaggcacgaaagggttgagctgggtttgaaaggcttttgcagggtagtccacaaggagccgggcttctcctctgcctggtgccttctgggtcacatcagtcctgaaatcctgctctttgagatttcactgcctgaaaagagcctggcccaggcacatagtagtgaatgcctgcaagccctagcttttaggagtttgagaatggccttagat

SEQ ID NO: 18299 - DNA, 1987 bp, Mus musculus
ttccctttcccagttgtccccactgtaactcaaaaggatggaataccaaggtctttttattcctcgtgcccagttaatcttgcttttgttggtcagaatagaggggtcaggttcttaatctctacacaccaaccctttctttcctatctagctttctagtagggagcgggaggggggaggggaagggtaacccactgcttcatctcatcgggtatgcatgtccggtaggcatagctgtcacaaagcgggtgtacttatggtgaaagaggacattttttttttcttcaggatagttgaaagggcaggcccaacggctgagattgacatttccactgttggtagagagctgttatttctaaaggggaaaccagctttctgttccaaatggaagttaggtgaggagttgaaggttggtttcttgcgctgtgcttccttggcttgggggagggggcatccgtccccctctgtgtgaacacagctcaccgcgtcacctgatggatggccctactgtgaaggaagaaaaaagttggcatttcttggtcctccgttcataacacaaagcagagtagtatttttatatttaaatgttaaaaacaaaaaagttatatatatatggatgtgtggatgtatgtctttctaattgagagaaccatcctattcactgggtgccaagtttgagtgatgaggggcttggcttagaagtgaggctcccttgaggtaggggtgaggatgcagtaccgggaaagttggttatcttggggtctcagcttcattactgcttagggtttccctgcccactctgcaggagcagatgttggacaggtagccagtgggatgccactgcttgccaccacctgtccccaggcttaggtttaggggatgcgtatacttactccacacacgagttagaagtatgagttggctggtcaacttgaacactgttactgatgggtgggtgggtgggggtttactggggttatttttttggtgggattagcatgtcactaaagcgggccttttgatatattaagttttttaaaagcaaaacaagtttagattttaatcagatttgtagggtttctaactttacagaattgcctgtttgtttcaatgtctccctccacttggctcttaggggaattaaggacaggcctagagttaaaacacttgtctcctagtgtcacctctgccagcagactgttactttccttctgaaaaagccaatagtctttttttttttcttttatagtaaacacacccccacctccatcccagcctgttgcccttcagttttctggttgtttgtgtcggcagcgggccaactgtggtttctctcttgccatgatgacttctaattgccatgtatagtatgttcggttagataactcactgtaaacagactgtaactgccaggcagcgcttataaatcaacctaacatttataagatttcctctgacttgtttctttgtggttcccaaaaaaaaaaaaaaaacctcaaaaattaagtgctatttcattccttctttctctatcaaaagaaagggaaggggggtggttcttgtttacggacaaaatgtgcttatctgtacttatgcttttaagatgaagtcacgttgacgagatattttgagacggggtcctagtgtccggcctttaacttgaaagttcttgctccagagtaggcaattcccagtttcatgttaggtcttacattttgaaagcagtgttgtctaacagttcagactcaaggatcatgctatcaagtgacacaaaataagacacagatactttaaggtcttgcgttgggcctggccactttcacggctgccctcagctctgggtgactaggctgctagaatttcctggcaaatgggaacctctgtttcacttccggtgccagggcttggtttatcgaacactgacagtcctggcttatcaggatatttaatacagcgtggtacagtgtattagctgcccctgttcttg

SEQ ID NO: 18300 - DNA, 1232 bp, Mus musculus
aggatagtgtgtggtgatgctgtgaaaatagtgtgtggtgatgctgtgaaaatagtgtgtggtgatgctgtgaggatgcatgtggtggtgctgtgaggatgtgtgtggtggtgctgtgaggatgtgtgtggtgatgctgtgaggatgtgtagtgtggtgctgtgaggatgtgtgtggtgatgctgtgaggatgcatgtggtggtgctgtgaggatgtgtgtggtggtgctgtgaggatgtgtgtggtgatgctgtgaggatgtgtagtgtggtgctgtgagggtggcatgtggtgatgctgtgaggatagtgagtggtgatgctgtgaggatagtgtgtggtgatactgtgagaatagtatgtggtgatgctgtaaggatccatgtgaaggtgctgtgaggatggtgtgtgatgatgctgtgaggatgtgtgtggtgatgttgcctcgagtcctacttttattcatcaatgagtcatgtgtgacttctcctttccctttaccttgactacagagaggtacagaaagcagtcaacactgcccaaggattgtttcagagatggacagagctccttcagggcccctctgcagcaacaagggaagaaatcgactggaccaccaacgagctgaggaacaatctccgcagcatagagtgggatctggaggacctcgatgaaaccatcaatatccttctctgtcgtctgggggtctagggacttgggagcatgggcaagagacagacaaggttttatctagatgtcttgagccatagatgagagagaggctggtttttatagtgattgagctggcttttgttggtcactgccgggtgatctcagggaggctagccctattcttccgtctatagcaaaccctccagatctagactgtatagggcagtgatcatcactttggaccctggagtcagtctgctggtgtcccgtttctcattccaccattgtagaagtgaaagtaaacttttcctctcaaatagtaaaatagtaatacttctgatatctgtgggggatttttcttcacataccaaacggttctccagcagacaccaactgagtgtcctatggttttgagactatgtacctggagatagcatgggatcctgtagtgctcatagcccccccatatcagatgccaggtgcaaaccccagattctaacttgttagtcaaactcacttcctgtttgtttaatttttttcaagagcagcttgtagagttc

SEQ ID NO: 18301 - DNA, 1173 bp, Mus musculus
acttaaactttgaatttaagttctgatttgtgtgtttttcttgtttgcttgggtttgttttgttgttttcattgttcttacttatctcccccctctcattctttttttttttttttttttttgagctatagttgggaaaagctatcggccagcttatcccatctgccttgaacccttcaaagaagccagcaagtggctaaggtggcctttaccccaagggcctttggtacccacttaaacaaaccttagccagcccgccctaactctgctctccactgctccctctcatcttcccccagccattctccttaggagtagcatcgatctgtgagactcatcgggagatcttgaatataccttgctggtgttcctcaaaccatctaccaggcaccatcctgcatgcccatatcagagcctgatccaggttcgagggctgcttggcttggtcagtagtggctcctggtgttcctcctgattggttgtccctgctcacacaggcactcctaggagacagcagcagccagagctggaatgctggagtggcagatcgctatgggcgccttgaccgggagctgcagctagccaactcccacttcatcgaggagcagcaggcacagcagcaggtacctgagaacagctggtcaagcaaggaggtggcaggagggcgcctcccctgactctctgatagccacaagcttattacctaaagacaagcagcttagacccagctgccgtatgctgggttgtcaggtgtgtaatgattgtatacaccatttaaaatcttgaaagcatggtgtcccaaagaaccacttgatcagacttcaggaaaagcagagctgacatctaaaccaacaaggccaaggatttgtgcaggctttggttttgttgctgttgttctgagatgggttcttgagctgtgtagctgtggttggttggctgacctccaactcctggagattagcctgcttgtgccttctgcatgcagccgtgccccagctaaagccaaggatttttaaaaggaaaacattccttcttccccagtttcttatttgtacatttagccttttgtccattttaacaaagatactttcagaaacactcgagttcttgtttcatccattgaaagttgttaatttgctgagcgtggtggtgcacgcctttaatcccagcact

SEQ ID NO: 18302 - DNA, 1151 bp, Mus musculus
cagttgtctttgaggtaacttactgtcctggaagaagaaaaggactctatgcagtcctcccacatccagagatctgctaggctgtctttcactgacactgtgaccatctgttgtggacggagaccttgatcttggcggtgggcttcctcttcctaaccagcccctgatgtggtggtcatatgcttgtgtgcattggccgttttccgttccctcgttggacctcagccaagcagagtaaatctctcttggtggtttcaagccccgctgacggctcactgttggatcagcaggggatagcagtagcttgacagtccaggctttggagcagtgtgttctcagaggcagtggtctgctgctttgatttctgggctttgcttttgaatgtgaattgtcccaagctggcaaagaaactagcagctgctggagtgccgggcttggaaccaggtaagatggattttaattgcttatttccgttcctctggcaccagttgattgtggaacagcaggatgagcagttggagctggtctctggcagcatcggggtgctgaagaacatgtcgcagcgcatcggaggggagctggaggaacaggccgtgtgagtagtgagatgccctgagcagcagtgacgctgactgagaccctgaaagcctagcagtgaagtacgtggctgctaaagagagaagctgcataatgtgtggttgcagtttggactttgttgcacggagtagctcccccaaagaagcaaatcccagataaaattcacaactgtggtttaggcaaagctgttagttttaaaaccctttaaacgacacactaagttctctgagcagactcttgaggcatagttaggaatgggaagcagatagagccatgccctctggagacagtgccctgaagaggaggatgggcctgaaggtggtgttaggactcccagctgtcatccatcccagtacccactacattaacataagtcctgtcttacaaaagaacattcaaatttaattgtaattagcaaaaacaatcttccctctcaaaacaaaggaataaaaaaaagcaaaacatggactagagagatggctctgaggttaagatcactggctgctcttccagaggtcctgagttcaatgcccagcaaccacatggtggctcaa

SEQ ID NO: 18303 - DNA, 1553 bp, Mus musculus
ctctaccccgcctcctctgtgactccagctttgagacagccctctctcccagcgctcaaagggcaagcttcgaagagggaagaggtgaccatgtgcccggccggatagcagaagccccggctgcccactcttgctgaggacagcaagccactgctttgccttactggacctcgctccttgaggaaggaaggacagagtcctcagaagaactgacagccccacttactccgttgctcattctgctggtctctggcagcctttccttctactcagacccttttccctgcttagatgggttgccactctcccttcagaagaagcctggcaagaacgagggcatctggggatgtacgtttccattgctgttatgtttcttagcccctgagagcttgctgtttctgagaacagaaggctcagaaacacttcgtgacagaaatgcagtgtctcattttgctgggtaagagttgagattaaactgcttttccgggtgtttttgtggcagggataagcaacaggaagtagtgaaatcccttggggctgggggtgcagatgatgaaaggctttaataaactggggcagttgagaacagcagcacctgtgtcggtctagcctattgaaggactgatggtatctccctgggcctggccagagctgctgacctgctctgtcccagggctgtctcctcagaggtgcagcttgcagacgtagagccccgaacagcacagcaatgctcagccaggtgggacacaccttcttctctgatgcttttatgctgatggcactcagagatgaggtaggagggccagcacatctattacgcttatgcagaagctgtcctgacacagaaaggctgcttctgagccagaggccccttactctgtgagtaatagcatagatggggaagagaacttggtactctgctctctaagaacaacttgacttcatcatccatgggagttactgagggagtccaaattccctgacagatggtttattgggttgaagtggctgaaactgctgacactacgcttcaggcttcgggtgacggttcccatacctcagatgtgctcatgaatgtgggatttcttataatgtcccaaatgcatagcctggtattaacatagccgtcagggccagagccagccttccacgttggaggctgccgctcagttgtcctccgtgctggaagagcagcacctggacagcctgacctttgacctctcttgctctgcctctctgtgcattccttagcatgccaactttcaaaaaacaaatcctgggttattcatattccttgggattttgacttttgggtcccctttttgttttgttttattattcccaatgatgtgcttgcccagctaactttcaaattgcacttttaaataaatatttgtaacaatttttaaaagaagggtattttatcttgtttaggatcatgataggtaaggaaatctacctgttggtaaaagctaaaagattagtaagaccaaaagggggtcggcaccgtgtctgcgtgaagctctggtgttagatacagtgatgttagttct

SEQ ID NO: 18304 - DNA, 4632 bp, Mus musculus
ttcaggcccctcacactttattagacatttccccttctggtctcaccttcttcagccagaatttgatcaaattaaaagtcttttgtggggactgtatttctgagcatctagaacaaatcctttatattcatcgacacaaaagatcttggtggctatttttaaacccagctgtattaaaaggtgatgttgaattttacgacacccctaccatggcctgcttttaaattcggggcttctaaacctggttgtactttttaaattatatttcttagaaaattcaggatataaatacctactttattctctatctcaccccctttcttcataaattctctagagaagcctaaaaacatacagcgcttgactgtcttgaaaatggttggtttcatatctggtactcatcagcttgtcactgggaatctagatcgttggtagtagtgactgcccagcattcttgagacccttgattttctctccagcatgggtcagggtagagaaacagccattattcagtaaaattaatataaataccaggaaaaggtaaataaatggccccacccttcagatctagataaaagtcccacgtaggagggccatgaacgtgtgcccttgtcagatgaactttagactaagaaaccggtgactagggaaacagcagtaacacttacattgttttaaaacttggctactgccccttagctcgtgcttgtcattagctcctcctgcatatcaaacccttactcactaaagttacagcactgctaaaatcctactgattaactcaccagcttccgtttacaaagtttcttccatttttattctgacaaagttccatttttttcctcctttctcgattgagatttttaacaacaccttgcccccatcccccaccccaaaaaagctcactcaatgttgtaggttctgttgctttttgtgttttgccaagcatgtcccttgccccaaaactaaagagcaaatgtttatttaaagtaaaaacaaaactataaataaattgtatactttataataatcagtggtaacaatttagagaccctggcagattaaaggttgcattatttttatttagatttttttcccttactattttgtactttaaagctggggatagatttcactggtttctgaggtaacagcagtaacgattaggaatatatagaaaagttcagtgaccagtcatttcttgtacaaataaaatcagtggtactgtgtatccagagccctgtgaattgtcagcttctttctctggtagtgagctgagtggcggcacacactcctcacagttgactcctgatgttccagctctctgatgtctttatgtcaggtaacacagagccagtttggtctttctccccctgccaggatcccaggccctaatcagtattatttctttcataaacagtaagtgatggagtatattccttttctgatatctgtcctgttgaccactcagacgtaagtttacaagctgtgcggcttacatggcagacgctccaacgtgtattcagatgctctggctgcatcccttcccagctctaaagagatttctccatcaaaagactttaggaaacgacatatgcattaattattttcctttgaaaaaggcaatgtgcatttttctttcctcagtttcatctgccccaggcactgtgagcagtgtcctgctaatgtgctcttggataatcctgtaccctgaaactctcgatggaacacaccaatgtcatgtcacataaaccagaggtaacacttatctgattgcagccttagaactcttaattttagttttatttgaaaaggaccccatttttaatagcgcttgaaatacccccaaaagaaatgaaaaagagactaaagtccacttttcactttatactcatgcagaaagcagtgtagttggaagagatagccgtttgttgttggcaaattagcctataccgcagctgcctcgacagtggggtgttgacatgccctcccacaccgaggcagtggcgggatcagcgatgaagtcagccccatagttgggtgtaatggccacgtgcaggctttctgtctccagccccctgtattacactccttaaacagactgtttagattcaggggacacagtgagtgccagtggctcagcaagaacccaggtgacctcttagaggaggccctccctcctgggagccatgactccccatgtgctagatgagctctcatgggcggtgtctttccaccatgcttccctgttgtctgagcaggtgaacctaaggcaaggcaagagcagagctgagggaggcacactgacagggagtcagagtgtagttgatggagaggactgggtggggctgtggcagcaggagcagggcactggtaaatcctgtgactcgggctgtgacttcctgtcacttgctttatttacggatagttctttactcccaaattcaattttccaagcagtaactgcagagatttcttattctaagaaaaggggtttagaaataacactatctgtgacattatattaaaaccatgggattctctagtgattatactattgcgtaaatgttttaggttgttgttttttacataaaaataaaatttgcctccctctcaataggaactttttactgtaaacaatatgtttcggtatctagaattaaggtaactgcttagactaaacgttgattgtgtggaatcctgagctacagaagccacacttttctctattctaatgagctgtgtcattactgaccaagggaaaatagaaattcaggttgaattttgaaaatggtgatctgttttctattttttttttttggtggtcattcacttaaacatgaatttttgcatttcaggcatcagtcacaatacctgatgttaaagctcccagcctgcctatttcaagtttatacaatgccagaacacatggtcgtgtgggatagagttgattatattgtagtttgtggtattcagtgttaggagccagccctctagccagcgtcaaccacactctactcaatgaatattttttaaaaagcaaaaacatttcatgagccctgcaagagctgcagttagagagtacagagtctgcctgacagagaagaggcactgacgggcgtggcccctgtgcctttcttacatgaactttcaaaactgataacgagttgcctgccccctagaaacaaccttcagaatatattttcttatcgtggatgaggaagtgagggggacaagatgagtttcccctgaagtggggaaaaccatatcaatttacaactgaatatgttttcttatagcaaaccttcggtttattttattaaaccaatgccagcttcaatttttttatacggtgccatccacctacggaggacaatcaagtgacctactgtttgccttggattcagtgtctattgattgaatctcatcttgtgtacctttgaacttaattcccacttgactcctgtccatctgaaccaccacaaggcagagggcagcggcggcgctgctggacagatgtggatgtgtgagaaagggcggggtcccgcctcactgtctctccaacactctctaaagttcttgcctgcacttctcctgttgtccctggcaacactagtatgctgtagacagggagaaggactgcttgtgaccttagtgtttattttcaactgttaagataaaattgtaaaccactcctatttcagttgcaaaaacaaaaacaaaaaacaaaacccttgaggctttcttacattgtgaagattccttatgttgggtttctaggttagcacggaagcttgtatcaatgaagaggatttaggagggaaatagggtaaaacttgttacttttctttcaaaccctctccctctgctgtatacacacacacacacacacacacacacacacacacacacacacacaccccgtgttggttaggtgatgctgtccggtgactccctgaactatagttgtcaagagtaactatgattgtgattagtcctctgtgggtgacccttgccccatgtgcacccttgctttctttcctactctccactctggtaaatggaaaaggtgacatcaaagaatcaatgcttgcttggactcacgtcgtatctgtgactatgctattagctgtctccttttcccttcttatatgggtagaattcttatgacatgtggagtttccttctggataagtaggttaaatgcacaatgtggtactgttctatagattctagatggtgtaaaaagcaaaaaaaaaaaagttaatgtgcttatgtgtttttaaaagaaaataagtgattggttacaaatctctggcctttttcattattacaagctgtgttttccaacagtgtgctgactcgtcactggtgagtggtatgtgttcctgtgtgctttctctctgtgtgtcttggattcctgaccatcattccccttagtattaacatatatatgggtctaacacaaactgctcacaacagggaattagaaaaacataatttaccaaattcaaaagcaattaaaaaaaaaagcaggcatagtgggatatacctgtgagcctcagactgaggcaggagaattgctgtgagtttgagacaggccctggctacatagttctggaccacctgggc

SEQ ID NO: 18305 - DNA, 1147 bp, Mus musculus
accctgtctcaaaaaatcaaaaaaaaaaaattttaaagaatcaattcattatttgtgaaatttacccagcatcatcacagaaagacttgagcaagctgaagctaccttatgaagtccataactaggattcttacctgccactgactttgtgtcccaaagctaacagtaaacataaagcatatggtgactgcactcggtgttgagagaatagagagagagacagcagagtaggttacgatgaaaaacgtaagttggacatttttctgaaggtaagggagtgcttggacaaggtaaagactgtgcctgtggaaatggagagtaggaaggaaacacatgtgctcagacagtagtgagaaaatgtaattggatgggctcatctgaactgacccacacctgtaagcccagcattttgacagtggaagcaggaggatcatagctacacagcaagcccaggccagcctggtttacactagatcctatctcaaaaacaaacaaatagccaaagactaaaaactgcaggcttcatcttgtagggaaagaaaaagaacaaaacaaaacatgttcttccaaagaggagtgacaggaaaggagactgtgtcactgcacagtgcagtaggaaagggaaatcgggacagtaaaggcctggatcgggttgtaaagtcgggtacaggagcatagaggagatgagcagaaggggctacagtccggtgagtacagaagcccaggcctaccaaagctttagctagagagtgggaattttctggaaagaaagtagagaaggaaaaagcagaaaagaggagagtgagtcttagggcagaggaaagtagcagaagtcacagtgggaaatgagcgggaagagcactgactcagctgcactctgtccagggaggcacggcaacctggggtgcaggagcgctgtgggtaagagggtgctgaggaggtggctagcctcaaggcctggagaaaaggctgacagaccagagctcctcaccgtgaaggtctcatagctaccagcagagggcagtctaaacatggtttctgatcaagagggaggctcttggtgctagtctgttcatttcaggggtttacagggaaacgctgggaaactagatggcagccagaggaaggcagttagaagaacaggctt

SEQ ID NO: 18306 - DNA, 1242 bp, Mus musculus
cacctgcctctgcctcccaagtgctgggattaaaggcatgcgccaacactgcccagcttaaatgtttaattcttttagatactgttataattaaaattgctttcctaattttattttcagattgcttattgcttttatatatatatatatatatatatatatatatatatatataatacacacacaccactgaattttgtgtgttgattgactttgtgttctgcaactttgctgaagctactaactctcacaggtttattgtggattctttggaatcatctatattttgtaatatatctggtgtcttaggattcataatataaagctacaaatgtgtttttctacttttctaattttttaactaatcttgactctgctggctctctaaattaaataatttatcctactaagatttgatatctggtttatatgtttgattgcaaagcaagcactttctctaccctgttgcttttaagttattaaatatttttataaataataaatggttgtttaaattaagtaagtataacttggtagagatgaaatgaaagaaacacagtaggtgctggggaaactcacttttataaaaatgtgatgtatcatgccggttactgggagtgttgtaggatggggttgggaaaagtaagttgcaaattagtaagagctgagatctcagagctgaaggatttgaacatcataactctaagaaagctgtagagtagagatggtactgagtgttggaatgggcatgtgagcaacacagtacttgagagcaccagctttgtacaaagttataaagattgcagttataaaggtgtggtggtagaggcaagtgggctccttcaagttcaaggccaggccaaccaaaggctacatttacatatacatcaataatccagagcaaattacgcaacctatctgtgctccagttttctcagtcaacatagacatagtaatttaaattcacaaaacaattatactgattcagactaactattacatagaatagcaccaggaataagactaagtcctcaccttattaagcattctatacatgttgactatgatttatttatatggcatttaaattttctcattgtcttcttgtgttttgtgtcttttcattttgcaacaaatctgtgagataggagttaatgtagccagtgaaagcaatgttgaagaggatgtaccatacaagaagctcccattgacaaaactagtcttatactaggcatggtggtg

SEQ ID NO: 18307 - DNA, 1121 bp, Mus musculus
cctggttagaaggggagagttgactggggcaaactgagcagacctgtcctgggagcctggtagttaatttgtaagataggaggtattctgctggtctgtaaatgatacagtctcagtaggggtaatgctagacttagggagatttaaatagtggattaccatagtttgtgatatttcaaaatttaccaggtatatctgtcttctaaaatgtcatgagagagggcaaatagggagaaagtatttccaaaaggccccaagatagggtaatatgttttatacttctctatcaaaacataattggagtgcttctcctctgcacagttatctttatgtccttagatcaatgaaatatatgtaaaataataataggagatatgctagctggatgtgatgttgtgagtttaaggtcagcctgggctgcacactgggatcctatttaagagatatgctgtttgtgctctttgcatcattaatgaaggccttcttggctgttctgtgctgtagggaggcatggaaagccctcggtgactcaagccctagccaagcaatgcaggaatatatcgcggcagttaaaaaactagatccaggatggaatcctcaggtaagacttctagctgtatactttctgaaaacttactttctccaaacaaatgtctctaactaagctttggtgtaacgcgtcttaagcttcagttcatcaaaaactataaggtaattgtaatatttatctgtgaaaataactacttaaatattaccatgagcagtaactgatacagaaacctctgggtagtagtttgtagaagtatggtttaatcttgtaagatctgaaattatgtcagaatttggagattatcattttgggaataagaaaacttctttcaattaaaacaattgggtggtctggagagatggctcagtgtttaagggcatccactgctcttccagaggtcctgagttcagttcctagcacccatatcgggtagctcacaaccacctggaaagacaacttcaggggatccaactcctggcttccatgtcatctgcagaaacccatacaacagatatacgtacataacgagaaaataattatacagctcttgagagtcagatgcgagttggag

SEQ ID NO: 18308 - DNA, 1148 bp, Mus musculus
cagcactagttgttcttccacaggacctgaattcaattctagtgtgtgttataaaggcaaagtgtgacctcttgttgccttctcagctcatcttccatgaagtgagcaattcattatttatagcatgtttaacagtcttcatctgctgttttctctgtacccagatcctgtggccaggtactttgtgccaaagccaaaaaagtcagtcaaactggttttccttcaaatagtttattttcctttaatcttgtttaacttttattattatatgaagaggtttgtctgtacagaaggtgtgaaggaaatttgggtctatcaagctaaagtatgccatagtccttgctttcagagagcagaagttgacctacaatcacaaaaaaaatacaagaaaaagatggaggagatcagggagagttttagtgcagaatggaaaaagctcaagattctcttgtattttctaaaaagagagttgcagatgtaatgtactgtaggtgcaatgttttgtgagtgtactatggtgtagtttctataaatgtactataggtgcaatgttctataagtgtactataggtgtgcagagttctataagtgtattatgggtatagtgttctctaagtatcctataggtgcagagttctataagtaagtgtactataggtgcagagttctataagtgtactactattattgtgttatataagtgaactatgggtatagtgttctataagcatactataggtgtagtgttctataggtgcattgttctagaagagagggcagccagataaaaaggggcttccatgattctgcggcattttaaaagtgatggtaaataagaattgtgcacatgatgactgcatctctctctctatttgggagtgtgggtgtgcacagaccgtactttactgcgtcgctcacctctgtcctgtgtgtgtagagtggggaacctgtgcttttctacctttatagtttccattttaggcattgatggcttttgattcattttaacattactctgttatttttgtttacttttaattcaactgagtagttttattttaccctaatgtatcatctgttacaaagatttcaaacacatgaccgattctaatgtattggaatagatttggctgttctttataatataa

SEQ ID NO: 18309 - DNA, 4125 bp, Mus musculus
gtgctagagtcacaggaggtatgcgccagccaccattgctagctgtcactgagttccagtactctaggatgatatggtacttctgttggatgagtagagttttcctttgcagggctccatctaaacttgctgcttctctttcctgtaagctcctgtgtgcactcactcgtgttaacacagacatgggttataatcagtctatctctcttatctacaaaatgctggaataccagcatgttcaaatggagctattttagtttcgatgctaattttaaaggtgtattgacatgatttctttgggacacattgtacatgggaggtgtaagttcctagctcttgggtgacaggcttgctaacgtattgccttctaacatccaggtccaggagctgcacgaggaggaggcacagtgggtgaactatgatgaggatgagttgtgtgtgaagatgcagctggctgatgggatctttgagaccttgatcaaagatactattgatgttctcaatcagatcagtgaaaagcaggggagaatgctacttgtgtgacatcttgcaaataaatcgaacactgagtgctaacatgagtcctgggcctttctgccttctgatatacaccccatctccaccatagcaagaatgcttctggaccttgaacctgttcttatggactgctggtttggagttcatgggacaatgtggtatatctggtattacagcctttgcctttacagactgtccactggattacgtggttttttcccgtgggcagggctatactctgatgctgagacttggtatcacctcattagcacccatacctactaggtctcagatgagggctgagaacaccagactgacctctgagcttagacaaagcttgagtgtcctcatgagacttgcgtctccgcaggaaagagaggtacatagattcttcttttaactttcaaaacataatcctggtctatacaatgaaactcacaaatggacatgctagtctctgaacagtattaaacccataaccactttaaaataggcaaacgcaagattgtctgcctattttacattctggagtttatttcttcttgaagaccattttcttccattcttgaagttaagcagcaccaagtggatgtcagaaataagtgggagctttgctttgggcaccacctaaaaactataacccattgcactgtgtttaattttcctgtctgggcagaacccagtgaagacgaggctccaggactgctgcgggctgttcctccgccctggtcccacccctgctctctcctcatctgtcctaacctctaccagctgctctcagaatcgtagatactcaggaccatctcaggcatccaggcatggcaaaagtggaaagacctcattttggccttcaaacgttgacttcccatctctcccgcagaagtcagtgctgttacttgaatgagttagaaaatgagtggcgcaccaaagacaagaagatcctgtccagagtctgcctgcttgtttggctctgtggaatatttttaatttattttaaggtaaattattaagttgaaaatgtgtgtccctattgagaagtgaaagattctcatcattgtaaacctccgtctcgaagcttctacagtttaatcttcgcacaggaaagctgcagttttaataaatctatacacacactgaagaagtcagttcagttcatcaaaaagacaacagacgtttacaccgtcacccgggcagcaggacaggacaggactcgaaagactaaagtttatcctgcctttcttgcagcattgcatcttacaaccattacctgcatctgaggaacatctccagactccagctgctacctttgagcacctggtgctctcctgggcccttagcacctgccttcttgactggtttctcttcatcagtcctgtccttcctaatcccagggaatgaggatgatctgaggcgtgtgtgtaaatgccttaaccctaacagtcgcggctagaacagcatggtaagacatccgctggggtcacacttacagacaccctggacattatggcttcaaaacacattagaaaacccaaagacagcgtaacccttaagtatgcacgtttgttcttttctgcatcttccttccctacttgccattgcatctctgatgtctcactctgcacacgtcactcctcttgcgtttcatcctgtcattacacaacatttgctgaaaccatcattggatatttgcattttgcacagtgactggtgtgctagctcttgacaataagaaagcactgaactgttccaattgggtctcctgaatgctcaggtgggtgtctcatcagcatctcttctgtgcttttgctgttgagctgtcgtctttagccataatgagcaggttgacgaagagaagaaaggtttctcgaggttcttagtagtgtggaaatagttttcatgtggccaatgaaagcaaagatagttctcctcagtttgtgttccttaggagacaggagacatctgtgtccatcccttgactgtttgtaggatcatattgtctttatgaaactgaactttacagctgctataagtttttttataaatgaaaatcaaattataataggaatataggttgttttccatgtcttcattatttggacctgaggttaattttttaataagacagtgtatcttttactctctacattatcatgccagaaaaggaaaaacttactgctgtaagtccataggctcagcgacctggacagtgccgagatcgtggcagtggccgtcctaacctccgctagctgtcttcactatccaagaaccctgcattccagatgcgaggcgggagtaagccagtctcctcctttgctagcaattacagctccagtttggtagcaaaaacaagtgagtctatagagttaacaggtttcttcctattttaactatttggatctaactgggtgggtttactgttagggtcaggaatgatggatgtggctgcccagccactcactcggtccacactggggtctttttaatgaagctctgcctcataaccaagaacctaagaatgccctcttcctaactttgcccctcccctacacccgcgccctcctgtctgtctgcattgattcctctaaacgatctttgcatctgcagtaataccttttagtatagcactgtcagtacctggtagtaaaccaccatggaggcttcagattgacatctgagtccaaacaatttgtgctatccagggcagttaactctgggttaaactagtacagggtatcgattccctcttcaggtctaaacaggaatttttactctagggaaaagtggaaagagctcaaaagtagtttataaggaaggtgacttccttctgtgactacaggtctctgagaaattgtctttcaaaagagattgcattgctcataagagtgttgtggcctattgataaaaacaattttgttcactttcttgtcttgaaaaaaaagtggccttagctttttgcaatacttgaataaagtgtgtacttgcaaaagaatttctgtagcacagcattagagactcataacttttctgcaagaaattcaaacttacatcttccttttactaccttaagaatactagtgaataaaacattaattcaaagagcaagtgatagaaactacaatgccgtttaatgcaaattgtaggaatttacatgtttacaaatcatcttaaactggttgtgcagcaattcaataaaatctttgtattataaaaatgtgaagaaagtgtaaaccggtgtaaaggaagcaccgttgttgtaactaagctgtggaaaagcttttccttctggactttgcaacgccttcttggttacacattgcaaagcattctctagggggctcagcctcctcgtgtgtactgtactgtgcagacatgaaaaataaacccgtttactgtgtgtgtgtaaatagcctgatcatcaggccatcttcagccaatagtcaccccctgcagcccttagacgtctgcacagaagccctagggtgtggtttgtaagtacgctctgtaaaataactgggatgaagtcccatgtatacccatgtacatagatttgttaactaaaatgtactttaagatgaaatctgtaaataa

SEQ ID NO: 18310 - DNA, 1183 bp, Mus musculus
agaggatcagtccaatcacagtacagatgaccgcagtccagacatccagtcagcaggaggcatccctgagcaaggatgcagagagagtggggactccacatgctcaggacagctttctgttcctaaagagtcgtcctactctgaagattttgaagtgtcttctttcaggaaagggatttctgctgacgagattagtaaagatgactctgaggggtcctcaccatcgtcgctcaggaaggactctcagtctcacagagataggtcacagctcacaaggagctccagaagcagagccaccgggtctggaagcgatgaggagatcagcgagtgtctcggtgagaaaagcctctctgttcatagtggcgtccactcggaaaggctgctggagctcaggtcacccacagagctaatgaagagtaaggagcgcagcgacgtggggcacgagcagggggggactgagccccttcccctggctgccacagaggagctactagatttccacattggggatagggtgttgatcggcagtgttcagccaggtactcttcggttcaaaggtgagactgactttgctaaagggttctgggctggagtggagctggacaagcctgaaggaaacaacaatgggacctatgatgggattgtgtattttgtgtgcaaagacaagcatggtatttttgctcctcctcaaaaaatatctcaccttctagaaaactttgatgatacagacataaatgaagatgaagagtcttactcagatgaacagtaccaaccctataatcaagagcagaaagatataaaatgtctaaaagacagagaaaacaatatagctgaatatttttgtgagaagtcacttcctagtatgcataatacagatgcctcagtggataaagatagaagccttaacatagaaacagatacttctgaggtcctagaggtccatggtcaccaacagccttcagtagatcctctgatttcttataaggagaacaaagtccttgtttctgatgccacagagagtgttcctgctgctgcgggtgctgctacttcagacaacacgttttctggagaatcaaagcaacagcagcttgcagagaaggaagagaacttttattctcaagttttggaaaagccctctacccctcttctggatcttttaacaagagaaaaaaaccaattagaa

SEQ ID NO: 18311 - DNA, 1179 bp, Mus musculus
gtgttttttttcttttcttttatatacccccggagtttggctttgtttctttattgtctatttaaaaaaacatttagttatttttattttatgtgtctgattgttttgtctgagagtatgtgtctactgtgtgtttggctggtgcccataggcagctgtaagccactctgtgggtgcagggaactgaagctggaccccccaagagtagcaagcgctccgaactgcggagccagctcttcagatggggattgattattttgtggaattttctatgttctaatctttggaaagcaaatcagctagttttatttatttatttgtattttttgtattctgtagagaaggtctgttctctgtgtcttgagaagcatagcctttcataatggtagggagaaaaattgtattttgagtaaatataataaagatttagctttgtaacaaatgattatgcggtctctctccatgagctttaaatgtatgtaatgcaggaatgaatagtaattggattatttcaggattaatttatgtgttttcatggtattcaaattttagctgagacacattgagaacaaattagaagtaactcctacaagcacagctgtaatcgattctgtgatggatactaagaagtctgcaagtgctacccgaaaaataagtaggaaaggtatgtgtgaagtcccttctaagaatttaactatactgaatacagattcataaattactattattgcttgtggggatagatgcacatacgccacgcctgcatttgtggaggccagactttggttctccttttctacctttatgtgggttctggggttgccccattaatacagattttagttgtctcagtttagtgcgtcttggtagtctgcagtgcatgtcttaggctgagtacttatgcagagtacttgtgacacagcctcatgcttagtgatgctgatggtatttttaccagtgcatcatgcgttttctttgtttgtgggaatgagaattgtgtttgggtgtctgaggttatagatacttattttgttagttcttaggtatagtctttgaaggtaaaatttagctgacttaacacgaatgtgtttcttttgtgggggggccaaatttttagtcatgaatatctttcatatagaaactatataatacattgacactatgcagatgcatatagat

SEQ ID NO: 18312 - DNA, 1211 bp, Mus musculus
gtgtgtatgtgtgtgcatgtataaataaatgtaacatgttcagtccatttagtggtgcttatatgtgtatgtatttaggactgatcacgtggaatcagataacttattagggcacttgtcctagaagaaggctagttctacctctcttaacaacctgtagctcttcatctataggagtgtaaataaagcaatgtcttacccgtgtcaaagcctgtaaattacaacaataacggccaagatacgctcacaggtagacttgcggcctgtttggtagatgggaattcatccttgttccagtaaatatagccctgcctgtgggtggtgaggtcatgaactccagaggataaccaacactgccacattcctaaacctgtaaaatttccaaccacattctaaatatctattcagagccccagaaggatttaggcaagttacaatagcatttgggaaatagctgagattatgaaaagtgtattgaggggttagggagctggctcagttattgaactgtttgctatgtaagcgtgaagacctgagttcagatctctagaacccacactaaaagccaggcattatgctatatgcctgtaatcctggctgtagtgagatggaagcaggatccctggggattgctggccgtgtactccaggtcagtaggtgagctctaggttcagtgagagactttgtctgagaaaggaagacaggccccacctttgacttttgcccttcatgtgcacatgcacacacacataacacgcacacacgtacatacacatacccactcacacatgtgtactcggacatgtatacacataccttaaaatgtgttgaattttcttggtaagaagaagctagaaaagaggtctagtgttaggaaatgtaaccattgaagtactgggctgaggtagagggccttcatcactcagttaatgtatgtgctgttaaggaaaaaggagagctgtgcttacattattaatctaggagaagtgggagtttcaagattaaagttcgaaattgtatatgttaataaaatattgctttaataccatcaaatggaaagttatactgtgcatatgggttttttatttttagatttttaaagacataattttaaacaatgtttaaataagtctttaaactttatttattttatgtttatgagtggttgctttcatttatgtcagtgcactgcatgtgtgcctagtgctggc

SEQ ID NO: 18313 - DNA, 1237 bp, Mus musculus
atacctgacagtttttgtcctaaagaaaatatagtttctggtacatcctcaacttgatggtttgggattttttaaattattattattattactattattatttaatttttttactttttgccgatactaggaattgaacctgagatcccacaccagctggtcacgtgttctcctggtgaccatcccctagcagtagaaacacattttgaagtcaggtaactcatgtctacaatgccagcacttgggaagttgaagaagaagccattgttagctgtatagtgagtttcaagccagcttgcctgggctgtaggatgaagtactgcctctacacccactatccccctccctgccccccaatacacaaccacccccactaccccccttcccacccctctgacccctacccctgtctccacacctactacctccctcccccccatctccacagccaatacccacccccccaatacacaacacagagatagcttcaaaattggtaaacagttctctgctgggctgttgaagagaacttcattttctctgtacatgagtactggaagtctgggagtggtggtccataacaaatagagatatactatgcacatgatcattttgtcgagtgagtacctcaagccaaaagagtgaaccttaccacacgtgaagaacagcggacctaggtctctattgctcgagtattttagagttttttgcatttataactaggtattctcatctgtccgctgctgttttgttttctactcttaacaattctagatgcaccttgagttcttctccatagacatctaaatgagaatactactttagagtcctagtcaactgttctttacccactgggagtctcatggtgggtggtaagatttgtattactatctgtttcggtcaggtcagactgataagattctcattttgtaaagaattataaaaaagtttttgaaagtctttattttttacatacatatcataaggaaatagaaatgtcttatattccactgacttaaataaatttcttttatctttcagaaaaaaaacaattgtagcagttaatgtgtaaaaagcttttaaaagctattttagtaatttaaataaatttactttttgggtttgtattctgtatgttataaacttaatgatttacaagcctggttttttgttttttgtttttgtttttgtttttgttttttctggtttttcgagatagggtttctctgtgtagccc

SEQ ID NO: 18314 - DNA, 1123 bp, Mus musculus
gtccagataaaggtcctttcaagactgacttcagtggatctactccaccaggtcttcccgaccttactacatcactgccaagtgctattggcgagactgcctgcaccagcagaagactcaccggatccatcagagcgtcggttttaccagagcaaagcaagagcctgtgtggttctgcctcccgctaatactggacaggaaacagcaactggcttggactagaggcctggctttcctttgaaggagctattctgtgatctgtgttgctagtaagtgactgacagtattctagactggactggtccctgagtacagagactgagttgcaattaagtgaagaataaacttcaagatcttgaagaactgcactaaggtgcaagccaggttcagcactccagtgttgttgaactgacaagttgctaaaggaaactgtaactggactgactgttgcttattgcttccctctctctgtcattgttgctttttgttgttacattgctttgtgttgtctttctaagcccagatgttctccgataattcacactgccctgattgtgggcagcagtggttccctagtttagaactagggcactggttgtaccaaactgaacttgttgaaaatgaatgttaccaagtgttcttagaccgtattaacagggctgactactgccctgagtgttaccctgacaatcctgctaatagaagccttgttctgccttggtctttcccacttgagtgggcacctcaaaatcttaccaggtggacctttgaaaaagcttgccatccatttcttctgggtcctccactggttagaaaaaagatacatgactccagggtagctggctttaatcctgcattacaattaattttgtccagaacagacaaaaccttaaacaagaaacttggccaaagcaaatgacttctgtaacagaatcatggagactctcaagggctttgcgttcgtagcctaggggagaagaggaattaacgtgtttctgttttccttctctttttctttcttataattttttaaggtgctggggattgaatctgggtgccttgtgcatgctaggcaagtgctcttccactaagttaaaccaaggctccccctttctaagactga

SEQ ID NO: 18315 - DNA, 1365 bp, Mus musculus
gcagccagagtatttacctagaaccagactaacctatagcccctataaatgctttagaactacctggcccctcttgaaaatcaccacaacctaagtattgacaagataatgtagtcctggaggggaggccccatgttgtatgccccataaactgtttttctatcagtacctgttatgagaacatgttcttgtagctggattctagattctaataaattttaatacactacattgttctaattttctcctcttatattgatcaataatgagagatgtgtgtatgtacatgtaaatttttttcatatatatataaccattctttgacacttttatcctcagtgtaagtattacagtgttttaactggtcctgtcacatactatttggcaatacctacaccggttaccaaaaaatgtgttaatgctgccagtttacacttacttatctctatataaccaaagactgtcttgtcttgtggtgagtgaactcagtgtcctcccatggaaatggaaaaataacccatgctatggagtttatgacaaatgataaagcttgactccatataactttagagtggtctagtggatgctctgtcttagccgtaagaatgtgctgctgaacattggccacgttctaggattctggtcatggaaatcatggaatcagatttggagttaagcagcttagaaaaggctcctgggaacatctgagaagccactggacattgttaaattttcacttaagattctaggtgatccagtgcctgtgtagaagcagaaatgtcaaggacccaggtggttctctttcctctctagggtctttatggtctttgttctcatgatagtttttaaatgggttcagtatggttcgttgtgccgataattcaatcacaaccagaagcagggggcacctggcttgctttcttacaagtcttaatttggaaataaaatctttttgaaatgactcagcaggttttattgtttttgttttactctcatgagcaggtactgattcatgcactagtctgagaaagacttggcaaaggaggaggaagattgggctttcccttatggcacctcacctccgctgataaaactgacatccatcccttaagtggggaagtggaggactagttgttgatacgcaataaatcttgctttccacatgtgaaacctggcttttgtctctttaaaggatggattctagtgagccactcctgtgtctgccatatgtctgtcatggcggaggttctcacttggtacctgaagtacactgtgtggaccgccagattgagtgaagttagttgttaattgtcaatgaggtacttactcccatattgttgatcctaaagctcttcccaaaacata

SEQ ID NO: 18316 - DNA, 3303 bp, Mus musculus
ctctcaccagcctctagggcagtgcttggacctggacgaggtgtcatgtaaatgattttagagaactcttctactacatattaagtgctttttaatattcacttttttttgttgtttttttctgaggcagggtttctctgtgtagctctggctgtcctggaactcactttgtagaccaggctggcctcgaactcagaaatctgcctgcctctgcctcctaagtgctggggttaaaggcgtgcagcatcactgcctggccttaatactcactttaataatacacttgtgggttgattgtgtcttacacagatttgcactttgagtaggtgaaaacagaaaactagaattcaaccctccaaacctacctaagagcctggtgtgtgtgtgcttctgttccgttagtgagctgaggccagaacagctgtgctcaaaaaagaaccttcccaagcattggactcaatgacgaaattgttagtaatcaccagaaatgaaaaaatcccccttggccatgtcacttgtctttgcctacccagcagcccctccttcctgtgaatcatgcctgctcttggctgctgggtttggggttctctgttaggatttcagtggagctgagtttcacagagaagtttgaaagccattgatgaagtgaaagtgcattctagagtaggaaggataggaagacatgaaagggttaaagctgaggagtaacaggaagttctgttgttcagggcgacagagacctgcagatgagctgctactggagggtgtagggcagggccgtgagcttttgtccctttctgtggatctttcctgtcctcccctgctggaatctcactgttgtctgtgttctttcagaaaagacttgaggtcctcagctagttagaaatgccgtcaggaaaggaacttgataaacacaaggggaaggtctcctgtagggaacagaaagaggaatcatggccaatatccgttgttaagctacatcccatgatttcagactggggccaataagctgttaatcagtacgtgaactctgaaagtaaaactctagtaaaatgatcttgacccacaaaaggtctgttcctttacatggatgggaaaagcccttggaatcttgcactcagttttgggtcatctgctgctaagagatcatgtatacacttaagacattaagcaacctgagtctaaagggattttaggaaacactaagaagatgtctattggtagttaaatggatcacagagacacgggtgagaggtgatctgaaaatatttcccacaagatggctttggccacaacctttggtgttaagtaagttaagtatgggggcacacatgaaacagtatgtatttgggattttgaaggaatcctgatatagatttcagaaaagaccctacacaaagtttaagcatagtgaatggaatttttctgtcaactcattgtaaaacacagggattgaagaaaaatccatttgccatttttgaattttttttcttctgtatttctagacttatttgttttgaatgctagtggcttgtcacatagccatgtctggcctggtgtttactctgtagcataggctgactttgaacttagagtaatttctcctacctccgtgtgctgagtgccgaggctacaggtgtgtgccatcatatccaactttcatgtaagctcttagccactagcattacatcgcgtaaaaccacatcaaatcgcgtcaaaaggtgccttgcagactgtcatgttggcctttgacccatgctacctcagactctagaggaatgtctacagtatttgtgcacagtctatgtcagtggctcagatcacaagtggaaagcaatcgtttcctcattaaaactatgtaaaacgacagccttacatagtttcctgtcaacacaaatttaggatataatacattttagaaatttattatttttcaattatttttggtttttttactacttaccttgtaaaaatacacttttccttttgtcataagtgcaatcagctgagtgagacttgtcagttgttgttgctttttttttttctatcctctgtttcaaaactcagggccttaacattcaaggaaagtgccctaccactaacctatatcccagacctcttaaaagtcattttgaaaagaagcagtatgttagtttggggtcagaacaagtaattttctggttttgataccgagtctctacacagtccaaagtaatgattctcaagcctcgggctcttacaggatgggattacggtagtgtgccgccacaccagcctattatcccgtgtactgtcttctagaccattgcttttcatattcagttttccagccttttatgtgtgttgtaattctttgtgataatttgcctgtgtgtgtatgttttttattggtggtggggttttttttgtttgtttttaactaggaatcccttcttgagtaataccaagtcttagaagcaagcaggggaaatagaaactgtctttagacttgggtctttctttccctttcaggtaaaatttagggttcttctgggcaccactcagagattgtcagaaaagctctagagagttcttaacactgaactaattttagtaacttttacctggaagtccgcaggcttagggggagtagtgaggctcagtacccttcccattggcttatgtgccccacccccacccccaatcactgtggctgatggtacagctttgtctcacagcctttggtccacagtcttgttaaagacaggagcactgtgagcacggatgttggctatgacagacagatgcagcctgtgaacacgagagtagtgcagcaaaaatgattttcaccaacactcttactttctctaacaaagatttcttaaccccatagagttttgcctttatatatttacaaatgtaatggcttgtcaaacttaccaaatcaccataactgctttttgcattcatttccatagtgatgatgttgaatgtgccttattcaaatcaattgtctgattactatacaataaatctcttcaatttttcctgactgattttttactaaaatttccaaaataaagaatttatgaaaatgggtgtgcggttgttagtggtgggaagagtcaaaaggattctgaagcatcgggtggtgttgcggctgtcagggacgaggggccatgcaggcggtgtgctggactcctccaccacccttggcagtggctgtggggcatttacccccacctggctctctcttgaccaggggaagagtgagcacagccttgggagtggtccaaacatgaggcttgctgactggggatgtat

SEQ ID NO: 18317 - DNA, 1454 bp, Mus musculus
agggcttcagagacatccaccccaaggagaaaggcctgggaacttacgcgccaggttccatgtccatgccctctggaaccgaatcaataatgttcaacagcgcttccagatgaaacttcatttcattaatcttttcatcaatttcaagccactcttcagtgggtacttgagaataatcaaggaagttttctaacttgaaaacacacatgtccaaagaaatgaccaagtttggaagaactttagagatacctaggaaaatggggaaaaaaaaaaaaaaaaagaacaaactctttgtgatatcattattccaatagagtataaaaatctaggcgagggcagatcctctcttgtctctcattcactagagaacctcaagagatgctcaaaacacccaaagatcaagttttcagcacaaagaagatgtatgtgccccagagggacaaaaggcagggaataagagacaaaaacaggtctcgaactaggctgcttcagccgtgaacaacgccgaaatggccaagattaaggctcgggacctgcgcggcaagaagaaggaggagctgttgaaacaactggacgatctgaaggtggaattgtcccagcttcgggtcgccaaagtgacaggcggtgccgcgtccaagctctccaagatacgagtcgttcgcaagtctatcgcccgagtcctcactgttattaaccagactcaaaaagaaaacctcaggaaattctacaagggcaagaaatacaagcccctagacctgcgacccaagaagactagagccatgcgccgccggctcaccaagcacgaggagaagctgaagaccaagaagcagcagcggaaggagcggctgtatcctctgcgcaagtatgcagtcaaggcctgagatgacaacgacaataaagtgcgagactgactggcaaaaaaaaaaaaaaaaaaaaacaaaaaaaaaacaaaaaaaaaaaaaaagagacaaaaacaggagacagtgggtgaggactaaggagaaaaggaacaaggagggagagggatatttgttgggggtgggaggggatgacaaagtattgcctctagatagataggagacagatgtggtacacaaaacaatggcagtttataaaggttaaagggaaagccagtgttagaatggggtgttagatttagagtgggtatgttaattaggtgagccaaaggtggcttttgattgctggacttcaatactttgatagctggaccttagtagtcagcctcaggagaaggaagtgggcaaataagggaacaaaccttgagggctagctttaggaatgtaatctaatggtttagcaacacagaagtgattttgagagacctaaaggagaaatagatatggcccaattaccatagttttaaatcttaatagttattaaacatttgaagttattaggggtcagggatgaggattgttggcagagcagttgcc

SEQ ID NO: 18318 - DNA, 1159 bp, Mus musculus
ttttttttttttttttcaaaccatgtctgaactctttaaagagaaaataaaaccaaacctcttgctagcagtgtgttccaagctggtttgtttattgtttattattccgtgttgtgccaatgggagaaagctgttttctcttgaggatacttcttatttgtctacaaagtaaggggtttagtgttttctataagaagtattaatgctgataactgattttaagtgacccaagaaaactactgtctctacagccatttcacgttgtatttggatgtctgcttcggccttgtgcgacttatgtgttggacatttttattctcagtctcagataagagggagagggagcaagtttagggtttttttttgttgatggatgaatgtattaaaattacctgggtaacattgcttgcctcgggttagactttattagaacactaagactggaatttctggtgctgtttgtttctgttgttctttgtttgtttttgaagcagggtgactcttcatatctctgtctatcctggaactcatgttgaccaggttgtcctcgaactcacagatctgcctcccaagtgcagggtttaaaggggtgcaccgccatgcctagctggggttgtttttaacttgtcagtaactgcagcatttggcagtgtggaaaatgtacctgtttcccttctattcaagggaaaagttgttgatgttggcaggttaagaaagaaagtacaatgtagaagtaattgtatttgtaaacattgttacagaactaattcatttatgatatgtaacttgttttgaaagttaaaaattattcttgtctaaaaattgaatatcacagctttgtttttagacaagtcatattatgtttgaaaagcactcacttggtctgtataacctaaaaagatggaatttagcctagtagtggtggtccatgcttttaattctagcacttgggaggcagagataggtggatctttatgagtttgaggttagcctggtctaccaagggagttccaggacagccacggttacacagagagactctgtctctggaaaagaaacaaaacaaaacaaaaaacagaaatggaatttattagttgtcaggagagcctattttaaaaaaaaatgactgttttacacaggtataagaaaatttgaggca

SEQ ID NO: 18319 - DNA, 1533 bp, Mus musculus
ggaagacatcatttctgtatctctgagcatagaagttttgttcatgcacattatcaagaggtatgctagtgcaattgagaagaaagaaattttgttatttttggtagagaaaaaaaaaaccctattttccaaagataatcttgttatgcattctgctcgtctcttttgttgctattctgctttgctttgcttctgtgctaggagtggaacccagggtctcgctcagggacagcaccctgagccacagcccaggccttccactgtatttttctgaaagttctggtctactgttttgttttccattttctgtataagttgtgattcttttaaatgattagtgttccccttgaactcaatgctagtacaaattcaagggtcagaagtagaaagggaaaaaagacatttccttttgaaatttcaaaagtcattttaatacagactcactgagctgcccatgtgtttttaattgtgctaccatagaagttctgtggaagattttattattgttggtttgattttggttttttagaggtggggtcttgctatgtagcccaggctggtcttgaacttgctatgtagcctgactggtcttgaacccctgacctcctgtgtcccaagtgctaggatcacagaagacatctccatgcctggccaagatttttttttttttttttttaacttttaggttataacttctttgaagttacttagaagtatcctttggtctaattgctttattgtctaatgcgtagtgactttccttgttatagactagcgagtccatagtggaagtattaatctttctctactaataatcccaaaatggctcctaaggctccagaagctggcttctgaaacatctgctcagtcattatactttatatttttagatgaaataaatgactatgtgatcatttgtaaggacatgtactcatatgtgacatttgcaaattgtgaggcgctcattcctcacctggtgtgtcagaaggacctgctgtgcttgtgtgcaagggtgagcctatgtgtgcgaggactgtgcatcagaaaggtaccacggaccacagagttcaaaccttctgcccaaagaaatgagccgtacaagttgctcacacacaaaatcccatggcacagtcactttggtggtttcctggcaaccatccgtacagttttgggaagtcttttcagagtggctttaaaaatcacttttgagtctcacgagatctggagggctcttttataatcactctccgctaggaccacaggtctccaggttccttacctacctattgaccactgctggggatgaatagtggctgtttctgtcagttctttgttcccaaacaatagtgttctgtgttgtcacagaaccatagccccttgataagtctgtaaaggcttgtgtgtgttgttttgttttgttttgtttttttgtttttcgagacggtttctctgtgtagccctgtctgtcctggaactcactttgtagaccaggctggcctcgaactcagaaatccacctgcctctgcctcccaa

SEQ ID NO: 18320 - DNA, 1240 bp, Mus musculus
cggcagcggaggctgcagcctcgctctggtccctgcggctggcggccgagccgtgtgtctcctcctccgccgccgccatattgtctgtgtgaagctaggggagcgcggctattgccgctgccgcttccaccgcagtgtgaagaaaaagggtctgaaacaaagtcttaccaacgtctgcttttgaacacagtgactgctggatctttaaacatcaagttcagctttgtctgtcaacctgtctgacatgtcgggacccgtgccaagcagggccagagtttacacagatgttaacacacacagaccccgagagtactgggattatgaatcacatgtggtggaatgggggaatcaagatgactaccagcttgttcgaaaattaggtaggggcaaatacagtgaagtgtttgaagccatcaacatcacaaataatgaaaaagttgttgttaaaattctcaagccagtaaaaaagaagaaaattaagcgtgaaataaagattttggagaatttgagaggtgggcccaacatcatcacacttgcagacattgtaaaagaccctgtgtcacgaacccctgccttggtttttgaacatgtaaacaacacagacttcaagcaattgtaccagacgttaacagactatgacattcgattttacatgtatgaaattctgaaagccctggattattgtcacagcatggggattatgcacagagatgtgaaaccccataatgtcatgattgatcatgagcacagaaagcttcggctaatagactggggtttagctgagttttaccatccaggccaagagtataatgtccgagttgcttctcgatatttcaaaggtccagagctacttgtagattatcagatgtacgattatagtttggatatgtggagcttgggttgtatgctggccagtatgatcttccggaaggagccatttttccatggacatgacaattatgatcagttggtgaggatagccaaggttctgggaacagaagatttatatgactatattgacaagtacaacattgaattagatccacgtttcaacgatatcttgggcagacactcccgtaagcgatgggaacgctttgtccacagtgaaaaccagcatcttgtcagccctgaggccttggattttctggacaagctgcttcgatatgaccaccagtcacggctcactgcaagagaggccatggagcacccttacttctacactgttgtgaaggaccaggct

SEQ ID NO: 18321 - DNA, 6172 bp, Mus musculus
tgagcagctacacatactctgcacttaatgagaataccaagcagatgtcgtacctttctgaaaggggctggccacatggctgcttgtacctttccctccttgcagccctctggctggctgtagggagccgtgtccactgagggctcgcctccacaggatctcgtgttctttgtctttgctcccagaccatccctaagcccttgttgcacttggagtttgtgttgggaatattctttatttattttctcctttcatctctatttcagtgtgcataatagaaggagtgggttattttcagggagcaccagttaggcccagagccctcagggtttaacctgagagttggttttgcctttgagaaatgccactcccctcccctgattacagtcatggaagctattagagtaacatgggatagaaccgtagcaggctgcacattacttatggttttggtgttgtgtctaattctagtttctgggtttttttttcaaagagagccaatacaaaatatggtgatgtttctttttccaaaggaatattaatgtaggaagatgagaattgcgcactaagcagtgttttcttcctggctcattgatccacgccgtcaagtcgctgccccgtcttctgatctcttaattgaaggcactagcccacattcccaagcgggttttgcagacttaatataccactcccgctgagaggctctctgggaagctcttaatgttaacttaatgttgttgggtcgcttttcattctctttgctgaatcacaaataagaaactttgaactgccagaatcgggccagaaccctaaggggaaactattttaagtcgcatttggcatccttaaccaagaaagaaattaaattttcaattagaaaaaggaaatttggatgcctgtcactgctgctttagtgaaagctcagggtgagccgaggcctggggtaaaggacccagccctgcagtggcagcatgttccctcagctgcagcctgacagccaggctccaggttcatgcccctggagtcacggaagaggattccctccaccttggtggccactgttctgcacatcggatgcacgcataaacttgaatttattctagcagttaacttagttagatggggcagaggaagtgaaaacttgagggcattattaatgctgcttttagcgtatgtcccttgccgtggtgggatgtcttaatggatggtggttgttttgggtttgggtctcgtttttgtttgtttgttattggttttcccttcagagttctgaaaacaagcaagtagtgttcttcaaaacactgctgagtctcttggctgcctgcttttctttctctgaggccctgagtcatgtctcactcaagcgtctgccctgctcacacagcatcactaaatccatgagctgaactgactgtcctctcctcatgacgcatgagcggtgtcctttacagggattgaggcctcgggccacagaggcactgtcaacttgctgtggaagaattatttacgtttgtcttgcatctacctgcaagggaccagcttaaaagggggggggggggacacaaaataaaaggttagaatctaaatcagagaaaactgcttttagaagcgaaaaatgtaattaattatgtagcctaaaaacaaagcagatggcgagagagaaggctctggcaactcctaaagccgtttgtcctgggcagacctttgcactgtgacagcttgcttactctcattacaagtcccgtgacttcagttggctctcctgccttcagatgcagtgctttgtattgaatatagccaaattctgctttacggggaacttggttgttgtcgtttaagctttgggtacaattatatttcacatttccaggtgatttccatcatgctgttcagaaagaaaggccttaaaattggccttttgtattttgcagtgagatggactaaattgaacataatataccaagctgtgatctggcatgtaagaaactgatttggtcattttcaagatgcccttcgtaaaaggtcatcatagtggattggagactagtttccggcctcattttaaggtttcatttataaatgttcctacttaaatcctccttagcagacaattggctggtaaaatcattttctgttaatgaagacagtggtttttaagttaggggtacagcattaccgatagtgtgaggccatgtttataggctgtagctcaggtgcctggggcagtgaccacctaggatgttaattgctagtatgagctcctaacctgggagcacacaaacatcctctagagatttttaaaggaaaactgatgaattagccccgctttgatggaatccctggtgggatgagagactagctagcatgcttcccaagatcttctccaggtttcaaacactccccgctctctgaacactgtgcacagcagaggagacgggagagtactgttgtcactagttcatatcttggagcagctaatggcaaagctggggctagaattcaggagtcctgacatttggcatctctccacagcctgctgccttgtgagatgccgagctagacaatcagtgtgcatggtgctgcacacttctaaagcacaggctctggcaggcctggccagggagggcttggatgtttggtaatggcagtgtagctggacaagcctttagtagaactccgctctgaagagaacttagcactgttcttctagacctcaggcacacatagagatctgcactttgtagttgaagaataccagcttgagttgtttaaaaacaagaaggaaaaaaaaaaacaaactagtcctacactcttttttgttcaaaaagcaatgtgttgttcagtgtcattttaatgcatgtgaggtagtgtatctgaaagcaccttgagaaatcaaatgcattcactgtaaagctgaattgcgaatgtgtgtagaggatgagctgacctggacctggagctagaggctcaccctctgctgtggtttgttgcagacataggtccgacactgctaaatgtgcatgggaagacacggcgctgtttgctaacagtttagagctgagcagcttcaggaaattaggggccaagtctttggtttaattctcatctttaagaagtagtcaagtggtggcgtgcaatccagcagtgaagaggctaaggcaagagagtctcaggttctagaccagcctcggcctcaggagatgcaaaggaggaatagattactcccggtggagccagcagcttttccaggcccttgactggaagatgaagacccccttcctcttgagcagtcctctgctacatgctcggcttttggtgtggtaggagcagactcatctcctgtttatgttgacactttcttttaaaaactaatgtcttggggtggggggaaagttgggggtagaagactgatgtacttggagaatttctagaattttctcccagttataaatgacagtgactcctttaaaagaagagtagctgagcttaactcacctgttagattatcatgtattccaaaaaatcatgtggaggtggcctgcgtagagcggcactctagtctcttcccctgccccgccttttctacctttgctagtgatgccctgttcattgggctgtatcttcaggggagttggtattgggttgacagagtcatctttatttctgttctcaatgatctgtgtcatcaccttgcatgcattaacttgcttcatttgaatctgacatacatctttatgccctcagcatctgctatggccagtactttctgtatttcttgtcagctgctttagcttggtcaagcctggtagcttagttctttggattttgtaggcatgcagaggcctagagcaaggcagttcctagggaacctgtgctcagactgccggaggcagcctaagggtgcctatggctcccatgctgccgtcacctctgaggcagagaggcgagaccttgggatggtcctaacacttggtctactcctaagtcttatgcatagagttccagttttccagcttaggactcaggagtgcttggagtggtggttgttcctgttacctgtgctgatgagcccagcacagtgacccaacttcagtgctgttgcctgtgatcctgttactacggaggctggctcagctcaccctgctccactgccatgtgtttgtgttccatcttgactaggtaatgataactcttcttttagactagctccccaggtgcctcaggaggaccctggatggagtctgggcagtttatcttgataagaaactgacagaagccttgattagaaactgacagaagccgtttaatcccagcacttgggaggcagaggcagaggcaggtggatttctgagttcgaggccagcctggtctacagaatgagttccaggacagccagggctacacagagaaaccctgtctcgggggggaaaaaaaaggaaaggaaaaggaaagaaactgacagaagtcatcttcagagatttgtaccatcaaagatgagttcctgagtattactgggagaaatacttgcctgctgggctgttcataactattgaactagagctcaaagtccgttgcttcagactctccattcatctctctgcacactggcagattgctgccgtgctttctccatcctatgtgatgtgctgagggaagaaggtccttctggaccagcctccgcctccactcacacttcctttgctccatgtatgcctataaatttgagactgtttacccctcctagataataataatctttatttccctggtgcggacaaacaagaacacagtagcagaaccctgcacactgagtggatctgcaaagttgccatctaaggataaaataggcccacttgtcctcggaccatagcatcttgagaagaatagggctgtgtggggtcctgagttattcacctgttttgagagcttggaccccagccctttagaacatggaggaggcacagtcagatgctagcaaggtggtgaaaggaaatacaaagagttctgtgggtggagcttgctcgcttgcttaggtttgtttctgagttcctgaatagcgctttaacatcttgtttttagcgaccttataatttaggactagtgggacttcataaaaatgtcacatacctgagttcccagttttcagcagatataaagtggcacatctcttgttgagtcaggggacactgcaggggctgtagtgctccaggatccttagttcccaagttgtctttggttgctttaagacccatgctgtgttgtgaatgacaagaatgctgatggtcagggccacgggaacctgcttgcttgatctcggtggccagcttcctttatgccacttgaactccatcctgagaagtgtttgctgagaccttgagaaatgaccttcaggaacatgaggattcagaaacctccctgtagctccttatcacctctctctgagggcagaggcagtggctggtgagcaccctgcacacacacacaccccttccttgtagaccctgcacttcttctcgtttgcaatctgattctgtaatgactatcagtggaattgcccgactttgtgtttgcttgataaaagtaaatttgaacattttgtgatggttgatagaactttgtcctaaaacttgctaattcagactctttaaaactctaatgtttataccaaaggttacactgcaggcgtaggtggtacacagagggtgactccctagagtgggcactgtgtgcattgctaaggggacacagtgcccagtgagaccatatgggattttactaaacacgtcagtcatgggtcacactaccactgttgtcaagtatttgttcttaattgttattgtaatatattttcgattgtttttctaatttaattctctctgttgtctgactgtgaactgctaacagtgttaaaaacttgatgtaaataaacgatgcccctggcagggactgtttcctgccatgtctcacaaggtttgcaagttgtgttttgttctaaataaaagctgaaatgatttataggcaaagtgggcttgagttggagtatttctcccaggatactaattgacagggaagcagagcagacctttacaggcaggcattcagtagagggctctaaagtccggaggatggttagtgagcatcctctgatatactctttccggagtgtgagctg

SEQ ID NO: 18322 - DNA, 1202 bp, Mus musculus
ccccctcttattcaaagtcctgctcagcactctcacctttagttcttgtaaaaatggaccatttctgcaacccccacttaccagtacatgtgtactcactcacctgccttaaggctagggaccacctagcccagccatattcaaataactgaaataaaggagtgtggtttggaagtgggatctcaattagcaaaggcagtcacaaagttcaaaagcttaggagttctgctgccacaaaccccagggacagaaatttaacaattaaggtttcttataaagcaagaccacatggtaattaataagcataaaatgcccaatgagacttagattcttgttcaagccaggtgcttccatgctgtccttgaatattcaggaggacagagcgggatgggcacaaagtgagaaccaagtgaactgtaacaggaatactagtgaatccctcccatccaagagccagacacaccgttctccctctcgacaggggatgctggagcgctgagcaggtcttacctgatctaacagaactgaaatccgagaataccctgtggtcacgagtattataggtaggaaagcagagcagggattataagcagaaacttacagttccagaacaaccagcaggtcagtggttagagtgaaatggaaaaatcttaattttgtgaggcaaagcccatgaggaaaacagctctgagaaactgcaacacacacacacatctcagacaggcactgtgcccaaaggactagaaaaacactaaactccaaattagtataataacgagcactacagtggtgaaaaagctccatgactcaagcactccgaagactgaggcaggaggctgtctagtgaatttgagactggctagggatatacagcaagactgtccctgtctttttgagacagtgtctcacacagctaaaaatggtcttgaactcagtacgtaaccctgaagtgactttgctttttcatctttcaagtgctataattacaggcatgtgccagtacacctggctttatctggtgctgggctcagatcctgggcttcttgctaggcaaggactttactgatgcccagccccaagaccctgtttctaagaatgacactggactggacaataaaaacaaggtcagtgcaagtgctgatggttcttcctttgtttttgtaaaataaacatgaccggtacagctaaggaaaagtgaaggg

SEQ ID NO: 18323 - DNA, 1151 bp, Mus musculus
tgagattatgaagccagaaagctcatcaataattgtggttaaaatgtcccttagggctggagagatggctcagtagttaggagccagcattacccttacagagggcttaagttcaattcccacaatccccattagccacctcaccgctggctacaactccacttccaggggatcggactcccttttctggcttctgcaggcagcagccctcagctacagacacccagaactacatacatatatctatatacataattatataaaaagaatttttaaaatggtatgttctagggtttgggagttagatcacttggcagggtgcctaagtgatctaggggaagcaagagtctgagttccaatcccagtacccacataaaagttgggcatagccgggcggtggtggcgcacgcctttaatcccaacacttgggaggcagagacaggcggatttctgagttcgaggccagcctggactacaaagtgagttccaggacagccaagactatacagagaaaccctgtctcgaaaaaaccaaaaaaaaaagttgggcatagctctgcacacctgtcactcactgcactgttggcagagactggtggctccctgaagcctgttagccacagccaaactgatgaacaacaggtccagggacacaccatatcacacacacacacacacacaaaaaaggcatgattaaggaagacacttaatgttgaccccttttgcatgtacacatgaacacccacatgaacacacacacaacacacacagtgttcctttctagtcaagtatggtgttctgtagtctagcacttgggaaacttaaaagatattgtctaggagctcagcctaggctacatagaaagacccagtctcaataaagaatcgtccgtctgtctccaggtttaaccagaaaaggtctgtggcatataacctggacccagcagcagcagtgagcggttaaggctggtggatggttttcctgagatgctccactgtcttttgcatggtctttgatggatgagctcttagaaacaagagacttcattccaagattgcttcttgctattcatatgcctttcctgtcattattaaattaatataacaatccctgggcattagcccaccctattaagcagatttcctgcagatc

SEQ ID NO: 18324 - DNA, 3604 bp, Mus musculus
aagaatggagtactaaagtctgccttaaaatctgccatggcccatgaccccatctcccctgtgctctccgatccacacttggacactgtggaccagcggcttctgaatgtcttggccaccatcaagcagtgtactgaccagtttgggacggatactgtgctggtggaagacaggatgccactctcccacttgtaattctcaacgcaaaacaagtggaactgattttacaaagatagagaaacagcacaatcaattccaaatggcatgcgatggtctgcaggtggccacagtgggtgctggtggcagaagacggtggcggccctgggagtgctcggtgttttctgcagtgcaagctacggaccacagttaggctgcctcacctctcaggcggccagcagcagctctgctcagtctttattcccacaccaaagggcgagcaggtgtgacattggctaaggaagtgtttccagagtgtgcgtctcgggtgacccttgctgtcttttctctacacccatggattctctgaaaatactttgcagttccttgtgtcttaaaaaaacacaaaaacaaaaaccagaactagtcagattgaaaccatactgttcctccagagcggcgttagacaggatagcggtccgcaccgggggccgtgtttaagggagattggaggaggggaaaggcggaaaggtcttgggactctaagctattgggtggcatggatttgacatctcagggaagagaagagggagggactcactctttagaaccaggaagataattgacttagtgaaagacagcttcccctctgtttaggttctcagatatgtccagagcaaattagtcatcccccggttgtgttcatattaaccacaatcatctctagaggaaagagtattacaacccaggcatgatcctctatggacactaacttaccccatgtccacctttgcccaaaaacactgaaactgtgctctctgccacctgccccccacgctttttctttttctctctttggcattgttcattttgaggtagaccatagactctagcccaggctgatctggagcttactgtatagcccaggctttgaactggccttagccttccacatgctaggattataggtatgaaccaacatgcccagctctctcttctctcgtgaagtcataccctgtgagtaactggcctgtaatggcgctcttcctaggacagtggtgaccttgtctgtgccggtgactgcaccctgcaggtaacagtgaaagcttttaagcctctgagcctcgagactggggagattgagtttataccccctagtctctcacattcaaatctagtagcctgtaaccacttttaaatggcttgaaattaggaaacttgtacatttaatgtacactttgcggtagattaaggaatatactgcatatttctttttttaaactcgggatattgaacttcagaaaacaaatattagcacaaaacactaaaatagtgttaacaaaaggagatattgagccaggcagtggtgacacgcacacctttaatcctggcatttgggaggtagaggcagtcagatctctgtgagttcaaggccagcctggtctacagagtaagttctaggaccaaacccaaaaaataaagcaaaaacaaaaggaggtattaagtccagtttccaggctacttgctgtgtacatcaagaaaattcagttgaattctgagattagcatggttattagcactttatgctgggagccagcagagtggtggacttccgtgctgactaagctgtggctcagcattccattgcacactggtgaagtgagtagggattgttcccaggcaagcagccgtactcgtcatgttttctgcggaaaagaacaggcaggaaagctgctccgagcagttagagaaaagccgcctcacactgtgtttcacactcgggcagtaagtattgtaacgccggcctctttttgggtcatttactagattaggactattacatccaaggcactgggggattctggtgggctccaaattagctttactgattgaacatccacagagatggaggcatttaatacaaaaccaggaactccgaatccattgctctttcctcctttgctttcacttcttaagtatatgtgttctgaagttgagatgggagagatttgaatatagaatttttattctcaaactgtttagtcatctaaggcttcattgtacttcggggagagctataagtaactcacctttaaaacaacaggctctgatttgctgaagaggtttggtattttttaaggtatgtctccctgtttgcactcagggttaaagtgtcagactaaatttttagaagaaaacagaaattcaggtgtgtgttcattataggttattcagcaaagtggaccctgacagtttctcggtttccccagtgctgaagacagcattgccatccaaagaaactcacattttctttaaagctatcacactttgtcttcttatcccctgcttcctgttccttcagcctcccttccctttccttcctggatctctgattatcttgtgatcatagcacctgctgtcggcacactcccgtgagtcctgtggtcagggtttcaggataggaggtggaggtttgggttaacgtgggaaaatgttcttgctttgacacaaggaagtactgagtggctgcaccgagaaaggacttggctagtaaggttagaatgtgcatcgcgcatagccgagcagcctgctagcaggtgacacactccgtgggggaggctcttctccccttctttctctagtctgggtggtgaacgggctgacactgctgtcactggttcttaggacctaaggtggtcctcataaactcctgggggaagctgggagcaacttcctgggaagctaatttatttgtctaaagggtggtgtgggcatcaccacccttgtttgatctgccttggatttcctcttggagcttatgtgcagatagaggttgtacttggtaagatttctaatgtgttctatgggtttcaattctgaaaaaaaaataaaagattttaatatatattattgtataatgtcttctggttaatctccccccacccccaaccccatgctttctatgccatttctattcctactgctgttttttagggagagaatgttacatcctttatttctgcttaaccttccatagggactgcttcctgtggttgagagccttagacttccttacgagcttttgaacggcccacatagattgtacctgttacctacaagtcgtcctaggactagtcataggactagtcgtcacgggactagtcacaggactagctgctagtgtttcctggatgttcagtagtttccttcttccttgtagcttcttggagatgaggaattatgagtcctaactaggacttggcagcgcactacactacagacaagaagaaaggaccagtttccctgattagaattcttagaatacccagaatttacatttttgaaatggaaatctagtatctaacccctcagccagacaagtatcgtttagatttcctctccatgtgctgcataagtgtgccagccttgtcattgtatttgaacaagg

SEQ ID NO: 18325 - DNA, 1099 bp, Mus musculus
cccactattgtgccaccttcttacaggctcttgatcctgacgttgagtcagtcacagtgttcataactgcagagtttgcagagtttgatttattagaagcccaacaagaacattgttatcccggaggaatgagccatgcttagcccctccatggttggagcaaagatggacacagcctcgtcagtctctggctgcatttcctctccaatgacctcagcagaaagtcttctcctgagattaaatctgtaaattacatacatctaaaactgaggcagtctattgattggaaatcagtactaatagatttaactcattggccttttaagagaacatacccttcctgtttattgaggcacattcctttctacctggattttaagccatcatgcaaaacctcctgcaaacaagagttactggtattgcttactggaagattggctttagtcagaagaaatcctctgcccgcaatgcttttgaaagacttggatccttttgaaatggatgctgagctgcactgtgcggggcaacagcagtgaggaccactgctgcttgtggggtgacagctagcggtggttggggtgtggctgacaagcctccttttagggcttgcattcattttcttttatattatttcttagaaacgtagtgccatcctggttttatagctgggggtttattgcttcttcaagcctctgaggtacaagaattgctattaaatagtattgatgataaattgcctatgaaccacttcaaaatgacttaagtaccttttggatttgcttctcaaaaatggcttgtgtctaaatttcagtttgagaatcttctgaagagatgtgtacacaccagctcttcagcccagtgaaagcaatttctttttccctatctccagccatagtgtggggaaattgggtcagtgtctcagcgatctgaaggtcagtgttagggcattgaggatgactgggatcacctgcccacctaaccccatgacttgagggccgtgcttgtccctctctccacccactaaatctggcagtcgtaaaggagactacagacatttggatgcttgcaggcctctcatcttagatcttagttctttttc

SEQ ID NO: 18326 - DNA, 1144 bp, Mus musculus
tctaggaattgaaaatataaaaccttttcttgtatgacttcacaaaatgtaccagaacattgtattcagaaagttactgtcggtccccagtgtgaaaaccatgtttgttagtaactgaccaagcattggagagagctctcctaggcaataacacatttaatttttaaaacgaatgttggacttgacatagcttagaattttaaccaaaaataacgcttgactgttgagggtccccacttttacagtggctccgtgtgcaaaggccttgactgacagacacctcctagcaaactgctctttgggtctcatgtaaaatgtctcacattgtgtccttcaagaattgtatactttatcagaagtattttatcaccaagcccattgagcttaactagaaaatactgtctatacagtaattacagtaattagctaaaaaaaagaaattagtccaagagaaaatgaagagccttttctgagtgtttctaatttgaataattcaaagacgtcatgtgacagaaataccttatttgagacttcctagacaagcagggaaaggcacatattgccgtgagagaatgatttttcagataacggtctaagctaacccgtgttgtgttgagtatacgcagacagatccgcagtggccagcggggctacagcgcaggctttccccgtgtgtcttacttttgtcttgcctcttttttttttttttttttaaagcaattccttagtttgttttgctccagaataatgttttaaatagtatgcatactgtttttgagatactgtgaatgagagccccgtggctgttgtagtactactctgtcatgaatatgctaaagccgttacaatgtaggtgaatcaggtctggggagatgggcagctcgcacaggccagcctcacagttttgccaaagagaaagggctgagatgggcgttgtatttggtacacccagctctggacacttacgggtgtgtagaggaagaaccggattcagatttgatcagccaggccctattagcaccatggctcctggctgaaagtaaaactatttttctaccttgagattgctctaaagatcagtcattgctttttaggatgattttagaaaccgtgagagatgcattagagtaggtgagttgttttt

SEQ ID NO: 18327 - DNA, 1220 bp, Mus musculus
ttttcttatacctggatttggaattgagtattcttgaaatgcctatatttgaggaagataaattaggagtttagagagccatagtaatacactgaacgtttcttgttaaaactgtaaccttgttatcaagaactgttatgtgtcataacaaatacaaataataaattaagccctaaaaatctactgtttatatttctaaatacaaaaggaaagaaagagggagggagggagaaaggggggagagagagaggagaagaggaaagaaagagaaaggaaagaaagaaaggaaaggaaaaagaaaagaaaaaaaaagagaaaagaaaagaaaggcaggcaaatcttgcttagcatcaataggtttgcactaatgattcctcaaggagggacgcattctcagtgggcatggttctgttccaaaacaaactctgcaaacaggttgattgtcttttatctcctgaactagaaacataggaagttataaagaaagtttctctttgtttctagtttcattcataagatgaacacagcagagtttaagagcgcaacgttcccaaacgcagggccacggcacctgctggatgatagtgtcatggagccgcacgcaccgtcgcgaggccaggctgagagctctacactttccagtggaatatccataggtgagagactcacccgcacttccagctgctgcaaaatacctcagctgcaaaaccattcatcaaccctagcacagtggttctcaacctcctaacgctgtgaccctttaatacagttccttatgtcatgggaatcctccgctatagaaataattttgttgctgcttttgctagttaatgaattttaatatggatatctgatatgtgacccctgcaaagggttgttagacacccccaccaagggcttgagaccactgccctagtataaacaaaaaattttggtttaaaacaaaggtacaattaaatataagatgatgataattttaaaactattaatggttttgactctaaagaagacttttgaggactttgagaaaagaccagagactactttaattggttggttaactgcatgcaatttggatatggaagagaagaaaggaaagagtcaaatgggattccaagtgccttgacttcagcacccagttggctggtggtgatcttagcacacaaaagactgggagagaatcgatgctgactgctgacatacatattgaagaggtggat

SEQ ID NO: 18328 - DNA, 1186 bp, Mus musculus
gtctgccaaaaggctataatgttagcagcatataaaatttttaacaaatatttttctgttttagtaaaaacaatgcattaaaatgtaagcaggtcatggacttagtgagagagtggaagctgtcaaaagtatgttagaataacataggcactctgttagaagcacaatgcagctgcctgtcagtgtgtgtctgttgttctcatcttgagtatcttaggacgtcgtaaggtcaggtttccattgggaccagggaaggcaaagaggaaagttgttttggcatttgcttctatggaagcagaaaatagcttctgtctttatccctaatctcattagaggtggtcatcagggaggagggaaggaaggcttgaatacattagagaagagggccttaccctgttaggttgtatagtttcaggggtttatttttgtttttaataaaaatgcagacatgatggaatcccatccatggtggcgacttctgtatagccttatagttgggtacaatggatgccctatctctttctagctttcactttgaacacagagctacctcactaacagtcagccttctcacagacaccctctgtcctgtcgcttccctccctcaatctttaggatcccactgttttctgtcctcccttggtctctgtctacatgctggtctatattggccttttctctgcttctgtctataggtatccctacatcatcacccttagaacagtccttttaagagtgttggaacctacaagacgtaagagaagctgtgactcctgtgaattgagtcattctctcatagggtaggtggtcatcagctgtggggtttgccctccttgtgcttctgaaataaatgcaactggaaattgatcttgataggtaatgattcacagtgagtccatgcctgttctgaaattcattttagcaaagattacgattgttttatatatttgaagattgtctttcctggatgtgcttaaaatggcaagtgagcatattagagcaaatattaatggttcagggctgaggtgagtacttacacggcacacccagccggccctgtctgttcttacgctagaccctcccaaagggttgtttgagtggctgactcacttgagcttggggtgtttgtgtgagattcattagtgcaggattctgtgtgaccaaggcgtcagtataaataagacag

SEQ ID NO: 18329 - DNA, 1139 bp, Mus musculus
ttcaacattggctttcatatttctggctttatattagcatttctccacctaagcagcctgctctactcagcttttctacatcttttattacatagtgttcttagttcctcagtttgtgtgtgtgtgtgtgcgcgagaggaagcatgctcatgtggtgtgcccatgtgcgtgtggacaccagtggttgatacaggtgtgtctttcttcattttccagcttatttttgagagattctaccactgaatctggaattgattaaaatgtagctactctgattggccagcaaactatgaatcctcttatctctgtgcactgcccagccctggggttgtaggagtgtacactctacctagattttacatggatgttgagactcctagttagatctgtatgtttctatagcagacatttgaccagccaactatcctgtcaaccccagagttcctctgtctttaaaggcttatctactttgtgtggcccgggctgtgaaacgatgtttaaaggctgtgttttcttccatcttgtcagaagagtagcagctctgagtcactaagcgagaagggctctgaattgaagaaaagctttgatgctgtggtgtttgatgttcttaaggttacgccagaagaatacgcggtgagctttctgtctcttgctttccagttttgcatttaatttatatacagcatctttattgaattagaatttgtggcctcacagatctcctcagaagaggagatgggtttttaaggctggatctaggaattgttagagaataacacaagaatggagcattaggggtgaggggtgaggggtgaggggtgagggggcgagggcagctttcttctgaagggcagctgcctgttacccggtcaatgtggagcagagagatgataacttgatcactgctgtgctgactcaccaaacaaatatgaacatgctcactatttttttttaatgatttgaaatttaaaaattgagaactctgatttaccaaccattggaatatgagtgatataaaattatctagagaatctttttaactgacataagtgttcattgattacattgcttttttggtcttacaccatcttacattctaagagtaaaatattcttgcttggagtacgtggtacctttcc

SEQ ID NO: 18330 - DNA, 1177 bp, Mus musculus
tcaaagcctcatatctggggtcaggcagaacatcccctggcctttggctggcctagaggctatggtcagtctagtctgcctctgcctgtgctctagtctcatcatgagatggaggtggaaggtgactgtcagggacatgctgcattcaccacctcagccaagtctagagaggactcttaaagtctgaggcagaagtggcttggagggaggagggatctccacgcccttcagaagagggagggatggcttctagccttgggttttctcttgaaggaaatgcagcaggatatggacgaaaagatggatgttttaattaataatcagaagaacaacaagctgtaagtatcctcctcctccctaaagactcctcccttcactttgctcagtgcacaggggtcttagagagggcacccctcaaggaactatcttggcttctgccattaacaatggctggaagctaagatcttctgtgcccatgtgtactggtagaaacagtctccccaaatttctgcctcccccctcccaacccaccagtccctttcaaaaccaagccaaggagcagcagaaattctggcagctaggaaagatggacaaaggctcccaagccatgatcacagaagaacccgatggagcaccattggcttgtgacaagaatgtggtgccaccaaaaccaacgaggaatccactggagtccctccatccatgtcagagttgctgcgtaagtgaactcctgcccaccttcagcacgggttctggagccctgggctgctcctgccctgacttcatctcaagagcccttgcctcaccctattgccagcccttgggatgcagcccttagtctagaaaccgtctgtagttgcctcaccctctaggctatggtgagtcttaagccacaattgttcagtcaacccttggaagtgcctgctcccaagttctgctcagttactctgtgctttcctctagcaaagcctgatgaggtaccctgcaggctggctaacttgaaccaggaaaaaaaaatgatctttcttgtgccgtttctgtcctctgcaggagaaatgtttgttgtgtgccctaaagaccaaccgcaatcaggggtaggtagatccataggagaagtgccttctctcagttgggtgtcttgttatcatcccaaagggagtgtgcttcaacttccttt

SEQ ID NO: 18331 - DNA, 1684 bp, Mus musculus
tagactagccatgtcactaactcaattcagcaactctccagcccatctcacggctttctcagccgtgttacttattctcagcaacgttggggactgtcttctgaagacagatcaagcaagttcaaaggacattctgctctatagcacttgacttttcctagtcagtaacttgaactttcctgcttgcctcagcagtaaaagtcaccttcctaccccatacctggcatacctttttaaattattattattattattattattattaatttaaaggacttttttctttctttcttttttttttggttggtttggtttggtttgggggattttttttttggttttttggtttttttgagacaggatttctctgtgtagcccaggctgttctagaactattctgtagaccaggttggcctcgaactcaagagttccacctgcctctgcctccagagtcctgggattaaaggtgtgtgctgccactgcctgaccatacatgtttcttaaagcaagtaatgtttaggcccattttctgtttgaataattgttatcagttcttctagaacattctcctgtcactgatccatctaggaaagcacttgagctttgaaaggacaagggtggtgaaatttgcatgagagagaataaatttctttcagaaagatcctgaggaagacacatgatccaatcgcttgttgctcagaagttcaaggaaacaagtggagtggcgtcccctggctctttctaggatgagtgtgtgtgtgtgtgtgtgtgtgtgtgtgtgtgtgtgtgtgtgtgtgtgtgaaggcagctcctgagacaacatgtaacatgcctacagaaataccactcttaggacactcctttaaaaaaaatgttaatctactttgtaaaccagtaactcccagactttcttgaggctttgtttttgtttggttggtttttagattttaaaacattctattcactttgaaatgtactatatgtgttatatgtatatataagttatagtgacttgaactctgtttggcataggctgagaactattgttggtagcatagagtgtacagagcagccgctgactgtcaccatctgagagcaggatacagaagggagtttggttcctcagcagtgaatgcccaggtgcttgagcaatggcccagccagcctcagtgaggacggcaagccacccaaggagaggagaagagaaactgacccgctgtcccagcacacaggtttaattttgtactctttcatttctttatcaaatgacctcattattccctaaaaagtcttggaactgaaaaccagactgaactgtcggtgcagtggcatttccacagctgtgcttcgggggttctgtcctctgtgtgtggtgcaagtatttagaattaatagcatggatatgtcatgtccaaaccctcaagggaaaattaccaatttccacttaaccaacagatgaaatgctagttaactcaatgcccactatcctgcagaaaagctacagtcagtagtaaagggtggggttggctggtgctgatactccttagtcgtatagaccaactcaagcaacagcagcattatttactgggtcacacctgggaggaacttagcttccaaatttggtttttgcttttcatctccagggccttaataagagtgtgttaatacacatgactattttaca

SEQ ID NO: 18332 - DNA, 2248 bp, Mus musculus
tgatggccttggtgacacagactgtgggaggaggcagaaggaagttgcccagctctcctatcccagccctttaaccctccaggtttacagaatgttatttcaaatggcagtgtggtgagaaactcctaaatgaagaaaggaaccttgtctttcagggcttaaagcaaagacttgaagtttgatgcttttcccagtgtctctatgtacatagggaacttagttctgggccgtgtacagaaataccactgtaatataccaaaaggaagttaataatgtagattacctttttaattattactattttattattgtttttctcttattgaaagcactgcagttgttagtggaggaaaagtaggagccaagtgtgagtgaggaataagcctattggttcagtaggtagagttcatgtattagataggagcacatggagtacgataggaccttgtcggaatggatttttttcagggattcatctgccagtttaaaagccccaccatagtccttaccattaggaaaacttgcaaataccaagatacatacaaaacagtaatttatgccactgatcaaccaagatgcttctaacagactgtaacctgctttggagagccgccgtttcagaagacacagataaaagtggttgactgtaccaaaactagactaggaatgatttctcttgaactcctgtcaatatttatttcctccatctataatggacagttagatgtgggattttttgattttactccaactttttttaaagtgctctttagagctgacagatttgtaagtaccgtgtctctatctactgtcttcatgttcacttgtccactgccctttcctcccaggctgggagcggtcagcaccaacaggactcactctcccctggagagtggccattcaagtagaccactcataagccatctgactaaataccctttttccacacagaaaagggctaactatacagcagagcaggaatctctgaatatcccactaaacgttctcttcctatttgtcagttgtatttttccttaggataaaggttttatccactatattagcaaatctgtgggcagggtaacccgtcaccacttaacatgaattgcttcctctttctatttatcctctccataaaattttggaagctatctaaaactgagacatgccccttaaaaatgatgattaatcttgctagagaaaggatgacacattctggttgtcattccacactcatggtagactcagcaagactgacctagattatcattaatgactttgatataggacagaaaatctgtggttttctccagagtgtgacatgtcatctggaaatctggaatgcaggcttgattaccagagatatggaaagttagatgcaggttaagcaaatattttatatatatataaatatatatatatacatatattcacacatgtacatacaatgtgcacatcaaaaatggtcatatcttctgtgctgtcagatatacagagataaatgtttaaaagggtcttgaatctctttaagcaagatctacacagttttacaagggaaaaaaacatttctcgaataagtcaaagtttcattttgttttttaagttataaacttcaagaatttttttctaagtaaaggacgaggggggagacataacggagccatatgcatggagtatgtgtttctacataacagaaaacttacgaggaaacgagagaacatgtatagttccctcctatttgaagcccaggtgtagataccaaggcctccttccccccaagtcccaggggtgcattccaagcctcacttgctcctcagttgacctttgggtctgaccttgtacttcagccacctcaccagagccctcagcctacaacctgtgaaagggtttcttcataactcttaaaagcaggagaatcccactatgcttagaacttcaggctccacgcccacttgagccttctcctgaccctcagcagttcttttacatcttatctcttccctccaagctaaggtcacagtgtggttaaaattacttcccaagaaagaaggttattgattcttcagtaatgccctgtattggagcggggggggggggggggggtaaacatagatcttttcatgtttgtagcctagcagtgtttccttcattcttcaaaatccttcagtactaccacacaaaacctagtcaaatatcagtgttggtggccagaagtatataatgtggataatgtcttgctttgaggtag

SEQ ID NO: 18333 - DNA, 1172 bp, Mus musculus
tcaagtgttagatggctaagtattaaaagcacccagattaaatccttagcaatcagaacacttgcctcactagattttgccaactgcaaatcatgttggactgagtacctgttcttctttctgagactgttaaggtaaataattaacaataaagcctccttaaaaaggaaaaaaagaagaaagaaatgagatctcagtatattgccaacattggcttttaactactcaggctcaacagaccctcccgcttaagcttcccaagtagctgagacttagggtgtgtgcccctttgcctgggtcatcattatgatttggtagcaattgctttctttcttttcttttcttttttaacattatgaaaaagacctctaaaagtattccattttgttatttaaaattaataatctaatttactttttaaaagaataacattttcttcccttcattttaatattctgtgtggacaagcctaaaattttgttgtttgatgtgtaggtttttgtttgaacaaatatcttttttcttgtacaaatctttaaggagttctgaattactggattatgcgataattcagttttcttagacttaacaggactgtgaaaccgaagcagaaaaaaaacaaaacaaaacggtgaagtctttgttctattacttagttatttttcaattcctttaaaaatatatagggctgtgtgaagttatactttaggataattaacatcctgaggaatttaagaaggcattctagaacagtagagattattgctcacaaattataccatcatggagagagatcatattaccaatagactgattcttgagtttctaacaaaacgtgttgctagggtttatattgataaagatgattatgactaatagcttatgtgaactgtgttttcagccactcagagtttattgctcttagtttttacaataccacatgctgttatttctggtttgcacttgagaaaagagaggtatataaaaggttactaaactagtgaaacttagatttaaaccctggtttgcctccagagcctcccttattcttgtttcccgtattctgtactaggaggtagaagatgtgattcgtggctccaacagttgtctagttgagatgttgggtctcaaggtttttgtgtgtgtgtgtgtgtgtgtgtgtgtgtgtgtgt

SEQ ID NO: 18334 - DNA, 1192 bp, Mus musculus
ctttttctcagataatcccaggggtgccaagataacagctttgatgatattacatgtgcatatttgtagaatgagaatattgctataaaaacaattgtaaataaatttctcttaatatttaaaagtgaaaaagagctttattatgaaagacatcctttttttttgtagagcaaagggccacctctgttctgattttggattttctgaattaatgtggcagatttctgacttaatcaggcagattctggactaggcagtcgttctgtcttctgaagttgtctagttcatccagtctccttttggttttggctgtctttgtgatatctcaggtcaggctatggggacccctatcagaggtaccacactccgacaccgagggatgagtatgcttatggaaattactactaccacggacatccacagctgctgccggaagaaagaggtatgaagtaacctccagaagaagcctttggggactagagacgcacgggcagccggctgccagggccactagcaccatgtttggagaccctgccctttgataatactgagactacccctatgatgcttgttctgtggatagtgcatacttcatccatattttcctctgattctttcctgtggcaaaggttctatttactgtttatgtaactgaaaagtcagttcttaagccattcaggtgtgctgagctgtaatgtgaatgcagcagtcacttcattctgggcacagcagatgaacagcaatgggatgctcatgcctaagacctccacaggatagggtatcgtgctatgacagtttatgactagctaccatagagaatctgtttcatcatggaaagcacacacacacacacacacacacacacacacacacacacacacacagctgttgtgaaactatttaaagccaagtaaactagttcagagcatcttgggggctctcattgttagcccttgcccatcaaccaactcaatgtggcaaatacattctcatacctactgtattgcagtagcccagcttcacagctcgctaatacccatcttaaaggacttgcagaggcagcaagtgacctgcctctgttttgctttctctgagggtgcagtggcaaggcaagggagtccttatatctggcatgaagatcatggagaccagaggtacttcggcgagcatcatcgggagaagcacaatggta

SEQ ID NO: 18335 - DNA, 1282 bp, Mus musculus
actaatttttcatacaatgctttaattgaaagaaggaatgaacatctggtttcttccagttcttttgcattataccagatagtaggtatttgtgtttggtttttcagtagtacatacagaaaagcaccattaaattctttgttttaaagcaactctgtaaaagtcttccttttggtttccccattaggtgctagaattggtataaagagtttcctgaagtcaaactgtgtttgatcctcccaaaagccatctgcagctgatgatgagaagaaaaagaaatggcatgtaatgtctcccccaacatcatttggatttgttttaagtaccttttccctcctttatgcctttgggacactgggaatatccagagaattcgccaccatcagtgtaactatgaactttgctgttggcagtgtggctaatttttgtgatagggaaacaaattcttttaaataaaaataataaacaacaacaacaaaaagtttattgagccacagctgagctaggaacacctttttgtcagatggggtgagagtcttttgaagaagttgcacttatgggttatacagaatgttctggctggggctggagagaggctcagagaataagagcactggtcgctcctacagaggatctgggttcagtccccagcacctacgtagcagctcactgctgcttatgattccagtaggagatctgacgtcctcttctgggctccttaagcaccaggcatgcatgtggtgcacattcaaagatccagatacaacgctcacacataaatgaaaataaatcttattttaaaaggaagaaaaatgtactggtgagtaattttatcgttgtgtttctcaacccttttggaatatcaacataaacaaaagataaaatgtgtagattccttccagggaccttaatgtttacaatttaaaaaaaataataagaattcctttttctataccctgattagatgatcaccatcagaccttatctggtcagagatctaagagtttgacttgagatcaagtaaacaggaaaggactgtccttacaactctggttctctttgcaccaagaatccctcagttatactggccaagactgatcactgactgagaagaggtcaaccaaccttttctataaaagaacatataggaaatacttcaggctttgctggccatatggtctcttataactgttagagaactgttagctctgccagggtatcagggatgtagctactatcgttagtagacaaatgggcatggctagaaaataggtggaatttc

SEQ ID NO: 18336 - DNA, 1212 bp, Mus musculus
cctgctgctcttgtagagaacccaagtttgcttcctaggacccacagatgagctcacaactacttagaaccccaattccaaagaatctgacattctattttaacatccaaggcccaaggcatggatgtggtacacagacatatgtgcaggagaaacacctatacatataaataaatccttaaaaaaatcagaagttaccatctgtcaccagtgaatgttaaaatcagtaaatgtccatttgtgaagatgtaggaagtatactccaacagagatgctggtgttagggatgagtgccctgaacatcttcaagataggaagcagttagtgccaccttggatgcctttaaatagaagtgatgtttttgctcattaatactgtttttacatgcctacacttttaatctcaagctctctatattatatgagttgatcatgttagtttccatgtttagaaaatatagaactgtttggttatcaaagggatatggctttttagaaataaattattttaagatagtgctttttttttttttttaaagaaagtttaccatgtagcacaaaccaaactcagttttactctgtagtcacaagtagccctgagcttctgatcatcctgtcgccccaccccggggctgctgggatataatcatgtgtcccccctcccagttttaagtggtgctaaagtgctagggaagaaaacctagggctctgtgcatgctaggcaagacacttatcaactgaactacatctgtaaccccttagttagattttttttttcctttttcttgaaaatcatagctttctaaagttgacttagtctctgcaggacattgagatcaaattaataatgctattccttgtaaaaatataacacttaaattatgttttaccttaatctttatttcaggggttttgtagggtttcttacacaacttgtctttattcccatttgtcaactaatgtgaataaaaaattgaagtttgtattactttgtagaattattgtaaattgacctgatattaaaaacaaattaagaaagcaaagctagatatggtggcacacttctgtcatcttggtgcttgggaagtaggaggcagggagtcatgaattcaggctcattctcaacagcagagtgcagtctagaccacccacactacctgaaatgaaatatggaacccagctacagcttttagaaagaagaaagaacacagga

SEQ ID NO: 18337 - DNA, 1745 bp, Mus musculus
taataagacctatttcaagaaataaatgtaaggacgattggctgcttagacattccttgactagatctgcttaccacattaattaaagaccttagcactagacccagatccatgaatctaaagtttactaatttaatttttttctaactaaaatgttctcctttcattatgtatccataccataacttgcaggggtttgtagaatttttaaatgtgaagaaaaatacttttaaaaaaaatcaacaatctggaaaacttaactactcaaattgatcattttctctggaaatctcactgccatgttagtccttgccatttggcagaccctcctttgtgtaccatggtagttttatcaggatgtgcctgggcatgctatttgggttgtatactctagcatcccttctctctgctcaacttcctaccacttacaacccaagaatgtctttccatgcctcagtttttccattgtagcgtgttttctttttcacagaaagccttcctacgacacggaggcagaccctagtgagggattaatgaatgttctaaagaaaatttatgaagacggagacgatgatatgaagcgaaccattaataaagcgtgggtggaatccagagagaagcaagccagagaagacacggaattttgaggcttttaaaagtccgtatgggaactgtgatgtggaatgctcgtgttccagtaaggggatgttgttgaactgcacatatttgttcatgtgggtatgtagttttgacagataaatatttacaccgccttttaagtaaagatagcagattctccatttcttactggaggatttgatttaaataaataagcttattaaactgtttccttcattagcaccccagacatttcgtttcagaaaaggctatatggcactcttactgaaaatgtaaaaaggaagtcttgcataatgaaaatgttatgtcacagacttttgttctggctgggagatagaatacagaagtgtttgtctgtagttgacattagatcccagtaatgtaaacaataaagcaaaatttttgcataaaattcaaatttgtgcaaagttactacagagctgttccattattaccatgtgttaccatatactgctaattgatttaagtatacttatgaatataaaattaaacaaaatacaaaggacaaaaatagacaaacatcgtgttgataagtactatcatggttcagatggcttaaaaataaccatgacgcgaaaacttgaaaacgcccatttattcctttgttcaataaagttggagttttacttaaaagatgagttctgcaatctgttttgagtgtattcaaagttaagctttgtcactgtactcgagtaagtttcagaaagccgtaagggcttagcaatggcttagctgttaaatgataggctcaccatcaaaaagaaagcaattagatgcctagaaaaaaagccagtcgatcacaacaactaccattaaggattaggtaaaagtcagaacttacaattaatgtatagaaagggtagctggaagtgtattgagctgtgaagtaagcagactggtaaacacatgaacttattgcatgcaggagatttggcgtttgtagggagatgaagcattaatgatagcagtgtaataagacagccatatgctcacacttacagcatctaagatctcactgtcaaaaataaagttatgcaagtacttaaagagatggaattccattatgacctaggactggggaagaa

SEQ ID NO: 18338 - DNA, 1201 bp, Mus musculus
cgcctccagaaacccaaggcccacttaaagccattgttctacttaggagccttcctcccttaacaaatccgtccttttttgatggtagttgtgcttctttgggggcgctcctttgttctttcccgatacctcagagctgccgaagacaagatggcggcctggcaactccgcatcgcaccagcggaagcagcccttctcgagacacttcctatcgggtccccaaacctttgaaggttagttccggggctaggtctggccgcggttgcgagctgcgactgcgcagcccggttctgccggcgcggaacgacgtctcaatcgctggggcggaaggaagtggctggacgcctcctgagcattcgatcgctcgcgagaattgagcgttgctaggcaaccagcctgggggcgggactagactcggaggggcggggccttgggaggctccggtggagccttgcgaaggttccagagccgtctcgtgcggagggcgggccgccgtgtcgcgccgggtctgtggagctcgctgccggcgctgcgacgctcgtgggtggcgtgttcggcttttcctgtctgcttcggtgcaccgctgcagctccggcctcgggtctgacgcgcgacggcatggcttccgttttggaagaggtaggggtcggcctggacccaccggctcgcgccgccgggcggcggctgctttcccggggctgatgtcctcggctctgcccccgtcgcgggcccgcggcctctacgccgccgcctgcctgggcctgagtgtcccggccgcggctggaaggtcgggggtgtgtctggatcccaatttttggcgcggttcgtggtaggctcgcgggtggcggtcccctctctccattgcctgaggtcttctcggctcccggttcctggccagggatcagaaaccttcctgcaaagctctgagctccgggccgggggccatgggaaggaattcccatgcccgcatgactagtcatggtcaccgctttcattttataggtggttatacatacattctctgtattatttctaaacgccctggacagtgcttatggtttcagtttttatttagcagtgccagtggcggacctgcaggccttacacacgctaggcaagctctctaccgttccggtatacccccagtctttatgtataaaagcaatttttaaaaagttactgggaattgagcagtaggtac

SEQ ID NO: 18339 - DNA, 1114 bp, Mus musculus
cttcagatgaaacagtgatgaggcaatgggtaatgacaaacttgttaaggccaacacctatgctctgtacctttttaaaggatgtgatgttgccaaggaagttgaggagatcttcccagcaccttagtgttgggcaactttcttaacttactccttaactcccaaacggtgtctcacacctgggaataaagagaaacaagtacatttttcacattttggattgactaaacctttatagaaattcttaactcatggactggaagggtagctgttaaaaaaatggtgcaaatatttttttcaattatatttgacatatctgtataaatagcccttgcaagaaattctttggaaagaacaaaactaatttttccattttctaagctactctaatccctttatagcaaccaaacaactgtcaatcatgtacagtaacatttgtttatattcatctttagcttcattgttattcatactgtttccaaagtatcttcaagtatggagtgccaccatggttctcctctgtgccatatattgtagtaacccactctgagagagacctctcaacccctgccttcatgttgctcatgaccaatccttcctctaagatcatttctgagttctagtaagtgtaatttctttattctctagatatctgtatcatctacaggtcataaaactgatgctgttttttgatatgtcacacttaccacacaatgctttccatatagaaatttgtttttctctgatagctttcttcagaagattcgtttcttcttaccaaaagggcaataagccagcactcctgatatctctgttgactttaacattccctacatagtggtttagataagctatttttttcatgtaaaatataatggcttgaacattaaatcatttctgtcaatcatttagtgcagctacttagctttattggtactgtgtgttttgagaccagaaagcctggccagctaaattaaggtgcatttttgtggacttctaaataccacccacagatctttttaacttctgaaaataaatacattccacagaataccgaagttgcaaattttccataagtggtaaatgagagaaacagaatggctctagatcaagt

SEQ ID NO: 18340 - DNA, 1240 bp, Mus musculus
tgaaactgttctctgaggatcctacactattaatatatagttttaaatctcaatcactggactgttttcctcctcccatttaaataatgaaaatttaataaaactaatttatttcctctgtcttcattactaatttggttcatagaaaaaattcttaacatcctattgtttgtgttttagaatcttaaactacttttcattgtttttctcctgacattgcttattgttacccccatttgctgttttcctttaccctagaaactaggttccttatgagttacatgagatccccgatgctctctgccctccctgcccaattccaagccagggtaggatgattttagtgtatgtatagatacattggctgagcagtcctgcctactaagacttattacccaaattctgaagggaaaaatatctctggttaggaagtggtccttgtagcaattttcatcctttattcactttgtcctcctgatgagaagagtgaatctctcagaagcttctaactgccatgaaatatatacccagcagcctagttttaaaggctttgttgaatgtttgtcatagtccacggagtctatatgtcctgtgagggtttgacggagactgcctccctctgagagatgtggttcctgatatcacgttgttctttcattgagttccccaagtttatgggattgaagaagtaagtcagagagtaatgctttgcttagttatggtgctgagtacagtgccaggaatttacaacagtgaacttttgttccttttgttgcaggtcatccttgggattgttgatgttcattatttcaaaactaggatatgtacagcctctattacaggagtcaattataaatccttggttctttattctgttttattttctataatgaattatagtgtgaaatatatttttaaatacagaaacaaaaatatgaaataatatagttatacataagtttcctccccattttctcctctttatttcccacactccacagtactattttctagctctgtgtatggaaaggatacataattcacacttatatacattccttcttcatatgatttttctatctataggggctaaactgccccattcttttatcacctctttaaaaacatattctgttggtagacataccaattcctaatcttgtgacaacaaataataataatggcaatagccctgaccacataccattttacagacattctgagcttgttagagcaaatt

SEQ ID NO: 18341 - DNA, 1215 bp, Mus musculus
tattcagtttcactgagctgtgttattgtgaccaaccaaagatgctttctctccaaaatgaatagaagacaatactatggtgttggactttttaaaattaaaatttttattaggaaaactgattgctgaaaaaggcaaattcattttctctagggatgagacccttggtaggttatgcaatcccaagtggtcaaccctaaacacatgtatataagcaacagtaaatgcactcagtagcttctatgaatgtgtacgtgtgggttggaaggaggagagacaggggtgggaatgataccaacatagcacttacatttgatattctaggaaaaaaaacccttaaaaaacgtaaagtagaagtagagtggagataatatctatcttatagtgttgtttagttgttaactcatttagtcattcgacaaacattaaatgcttcttcagtgacataaattgatttaggctctgtcctaagtgtaggtttaatgttaaattatcataatattttcttgatatctctataaaattgctgccatattggctgagggttttttggctcaacttaatttagaaatgatgagaagggagagaagtagtgtagctctgaccattggctctcagcagctggtgggtgttaacagttttccaagctgctcttggcaggacctctgagcaaacagtagctggaggcagtggttgccagaagcttttggcagccctccactgcttgagtagtaaccgctggcagctctggatcttctccagcagctttgctggaacactcccaggcagcacagagtttgatagtctctggatgctaggcattctgtaggcctgtacctcttggtagtaatattgtcagataagctcattctgctcaaggtacaaaggatgaatggtggatccgatgtagcttgataggtagagtgcttgatagcatgcaggaagccatgggtttgagccatgttgaccaagcatgttgtcatctatccatcattccagcactcagaaggtagatgtacgagaaccatgagttcaaggtcattcttgtttatatagcaggttccagatcatcctgggctacatggaaccctggcacaaacaaagagttggcaagaaaaccactccagcaaggctttattagggcctatgctgatgggacagagcagggatacattttctagactggtctgaaaaggatataaagaaaataaaatt

SEQ ID NO: 18342 - DNA, 1208 bp, Mus musculus
tttttttaccttgttaaacttctgggcttaaaggctttccctgtcttaaacctgggaggctgagaagctgagattacagggatctcttctcctccccctcccctccctgtccccctcccctctccttcttttccctccctctcccctcccctccccctccccctcctactctccttttccctctcccttgtccatctctgtcctgtgtatgtgtgtgtgttaatttgtttctagtcatacatttacttttctccctctctatattgaaacaaaaacttgtagtatttcttaacaaaatagagagttgagtcgaggtaaatctgtctggttgaggtacagctgggttgtgtttttcaggtaacagtattctgttagtctgaaagttaagagcagagagagtgcatttctttgagtggcctagtccaagaagatagccttccacatttggagataatttgcttgccgggattctttttcatatgaaccatttaaaaaagattcttagtttagttttagtttgtttttaatcaggttctactttttcttttgttactctttagttgttccaggtggatgtgggcagagaggtttgcagaactgaaatggaggtcagagcttcgttccagaaggttagtgggtcatctgattctgtggccacactgaacagtgaagaatttgttttggtttctcagcacacagatgccacttctataaaggatgatgggaagccacagctgaaggtattgtttcttcttttttctaatatggcactgtttttcatgaatttctttctcccttctaactatttggagctcatctggggataagcactgaaggatttcttaaagtactgacctggataataaaagtcagggtttggttgactctttcagacgaccttgtagtaataaaaatacttaatgttttattaatccagaggctaattatttggcttgatttttaaaaagtttttttccctcaattatcttttggttatttaccttctgataaattcttggaggaagaaatagttgggaaatagagaaaaagtaatatgtgaattaaacttactgattaattcttacataaatttatttgactgtttctttttcttctgggttttaattgaaagatttttctgttatgtagttttagctttaaattatgtgtaagagtctggtagacagtttaacagttgactaattagt

SEQ ID NO: 18343 - DNA, 1202 bp, Mus musculus
cagccagggctgcacagttgagcgagaccctgtctcggggtaataaagggataaggttctttttggggggagggggcagagtgatgaagaaaattttcaatttagttgctatagttattcaactgtaaatttactaatactgtagatcattgaattatatatgcaatctagttaattatatagtatttgaattcttttaataaggcttttatggaaataataatggataatatatgcaagtaaaagtttgaaaacatttagcaaatttagtagttttaatgttgtaagcacctatactataagtgggtaagttgtactcagcaaaatgtttaatataaataagtggaacattcaaatatttcttttgttctccagatccctgagcaacagcccattactttgtgtagtggggttgaagatacaaagcattatgaggaagccaagaaatgtgtagaagaattagcattgtacctgaagccactcagcagtgcgagaggtaaatgtagttataaaacccatgctaaacaagtagctgtttgctaatttgttttttgagacaggatttcactatgtagccctggttggcccagaactctatgtagaccaggctggcctcattcacagagatctacctgcctctactttcaagtgctagaattaaaggtgtgccccattcatacttggctgaatacctgttatagatacttgtagtaccaaaataattgagctacaaatgaatacaaatgtatgaaacctttttctctgtctcgtccctttctctctcttctcttccatttctactttttcccctacttagttttcagtgctaggcaagtgttctactactatacagtagtagatttaggatttatatagtactactatctatgcagcttgtcctagtgaatgctaatagaatttattcattataagctgtactggctagctttgtgtcaatttgacacaggctgagttatcacagagaaaggagcttcagttgaggaaatgcctccatgagatacaactgtaaggcgttttctcaattagtgatcaaggcgggaggtccctttgtgggtagtgccatctctgggctggtagtcttgggttctttaagaaagcaagctgagcaagccagtaagaaacacccctccatggcccctgcatcagctcctgcttcctgatctgcttaagttccagtcctg

SEQ ID NO: 18344 - DNA, 1195 bp, Mus musculus
tagtgttctgaatgccataatgagtgatatttatctatatatgtttgctttactttttaaatgttattgttatatggttttatttacctaattacttgtttgttaattttgatgttttgagacaaggtttctctgtgttgctctgactgccctggaactcactctgtagaccaggctggccttgaactcagagatctagctacccttgcctctcaagtgctaggtgtggatatccaaactgttggtttattatttactttaaatatgctaatgagaccgagaactagcccataaagaagccactccagaggaagtgctcctggatcataaaattgcactgtaaacctagaaatagcttccttgttctctcctccaggtgtgggtctaaatagcactactcagagtgttctgagtcgcccaatgcagaggaaacttgtgactctggttcattgccagctagtggaagaagaaggcaggatccgtgctatgagggctgctcgatctttaggtgaacgcacagttacagagctcattctccagcaccagaatcctcagcaactctcttctaatctctgggcagcagtcagagctaggggctgccagttccttggaccaggtatgtaattaaagtttgttgctttggctgcttacttactcttgctgggtattctaaaagtatagagaaaaatccttagaaatatacaaaccctcatcttttgttaaattctgtttcaagcattgttctacttgacaaccttggcttcatactttttcagagaattcacagtcttttctcttgatgaccaaagtttattccttttattagtcattaaaagtgtttttctctgtattaattatttatcgacttaatatatgacagaattgcccacaaatatggctttaaaatgtaattataaatatgttatattgtttggggttttgttgttattgttggtttggttttggtttgtttgtctgtctgtttttgaaacagggttttgttgtgtagccctggctatcctggaattcaatctgtacatcaggctggcctctagttcagagtgctgggattaaagatgtgcactaccatgtctggttcatggtattgcttgttaatggcatagtattatgttgctcttcagacaatgtgtttagttcatctttgttcaccatacattttgattgtaccattttt

SEQ ID NO: 18345 - DNA, 1194 bp, Mus musculus
caaatattttaagctacgggtcttttgggatgttaggggctgtaggggggaggagtctcactacctgtcccttcctcccaagtgcttgtctctaccatgcctgtttgttttaactcttagttcagttttctaatatgtatatgcaggttgtgttctgctataacctatacgtatagagtaggaagcttgtcagttttagtttatcatctatgctacagtgtggatgaggagttagaatcaatatttggaagctatttatgtagttatttttattttggctgtttgagacagtctcattgtgtagctagccttggttggcctggaaccaatctaacctaaaactgataaagaccagctgcttctgccttctgcttgaactaaaggcatgtgctctactccagcctcatgtttttctacagtgctaaataataagccctattgattggattttatttagagtaattgcttttctctttctataaattccaactattttttcatgtaatttacagtgatgtaccaaatggatcagccttgacacaagagaatctcagcctcctatcaaacaagaccagctctttgaatctgtcagaagactctgagggaggaggagataacaatgattcccagagatcaggagttgtttccaattctgctccctagaatatgggcacctgcttctaccttctgctcctaatcagttcatggggcatagggatagaaaaatggataacttctaaactttttctctgagtggtcagtgaagtccaggaaaagcaccggaggcaatgtgcacaaacaccactactaaacaaacctgcacatagttcacattgatgcatttttttaattttaagaaaaaaaaattagcagtatctgcaagcaattcagattaaatttgtttttgttctgtgaatgaactttattttaataactttggacgccttggatccggggctttaaaaaaaaagaagatattatatatacactctgtttgattaattgtatgatcttaatgaagtaggtttttcttgtattttggtattattacatacccagtgtataattccttttccccagtcctttccaactctcacaaccctgtaaactaaaatagacaaaaatgcaccgtttccaagaattctgtggtaatagattgggttattagaaactgtgcagcaaactaattttatt

SEQ ID NO: 18346 - DNA, 5260 bp, Mus musculus
accctagaatagaaaaaccaggacagtgaaccatactctaaagctgggagccggctcagcagaagagcaccggctgctctcccgggttcttggcagcacctgcagggtgtctcccagttccactttcagggacatgacacccttttctggcccttgtggacaccagacacaatgaagaaaattttttaattaaaataaaacttaacactcgataggagcttcagtaaacaaggacatattatttcaatggaatttttgttttcctttcaaaagcgttaaagatttggcagatagaaactgactgagtcttcagggtagttcatgctttggtcacttgtcagtaatcagaattactagaataactataaataacttgaagtgagtttttatagacctggctttctgacattaaaaatgtttatgaaaaagttgaagagtgaggaagaatttttatttagttctgctgcacatattctaatgctaaccactgtttgcttaatttactaagcccctctaaaatgagttcagcaaggcaatgtttcgtagaatcactccatccctctgattgcctgacgtcagtttccctttctagatgatgctacaaaacaagaaagcactggttatgtaataagttactgcattgctttggttgggtaaaagcaaacgtttatatttttcttatttctatttcctgaacccttaactctgctgaggtctgcgtcacctcagtctaagctctgtgtccatcatcttgttaattgaaacaagtgggtgggggtgggataagagtgggaggggtgggaagggaaaaatagtcctgccattgcctaccagtaggaaatccaaacagaacactcatttgagtagcgattatttaatttgcccagtcaaggcaccgtgtttatatactatttcacattgaatttgattatgccctacagacctggctggtcaaggatttgatatacacatattggcttgggattcgagctttcttttttatttaaataaaaatttatatatatattatatatatacatatatacatggctatatctgtatatatatcgggtatgttttaaagatttcttcgcatgagcgcagctgttgcaataagatgactgattgggaggtagaggcaccgaatgacggtgaggcatttctcagttgatgcatacattttccttttaattttaaatacacatttgtacatttgctttttttggacttttttttttaagataaaatgactcttacatttatactttactcattatttattgagatgaggagagaaatgttatgcctgacaggatttttatttttctgcatatctataaaacgccacattattggcctcttgccttcagtagacagatttgggtgggtcttacctcctttggacatttcaagataattcctaagtcttagaagcagatgggtttttgttgttgttgtttttaaaattggaataactagggggaaatctgcatattggttttcttggagttaagaataaaagtaaattttcattgtagtgtgtatgagacccccaaaatgtactctgctgcggtgcactagtatccttttaggtatatttttatttagggagaaaattagtcttttaaatggtagtatgagttccccaagcccctctctatagccagtctgggttgggtagaaagtgaaagactgtgcctacaattttgctatttagtcattttcccttaccaatttttaggtggggttttttggggagcagggggtaggcagtattgtttgtgcccactggcaggtttagggattcaataaaaactctcataactttgaggggtttttctccccttaacaaagtcaatgttatgagacaacaataaattgaagcataacttcatgactcttaactgctgtttttattaaaatatgaaaaccattgatttttatttgtgtctttagagacattaaaaaaaggaagcccatcaaataggaagcagagcttctgcaccaccagccctgcccttttaagacagtcttagcagatagcccatactggttctgactcgagaccctgcgccagccttgtgagcgagcactggaagaatgtcaagcatgtgccgccatgctcagcatactcagcaatgggtatggcttttcactgaaatggtttcttctgaaggtgattactttttactgtatccaagagcaagaatcatctcagatgaaacagacaattctggaagggttatgcagcagcatattcatacttgttcagaaacaacgccagtatgttagctgtcgtgaataaaaagtacttaggctcagtctgttttccgtgagtctctggaacatgatggaggaactgagaatggggtatctagactcagtttcctgttgatagtaggagtctgaatgtgaccaaagagccattccttactacttttctacttaaacagaacttgtaccataggtttctggtagtgatgttcaaatgacgtcaatgtttaagacactattattagtaattacaaatattcacctactcagaatgtgtaagagcttgtttggcacgtacggcattaatgtgggtcattccttctctcatcttccttcccttgtggttttcccatgtatttattcttttgcctaacagcagaagatggatacaattctcacgtgctacttggatacatgatcccatcagactcccatgagcttgagtgtgggagcttgaaatttagttcctaagtttcccatgattgtcttttttcttttcttcctgaccccttgccattctgcagtttccccttgacttacccaatctgtaacagtgacagtttgctgcttctaaacagagcattcaaatgaattcgcttagccaataacttctgtgaagttgccttttctaatggcgttattactcagtgatgcacagatgtggtatttgccctactggcaggcaagcaaaggtctggcaaagaatgataacctgctatttctttaaggagcgccaaagacttgtgctttactctgttttggttttaggggaaatagtagccattttgattatgaaatctggtagtatttgtaagttgattgtactgtgtaaatgtctaaagttaactgttaaggttagctggccttacaaaatgtaaaagtaatgaaaatttatcagtttctctaaaccagtaaatatcacccttgacaatatttgtttaagcaactcactctccctttgggggcttatcttgatgtactactctcttctgtgcgtctctgtactttcacttgtgcctacaggacaatgtactttcactatggtcaagtcctgggtctgggaattcttcttgaacttgacgcttgtgagaaacagttaacggtagttacttagtacctgttcgacttaagttcagggacatcttatttttactaaatgggattcatttgctattgtttttatgtacaaatgatggtagaatgaaatttcaatatatttttcatttgggcttttaaagaatcaagtaaagagttcaatatgtaaaatctttgtgtaaaaaccatccgtaacgatttattacatcctaatttgttctcaagaggaagtaatgaccttgcaaattaactgcagtattacactattgccctataaaaggttcaagtgtgttaaactcttaattgttaatatatgcttatagtgttgcaaagggatgtcatccctgaagatagagctcagatacagcgtcactgagacaacgggcagtctacactgacaccatttcatctgaaacatatcgatgtctaccttagacagctatggcttttttttttttttttaacagctcagctttttaaaatttcctgctgaaatgactggctgggagtttttggtaaattgtgctaacattctttttaacgttctcaatcagctttcctgagccactcacttcaaagagctggttttgttttgttttgttcaaaagatacaggaaataacatttgagattttaagattctatttctgtaattgctagaggtgttttcacaagtaacagattttaattaattagtaattctagtcacactaataaagaataggaaactgctacccccaggagcaaatgacaccttctaataagtgttctcagtaggtaggtttcaatactacactgaataagtgggtaaagagcccttggaatcccattgtgataaagggacttcccttagcactggaattgttcttagagcctctggatttcagacaaacactgaatttccctgaacttaaccttgagcagaataaccttcattttcacaagaaagtaaggcattgtaacccaaggtggaaaacttaaactttaagacaatactgtgtcagaaaaatgtgtatttagaagagtgaaaccctgtggagtctgttgtcctagtgtatattatattatatagtagataaggtggcttttttttttttattttttattgaagactcattctggttcttcatttggttttgtgttttgtcttttaatgctacatatgtagacagagctcacaagtctttggctcccatattaggttgtacactcagagtcatcttataactggaaactgtcaggtggtcccagctccagtgaacacaggaaaagtcaaggaaaggatgcaagactgggtgaatagcgctctggggttttggttttgttttggtcctccttttaaaaattgtcatttttataatttattggtgtagcctctctctctgttcattggctgacatttcacagtaatatccaaaccaccccataaaattgtattcttacaagcctttaaagctatgattcctgtttagctaagacagtcctgagaggttttggggtttgttttgttttggtttgtttttgcctcactttccccttacccttttttatcctttgtcttcccaactttctggatataaaagaaaaaaaaacttcactggtcttaggcctcagtaatgagtctgactttccaggagtgatacaggaagtgaactaaggtaatgagcaaacttctcacccacctaactgctttccagttgtgaggttcctcttcgtgtgtggtcttttcccttttacccctgaaacccttccctgcctatggtcagttggtctcacggctcacaccagtctcctgagacattctgcactcattatcacctttttgggtggatttttcttagtttttttgttttgtttttaaaaaataactttaacattgattcatatttgct

SEQ ID NO: 18347 - DNA, 1173 bp, Mus musculus
gtaatttaccaatcgtattgattgtatgtgattgtgccctgcagaggtatacttaacatgagtaatcttaagttagtaaaggagctatgagatttgagtcagaatagagatggctttatggggagtgtgaagtcccttctcagaatcagtgctacggaagaccccctttgaaaggttttcctccattcctgtgtttttccattgcctcggctccctattgttttctgacattttctccccacctgctcacaaggttttttaaattgagtcttaaaataagagataacttttaactgaatgaattttgtgaaattttacattttccaaatgttttcaattgaggacaaaggatgggctggacttggccagcctgtgaccatctccttcccatctggcctggccaacagtgagatttgcatttagaggcattatcttctgaaagttgtttttgtataggaaaaaaaagaaccttgcttgaaatggaacattccctttctttaatctgtttaatatttccgtttttaaacagctttcaaaacaaatgaggtggggaaaaaagaactaggagtgtgtttagggctgccgacctctggatctgaacgagtacatggaccatgtgttgcatattcttgagaagattaaggccttctctcttaattttgtattctttgtgtgcatgttgtttatattaaagatggcacattttgttaaaatgctatttcctttattaccttggaaactgactcagcctcttgttgctcctaattagggtttaaggctcttgtaagttgcagataaaaggattcattttaacaatagaaggaggtggttcaccttttggattgtaaatatatgaaagtgtctaaaggtctttatctgctttctgtcagcatttatattaaatgataaattaatgaggaggaacagtgtgtagtctttttcttgtcaatgagtctgccacctcgttctcgtcttgggattgttgataaaaaaaaaaaaacaaaaaacaaaaaacttttaaaagctaatttatgcaagtaagcacactgggcgtcagttttctctacccagaattgctgtagacttgagtatgctgcaattgagaggcaggcctggttcagaggctgcgagacccatagtcagtgagctgtaacattattttatgacgtctta

SEQ ID NO: 18348 - DNA, 1130 bp, Mus musculus
gctgaggacctgagtttggttcctagcacccacatgacagctcacaactgtcttgttattcctgtcccaggatccaaatccctcttcaggtaccaggcactgtgcaaagacacattcaggcaaaatacccatagatatataaataagtaaaattttgtttattattagcagattctttcaaaggatgatgtagttggtctctgcagatttgaataggaatattgcccacttattcagaattacccaatttggttggtttaattgtgagtaagctgaatgagttactgcttaaaagtgaaactgttttctggttacttagctgctgtaacaaactgctctaaagtttaaaagggcttgactttgtagaaagttagaagttgaggtgctggttgaattggtctgaaaggttcaagatgatgtcacgtgtcctggtgtacagggacctgaaaagctgggcctggctttttcattgagtttcaaggattctccatggtagttggacttctttttgtttggtttttgtttttgttttttgagaaagggtttctctgtgtagccctggctgtcctgaaactcgatctgtagattagcctggcctcccactctgcctcccaaattctgggattaaagatgtgggcctccaccactcagcaggtagttgggacttttgacatggcagcttaggctgggcagaagatgccagtcttcttaaaggccaggcctccaatcatcacggggtcactgccatactttagtaagcgctgagcccagaccctaggggagaggaagtaccctaacctttatgaaagacatgcggagagtggagaccatgttaaattgtttacaggtaaccgttaggctgttcttttgtcctaaaccttttgcagtcagttttgttttgttttgtttgtttgtttgtttgttttgtctctaatatttaggaaaaatttccccatgtttggtttgacttttcttattttacaaaatcaaaagacccctaagtttttcattaaaatacccaggtagctctcaggtttctagaccatttcccacagcccttctaagacaaattcaactaagcttgttgttttaaaaggtttctaatctcaggagacccacatagtcaactt

SEQ ID NO: 18349 - DNA, 1203 bp, Mus musculus
tgcagttgctgggaattgaactcaggacctctggaagagcattcagtgctcttaaccacttaaccatttctccaacccggttttgttctttggaggcatgtctcatgtagtccaggctgagcttcaactccctatgtagccaaaggtaatcttgaactcctaatcctgatgtttgcaccccgccccagaggcttagtaagtatgcagccagaacttcgctttgtagtgtttatagcagtgaaatagtactctcagaattctttttacattattatgttaatagctttactttttggtagtattaacttccctcttggctctccattacacgtaagtgaatatgggctaggaatgtaactaaggctcagagcatttgcctagcttgcacaaggccctgtatctgtattccttacatcacgcagacacagaaacatgcacttcttagtaatgggcacaagcacattgggttgcttttcacatctgcacttaacattaggtaatactcactctttcttctgactcaggtagaagagtcagcaatgatgggagtaagcgcctatgtggagtatctccgagaacaagaagtgtccgaacgatggttccggtataatccccgtctcacctgcatctactgtgccaaatctttcaaccaaaagggaagtctggaccgccacatgcgcctgcatatgggaatcacaccgtttgtctgccgcatgtgtggaaaaaagtatacccggaaagaccagctggaatatcacatccgcaagcacacaggcaacaagccctttcactgtcacgtttgtggcaaaagtttccccttccaggccatcttgaatcagcactttcgaaaaaaccaccctggttgtatacccctggaagggcctcatagcatttctcctgagactactgtcacttcccggcaagctgaagaagggtcaccttcacacgaagaaatagttgctcctggagaatctgcccagggctcagtttctactactgggccagattgaaacattgagggggagggggcaaaccctcttcccctttgggccgtaaccagcccctgtcaggaccatggattggtacttagattcacaaaatgccacgtcactcaactagaagatgttcccatggttttgccaaattagaagaccaacatgcggaaggcactaaaggctcttctcctcgttcccacctcatact

SEQ ID NO: 18350 - DNA, 1218 bp, Mus musculus
gcaatccccggtgagttcagaagagacatcaggagtcctggagtgaacctagcttccctcaggctcgagcaagacctgcgacttcccccgggagagacagctcggcttcccaagctgcccggctctatgatcctcgctcttcggaagctggcgccggcccacgaaaaacagggagtccccaaagacccttctccggagctctccggggatcaaaggtagacttgaaagttccgctcgtctaggcgcttttccacacacgccacgccctccagtttaaaatcatttcccgacttgccctgcggccgactcggaaagcctcgcctgtggccctccgatttcacgtaactgaaagcaactgaagtcgtcattttaactgagggcaaggcttggaaggcttcaatcaatagcctcaaattcccaatcccctattgcgccgcgttgttcttccgttttccaaccggtgcgaaactttcccgcatactgccgcccacaataaacatggcggaggcgccctcgtcctgattggccggaatccttgcgtaactttggcgctcgccgggcgtcagagggactggcttgtggatgtggtttgtgtctgggtttgaacctcagagctgtttggatttgttcgtcttcacctttcaggaaaatccaggatgggccgccaggtttgggaaagttgaaacacgaggctgcacctccttatatttctgcttatgccctggtcaccttcgagatacgtgggaataaagggaggacgcgcgcctggtggccggccttccggctggggcgctctggcactggcgctgctgttgaggcatcttcggggctcagccttgtttaattaaagtgggaactgatgcactgaaggaagcaaaggctttccccctacccactcacctaaggtctctggagaccttgcaggtcaatctactttgtagatactagaacgttcagcggagcagggtctggatgcatttgcgtgggaactagaattttaagggttcccaggtattccgaaaaccgagttttgagcaccaccacacctgcagcgtgggattcgtgattgtctctccggatcccgggacttcaacatgtatcttggtttttggttaagtcgtctatgcaggggtttatccagacccatcgggaagaccatgcggccaatctggggttctctttccagaaatctggcgttgagttcacaaagaattccag

SEQ ID NO: 18351 - DNA, 1104 bp, Mus musculus
ttggccactttcttcttcttaaaaaaccaaaacctttcgtctcgacgtagtcttggagcaaaacttgaaggatgattcgtgaatccggagtggatgacagtgtctttacgacatagttttggtaagagcttttgggtcctcgactggccgtgtactgcatttctttctgttgtgtgactgttgtctttgcaatgcttttgtgtatttaagatgtgtacaaacggaagctaacgtcaacgtgagcgttagtatgggagcagtgggttgacttttgtggcaatattgcagtgactaactcagggactttcttcatggactaaccacaagaaaaactactgagttttagttgtgtgttaggaactgagtacaagagaatttgatgagagatatagttccgtggatactagaaagaggctgataggaccctttgccacgggcataagagtcaaaggaggcgaagaattgagaaattcgtagaacctttccctccagtcacctggcaacatagcagcgtacttactaatagggtcgtttgaggagtgaacagtagtaccagatatgtcccaggactagggaggctgaggcaagagaattgccgtgagttctaggccaacctgggctacacagagagactgtcactcgatataaacaaaacacccccaaacaaaagaatattcgttaaaggcttaatctttgttaagtgcttacaaacatgcctgaaaagtaatgtatacttagcagttattgtactagttagcctactttaaagaaagattctgtataaacagaactgatgaagactcctatctaaatagcaaacaagtggggagaagaacgggaggaggtggtggcagagggaagacgctgccttctgaaggaaagttcagttgatggaagatttttaacagaggggttcggataagtgggacctgcatggctgctatggacaggaagaatttgtaaagtcaaaaataataaaaaagactaggagctctcctgccaaacccaatactgctctgatgagaaggccaagggtgtctgtaaagataaagatgtcttccagaagttggcctgggacctccacaggcataagagccgaaggaa

SEQ ID NO: 18352 - DNA, 1209 bp, Mus musculus
atttttggctttaatttatcatggagttttgatggggatttttgtttttgttttgttggtttgggtcctttgggcttttgttgttgttattgttgtgttgtttttaattttttttttttaacttatccttcctaccatgaaaaaaaaggaggggggaaaaaggcaaaaattccaagctgcaaaattttctttgctttataggttttggattggttttaaagatcctggtaagcgcagaagacctatgtgtgacctgatgttattccttttagacatatctatacatctgcagagattgccagtgatgaaggtaaaacgctagtatatgcgctcgttaccactttgcactaaatagtagagcactccaaatgtaaagctggttcagtgagagtgcgtgctgcttctgcagaggacccgagttcagttcccagcacttatatctggcagctcacaactgtgtgtaattccatgaacaacggtggctctcagccttcctgatgctgtagccctttaacacagttcctcacgtcgtgctgacccccaaccataacattatttttgttgctacttcataacagtcattttgctgctgttatgaatcatgatgtagacatctgattacagtatatctgatatgtaactcatgtgaaagggccctttgacccccctacccacgcgccccacccccgaagaggtcacgacccacaggttaaaaactgctgaacttgcttatccagggctcactttcgtcctttgtaggtacccgcattcctacgcattcatatacatacaaacacacatccacccatcaaatataagtaattaaaaatgaaatttcttttaaatgtaaaagaaaaactgaataagaagacatctcactaaacaggaaaattaggaaggactattaagtctataaaagcaggactcagatgctacactttgcattcactggtgggcattttcatctggctagctcaactttattcttaccccagttcccttttttctcctgtaatattttcatagtttctgccacatgtatctaggtctcttataaaagcaatgtgaggctcattggttgtcatcttgagaattccagtgaaggcgagtgtggctgtggaagagttgtgccgactgtcaccacctgcagctttctttcctgtctcctcttggccaccaaggagcagtgaactttctccagccgtgaat

SEQ ID NO: 18353 - DNA, 1705 bp, Mus musculus
tattgggttttgatttttctgtctggcaagtcatctacattttcggcaactaggggtaggggatgggaggtgagaggcaatttagcctgatacaatccaatagtatctgtaaactgggggattttgagggcagtagattttgagttaaactttaaaggagtagtggccagctatgatggaatttaaaacaagactgttcctacttacgatggagaaatactctcctaacatgtcaaaagtcaatttgtaaaacgagttcctcaaagaagagagagtaaagaatatgttcatttaccacttttccatagttaattcttcgagaccttttaccattactgtaaggttgaattgcaccattcttaatgtctcccaacagaagggagagagcgtgatggtagttcccaccctctccgaagaggaagccaaacaatgtttccctaaaggagtcttcaccaaagagctcccgtctggcaaaaaatacctccgttatacaccccagccttaagtctttgcggaaattggggctgcatctgcacatccagtactggggcctgaggatgtcagctggcagccgtgggtccttgcagcaggtccgtagaaagatcgtggcatgatcacagccggtcctgtagatcgctcgctatactactgggtcattaaatggaaatggcaccaaaaccttctcgggattctttactctgtgccttcgccagcattctgcccctctgcctgtcacagtgccctactgactggctctctttgaaacgaattatgtattgaagattccttaggtctctgtagggtctttgatcagcaaacaaggtagtgtcagtgtgggctctgtgctagaatgatgaaacaccttttgtatctttccgaactgaatcttctgttacccattttggagagcactgacatagggagaagctttcgattctgtatttttagtaaataaaaagtggggacagccgggagaattcttacagggaatctattgtaagtttctatcgaagtgggctcagaaagcctttcgcctcccaagagtgcgcatgtacctcctagagtttccacatctgctctctggtgatgtctgcctgtgaacgcaccttataaaagacgggcggtgacagtgttttaccactcagtgtcctagtagtgggtggccatttctgaattctgctttttgaggttcaacaaataaaatcctgatcagaaaaccgttgtcatgttttaaagtactactatcttagactctagcatgtctattgcacaggcatgcttccttcttgctgggaatagcatgggtatgtttctccaacaacatgagtctccgcatgaactggaagccactgaaggatgaattcctacatgtatgttaggctaattccttggttcctgttctcctaagtcttgtgaacaggtgtgcaccttctcagaggttctcaacttgtggctcataacctctttggtcaccaaggaccaatggaaaatatttacattacagttcataacgatagcgaatttacagttaggaagcagaaacaaaaataattttatgtttaggggtcaccgcaacattaggaaggttgagaaccactaatggttaggtagtctggcctcattagtgtaagctctgagatagtggtatattttgtttttctactctgaactgaatggtttcattccaacttagatacagtgctac

SEQ ID NO: 18354 - DNA, 1245 bp, Mus musculus
aagctcttatacagactaagtcggggtcattgccgagcctgcatgacataatcaaaggaaacaaggagatcaccgtgggagcatttggggttacagcagtctcgggacatatctaaaaggagctgaacatttatactgaaaacttttttgttctttgaagaacagcctgtggtatttgaagggttcagggggagggataaaatattggggaaagtattcagaaattatgggtttttttattttgccttttaaaaaagtagacaggattgtgtcaatcttggctgatgagctacagttttacaaggctgatctcttcctagaaggatggtgataggcattttataaagatgtgttttcacagataattactgggacaaaagtaatttggaagcccagttccttgggtggataggaacgaaagcctaaacctctccttcagcttggttcccgtttcttgcaccttcccatatttatgtgccttttgtctatttataatgccactggaagaggagggagaactttttctgtcatttgatttgttttgtaactttattaggtttttgaagctgcaaacactacaaagctttaaggtggtccatgcctgaagctcagcaatgtgggtcatttgcataaagatcctaaagacttccaacttagaaccgctcagtagtctcactgaaataaacactttctcaagttttctaaaggcctttcagataaaaaggtgatgatttcacccttggtttcatttaatttagttggattgggttttttttccccctgagttattattaactcagtaaaatggtaagatattttcttggaaatgacaggtatttggaataaatttattataaattcacctttaaacacacttaactatttgtgatgatttctctacattgctctcaatgttcacagtaaacactaatcctccaaattttcacatcaccaagaccaggttttccatggtcctgtcactgcctttgtacatagtcacagaaccagccagtgagcacgtcaggcctgattcagtctaattggtaaagtctaatgggattgtgattccttcatgtttgctttcgttggctacaatgtgcagatatgtatgtatgtgatgtcagcatctgtcttcacttgtttttttgttttgttttggttttttccttaagtaattggcagtgtctgagtaaattgatttcttgatgtgtgattgtacagggatgagtgaaagtgatatgtgtt

SEQ ID NO: 18355 - DNA, 1231 bp, Mus musculus
tgctgagaattagctgtttaaggacaagagcagaaacaagaaggaaacttcttaggaggaggcagttgcagtaacttgggtgaagttaactaagattttagaagtagaaaatagtaggatgttaattgaattaagtatatatttaaagaggtagaaaataagccttaatgaaataccaggtatgtgaggataagaaatttaggttgaatctgaggggtttgataattgagtagttgagttgtatatgtgttagcatactatctctaagggagagagtgcagatggaaagacagactagatatcaacagaatgttaagtggtgagcttaagtctaaggcataaatgtacttactgtactgcttttatatttcaagaaagagttaaatggggagagaacagaaaaagagcaaatgtctgtagtttgttttcaagcaccatgctctgtatttatgatttcagagcaccttgactgtttaaaaataacttgtttgaattttaggtcccacggtccattctttaaagtagtttataattatgtttatcttttcaggtttcagatcgtcagagttaccttgtcatgtctttggttttatgtgttgtcttgggactgatgctctgtatgcaacgctgtcgaactacttctcaatttgatggagattacatttcaaaacttcccaaaagtaatcagtatccaagccctaaaaggtaaggttaacaatatactccacaattttcttctttttgtttttctcaaagaaatgctgagcagataaagggacatgaaactaaaatactaaaaatatcattgtagcaagatggtaactgtacatggagataatgctattgaataatcgagagaaactaataatatatatattaagcctttgaattattttggttgagaaagatgttaaaatgtggcattcaagggtggaagagaagtaagataagatctttggagaagatttgttttatattagcaataatggttttgctaatttaggcttgttccatatgttatgcaggtctcaaatcctccatttaaataggctacacagtaagttagatcccgtataatcactcatgtgtgtaatgttttcttaatatattaggtgtttctcttcctatgatgacatgaatttgaaaagaagaacatcatttcccctcatcagatccaaatctctgcagtttactggcaaagaaggtagatttttatggatatgatctacat

SEQ ID NO: 18356 - DNA, 1174 bp, Mus musculus
gcctgtgttagacagctgtgttgttgatgacattttttgcattcttcttatttcatagttgttgttttagctccgagtctggccctcatttctcctttagtggccaacgcgtgcgcttagggctgtgcttctgcctcagtgtgacccggttctgattctcatgcattctttttcttttttgttcttttctctctttctctctcttttttttgttttgttttacttttttctcttacagttcttatagttgtgaaattccgtacttgatttgatgacagagaccctcattaaacaagatctgggacaataatatttaaagattgctgcataatgtaaatgaaacctatgtatagaactttcaaatttcctttttcaagaaactaaaaggcaagtaccaattcaaattggagcattgagaatatcgaatgatcacctttccaactaacaaaatgcattttgaataattatatttgatgtagaaatatctctattttgctttattccaaggatctaatttgaaactagatacttgccagtctgttatttgtatatatagttgaaccctgataacaatgccccatacttgtgtttcagttgcattaaagacattattgcatctaagtgagagtcagtctggtgaccaggaagcctatgtagagtcctgactctttgctgcaagagatgcataaccatcctatcagtatttgcaagaatgccattcttttcatattgtagttgctttgcaggcaatttccacacttatggattaacaaaagctaagtgttgtaaatgtttctgccttcagctctacccgaaaacattccagtaaacctattctgactgtataagaaaatacgtggtaattttttggtctttggattttgaaaatgggaaatttaaacagtgtgaaaatcataatatggtcctataaaactggagataataaaatttttgaagaatgtcattggagtgtttgaaaacgagcactatgtagctcccagtcttggtccagttggttgtcagttaaactacaataaaaagggactaattctgacgtgagtaagtgaaggctgcaggtaatttttttcttgacttcatttttttagtggttttctctttttaattttaactaaccctgtgccagaggtgctgaagttagcgcagtcatgtgcct

SEQ ID NO: 18357 - DNA, 1101 bp, Mus musculus
cttgtaaagagtactggcctcttaatattgattaaataagtcaaagtgaaggtgcttcctgctgtgcagggggaaggcagagaccacaggaactgttcacatggacatctcaagctggaaagagagctcacaggggcggccaggattgggggcaatggtcctgtataacagatattagtttttgtgatcattttaattcaaaatgtgtaaaacaatttggatttttctttgtttaattctacaatggttaatactaacagacaaaatgtttagactggaaagaaacttgaaaaggtggaaacaagattaagtggtagccgagccgggcatggtggcacacacctttaatcccagcactcgggaggcagaggcagacacagacggatttctgagttcgaggccagcctggtctacaaagtgagttccaggacagccacggctacacagagaaaccctgtctcgaaaaaccaaaaaaaaaaaaaaaaaaaaaaaagattaagtggtagcctaggtatctaagtataattgctggagtttacagtttgttgcacactgtggaaaatcgactctggccttttcaccatgctcgtcaattcctgtgcgcagcatctgaactgagaatacatcatttggagaaggagtgctctgcattccagcagctggtggctcagggatggaggtgtttcctccatcagcacagctgatcccagtgtgtgtgtcttgtacctcaggtcacaagttccactgcttggtgtggaagacactgtcactcagtgtctgttagcgaagatgaagtgttgggtgtttttctttagaagactccaaatttcaatcttcttttaattaagtatgccacttttaaacaaacaattataaaacatagaattgtaaagttaattttaaaacattaattataaaacatattacttaactacctatatatgtagttgtttatatttaaatttctcgaatctgaggaaatcctattgtcatgggactgaggattttacaacagtgatggcttcaatcccagtttatcactttgtcccttttggtcttatgtaatcctgagacctaacaatgacattagggtgaaatact

SEQ ID NO: 18358 - DNA, 2667 bp, Mus musculus
ataaagtctggtattagtgagctgttcccaaaagagagagaatcggcagcaatgtgtattttattgtttataagagggcagacgctagaaagatggtggggggtggccttgtttcaggtgttttgttttttttaaatcacatagaatattttcagagctaggagaaacctatgcattaaaaactgaaagatcgatggggcacaaacttagggaaaactgatttttgtgattggtacaaaaatttgaactgagattgatttgacaggctttggtaatgttaggtaatgttgcagtgctttcagtttttgttttcttatttttaaaggcaaagcagagagcagaggttcttcagtccacgcagcggttcttctctgaacagcaacagaacaaacagataggaggcaaaacccagagagtggacagtgatacaagtaaccctgaaacgctgagtgaccctcctggcacctgtccggaaaaagtagaagaaaagccaccccctgcacccaccataaccaccaaacctgttagaactggaccaatcaaacctcaggccatcaaaaccgaagaaacaaaatcgtaaaggctgtggtttattggggatgggtgggtagggaaagtgaagtcaaataatgccagccagcagccacaggggtaaagtggtctgtgacatcatcctgtgagacacaaggggcatagagcatttacagtgacagagctgctgcacagtgaggctccacaggctcgcacctccggtgtaacatttgcatcttcagttggtttgtatacaagtacgtaaacagtctgtaagtgcatacagtttagtcctaaggagcatgaaacaccagaagtaggaggaggagagcgatagataccacagagtagctcagctggacactgggtggtcccatgaatccatcagctgtggctcttctgctcccttgtgttctttggatgtgtctatggctcttctaggcttgaaagtaaaatgatgctaactggtgctggatagaggagccttatcttttattacggcagcttgctatttttgtaacatggtgatttggttgaacacaataaagtacagtagtaactgatctcccctcttcctggatgagtgagcagatgattgaatattgatgtcagcatccttgaacacactcagatgagcaacatagagcttctgcttctatttaaaatgatgctgggtttgattgtggtccgaagctttgaagcactacttggcgtctccttccttggaggtctcaccatttaaacataacatttgataacgtgttggtaaggtgaggtctagcttgtctccactaggtcatcttcatatgaatccagtgggtatacggttttgttttagggatagttcattttttaatgacggtttttagctgacattcatggagagaatgaatccttagaactgtgccgctagtgaaaggaaatcctgtctaagagtgtttctttacagagcagtgtcacaccatcctttgggccctctgctggaaacatagaatcaagtctcaaataatgccttttaaattgtctcctctagtattatagatgtaggacagtactgtatcatacctctgtgaatgtaacatagcttgtacctgctttatgatacgtagtagtgaccgtgctttatcagagctgttttttaatgatgttgctcagaatgttttctttccagatgatgattgagaagctaattaaaaaaaaaaacagaaacaaaaaatggtgccaggtaccacaagagtaacagaactgtgctgttttctgggattttgttttttactttttttttttttttttttttttgataagagtgtgctggatgtctctacaattttgttcaaatgactgcagaacctggaaaagctgttgctgctattgatgcataacatactgctattattggtctttttatataaatataaatatatatacatatatataatttgaattttttggaaactttagctgtgctgtcaactttggaaaaacgtatcccagtttactgtgttgagttggcattgtacagaaattaacagccatattggtctagaaatgttgaacttaatttttttttccatttgtacaggggtaacgcactgtattaaatatgtaaggtcttatctacgtgggtttgattacaaaaactaataaagtattctctaaataatgagtcttggaacttctaatctattccaaagtcggaagcaaggcttgttagtgtaccaaaggtcctagccgttatccaaagagttagggactgccctgaggtcaagaagcttaaagctcactcagtcagaggtggtgttgagggtaatagttacagtttctgttcttgggatgatcaaactttgatggcaagatggcagcaggatgatcaggagttaaaggccattctcatctaggtagtaagtttgaggcccatctgtatgtgtgtgagaccttgtcttggagaaaacctagggagacacgtgtggtagtgcacggctgtaatcccagcactcgggaggcaggggcaggcagctctgtaatcccagcactcgggaggcagaggcaggcagctctcttgagttccaggccattcagtgaactccaggacagccaggcctacacacagaaatcggggtcgggggcagcctagaa

SEQ ID NO: 18359 - DNA, 2580 bp, Mus musculus
ggggggaagctcacacacctctatgtgttacacatcataagggaaaaataattctactggaactggtaccacatgtgtataatcctgacacttgacaggtaggggcaggatctggatagagttcaaggccagcctcggctacacaagtttgaggctggtatttgctacttgagaccctgtttcaaaaccaaaagggtctatcaatcaaaccatgccattttaggttttctaatctatgaaactttttcagaaagataaaatactttcttacagggtaggaaataagttatactctcaaattaaaaaatatttttctgtcgggcacagtctttaactccagcacttgggaagcagaggcaggtggatttctgagttcaaggccagcctggtctatggtgtgagttccaggacagccagggctatacagagggaaaaacaaaacaaaacaaaacaaaaaaatcttttccacatctgcaggtgttgttatcattgatgatcatcctgaagtaactgtaattgaagacccccagtcaaatctgaatgatgatggctttactgaagttgtatctaaaaaacagcaaaagcggttacaggatgaggaacgccgaaagaaggaagagcaagtcgtacaggtttgagctcagcattttattgctagctttgtctgttgatatccagaacttgttaacaaatggtcaggttactcaggtctgctcagtcttagaagatggctgagtagcttcacacctgaccttaagcaattaattttaaaatgagctacgactatagcttgctattgtccttataacagaccatagttaattcaacatatatttttactaatttgttctatggtagaattcaatttgttttaaattatgttggaaattgaatgaacacaagtgccctgatccagaagtaacttttgtctttctcatttgtttgtttgtttgtttgtttggtgaaggtgtcaaatgtacttcaaattttgttagtttatttcatattttagagggaagagtaacctaatatataaaattatattttgtctatattctccaaactatcttgacttctaatactttgtaaactcattactaccctaagggtgtccaacttagaaaaatgaaatagctaagttagcagtaggaagttctaaaatcactaggaagtacaaattacatgtatacactgtttctttgggtaaattagtgacaaaatgatctgtttgtttaaggtatggagcaaaaaaaatataggtgaaaaaggaagaagtcagacttctaagcttcctccaaggtttgccaaaaaacaagctactgggactcagcaaatccaagctccaccctccgcgccagttccagtgtcttcctcagctccaggcctaacagccccagcagctgcagctcctgcctccaccccagctccagttcccattttggcatcagccaccgctctagttccagtgtcaaccccagctccggttctaacttcatgcccagctccagttccaacctcagcctcggctcctgttccagcatccacttcatctccagtcacagcctcttcctcatcccaaccatcagttccagctccgactcctgtcttggcctcagcctcaactacagtctctgtccctattctcacctcggcttccattcctatccttgcttcagccctagcaccagctactgtttcttctccaaccccagtggtctcagctacagctgtgccatccatttcaacaccagccgtcccagcctcagccccaacagcctcagttccccttgccccagcctcagctgcatccactgtcccacccccggcctcgacagtgcagacccagacccagacccagacccacaaaccagtccagagtccacttccaccttcagcgccatcttcaaagcagccaccaccctcgattagattaccctcagctcagacgtctaatggcacagacttcgtagccgctgggaagtccatgcccacttcacagtcccatggctctctaacagctgagttatgggacagcaaagtggctgctccagctgtgctgaatgacatttctaaaaaacgtaagtatgcaacagggacgtgtgcggtgggaaaagacagaagtactaaaatttcttttatatcttaattaggaagtcttagcttcctttattttagtagcttagtttcctttcctttttatttctctaaaacagttaacaggatacttttctccattgaggtttcatatcaccctaactaggatagttatcgggaacaccaacaaatgccaattggggggggaaagagaaagaaacccttatatacaactggtaaattagctcagccaatgtgaaaatcagcaaggaagtttttcaacaacaacaaaaacccctagaattaccatagaatctacctagtccctttctggatgtatatccaaagggatttagattagcagagaaacttgtacattgatgataacagtggggacagtgaccaagataagtaatcatgatctagtagaacacagtggggtcctactcagccaggaagaatgattctgtcatctatagggaaatg

SEQ ID NO: 18360 - DNA, 1133 bp, Mus musculus
gtcctgccaccttaagaagacctgcttatcgagacaatcagtggaacacaaggcaggcagaacctcctaaacctgaagatggagagccaccaagaagacatgagcagtttatgcctataccggcagataaacgacctccaaaatttgagcgaaaatttgacccggctagagagaggccccgaaggcagcgacctacccgaccaccaaggcaagataagccacctcgatttagacggctgagagagagagaggccgcttccaagacaagtgaggtgttggtaccctcaaatggcacagctaataatgttgttcaagaaccagttaatccacctgcggacatttctggaaataagacaccagatttgtctaatcagaattcttcagatcaggcaaatgaagagtgggaaacagcctctgaaagcagtgattttaatgagaggcgagagagggacgagaagaaaaatgctgataagagttcacaagcagttgtaaaggctggtgaaagtgttttgcctccaaaaagggaaatagcgaagagaagtttttctagtcagagacctggagttgatcgccagaatcgtcgtggcaacaatggcccacccaaatcaggaaggaatttttcaggtcctaggaatgaaagaagaaatggcccaccatcaaaaggtgggaagagagggtgagtactgtaatttagaacatgcctggaaagaaggtacacaggatgccaggctagataaaagaccctgtattgctgactgctgttaatctgttatgctaagacacttcttctaaaagggttttcttggaaattatgtatagagctttagaagtacttgtacatccagaaatgaacgtacagtttctgtagttgctttgtgctaatgagtagctctctgtccttagtttctccaggtgtgttttaagacttgatgtgttaaaaccacattactctggcactctgtgctgttatctcagaaatccttggtgaattgtcataaattgtattcccttctggagttataatagtcccagaaagacaatccctgcatgtctactatgctctagtggccaacatgagtcctctggcaatgggtattaattaatttttaaaacttcatgtctgagggtgtagt

SEQ ID NO: 18361 - DNA, 1532 bp, Mus musculus
gtattagaacttcagtatacaagtccatattactatctgcagttacagatacagagcttcatattgtgtgactgaaagtttaccccatcatttataacagcatctccacgtttctgactgccctaagccctctagtaatcttcattctatattctgcttgaatgaggttggttgttatatttgcaccctgatacaattggtgcccttgctaccagcaaaactcttatctgcattagtgtttcacagttatcttttcttattttccctgagtaacatcgtcataatttcttcattcactcaatgatatagatactctgtgttcttctctttgttaagatatttttaattggggaatgtcaatgttctttatacttaggattcattattttgtattcaggggtggggttgtaggggtaatgctgcagtgaaggggtatatgtacacatgggtaaggttgttatgttggtaatacctttgaattctcatcatcacaggcctgaaactgcaatggaccatgagcatatgactgctgcttatcctgtagaacatagtcagttggaaactcattcaaaaacggacgttgctagagactcaactgaaaccgaagaacaaaagtttttaagcagatcactggaagatgtaaaacctcgccatgttgatacaaatactcagtctgcttgttttgatgtaattgatcagaagagcttacctacttctgcagaagagcggatctcagcgctagaaagtcaacctgcccgaaaaagaagtgtttctcatggatctaaccatgctcagaatgcagaggaacaaagaaatgagccgtctgttagcatacctaaggttatcaacagatgtatggattccaaagaaactgtagaaaagccagaggagaagccaagaaaagatggctttctgcgatcttctgaagggcctaaaccagagaaagtctataaatctaaatcagaaactcggtggggtccaagaccaagctccaacagaagagaagaaggtaatgataggcctgtgagaaggtcgggtcccattaaaaaacctgtacttagagatatgaaagaggagcgagagcagaggaaggagaaagaaggtgagaagcttgagaaggtcactgaaaaagttgttaaagcagaaaagccagaaaagaaagatcttcctcttcctctcccccctccagcaccagctcaacctcagccacagccattggtttcaccaccagtacagccagaaccagagaaaccaccatcaacagaaacatcaactttgactcagaagccatctcaagatgagaaacctttggaacctgttggtagtgtccaggtagaacctgtagttaaaactgtaaaccagcaaagcgttgcagcaccgacagtcaaagaagaaaagccacctgagaaagtcattaacaaagatgttggaatagaaagatctcgcccagattctagactagcagttaagaaagactcatctttacccactaggacctattggaaagaagctagagatagggattggtttcc

SEQ ID NO: 18362 - DNA, 1169 bp, Mus musculus
ttttgggaatccatttagaattaagccagataatctgtcatcagaatgatactatggaagatttaggaatgattaaaaagctattcacaaattatagctcattcaaagcagtggcatgtgctcataatcccaggacccaggaggctcagaagtttagagccatcttgaaggttggttggttggttggtttgtaaatctcactatttgaatgcagagttaactattttaacagcaaagatgaataaaatttgctgtaagaaataatttttcccaaaacttagccttgttggtatgattctaatctcagtttttctgttagctgttttttctatgcacatttttttttcttttaaaataaagtgaactcctattgtatgtcccctcttaatttcttagcactcatttttgtatatgtttatcttggttttgtttctttcactttacctaattctcttgtgtgtgtgaacttttctttttcttacaggaatgattcctcctaagccgttaatcagaagagaccagatggaagggtcacctaatagctctgagtcatttgagcatatagctagatctgcaagagatcatggaatttcactttctgaacctcgaatgatgtgggggtcagatccctatcatgctgagcctcagcaggcagctactcccaagtctgctgaagaaactggggatgcaaggtaataaattacttacatcattgaaagataagtagaatattgcatccctaaagatcattctgggtgccaacagtatcactcatggacaaaggtgtttgccattaagccagatggccagaatttgatgtttggaacccatatggtggaaggagagaactaactcccaaaagttgtcctctgatctccacagatggttgataataacaaaagctcttcccactctatcaacacacacacacacattaacatttttaaaggattagattctgatttaataccaagccataaatgtgcttcattttatctttgtgcatattttttctttttcttgtataataattttaaatcaacgagggcaaattagtaaaaacaggaatttgcctttttttttttttatagtctagccaatgggctgataagaatctagtagtgatgagaaatgatactttcaatccttagagaaactatgtaaaccac

SEQ ID NO: 18363 - DNA, 1363 bp, Mus musculus
tatgctttaacagaatctcttccttctttctttttccttctttttgacccttcccatctctccatatttatggcacacaatatcagtcccagaaagtgatcagggtgatgatggctcaggtgttaggggtgcttgctgccaagcttgacaacctgagttcactctaatgagattccatataatggaatgataagagagctgactcctacaggttgttctctgattttcacatgtgcacacatgcacacacacatagacataaaaacaaattatttcgaataccaagttcttatcttcatctggtctcttactccttcagcatcccccacctccagatcgacaaatacctggaagacaaggcccctttccctccaagcctccagtacctgataacgatgaaatatggaagcaaagacgaaaacaacagtctgaaatatctgcagcagtagagcgtgctcgtaaacgccgtgaggaggaagagcgaaggatggaggaacagaggaaggcagcgtgcgcagagaaattgaagcagctggatgagaagctcgggatcatagaaaagcagccatctccagaggaacttagagaaagggagagagagaaggagcgggagagagaacttgaaaaagagaaagagcgggagcttgagaaagagcaggaaaagcagagggaaatggagagggcaagacagcaagagaaagagttagaacaacagagagaaaaggagcaggaactacaaaggctgagagaacaggaaaaggagggcgagccaaaggaacaggaaaaagaggaaaaagttgaaccccaagagcctgttgtagagcctgcgacagaaaaccaagaaagtgaaaacaactgcaagaaaggtatggtgccccacccacatttcatagttaattatgcattctccttagttgttaatggtggagaggtgaaggcagggccttgcatgtatacttgtgatgcatcatcctctaggacagatggacagatggaacaagttttcctcaggataaaaacagtaaacaggtccttgacatagccctgactggcctgaaattgcactgtagagcaggccggcctcaaactcagaaatctgactgcctctgcctcccgaggtgctggggttaaaggcgtgtgcagctacacttgattgtcctcttcccaggtatagatcatatcatgtaaatactgagtgttaacataaatatttattgaaataaatgagaagtattaggaccttgggtttttgtcaagtaaatacatatgtgtgtaagtgaaggatttggatctgtgttctccttagagtccaggtttataagaatctgttgatagtttagtgatatgttattgatgtttttca

SEQ ID NO: 18364 - DNA, 1232 bp, Mus musculus
ggaaggggacattccaatctacaagggaattgtattgtattgtattgtaattttttttcatacaatatattctgattatggttagctctcctgtcctggctagttgacataagctagagggaacctcaattgagaaaatgcctccataagatctaactgtaaggcattttcttaatgggggagggcccagctcattgtaggtggactcacccctgagctggtagtcttgggttctataagaaagcaggctgagcaggtcatgggaagcaggccagtaagcagcacccctccatgaccagtgtatcagctcctgcctccaggttcctgccctgtttgagtcctatcatgacttccttcagtgatgaatatgggtatgaaagtctaagccaaataaacccagtcttctcccagttgctttggtcatggcggttcatcaaagcaatagtaagcctaactgaaacaccttccccaactcctcccagatcctccttacggttccacccacccaagcccatatccttccttcctctcagaaaataagcaagaatctgatagcagtagtaataagaaaataaaaacatgccgggcggtggtggcgcacgcctttaatcccagcacttgggaggcagaggcaggtggatttctgagctcgaggccagcctggtctacagagtgagttccaggacagccagggctacacagagaaaccctgtctcaaacaaacaaacaaaaaaacaaaaaataaaaaataaaaacaaaccagaacaggacaaatgggtgtggggggggcacacatacagacacaaagagacacacattatgcacacagaaatctcataaaacataaaactggaaaccataatatataagcagaagagttgtaaggttaaaataaaatgcccatataaagcatgagacgaaaacctccaaaaatacattgagttcattttgtgttagccatctaccagggggcatggggcctgcttttaagtgtggcaagtatacgcagcgagactccattggaaataactaatttttccattttgagcagttatcaattagtgttagattataggttaggggtgggttatgggttgggtaggtatcatggttaaatgtaaagtaatgtgtagcattattttattagttgctacattgagatctccaagttaaaagcttcatatagggaccagtgtgacagcttggtaggtaaaggcacttgtcatgtgaac

SEQ ID NO: 18365 - DNA, 1531 bp, Mus musculus
tgtgtgtgagtgttttgtgagtgtcttttagtgcttgtgtgagtgtatttccctatcgaagttcacacgtaagaggaaatctagcacagcctcatggcgactgctgcccagtgagtgcatctctctctgtttctggaaggaaatcccaaggggaatttgagaaagaccactcttgttagcttgaagcaatcatcatagaaacttattttaaaaagaggcattggcctgacactcaatgggagaatcagcagaacctgtacagttttatttggagttgacattctgttgtaactttaatttttttctttttttcttttcttttttttttttttttttgtttttcactggaaggaaaaagatgctcattttaaatgttgaagtgtacaagttgctttgttacaatgaaatcagtgtgtacataaaggacctgatgcttttctgtcagaacagatgctcaacagaccttccaagtttcactgcataatgacatcacgtcaaactttgtctccccaacttcgtattttttgatacgcactttgcaggatgacctcagggctgtgcagattgagaaagggatttgaatcatgtcttaacgtctccgtactgagttgtgggcacagcttgctgctgtggacttgtacccttgatttttatctcaatttggcattttctttttaaagtgggcctttacccggacctcacggcagcacctacctgctcccaccgttactgacctgttgctctgtgccatctatgagggacagccgctggtgtgtcctcattggcagtgtgaactgtcagggtcagcagtcagtgaggtggttggtagtgtctgtcacaggtatgtagcagaagctctcagatgtgagactgacgtaggtggatgaagagctgtctgctcagcgccatcgggcagaggataatgttggggaagctacctgatgagtaagctttttaatgctgtaaaatagagctaaaattcaatgccactttttcagagatgattaatggacagcgtggtcaaattcaaagctttctgatgtataaaactttataaatggaactactccatcaataggcaaagcgtaaccaaaatctgtctagatggatagtgtgtaatttctgcccaggactctgtttagtaaatacatcactgtatacgccaggaatcttgctccaataaaggaacataaagattttttttggaaaaaaaaaaaaaagaggcattgggctggagagctatatcagctcttaaagactcaccacccaaacaccaagaatgggctcttaaactgttgctctcaggcttggtttttttggcttttgttttttcattatagaaagctgggagaaaaagtgcttactcctaagataatttaaattactcaatgagaagcttaaaatgtggaagagggaaaccttttaaagaagggttaaaatctgccattacttaaacagttaatataaaatgaaacaatgttcactcctagtattgctttcaagtatattcttaaatcaaatagccgacaca

SEQ ID NO: 18366 - DNA, 1115 bp, Mus musculus
tagagctcgtgtttgttcttccatgccttacccagtaaactgagacatgcactgcagctaagacaaagtgtgcttcagtgatactgacacttttttttttttaagtaatgcatcacttgggtgtcagctgcaggtgaatggttggcctcagtgttaaccgtctgttaacatgcagtcacggggcagcagaagtaggtattggtgtgcatgagcgagcagcaaacgcaggttttcatttggatgtgttagcatcaggcatgtagagggacaagcgcagtctggggcagccaacactgttggaaaccttgcttgcatttcttacatcatttactgtgtttcactggtgcctgggcggccaccatctgccctgtgtgaggtttgattttatctcttctcatgtgctatgccatactgccccagctgcagcattccccgtggaagccgttcttcccagcagcctctgctgccttcctgtgctttgcctgttacttcctattctcctgtgtccttaaggtgtgtcagtgaagtagtgattgaactgaattcgagcaaatattcatgacattttgcttttaaagtcctccagaaaggagtggtggaacctaccttctctgccagcattcccaatagggaattcccaaacaggaagattgtttgaagtttaaggtcaacctaggctgcacatggatacagcaataccctgtgttaaactggtgttgcttgaggcttgagttgatgtaagggcagaaatggtgagagggagatgtgtagataactcagagagaggaacatttggtaaagatttttttttcccttctagaacaacttctcatgaagcataataaagatacaactcacaggctggcttatatttcaagcataataaagatacaactcacaggctggcttatatttcaagaaaagaacgaaattaataataccatctttttccctacaagtaattatactttttaaagaattctcttagtctttactaagagtagagactgtttattggggattttacaaatgaatgtaggtgtattcaacttgctgtagtggtacatacctataatcctggtacttagaaggtagaggcaaaaaagtgtgagtgc

SEQ ID NO: 18367 - DNA, 1732 bp, Mus musculus
caaatagattttaaaagctggttgggtgcatattacttttagcttcagaagatatcgtgtatatttaagaggcatttaactattataaattattctgatgacttaaaaatgtcaatactgagctgtatattttaaaacaagttttattcatttaataacaaattttaaaaaatgcagctacacatagaaaaacctggttctatgttacccagtctaattaactaaggtttccagataaaataaatccaggagataagattaacttggatgctttttccgcactacccagggaccagtccataaggcgttgttcttgattcccatcgtaacttaaatggaaacttaacacaatgttcggagctcttgacgccctgcagatgaaggaggaggatgtcctcaaattccttgctgcgggaacccacttaggtggcaccaaccttgactttcaaatggagcagtgtatctacaaaaggaaaagtaatggtatcttcattataaacctgaagaggacctgggagaagctgctgctcacagctcaagctattgttgccatcgagaatcctgctgacgtcagcgtcatctcctccaagaacacaggccagcgagctgtgctgaagtttgctgctgccacgggagccactccaatcgctggcctcttcacacctgggaccttcactgaccagatccaagcagccttcagggagccacggcttctagtggtgaccaatcccagggctgaccaccaggcccctcacagaggcctcttatgtcaacctgcccaccattgctctgtgtaacacagattctcccctgcgctatgtggacattgccatcccatgcaacaacaagggagctcactcagtgggtctgatgtggtggatgctggccagggaagtactccgcatgcgaggtactatctcccgtgagcacccctgggaggtcatgcctgatctttatctctacagagacccagaggagaatgagaaggaggagcaggcggctgctgagaaggctgtgaccaaggaggaattccagggtgaatggaccgcaccagctcctgagttcactgctgctcagcctgaggtggccgactggtctgggggtgtgcaggttccctctgtgcccatccagcagttccccacggaagactggagtgcacagccagtcactgaggattggtcagcagctcccacagtgcaggccactgagtgggttggagccaccactgagtggtcctgagctgctgtgcagacgcctgagcaaagggaaaaaaagatggaaggaaaataaaggcgctaaaagctgaaaaaaaagattaacttggataaaaaaaataataatttcagaacatcatgttctttgtggtacctcaacctcgtgacattagtacaaggtctctccctaatccagatctctcacagagctaatctttgcaaaaatgaacaggaggagcaggaggagggggaggggggagggggagggggaggagaaggagggggaggagaaggaggagagttaagattgatacaaaatctcatctagttcttttcgtgcctcctattttctcctctttactccatatttctcttaacacttcatcacaaaaattccataatctaaacaagcaaatcgggagtgcagttgcagagtaggcacagaaaacagcctaaagaagataagacagagtcttggtgttaggaaagggaaaagttggaaatatccattccttgat

SEQ ID NO: 18368 - DNA, 1184 bp, Mus musculus
ggtgtccatgacccctctgacttgctcacttctatctcccactcttccacaacagctccacctgaagtttagctgtgggtctttgcatctacttccatctgatggatgaagcctctcaggagacagttgttacaatgttcctgtctgcaggcatagcagagtatcattaatagtgtcagggttggctctctgacatgggatgggtctcaagttgaggcagacattggttggctgttccctcagtcagctccatcttaatccctccacatcttgtaggcaagacaaattttaggttaaaggttttgccgagagattaatgtcctaaaattgctatctacaaaaagatggctattatctgttctttgcttgttgctatgataagtaatatattgatcacaaaataccatccatctgatagcaattctgtccatgagagctgctgagcgcttcctacctctgtttcagattgacgaagtggccaacattaatgacatggacgaatacattgagctcttgtatgaagacattccagataaggttcggggttctgccttgatcctacagcttgctcgaaatcctgataacctggaagagctattattaaatggtgatttctctttctaaatattaaaagtagaaaatcatgtaaaacaaacctactcttgaagtttatactgagatcttaaatattttatgtttgcaagtgcacatatgcatgcttttcatgtcttaaatatttaattttgtatttttttcttcaatgtattatgaatattttcaatctatcacttatcttcctctccttttttctttacatggtaggtctattttccattctcttcaccctgcttgtgtgtttgaatctcaagaatttctgttagaactagattatgactggattactgtaggttccttaatccatttctgtttattaatgtgtttagtctgtttaacattgaatgcttataaggtagtcttgatattttgtatttgctatgaatgacaaagcctttaacatgtctatatattttttaattaggaacagttttatcatgattcttaaccttttttactctctgttttcttctattattgttttttttatgctaggtattttctagtttaccacttgaagctagttttctataattatggttccctgaggtattatcttagtgatgtct

SEQ ID NO: 18369 - DNA, 1099 bp, Mus musculus
tccctctcctgtttatttttctatttttaccatatgtttattgataagtgtccccacccccatgtatacagaaagatgtggaagcacaaacacaaaattctttgaaacattgacaagagtcttttattgtctgtttttgttatctttcagttgtattttcaaatatatatttacaccttctattgtctcaccaagtcaataggccatcatgaataaaaacaaaaaacaaaacaaaacaaacggagaagaaaagaaaagaaaaaaaaaaagacaagtttataagcatgtcaaagattggtagatccatagggatggatttgaatctttcagtattttttttctgtgcactcacatttgatagaacaaatgagcttgctccaaccacgtcaacaacaaccttccatgccttgatcccgccaggtgccgcagaggatgaccttgttttagaagtggttatcatgattgggacggtgtctatggatgactcttgtgctgccctactggccaaatctgggataatcccagccctcatcgagctgctgaacggtaactctcatgctctgccaacgcatacaagatactattatacattttaacacataaaatacagtctgcaatgttatataatatctgttttctttcattaatcataggattaactaaattatgtaattacaaaagataaactaaactaagctgctgagttggattggatagagtgatatgaaaggcctggaggttgctgtcgggaacgttactgtgaagcagctctgggctgacttcatgtgctcctccctcctctaacctccaacactgcctcacttctttctgtctagcctcatctcggtttgagttaagtcttctctatcttgcaatccttgcttcttatatcttcacttctaggtaagaatgttaacttcaaaactgatcctaaacatcatattctcttgtagatgtacaggatttttgtcctgtgaacttgccaggaaaataaatgtcacatgcctgccctggcccacggatgtgtccattgaacacttgagatgtggtggtcaggactaagaacctgaattttctatttaatttaaattgaattagc

SEQ ID NO: 18370 - DNA, 2240 bp, Mus musculus
tgttgggagttcgctgctgacactcagattgcgtatcttattaatcggggcttagtctattccacaagacagagaccatgtaatagtcagcaaactctagccagtgtcgccatttcctagtggagtaacgctgctcattgcttgaatgtgattttttttcctattctttcataaagccatgtttgtggataatgtgttaattcaaattgttttcatttgagtccagaccctcctggtgggcttctgatatttaagcatagattgtcagaggtatatattttgttatgtacattttaatgagaatataaaaggttaataatatctctgaaaattatgtcgctgtcagggaatctgaaatgtgacattccatggccctgacaatgaggtgaaaaacaaagcagcttctaacctgcctttctctttccagcctcgggatggatggcttcgggcagccactggggatccttggacgtcctgccaccgcgtatggattccgccctgacgaaccttactactacagctttgggtctcgataaaatcacccctcccatgtggacactcagcttaggagagatctgtgtgctgtgggttaaccttgaatcttgacttaataatgcatgttatactcctatggggctgtgttgcttatttctccacgttgttagcttcaggttaactctaaccctcatgtcttttgttaaatacggttgatgctccactgttcactcgtccagccacatctcgaggtgaataacatttcccgtgagtctgttgcaaaactgctagactggaaaagcagatactacattatgtactttaagtgactaatttctattggaaaaaaaaagtggcatacatgcaaaggaatgagccgaagtcatgtgttcatacttactgtggttcataggaaacactcatgtacatgggagaaacatacttttttttttaactttctctttctacttataaacttcttagtgtttcatgtgagccatgctatctttaaactttaagtgaacctcaagctttttatcccatgctgtgtctggaagtttctttcacaaagttagtaactgtacaagctttttaactagcagtgagcatatgctgtaagtaatgttatgcattagcatagtctactgagcgacccacgctcatgccatgttaactgcagcagaacaccgggcagcggaaccctctgtagatggagcacgagcatcactgagcttctaagtccgggtcttccaaaatgtgcaatatcaaatgtgaggatgctgattatttttgccttacctaagaaaattaaggaaaggactctctgtttgttcacttaagatagaagtgggtagtgggaaattgaaagggataggatgattaataatgagttttggaaataattcattgattgtaagatattgaaaactttacttgagaaaccaagcaaatgaattcagtatgggcaaagattgttgcttgatcatctcctactgaaggaaacctaagcttccgaacactgcagatcaaagggaagacttctgctcttaactttaggagcccactgatctaagtgtactagttacctcagttcacacgtttagcacaaagtactggagctcgggaggtcctttggacaatacagtccatctgctggagaaatgtaaatctagccaacaggtatgttcttacctgatacataaatgacctgagacattgtttatgtttgtgaattcacaatctgaaagcatgcagttattgtctttgtttcccttttacccataaaatattaaagccagaaaggtttgaaccagcactgtccaactctcatttttatgattaaaaagaaaaatctatgatgagagccagtgggatgtaggtaagtaaagtcactggtcaccaagcttgaagaccggagttcaagtcccagtacctacatggtcaaaggagctagccaatggctgcacattgtcctccaaccctcacctactcactgtgatatatatgcaccctacacaatgtcctctaagctgcacccacacactgtgatatagatgaatccctacacatgcacaaagacaaataagtgtaaaatatgtatttcctgtaaaattgagatgagatactaaatgacttgcccatgtttctgtattcagtcagtaacattgcccgtctctttgttttcagtgtagcaggccttgtacagacgctttcctgctgtttatcacatacgcagtctaagtata

SEQ ID NO: 18371 - DNA, 1183 bp, Mus musculus
gtgagtcctgaagaaatgtttgagactcatgagcatatgccacacagaaagccataagacaggtacctgctgtagcagttgttttaacccctggtggtgtgataacttaaatccagtctaggccccctgaagcagttgacaacaaagtccagatacatgaaatgtttagtggtgatgagtgctatgaaaaaaaaaaattaagcagaagtggggccagtgtgggggcatagttcccaatggggataaagttgagaagcccttactacagtgacagtaagtataagcctgaagcggaaggagaaagccatgtactctctgaaagagttttgagcaggggacagataacaagtgcaaagcctcgtaggcaggagcatgcccagttgctcagggtatctagtatagcaatgggcagggatgctttgcagcccattgtaaacctggttatactctgaaggaaattggaagttattaggatttgagcaaggaaataggacataatgtgtcccaagagttgacaatatcctgtattgaagttgttttttctccagccaagtttggttctcttcataggacaaggtgctgcccagcttgtcttgtattcttacttcactgatcgtcaacaagaattggttgctagagcaacatactttggaggcatttactcagtttgctgaggtaagatcaatttatcatattgatctttatattttaatatttctaatacaacattcaaaaacattgatgtgcttctctgtctcaggtgtgacatttcctgctgaggaggtttagtaatcatgtttacaaggccttgtcacgaggcctagggaaataaactcaattctcaaggctctttgctcagcaaggattaagtgttcagcgtcggctacccgactcagacactgccttcagcagcactgggggattaggactttaagtgaaaaccctcagctccgttctagagaggtgacctcccccttgtgaggtcaaatcctttaaaaaaccaaaaattggaaatgcttctgtgctgtcctagttttgtgcagccatgcctttggtttaagagtgactcgggtaattaaaccttgctttactaagtatataggagctgaaattacattgcatgtcaaggctctgttgaactatgagtgtactgcctttgagaacccttggttactactttata

SEQ ID NO: 18372 - DNA, 1240 bp, Mus musculus
gagaggaagacaggaaaagggatagagagacacacaggaagtagaagggagggtcattcagtttgaggggttttttcagcctgtcagggagaagaaggtcggtcatctggatgctttctctccctctgagctagcaggctttcccccagcatctggctccagagtttttgttggcaaaattgaatatttatgattttgataaaacaaacaaacaagcaaacaaacaaacaaaaaccagcatacaagtgtcaagtactccccttgatgctgcctgctgctcagcctacttgttaaggatactgcttcctatcatcttttgtctcctcaggtccccatggtcctctccactgccctcattcttaagtgatgaccctgtttcctgtatctctgagaaaacagatacatcaaaacatactcatatccctggagccaccagctgctaggtcctctgtccctgatgtcatccaggcagctcaaggccagcccagtgcgtgcccctcccatatcactgcttccttaggcatccacacctgaccaccagaatccctgctggagacccagctttgcaatcatgtgattggtctgaatcattgtttctgccacctgacttcccagctagtgtctggagccctcggaactccagtgtaatcactagggtgctcaccatcaagaccccactccccccagtggtttacatgcaaaaataaaagccgcagaagtccaaaaaaaaaaaaaaaaaccatactccttctggtccaaacgggacttccttatccgccccataccatgcactttgtaattactcttctgaggctggctctcccacttaagctctggatacaatcaactctttgctgctccaaaccatggctctggccgtttacctctctccattttcctctgaccttgtcctttctgcaggaatgtccatcagcaggtgacatcctatgttttattttctcttacattttattaaatgctacttattttcaaggaaaaatacctcattctagtaagttacatgtgtttcctacttcttggttccccactctcagattcttttgaacataatccctttatgcttccattcttcaacattccccttgatctctcccttgccaaatccagtggtatttgtgtagcttggctagcttacagcatttgctaccatctctctctcctttcatttatcagccttcttacccatttcttccacacactcattaatcccaggctcttt

SEQ ID NO: 18373 - DNA, 1099 bp, Mus musculus
cgtgcgagactaagcaagatgggccgcagcccacgtgcatgtgtgtttcaggccgtatgtggataacccggttctgcccggacaagtcctgtgggagctgctggggaccggggacagtgcgtggataaagaaaacagtaaactcgactttcagtagaatatgtacatatgagtgtttgtatgtatatatggatggatgttatttggctttgtttttgtgagagggtccccctttccttcccctccttgactttgtttacccctgacaagatagatacgcgctattacagaaggacaatacaggacagtagtacgccatccgaatatgggtgcttgattaggtaagactgtgtccaaagatttactgcaccctctgaagtccgtctctgggatgaaaacagacggtgtcatataattggtacttagcttttctcggatggtgaagtgttgcttcacctacaggttttatcctccgtacaggtgtttttgagggctgtgatgcacatgggccatgaccaagaactcctgcgcagacatttattcaagatacaaacttgtacgcacagcaccacagaagtgcatagtatacttcagaaatgtgcctaactcctgtgattaaagctcattatcccggcacttggttttgtcagaggagcttgtagatggagattgctgctccaggaccctttccttgagtatccaaaagagtgaaagctcaggtccgatgtcttttccctactgtcagatgagtggatgctgaataattgccaccttcttcctatacccggtttccttccttaccgcgctgcttccctgcccaggtggctgtagaatatgactcccatttaagcctccctgtcatttcctgtcagtcatcacttctgaggagcaactaactcaataacttggcatgccaggtcagagcaagaggtgacactaccagacccatttcagactggcaggatataattactcagagtccagtttgttgtgcctttattcaaggtcacctgggaaagaattgagagtcagtgtggaatcccggatccactgacatttagcaagtacagctgacttctgccgtaatgttacaccctgct

SEQ ID NO: 18374 - DNA, 2452 bp, Mus musculus
accatgggaagtttggtccctagatctagagttacagatgcttgcggttgccatgtaggagctggggcttgaactcaggccccccggaagaacagccatgttcttagctgcagagctgtctctccagcccctcattcttcatctataaccctgaagtactgtattagatgccctgcttcgtggcccctcagagccctttaagtccccttcctcctctttataaagccagtcttcatccaaatacaaagtagttaaggtcgataagtattacgattctcaacatgtgacccatcgagaaagcagtagtgcagatgctcccagaatggccactttcatccactctggagtcctcgggtagagtctgtgtgcgtacaacccatctccagataatttcatgaacgactacttttctctcttgcagttcctgatttacgccagttacttcgcagccatctctgtggttttcctggcgaatggcatagtcagtattataaagaaatgcagaaagcaggaagatcccagctccagcccccaagcctccacgtcctaacgggctcccgaagtgctgctgcttccaagcaaggattttgcaccgcagctgcttggatgtatttaaactcctcatggttcagatagctatttctgaatgtatatttcatggcttcaaagcagctactcaactaacaccttgcagtcttggagttagtataatactgctaagagaagccggaagcttttttttcttggattgcttatgagcagtaatttaagaaaacccacaaaacttgattgtgaaaaaccgaataaccaagcagcgcgtctgctctttccctgattcgcatgtgactgtgatgctttccagtcacattcatcacgcactcagacctgtggcctggtgggaccagggcttcaggagccacaggatggtacaagcctcgacagacacgttctgtcagcacttgccccggccacctcattctggtttcagtgttacttgtgcgcatgtgtgtgtgtgtctgcagatggaaatcattccccactggcagtatctgctcgggttcaacgctctgtcctctgaggagtgttgtgtctgattttattttaaaagttcacggtatgagagttagtgcttcttcccaatttgaccgttgtatatttttggaaacgttctttagaatacatttctgcattatttgtatgcttcccagagaagctcatttcattacaaaaggcacattttaaagcctgctgataactgaggagggctaatgagataggtttgctcgtctgtaatagttatgtatgaaggactcttaattgcaactgaaaaggtcgtgtataggttagagatacagggagcccattttatatttgcatacccttttatttccaaaacaaaatgagctcttttcccttgagacaatatcattcccatatacctctcattgtcttggctttcttatccaagacgagaagatatcagtcggaactggattattccacagcctttttataaactgagcctcttcttaatgattgttctgggcttggcagtaggatagacttgatgcctgcgttttggaccttagacctgcccgccttcgttcctacagttagatcatcttgagagatacttaaaagtatctcctccttacttgaaagaatgatgttctacatgctaatatttgtgagacatgaaaactatttcaaagccaactttgttgtcttgttgtataagaaatctaggtaggtgctttcaactagagtgttgaccttgttaagacggacgtagctgcacggtattctcaatactgagattgcaaaactgaagcttgacaagtgtgtggaagaccctggctcaagttccagcactggaaagaccaaagtgcaaacgtgcatgggaggagtgagggtaacagaggccatggcgtacgtcttcctttgcagctagggaaagagaagaacactaaggagatggagaactaaggtcagagtagcagtctccagtcttacattttggtctctttcctcctatacttccttgttgctctataagaagttggttgcccagaaacaagaagaaacattgtgattgcgaagtgtcattttgttttttttttaaataacatgtattatggtacaatcaaattgttcacattaccaaagcaatatttctttgggattcagttcagtgtttgtggcatctaatctgatccttctttacgtgtctaaatcaagactgtatccacattttaccacgcggccatacttgcagaatgcagaccctagtgggctgtactgtatgcactttgatgaagacgtgaaaagaatctgttgtactttttattcaatctgtatagactataaaactatttttattaaataaatattttacagtaaattttcccttttcactcagaattattttgagttcatcttcaaagggaggttt

SEQ ID NO: 18375 - DNA, 1176 bp, Mus musculus
gacaattgagtaataagggaggagacaggcagggagtggtttttggctaaaactgaaaattggtatatgaagtagaattcataaaacttcatttttctgttttccttatatagatatatctgtaagagtattagtttacaattactaaaacataatgttataactaggcatcattgctgaatttatagcattttgggagaaagggtgaattcaaattcattgaggtgttattttttatgatagctccataaaactctatggaactatgtaggtagttgtgtactgatgaaacccaaggcctttacagcacatgctacgtacatctgacatgacctctcatctgtcttaggttctgcggattttggatccagttgcctgtacagagagctctccggacaaccaatttgctgaatcttcaccaaccacattactcactacaaagaaaaatattggacgtttccatccctataccagatatgaaaatataactttcaattgctgcaatcactgccagggggagctcattgctctttagtgtgtagtctgttggagccatgctcagtacccagagtcattatttgggagcccggattagtaagttgctagaaataaaatcaattcatcgtgatataatacatacccatgaagctatttcatgtactggattccagattattttttaacaaatatctcagggtaagaaagtgaagctttgtagatatatttaaagaacagaatacttcccagtacatagtatttatgctaaaaaactaaaaagattttataactttcttttaggccctatattattattctgttatatatttatataaactataagcaggtttcattttggtgcataaagcaaaaccaggcaaactccaaccatgcattgtaaaggggtgtggccatatccatcctttaccgctgtctggctgctttactgtagggcagcagagtcggtgtgtggctagcaaagtccatccctttatagagcaagtctggtagaagagctggggtgcatgaaaaagggatttgcagtccctttatggtcacattgtgggtacacaagaggccttcagaaacactggggtaaggggctaatccttctaaacatataataggaaaacaaaagagtattttagagctacaacaaatacttcaataagtgttcat

SEQ ID NO: 18376 - DNA, 2064 bp, Mus musculus
tcgttcgttagagcaagacgagacccatgatgcgtgtatgcccttaaaattaaatttcatgtccttttggtttccagagagatgaagataaggataaagtcgggaacatagagtactttgggatgggcggatactacggcttccctctgcagtattatccctactacggcaaactcctgcagcccaagtacctgcagcccctgctggccgtgcagttcaccaacctcaccgtggacactgaaatccgcgtcgagtgtaaggcgtatggtgagaacattgggtacagtgagaaagaccgttttcagggacgctttgatgtaaaaattgaaattaagagctgatcacaagcacaaatctttcccactagccatttaataagttaaaaaaagatacacaaacctactagtcttgaacaaactgtcatacgtatgggacctacacttaatctctatgctttacactagcttctgcatttaataggttagaatgtaaatttaaagtgtagcaatagcaacaaaatatttattctactgtaaatgacaaaagaaaaataaaaattgagccttgggacgtgcccatttttactgtaaattagattccgtaactgacttgtagtgagcagtgttctggcccctaagtattgccgccttgtctattttatttagtgtacagtactataggtgcgcactctggtcatttttcaagccatgttttatcatatctgttttctactttacgtgagcaaggtttgctgtccaaggtgtaaatactcaacgggaataaaactggcatggtactttttcctttctttcttattttcttggctctgaaatttcaaaggtaacggcccatcgatgagcatttttaacacactccatagtctcttcctgtggtatcaggtctttattattattttttttttttctttatttcctggggctggggggtgggctgtcatgggggaactgccctttaaattttaagtgacagtacagaaaaatcaaggtgatgggttgtgttgtgctccgtgctgaatgctgtctcgccatctctccccgtgtcctccagtgtgttctgcagctgtgtctgagactgggatctgcctgtcactgtggctagtgatgggctgggtagtttgcttattcgtccatttcctttccttctttcctttctctggaggcatcatgcgctggtgctgcgtccttatgaatgttttgaccattttcatggtggaagaattttatatttatgcagttgtacaattttatttttttctgcaagaaaaagtgtaatgtatgaaataaaaccaaagtcacttgtttgaaaataaaaatctttattttgaactttataaaaagcaatgcagtaccccatagactggtgttaagtgttgtctacagtgcaaatccatgttctagcatatgtaataattgccaggagtacagtgctcttgttgatcttgtgtcagtcaggttaacacaacggacaataaaagaatgaacacattcctcacgtgtgtgactcgattgtctgggcgtctcagtctgtgtcgtctttactctggagagctaattatccaagatcttgaagaaatactggacctgaaaggcaagcacagtctgtcattagctacaggcaggtctgggctctcccacctgccacctgctgagaggatggaggacccaagggacctggatacacaccttgtccccaagagatgaccgagttaacaagaggcagaaaggaaggctgtggcttgtttttagaagtgttctacagtgctgttccactcagtgaacacaggaaatcttgactcctgtgtcaatacatagctcaacaaagtgttcgctgagtgtgtgtgtgtgtgtgtgtgtgtaaatgtttctattggttaaattaaattttaggtttgagactcagggaattaaatgtgtgcatctccctctggttcaggatgtactttcttggccatatttaataaatggccttagtgtcagaaaagataaaaaaattacactttctggtataatggacttgaagatttggtattgccaacatggggat

SEQ ID NO: 18377 - DNA, 3510 bp, Mus musculus
cctgcatggcaccgtcttgctattctgaactcagctggctatgaaatacacttttagtgttcaatgtggattctttctcttgcccttacctcctacgtcttgttttgtcttgtgacaccggttaattgcgagtgaagtagtgacctaaaaagctatttcctttcggacaagagccattagaaagtgaaacatcttcatgttccttgctttgtttatttgccctcattatttataaatgtttactttctgtcctttgctggagttgagataaggaaagtacatggaagaaagatccctcgtgggccagcaagaaggcatgcctgccaagcaacctaaatgctccagcgttgactctcagcctgcactggacactagtagtcagcctgtaggtgggcatgctgcagcctagtgcctaaccacacacagcgttcttgtgttggggacctcatctggtcctcatgagagccatatgagttgtctcaactgcagtcaaggaaccggggctcaggttggtttctgtgtcacagctccagctgtggcttggctctcagcctctgttttgacactgagtctcctggcatggctctcctcagagcgtctgtcgtctctcataactgttcctttcatcctcctggcctgtaccttttctgatttcagcatctatgtcaattgtgccaccttctacccgctcccccgttttgctttttggcagctacgtctgcatctgtaggatggccagcatcccgtggtccctttcagctgctcagtgcatcccttgcatcattagtaccctgtcttgacagcttgaggtcctggcagtctatgtttgccctttgctcagggccagccttgacctctgttttttcaccaccagaccacaggaggtgagagcactcatctctgcggttgttgccagttgctgaactgtggctaatgactgtcttttcttctgagatggagaactgtggataggctgatcagaattagggcagaagggagctcagtctttccagattccagccatgctgttgaaggcatcgatgaggtcttcagtcaggaagcaaagttacatgctaccctctggctgtgtgaggcacattcatgtcccagaagccttgggaatcagttcagggctcagaagggctcagatgtgagaacggccattgggaaatttagggaaacccatggatcctagctgacaggaggagtagggtcattgctgcaagctccaaccgccttgtagttatgtacctaaaaagctgacctctccgtgcccttgtcagggactgggcttgagcccaggtatcttttaaagatggtatagcaaggatgaagagcataacagtgtgaacatgggcttagaaaataagcagatccagatgtggtccagtcccatgctggtgatccagatgtggtccagtcccatgctggtgatccagatgtggtccagtcccatgctggtggaggccttggaagttacctaatgtttggttcctcagtttcactgtttcctaatagtgggctgacaagtcctgctggctcactggaggatgccggtggaagagaatgcatcaagggcttggggcgcatgtggcacagcaagttgggtctccatgaactaactgatgagtgctaaaggtgacaggatgggtgcctgcctgtcagtttgtctagcatattctgtgtccatcactgtagactgtcatgcattgtctcactgaatggtcacagtgactgtcaggcaacggataactgccttcatcataaagtagtagtggtctcagaaactcccaggagcaggggcctcagtgagggtggtctaggttgagatcaagtctggataaaaggctttggcctaattcctacagcctgtggccagtttgcttcaacagtttgtgtctggacacatttaagcagtttttggatgactgtcttccagaatcttccagactctcagattttttttttcagttgccttaaccctaggttgtttctgaccctgcttttgctggactatagaaggaagaaagccacttcatatctgctaaagtctcctaccaagccagtagtattgattaaaagcaacttagtgagtgaggctgaagtggagaactagcctctgactgtggctgttggtgttatctgtttctcctccctaccctcaattcttccccattcacacccatggagcagggcatccctgtgttgccaaccaatggggactgttgagtgatcactgtagaggcagtgtggtcctcagccaggctggtttccaggtgtgggcctgatgctgccttccctgggctgcagtctggagtgcttcactgagaacaccattgtgccttctggaccaggagagtagcttcggatccccttggctggtccaacctctactccaggctgactgttgggatgctgtggggtgggggcctgtccactgaatcctgtctctcactgtcccttttcacagatcaagcctaaggcagcttttgtctctcctgctcctctgtgtggctgctgctcagaccccagctcttaggcatcttgtcttggggaagggtgagatgcatccccagcttggccttttcagtgcttgggtgtctgtttctctcatggtgactttgtggattatgccttaattgccaccccccttccacatagtcaccgtaggctgagagaacaagaaatgaaatcatgaattgcattccatatacgattactctttaatactttggttagaataaataattagcatcggggcagtatctgaaatggatgtgaagggcggggctggtttggcttttgttgttgggatccccgtgagtgacaggttttgccgtgcacgggatgagacttggtggaatgaattggtcagtcgaggtgcacccatggctgtggatttcctttcctttgtgcaccctctgcctacttcctgactttactcttcctctggtaacttctcagtagagtcaattacaaccaagcctaaaacttatttttagttaattaaaaataaaataaaatcagtgtttaaagcagtataaagatgcctgctagactttgtggcagtttggtttttactgttcaagtatttttttttttaataagtttaataatgtgcttatagataacatccttttaaaagtgaatgaaccttagctgaagttcattgcaaatatacattttcccctagaaatctaagctgcttaggaagttttattaaaaggattgcttagggggtgatcttaaagtacctgccagttcacgttttgctttgagatcttgtgtgtttttcggctagcgaagggggaacgcagtggagtttgtttaatcccagtttgctcggggtggagtgttctgctttgagtatttccagccctgctgtgactgtgggagacatttgaaattagctggtggcagagccttccttcatataagctgacaatatcaagtcagatacattctgtcaggagctggtaactgacaaggtagactcgggatgcacagagt

SEQ ID NO: 18378 - DNA, 1233 bp, Mus musculus
tcaaacacagggcgtcggcggtttgcacggtaagaaagtggggctcttccactgggattcaaggtggaggagctactatttgtcattggctccaaagtcgctgttggtgctgggcttcctgagcgatagggacattgggcatgtcctcttcaccacgactcataagcacaagaggtgatgacactgcttggagcggtctgtaaggaggaggtaaggcagtgaagcacggggctctggatccagaaagacaaattcccacattcactctggggtgacgtcacccggagacttcagggcggcgcgccagagcgacacccccgcgctcaagtcccgcccctcagcgtctccacgtaagacgtgtgtcaccctgagctagtggtcccggaagtaaaaccaggaggggcggaagagacggcggaagggcgggcctacggcgcggcggcagggggcggggccgagatggtaacggacgcgcccaggagccgcgctgcagagagggccatcgtgcgaccgctgccgcaggcgcttgctccgagtaaccctgcggctccgcttctgccatgatgatccacggctttcagagcagccaccaggacttctccttcgggccttggaagctgacggcgtccaagacccacatcatgaagtctgcggatgtggaaaagtgaggctgtggggcggggccgggccgagccgagccgagccgagccgagccgggccaggtccggttggtgtccgggctgggggtctgacggtctcggtgcagcctcacgcggtacttggggccgcaggctcggtccctctgaccgaccgttgattgacaacttcagtaaatggtcctgttccctgctcgcggcgacctctgcttgctggaactgtagcttctcagggttgaactgagcgcggctgttttggtggacttcacctaaacctcgccgctcctttttttcctacctaagcctgcgcaacctttctgggcgcgatgacctgttcccttgcgggcaatgacggaaatggtatttatgtttagttttgagcttctttggttctgtggtgtgctcttgaggttctgaacatgaaccattgagtaccacagacttcagaggacgtgagaccgtgtgacgttactgtgtgactgtttaggatgaagatttcaggtttttttttttttttctttccttcttttagcaaatcaggtgctgtgataagcacttgagataggacagatgaaag

SEQ ID NO: 18379 - DNA, 1146 bp, Mus musculus
ccagaggagaggacagcctcagggaagacaggatttcttctgactgatggcctcatctaggtgccggctacaagtcctatccctatcctaccaagggttcctggacacatgtgccctaaggtaacaggaaacagaagccaaggcagaggtggttgtgtgcaggagggacaacctcgggtgacttgggtgctgctcctcaggtgctgtccactagattatctggtcagccgatggtgtggcagctcctcccgtctgtgaaacccagggatggatgacacagccacgctgtttgtagggcatctgcttcaggacaggcagctggacatgcttttggtattgaaggctcggggccagggtcatcagttatgacagagggaagaagaggccttggtgctgtagatacatgtgcatcctctgcctgccttagggacggatgtgatgctgttggaagatggcacttctgaggacaaccctccccagcactgcacttgcccacccaagaggaggagctccgtgacatttgaggacgaagtggaacagatcaaaggttggcttatgggagtgtctcagtagacacgtgggcaaggaggggatcctagcctcattcttaccacagaacgtgccaagacttcatcgcctctgcctccttcccatcactgcagccccactagggatacttgaggcatctgactcatagcaagcagcatccaaggtgggacaaatgcagctgtagacacacacacacacacacacacacacacacgtacacacgtatacagtcacacatacagacacacacacacacacacacacacgtacacacgtatacagtcacacatacagacacatacaaacacacacagtcacatacacaggtacacatacacaaacacacacagatacactcacagcagataccatgaacacacacacagcacagacacattgcacacatacatacacagatacacacagagacatatacacacaaccatgcacagtcgcatacatatatacacgcacagacacatacatgtagtcacacactcacacacatagacacacagtctcacacacaaacacactcagacacactgtcttagggtttctattcctgcacaaacatcataaccaagaagcagttgg

SEQ ID NO: 18380 - DNA, 1174 bp, Mus musculus
gccaagaacaggcatgtattaggtcccactgtgtgcctcacttaaaaaatggctaagagcccattaggtgctaggcactaattgaagttttcaaatgcaccatctccctttgcagatgggatacagtagggatggtgctggtgtgtgatgactgagttaagatttcaggttgccaattaactagctaggtgtccaggggcaaattattcttgcatctgaaaatgaagttttgtaatctatttatatacagggacacagaatccaaggataccgcctgcacagggtgcttggcagactacagaaatgctcatggtacatccagcacaggacataggtgcagggagacctgagacactggccttgcttttcagtgtatctgatggggccaactcattcctgttttacagggatctctagtacggggaaccttcaaaagacatgttatccaattcaggatacttaatcatgttgagggttgttgcttggggacttatttcctattcggtacaaaagggcttaatggaaatgaaggaattctgacaagaagcagacaatagagaggatgttggagaagctgagtaggatctggaatgcaagaggttagtaggaacagaaacaggcagtcttcattccacacgaatggcctgattgcacacaaaacaaatagttctacttagccctgaattaaagatgatctatagaatcccaaaggacatcaattcaacattgaccttccttatacccagaaagaacatcctgccccaccccaatgccgttaggtgctgaggactgctctgtccagcagtgacaagtgtctggctcccagttcccagagctcttgtcttccaagccctgatggaagatgtagaggagggataggtgtccatgccattccccagagtgttcagaaccagataaagcctggggatgaaggaagtgagttataacatgaactacaggaccatggttgtgaccagctatgaacggctacgaggagggacaggcgggcactgttctgtgagttggggagagagacaatgaggatccaggaaggccatagaaaacctgtgtctcaaaatgagatcagggccaaatcactatgtcttggtcatgaggctgagagaagatcaagcctgtagcccaaggagagtgatgcacaggtaggttaaaggtc

SEQ ID NO: 18381 - DNA, 1144 bp, Mus musculus
gaaatttttgtttagattttttaaattaatattttataactattctgtgttatttttctgtacaaagaagaaaaatggtgactatttgaatgtttaatttagattcttaatggctaagtgtgtagtgcagtgagtgatatgtacttaggccctatatgcagttcgaagtaccataatataaaaaactataaaataaatttaaaatagtgttttgcttttatgatattttattttcatttgtttggttacttaaatatttatagaaattatgtgtctaattcgtgataattaaagagaaacatctgattgcatatgcatagactgtctcataatttaatgactttttatcagtatttctttttagtatttctctttaaagcatgtcttatttaatctttccctttttaagtgtataatcaactttatactattttttgttgtgttactgtctcctttcttttcctatctgtgtcagaatttttaagggggcctgagatagctttgctccgtaagcgcctgcagcagctgaggcttaagaaggctgagcagcagaggcagcaagagctagcacaggcccagcatcagcctcccacttccacttctgatcctcctcctcacgagggctcttcacgggaccctcgagcttcaggttattgatgtcaagtgtgcttaagcagcttctgcagttgctttctaaccctgctctgtggagccagtgttccccagccgttcaaatgagaagcttgtgtgtgcggctcttcttcccttcctggccaaggagtgttcagtacctagtgcagagggcggggctctcaggagcatttcccagagggcaaagacacagcgatcctttagtttactgcaaaactgtttggaaagaggtagatgtttatttttaaagtttttgaactactttctactaaatccactgactttcatgcctgcattgatctttttgtagaaatttcctgtgtgtgtatagacccttagcttttcctctttgttaggtgtgtactatagttaatcagtattttatatagatctagtaattcttttagccatactagcatgcactcaatcatttccttctgttatttgattttattcagtattgtttttctcatcactgctatagtcaacttct

SEQ ID NO: 18382 - DNA, 1187 bp, Mus musculus
cactcactcactcacacttacacacatatatatgtgccaggaattgtatagctgggtcgtatggtaattctggttttttgttttgttttaagtaggagaaaaagttacttggtaagaacagtggcagaaaatggagaaagtttgaagcaatggtgaatgggtggaatagatactggggagacctagagaattgttttagaaaggttaaaaaagggggggggctagagcgatggcttagcagttaagagcactgactcctattccaaaggtcctgagttcaaatcccagcaaccacatggtggctcacaaccatccgtaatgagatctgacgccctcttctggtgtgtctgaaggcagctacagtgtatttacatataataataaataaataaatctttaaaaaaagaaagaaaggtaaaaaatgttatctttatggtgtggtaggtccaggtgattgactgtcctgctgtcagctggacagtgattagaagtcattatatgtggtttattcatttcttcttccttctctcttagtttacacccttctctcccttcctggggattaaattgaaggacatgccctaccacagaactgtatctcatctggacagccaccccaccaccaaccctcccttcctcttcctcttcctcttcctctttttctatttaattttgagacaagatgctagtaagtttcttaggctgttgttattcatagcttaaataggtaatgaatttatgatcttcctgcctcacctgggattgcagactggcactagtaaacctagctttcgtgtatacagtttccaattgtatttgtatttgtgattttccagttggaaatagcaagtatggactgtagctccagtgctcatcatcacaagcacggtggaagactgagacagcattgagcaatgtttcatgtaacattccatctaacatctcatttctgtacttaaagacaatttggggatggaaatgctccattaaagtatgctgtaagaattgaggactagagattaattcagtggtacagtatttaccttggatgcacagggattcaaaccctatcaccagaataaaaactgaaagcaaacccattcttcttcttttttaaattttgaaatggcaacttttttttctattttaaaattttttattagatattttcttcatttatatttcaa

SEQ ID NO: 18383 - DNA, 1321 bp, Mus musculus
tcccgactgctgggattgcatgcatgggtcatcacgcccggttttttcctttgactcgagaggcgtgagcaagacaacctcagcggcttccgtcatgcctctccaatccattaaggagtaggctagagcgccctcaagctcctctcctagggtgagggcaatcgtgacgcacagcggcttctgttgcccgtgtgcatcctctcgcgagaagggccgggagggggcgtggtctagggaggagagggaggagctcgcggccgcctccgccttcgcctccgcctcccgcgggaggggggtcgagggaggggactgttgccgatctctagatgttctgggtagtctgaggagagtatgaggcgagccgtggcccgggtacctctccgctcccggggagaaggcgcggccgtggctgccgccctctgagtcgcggcgccggcgaggccccggggcgcgcgcatggtgctggtgccgctcgggtgttgatcggcctgtcccctccctctcttcccctccccaccccccgcggtggtctcccctttcccaccccagcccctgcggagccatggctcggagtggctcctgcccgcacctgttgtgggacgtgaggaaaaggtcccttgggctggaggacccgtcccggctgaggagccgctacctgggtgagcgggggccccggggcggcggcgctgaggtcgccgcccagaggtgggggagggggcgccgccggggctgttggcgaccggaccgagccccgaccggggcgccccgcaggctaggtctcaggtgggatgacggcgatccgcgcccgctcctcctaaggtcggggtcccctttgcaagctgccaggcgcggctcaagctgggcttccctcggagagccgggccgtggggaggcggcactaagcccggaaaggtgttggggtcgctcgtgggctgggactccggagaagactccgcgagccttacggagatgccacgttgaacgccaaagttggcgcttttgcttttctccggagctgtccccgctcagccgaagacctcaaggtgttgcttgtccaccttcttcttcggcttccgcaaggggttagatgtcgcccgagagagacgctgttgaccaccctcagggacttgacaccccagccgggctcgctgtaaaccgtggcgcttagcccaaacctaaaagagatcgcggagccctccccacccccgcgccttcccaggtccagcctgctgtcagtcccgtagacctcttttaggtggtgtaaggtttcacgttcctgttcccacccctggaaaacacacttggcattttctgtttctta

SEQ ID NO: 18384 - DNA, 2102 bp, Mus musculus
ctgattttaagatcaattctcaacatgacatatggaatcttaactcttcaggggagcagagtccttgctctggaggcctaacatatgtctgtaatgattgcttctgttcctgtggctcagggaccatcagttcttccaaacctctaattggtttctcttctccagggcccagtcatttacgcacagttagaccactctggcggacaccacagcggcaagattaataagtcagagtcggttgtgtatgcggacatccggaaagactaagagaacacccaaacatttccaaactggacgcttgtgcagaaaatgtccataaccgcatgtggccttgaggactcgggcaaggacaagcacatgtatactcggagagagcagaaaatatgtatagaggatatgtatattctatttaatcttcctgatgtgagaggccaacgttgcatggtgaagtggtatgagtctacgtatgtgtaaattgtcttgctgtttctgtatattctttcagagtcatttctagctggaaagttttagaagcatcccgtggtcccatgcgtgggatggtttgccttattgaagactctgcagaaccgttagtctttccgacagacgtggcctttttcatctaagggctcaaccagtctaagcatttcttgtagttagagagtgaggtgttcagtggaagtgtgtctctcacagtatcaggaccgttttgttctgtgcccgtgctagctgatagacaccgtcggttaaccacgccacccgaggacagtctgagaagttagtgttgatgcttttctttatatgagggaattctgagctgagattgtccttgtcaccatcctgctattagctacgatctcacaatgagttcttgtcagcgtgcagacagcagagctggctgaggctgtggtcgtggttaaaagggtacagattacagagccccagcatgacaatagcgtgtggaaggcagcatcttcctttctcctcctcttagggacgctatcaatgaactgcacactctagatacctcctgacaccaggttctttaccatctccttgtggtgctgagaccgtgtatatggtgctagtgctctgtgggctttgttcaaatgacacctcttcttaagggctttctacatctggctccatgatctccctgcccagtcagaaccaaatcctctgttggccaagccaaccttcttccctaggcagaaaccgttggctgctggccggccttcctggactgagcctgcagcctggttccagctgctcgcaggacagtgtgcaggcctcatggcctaactccacacaccacctcccttggagtattcggtctctttcctgcaactctgcgttctgggcctggctacagataacagtgaggccacgtccagatggcagacctgtgcttcctgtgtcttctgagcagaagaatgcattcgaattgagaagagacacctaaaagggatggcttttagaattcctgcctgtattttctcctggaaatgtgtccagctggagagataccaagttcattgttactttttgatattttcatttgtacgtctgtgaatattttaatacatctttttcgatttctgaatggtgttgtctgcttgtttttaaccaaatggaaaaagagataaagccctttcatctgaaccattgcagctgcacaagcctccatccttgaaacacactacctgtgaacctacttcagagcctaaaatgggactactgctgatgtttgtgtgagatctgttctctagcttaagtgtgcgttcagatgtccccttagaccttctgcaacatataaaagccacctcaggacagtaagatggctcattgggcctgacaacctaagttaggtccccaaatccgcatgataaagtgtacatgtacgcgcacacgcacacgcacatttaaaatgatttgaaataaaacagcaactccctagcccgtcagctctgctcttgactagtctcccccacaagagcatgaatagcaagactttgctgtttgttcctggcttctcccagtgtagaaaagcacacggcacagcacagctgctttctgcatgcttgctgggcaggtgttcctat

SEQ ID NO: 18385 - DNA, 1294 bp, Mus musculus
ctgagcttctggttcctcatttatgaaatttaaggcaggcgtgggtagatcaagctttatgaaatcagataggacttgaagagaaaacagaacttgggttgtatgtgaaatagttaactgttgggatgtgcattgaacgggaatggcgcgagcagaaggacggattggtacaaggcttatggtgaacaagaggtttctaagcccattttttgtgctgtaataaaatggcaaggactgggtaatttataaggaacatagatttattttttacagatccggagtctggaaagctaaagcccaacggacccagcatttggcaaggactttcttgtcgtgtcatcccatagtggaagccagaaagactagagaggaaaaggctctttgccaaacccttgtgtgatttgcatgtctttctgtggtaatctttttagaaagaagctgacagcgtagcgtggctgttaccagacgactagaatctgcctctgagggtagctcaccagttcttgttttctcattgcagtttttccactactcacaaggacaggtgtacattggggattatccaccatttaaagaccgagtcacctgggctggggaccttgacaagaaagatgcatcaatcaatatagaaaatattcaggctgttcacaatggcacctatatctgcgatgtcaaaaatcctcctgacattgttgtgcggcctggacacattaggctccacgtggtggaaataggtaacttcccacagtgcctgatgggtggacggatggatggatggacagtggctgatgtgatggatggatggatggatggatggatggtctgctttgtttggttagctggagaataaaatttgtgtttcagggtacatttggaaggaagttttttgttttttttttttttttaattttcatggatgtttcaaactccagccttacaaatgctagccacatccgcaagtcctgcagggaaggttttgcccttccagctatgcctcccatctctggacactcggggctcagcctggcggagctgctgcttgggaactgctcagtcagtacacagcaggtggcttcctttcccacacacctctatctggagcctgtgactgactttagatgtattagtgttcagtgttaagaccaagaaagacctgatttgctcaggctagatgaggtgggctgtgggggaaggagattagggttattttgatactgtttgaggtgatattcagtgtctttcatagcaatacagagttttcttctcttgtttgaaagtgtgcggggaatgcagg

SEQ ID NO: 18386 - DNA, 1231 bp, Mus musculus
ggctctgtatttggcaggaatgtcactgctctccgtgcaggtcaccagaaggtgccgcctcctctttccattcaggcgccgtgctgctccacagtacagtaaccatcctttcttgctgctccacagtacagtaaccatcctttcttgctttgtaaggaaccatcttgtgaggagtatgaaactgagtaaatgttaggtaagattcccatcaaagtggtggtggtggtgtttgaaaataaagctttaagagcttttgataaatgtattttattcatttcttccccttttttggagacagggttttactatggaggggactcatgtatattaggctgaccttgagtagagatttggttgtctcactatgctctagaatttcttattgctagttatttcaaagaaattcggcatgtgtcgttcttttttcttttaaaaaaaaaaggaagaaaaaaatccccttgtgctacggaaatggtttagctgttaagagcactggctgctcttgcagaagaccttagtttggttcctagtgtgcatgtagtggctgacagcagtctgccactcaaatttcaagggatctgatgccatcttctgacctctctgagtaccagacagacatgtagttcacaagcacacatggatgtaagcactcatataaactaaaaaataaatctgaattaggaaaaacgaaaacaaaacagataacccaccctggggttggagagataactcagcagttaagagcactgactgctcttccagaggtcctgagttcaattcccatcaaccacatggtggctcacaaccatctgtaatgggatccaataccctcttccagtgtgtctgatgatagctatggtatactcagatacataaaaataaataaataaataaataaataaataaacaaataaatatttaaaaaagaaaacctcacctatctaaagtatttgaattttataacttgattttcttagtagcatcatttttagataattaagatcagcttctgcctctggtagttttgtattttttgatattgagtgtagaattgacattttaaagaatcctttgggaaagttttgttctgagtctctcttttttctatgtcacatccaatctcatccaataagcccactgtgatgctattgtcctgttgaaaacccttcgtcttagttcagaccctttggacctgcacactcccgagcattaaacaggacttcttgtttct

SEQ ID NO: 18387 - DNA, 1177 bp, Mus musculus
ctttttttatttggtaatctatattgggaatcattttatatcagtattaaagaacgttctgactagactagggagatggctcagccagtcaagtccttgtcactcaagtaaaacagtgatgtggattgtacaggcagctccttcctaagagccagcactgaagtgtccaggtaaaaaattagaactggggacacagaggcaggagaatcactggggcccttctggccagctggtttagctgagtctggcaagctccaggtaaaatgaaagaccctgcttatacacacatacacacacacacacacacacacacacacacacagaaagagagagagagagagagagagagaggcagaattcccttatttcttatgatgctatggtatcctcttagccaagacttacttaaacatttctctttgaaaattcacacaaacattggatttgaaaattatttttaaaatggtggtgcaacttagaaagtttcctgttagcttccttgaaggtccttgcgctatcttactggttacgtgatccttctgtaagagactgtttactcttattttgttcattggtcaaataactttggcatcacagttggtgacttgatggacttggttgttctgggctcttcttgccatctggagtctggtaagtgctcacctccagggagacagaccctgaggagctgagggctttcattccattcaacatttattgtgtgtcaggaagcaaaagacacagttatctaaagtgtctgggaaagtcttagatgcgtgaggtgtcctaagcatctgtcactcaggtaacagtttgtgttcttctcccttggttgtgttgtaagttgtgttgtagtctctctgtgtatacaactcacagggtaatgagctaccctttgatcaatagagccagccacaccggaggtggtaaactgtccagagactctgaaacaatgagaacgtgggtttctctgctaagtagggaggaagttatatgaaaatcctgaaatacagcacattgcacatcctcaggcactggatcggaataagcaacaaagcccacaggaagcggaaactagtttgacatagtccatttcttcacgttgctaaagtttttaaaatgtagtatgtgcgtgcatgtgcatgcatgcactagtgctgtggcatgcactagtgct

SEQ ID NO: 18388 - DNA, 1180 bp, Mus musculus
cctaggaaattaaaggagcctgtagtgttttgttttttttcccagaatacatagccctccacctggccttttaaattttttttatatttttttattaggtattttcctcatttacatttccaatgctatcccaaaagtcccccataccctcccccccactcccctacccatccactcccactttttggccctggcgttcccctgtactggggcatataaagtttgcaagtccaatgggcctctctttccgttgatggccaactaggccatcttttgatacatatgcagctagagtcaagagctccggggtacctttttaatttttaagataatgttccttcatatcttcttccaggtgcggactagaggctcaataaaaagacgtcctccctcgcggcgattccgaaggtctcagtcggactgtggggattttagagattacagggctgtggagccatctcaggaaaacggtgccagggaagagaatggggatgacgtgtttgctagcaagagcaaggaccccgggtcccctcaactcaaccaggaggctatggcagacggggtggagggaactccgtggtctgcagaaaagccacggagaaggaacacgtgtaacagcacagagaagccagaggagctggtcaggaccccagaggaggcgaatgctggagagaaggttggacagaatccagacacagctagtcagggtcatccagaggtccaggcgccatcgcaaaccggcagcccagaggctgagaatgggtgcggaagcccacgggaagagacaaccccgggagagcatacagacactgggaaggccactgaagggacagcctctgaggagagggtagcagatgaagataggctcggacagaaaagcccagacgcaaatatgcctgaggaggagggagtggtcagggagaaagccccacaaacctcttctggaaaagcagaaggtactactatcgcagagccggatacaaagcaaaaggaggaggcgcctctggagccaagctgtagcccaggggctgaccatgctgcgggagagatcaccagtgagatccagaatgagaaagcagtctccatggtaggtggccctgatggtttatgctgtatcaggaccagagctgcccctatcagctctgtatgcagaagcaaagtcaacagcgccctctaccca

SEQ ID NO: 18389 - DNA, 1099 bp, Mus musculus
cggggctgtgtttctctcgtcttctcggagaatgaatgaccctttaagtctggccagtccagctcatgagataacggtctctctttccctctctaggtgaagcaggatatggtggactgagtcacaccagagaagtgtcttcggaggctcatgcacacttgaagggttggccctgcttgggacgtctccagctgtcagcttactctgccacctcttgttttaatcttgtttgcttgtgttaacagagagttgtccgtcagaagatgtggttgctggatttttaaaaaagaaaaaaaaatgtattttgaagccattttcagagaaaaatgccattcattataaccaaggaagttttctttcagccattcccggtggcttttcctcagtggtgcccacagaagggcaacatagaccagctgtagatcgcccattggctctggaggaagagaggtgcaggtgctttgtgcccgacggccactgtgcctgaggggtgctgtcctcacacagctgcctcaggagtctgtcagaggggcctagagtcgggaggcctgggcagggcgtgggtcccggatacagagtgcttgaatgaatccttcagtcgaggacagcaatggccacacacggagcttcccactcacgtccacccgtacagctgatccatcacaaggcaaaactgggtcctctataaaactccataaacatcatacatcctaaagtcatagttacccaggacaaaataagacaaaaagattttcctgtattcattttccacccaagtagactgtatatttatttctcatccttcaaaacacacacacacacaggagctggggtgcagctttcttggtagagcgattgtctagtatgagaccatagctctcttccccagcattgaaacaaaaacaaccagcaataacatttttatttgcatgagaaaggaaccgcaggaattttacatatgttgggttcctttttttgacccaacaccaaccataaccccagcccttctcgggcactctgtatctccaggctcctggcactgcagcccggagtcctccatgggagataaccacggtaccacggcatagaaacaaactac

SEQ ID NO: 18390 - DNA, 10966 bp, Mus musculus
aaatgacacctgtcattggcttcctcccaccatgttgtgaggaggaagaagacatggagagaagaaaaaattacacataccagaaaaaggaaagaatggagacaggacagcatttgcctaattttataataaaacaatgtcttttcaggattgcttcatggattggagaactttctaaccaaaaattttaaaagaaaaaaaaaaaaaaagaaacaaaaacagacagacaaaactaagtgaaaggcctacttaccatgtccagcagtcatgacgacaagctaaggtgggtcaccagttccaggagaggaaggggtctttttctttttctttctttcttttatgttattgttttggtttggtttttttggtttttttttttcttttaaaaaaaaaatcatttttataggtctgttgtacagaccattaagtcataacaaggtgtttataatcatatcaattgtgttgggggttcctttcttaactggtacaatttaggcaggcctgtattactgtatctctgatattgtttgtttatacatatatatatatatatatatctatatatatatattgaacatgtttatctcttgctcctggatcctgtttcagtgagcgcccacactgtggggagggagggtttgggatcaagggagacttaggtccttaactcctgggaatgttcgtgctggtttccttatccttggtgactcttacagaggtgctagaaaacgattttcttttgccacttatgcaagaggcttggtgcagaagctgaaggcagtgtgtgcaaacacttctgccttacacacgcccctccccatcaggcggtgcctttggagcacttgtgtgtaggaaggaattcctgctgagccgtggctctcactcaccccgaatcattgagcagcctgaggcccagaccctgtggtgcaacagtgacgcttccttctacttcccatgggaacagctgtgcctgttgcagggcagggtttggttccgaagagcaaagactactgcagacacctgacttggtggctctcctgatttcttatctcttaaaaaaatgctcctactgttagtgtttgtttgtttgcttgtttgttttttcattttatgaaaaattttcatccaaacttccttttatttacttggtcagaatcgaattggcatactgaagttgtgcgacagttctctcccttgttttctaaagcaattctgttgaactgttttctactaacgaggtatcccagagaggtcagtatgaagagcctgagcgagtgtaccaccgttctctagagagtcacagacttcctgtccactgagtgggtcacaagtttctccaagcctgagagtctcctcagtcccctgactgacagaggccctttcctggctgggcaagggatctgtggaacttcagagagatgctgagcaagaacttctcagcctcaagtgtctcttggttggttaggcccctgctaagtagatctgatgacgacatgcatctcctatttgatgtaaaaagtgatttcctcctgtaattgctttcagggtgtttctagactacataaatgagcccattgaaaaggaagaacttgtgaaaatggatgaagatggatgagggcaatttagagactaaattcccccatttgtcaatatcctattattatactatctgtaccagaatttttacaaatgacggaatcactgcagtgaagctctgagttgcccttactggagttaaaggttcccatttggcgtctgagggcacttgcttcagttcctggtggtctgcactttgagctgggagtgactctccttctgattgctttgctttgccgcaggaaactgtgcatttgtttctctgcagagaaaaagttcagcgaggcagtagcagacacagatgtgtaccttttttgttgttgtttctcagttgggagaaggtcatactaatattaaaggtcaaaaacattttgatccctttaattttttttagttccttttggttatttcccagagtatttaattttcacccctgaataatttcttttacctttaacttttcctaaaatccctccaaaaatcagtgaactgcaagcagggaaactcacagatgctcatccacctattttgtatggtgtgggtgttttgtttgttttgttttgttttttaaactaagcttgaaccaaagtcaattcttagcaagctgctgtactaatggactaatggttataatgtgcagttcaaacacagtgaggagatagatgctactgacaattcttactcatttttcttgattaattttatgtgaaagttgctgcttgtttttatcttttatgttggtaaattgtaatatcctctgggcagacattaccttgattttagctagtttgtttaagtcagtgtgtaaataggatggcgtgccagttactacttctcccctccccaccagcctttctctcttgttaatttaatgttttctcttgacttaacactctaatcttagtctgcatgtggttttaggcctgtcaatactgtttctgccctagcagagagtccctcccttgggagtgaggaggttaggaagaattcagggagagaaatgctgattacctaccagacagattagcagttatagcattaatttccagaattgctaccaaaggaagtagagagtcccaagaggctctggcccggggactaaggaggacagagggactgttttgtcatacgtggttaaaaggatctttttcccaaataagagtcccctacagactttgattttaaaaatgatactaagttttatgtttttgtcaatccttcctctgtagtctctagtgggtttgagaaaggattgctgcctttttatgtagttaattttttgaggatagactttaaaaccagcataaatactgtattgagaagaaaaggatctttagataaagataactttaattttttcctaccctttttcatgtgtttaaaattaaattgtaaaatgaaaggtactttatacatatgtatacatgaaacactactaaagttttctggtgggtgttcaggctaaaataccttccgtgaccatccctaaatggtcgttaacctactatacacaaacccttgggtagtttttacttgataccattttttttaatgatctcaaatgctttttaaactgacaactgtcttctaaggtaaagtactcagacttaaaggttcagctgccttttatgaaagaatgtagaaaccaaagaggttatttgactaaaagacacatacagttgagtttctacagttcctgagtaaacaggttgttaaacctgttagttcattctccttttcttccccttgatatttatgcttgctttatttcatccctaaatttagttaacacatagtaagccaaagactaattctaaatacatttaggggatactatatttgcctgtgataatgggccctccctggagagtagtgaatgtaattgtttaatcctgtttaagcaatgcagtttggcataaactttatttatttcctgtgtaaatctaaatgacaacagaaaaatctataaggtttctcacaagagcagtcttactgttgtaggaatagtaagtgctctgttaccttgaatgtctctgaagccctataggcagctccataaaatgaggaaacattattcctagccatttgcttccttaatgtgttgtcagaaaggtcagccccgtcctgtgtctgtaacttgttactccaaaatggaaccaaaggaatccggctttcagcttgtggaggaccagcctgtttatattctcataagctttattagaaattgttaaagggatatcagtgaaaaggttttaggtgtgatcatcttgccaacatgttctatatcatcatccatttgttttagggaaaaagcacaattatacctctctaatattattgtgtctattatctattcttcaattatttgaaaaataggggaaataatctcttcactatccagaagcacaggtttttgcttgacaatatttcagttcagctcagtcattattaacatttaacttgctggaaatgccaggtacatttataaatatagggatgttatgtaaggaaaaaatactatagttcctagtctgaagttcttcttaagccatgtcatcctcacaaatctttcttgaccaaaacaaagagacatctattttctgttcttccccaagaggggagaaatgctgccctagtgtgcaggagacagtgtcctgctggcagcctgggttggccctggccctgaggaactcacggaccagtctataacctgagcatgtggtgaggcagaaagaagggcctcagcagctcagcaagagagcttgagcagaaactttacgttggcttctgaagctgatgaacataaagtgtacttattcctcaaactctattagaactgtaaacatttaagactaccagtactaatgtaaggaaaatacttaaaagacctgaaacccatagttatacaagtgggcagaaattgatgtagtaatttatttataactgttatgagttcactttcatttgtggatatgaacagtatttaccatgttatattgtccatataaagagatccatgactattttgaagtcattttcagatacttgtaaaaataagacttccctaatattttgattttgaagaagaaaagcaattcttctttgccattcctctgagaataaaacactgttccacaggtttgcatggattgcacacacaagcataaatagaaaaggcggaaataaggtcctttgattattaaaggttgatggaataatctttgcctcatcctctaattcaccaatggaaagtaagtgtaaggttctagcagggtggtcaggaaacctcttcctcagcattcgtccagttcatacccggtgtatggtaggatttgtgaactgggtttcttccaaccatcattctcttcatgaaccaattccttagtttgacccttctgctcttggcctttgctggaagcagtaaacttgagtatatcacgtgtcgattcagtgatctggatctctctgtctcttttccttctcttattcatttgagtggtggtaccttattctgtgagaataatgctcatggggaacagcttctggcaccttcataaaatacctcagcatagcttagcattgttacagaactggttttagactgaaaaaccaaataagtataagaaaaaatctttataaatagtggaaataattctagctgtagtatttagttgaactaatgtttattatgattgttaaacatgattgatgctgtatgtatttggggtcctgtttatagagttagggagggttgggttgggagaaaggagaaattgattatgttagaaggaaaatattgcttgtgtgtatttgtttttctttatatctgtcttgccaaaggaaacttgatattccctatgaatgggttgggggtttgaggcctctctgtgatctgatatgcagcacagtatgcagaaccatgcaggtgatgtgtggggtgtccagtgggttcaggatgcccaggcacaggttacaaccctccctgtctgtggctgtcatgcccttgccccaagacctgccaggctctcctgacgatccattacctctgtgcatagctaaagcttaggcaaaggaagagtgtgcacgtgtccaggtgtgcagatgaaaagacagatatgaacgtgaacccgaggaatggagcggtgagtgatgtatcttgagctcggaaaattaacatgaaatgagtcatcttttgtcatgttagtgattgctgtgctagtagtagcccaacatttttaaaactttatttccttttcttataccaaggataattttgtctagaccaaaacacaaaagaaaaccaagccaagaagttgaaagctaacacaagtcaaaagctaaccctaccctgtactaaggtggggcatttaaggactgggtgatgagatggaagaagagttgttcttccttttgggaaatgtgaataagaaattatgttggtttaggaaaaaattaaaaacctttctgcccttgttctgtctgggacagactttcttagctccctgagttctaatgtaaactatatctcaagaactaattttttatctcacagaacttgagtgggatttgattttgataccaaagacaactgctaaaccattgcttctcaagttttccagacactcaaaggccatagagcaaacactgaggttggaaagcttcgtctcgtctctgttctccccatcggcctcaccccttcctcacttttggaagatgtctttttggttactctagctttgggaagagattggttttgttcctccctgctgctcggttgagattggtagagtttgctcagcataacactgatactctgactgagaaagaaacttggagtgcaaaaaatagtagtagaacttttacttacctttatctagttcatacaaataaaactaggccatccaacctgttggagtaccagtcaggatttagttaggaagagcagactacagccgaatgacatctccttcctctcctgtagagctgtttttgctgcacagtgtgttaggatacggctgctgggaggctaagaggcttcttatgtcggcaggctttagataaacagacagtgagagaggaaagaccaacaaccatgatcaggttgctaaatttcatgaaagctttacttgttatcattctgacattatgtaagtagtgttagtgctgtgtggttttttctaagcgttaggtaggtttgtatggtatagggatattgaagataagagcacggaaacaaatgctgtgagaagcagtgtgtgggtcgtgaacaccatttcagctgtgaaagggacgctcccaggttcagggagggaaacagtttgtgatctttctgcatccctcagtctgcccacgctgcacagagctctaccacccttgccacgtcctggttcaaatccagaaccctgtcagaaagttaagaaactttccaaactaatgtaccggaggagggaggagctgaggtccgctgcaaagttgttcatcactgcaacagccacaacctcacaaaagcagctagaagcttctttgctaaattggcaatgctattgatcactacatcccaaggtctgcaggcagctggtgacagtgcagttccaacagtgcagcatctgcatgggagatctttatgtgatcttgttagagaaaaagtagacagccaatgcccatccatcccagagagtgtctaagaactacaggaggaaacaaaatgttctcacacgggtgtgacagtgtctctgaggagcactgtgataggctgggtgggttccattcctacatgagtctgcagaaggcacgtgttgtttgtaagagtgacatgaactagttagtgctagcctggttagatttaaagttgcaaactgtgggagtgggggtagtgtgttcaacaagactgaccatattacaacattgactttctacaatatagatggtaaatggtgagaggaagacttcttcccactgcttacctctgcttccatgggaatgtgtgcattactcagtccacaggagggctcactgagggaagtgtcctgcccctagagtggccctcagccattgctctcctctgtggtagtgaaggctaggtgagtaagagtgggggtttctgcccaccacctgtccaggagctgtcgtatacctcatttctaactctaactcgctttaacttcctctcaaccctacagagttgccaagtctgccctccctcttctcagcaacattaaactctggcctatagcatcataagacctgtcgcctggggtgggactgtcccgccccaccccaccccaaagcctctgaatgtctctgcttttaagctactagaaactgagggcaaattgcaatctcctgtttgtctttgttgctaggggtcctcacaggttttttaccatgtccccaccaccttgccttcaaggatggccagctctcctctccccatccaccctgtatttcaaagtgctggatagacagcagcttctgtccttgcttttccaagtggtctcaaggctgacctttcccttctgaagccttggggctctgctcattgccaggacttggtagaaaggacacgaaggttcatttaagctgacctaagctacacatttcacttgtttcccgtgtgacatgaccaaaaagaattccaaatatttaagtttattattaatatattataataatagttattattatttgacaatcttatatccgacgggctttctggaagctgcttctccggccctttcaacgttttctttgaatgtagttcttaacttgcaatttccacccccaaagttggagggggggaaagctcagccaggtcaggtcataatactgctgctataagccaggggagggtggtttctttgatttgttttgtttttccatttccagccaaaaccaaagatttcttaatgattgtataaactcaaaacaaacaaaaaaaccaaagaaaagggaagtcttcggccccaatgcagtctgtggcgtcctggcacttggaggcatgccaaagggtaggtggggacacctggccagctcagaggggcaggcaagtcttttctaagttgagagattcattcagatgcatgcccaggagttttggcccttgctcacttctgagtagagcatgcatgaaagaaattggaacatcagatttttcaaaagtcccatcctcaccacaactcatgtgacagcagccagggtcatcaccagagctgagcacagggccttagagctgggagctgctactgggtggccatggactccacagagtggggatgctgaagacgctggcacaggattggctactctgctgggtgctttcacctttggggcgggctcttaacccaagggtccttgtgagttctgaaccttctctctctcttctgttcccgaactgcactgcttggaagtggctgtcctgtttgtgaggaaacatgcagaacaattgtcaaacttttttttaatcttgtttctagttttgtttccttttgcagcaccactgtgcaactatgcattgtatttcataacctttgtgctaggtagacgcctgtgactttttaacttgggggtgggtgggttgcgggttgcaaatgaaggaaatttttacatggatctttttaatctcagttgattgggggaggggggttttggttctagggtcatacaagctctatcccaaagcaaaatccaaatgttaataatactagcctgatgcagataccaaagacaatttctttcctgcagaaccttagacttgtgtactaagtacgattatccggcacttgcattagtctaacctcagtaattccaaagcttagatgtatattttggtatatttccaggatattaaaaaaaatgtcgtttaacttcttgtttgtttcagtgtaatgctcttaaagtcatcgcatgaaataactgcgctgtcctattcttggtagtttgaaataatagtatttttgtatgttttgggtgtgtctgtatgtattaacataacagttttcactgcctaggtgttcatataaaagtgagaggttctgagtgtacatactattaaataacaatctctaccagtgtccacggagtgtctggaggcactgatgactgcccagctgggatctggttttaaagagacggtgattgtgttttctaaagatgtttgcttctgtctttaaatatcttaacttccccacttgttttttcctacttttttaattactattgattcaggggtgtttttccactgttgtcaagggaggaacacaagggaactggcaccttggcctcccaaaatatgttattttatgtattttaaaatgtgagttttgagttcttctttgtggaaacttacaacatgatgtacatgattctttccggagttgcccagcagctttaatgaggcagcagcagcagccgttcctgggtagtttattgggtgtcctctgacatttctccttaagatgaatttgcagtctgggtggctattgtgtagcctcactgccccagaacgtctgtagccatttccccttcaatggggatattttataagattcagctgatagctcggagcactggccctgttatctgtgcccatgggaaatgtgtttttcttgatttggaaaacctgaaacccaaacacttctactaactgggcatagcagatagctcctgaggcctggggaagtggtgactgtgagaggtgctgtctctttaaaaaaaaaagtgccctttttgtgagcccctccggggatcaccagagggcggggcttgggagagattgtgtgggcgccagtgaatcagagtgaaatgctgggttttatgtagatgcatttgtctgctgtaattttttatatatattaaacttactgtaactgtacagttcccatttctgttgtaaaacattaaaccattttccaagtgttttcacattgtctgtgtctctgtgaggtcactgcctgggcgttctggtgctctccacaagcatttgcacggatatttacacaggcctccgaaacatttctccccacggttctccctgggaatctcggagtctgagcaagcacctctcctggcttccttagtgagcggtggccactgtgtttcccttctctagacccgccactggatttagtggaaccctgagttgagtagcaatagtctccttcagagctgactgctttgtatggtcaaacacaaaggcccttgactgatcctgcagtgtgtatgtgtgtctgtctgtctgtctgtctgtctgtctgtctctgctgggattgaacttgactctccaggctcagttgtttgtctgacaggcccaagaacctccagcatttcttaccaggccctgaaccaagagtggtggagtggtgggagaggatcc

SEQ ID NO: 18391 - DNA, 1427 bp, Mus musculus
gggggaggtataccaggtcttctctgctccgggaaacagagtctaaatcctgcagttacaagttctccaaatctaggtcacaggagcaggacacctccttccacgaagccaatggtgacactgtgcgaaacacctcacggttctcatcttccaccaccaaggaggccagagagatgcacaagttctctcggtccacattcagcgagacctcgagctcccgagaggagagcccagaaccctatttcttccgccggacccctgaaccctctgatggggaggagtccccagagccaaggcgtccaaactggaccaggcccagggactgggaagatgtagaagagtcatctaaatcagacttcgctgagtttggggccaagaggaaattcacccagagcttcatgaggtctgaagaggagggagagaaggagaggacagaaaaccgagaggaagggaggtttgcatctgggcgtcagtcccagtatcggagaagcacaaaccagcaagaggaagaagaaatggatgatgaagccatcattgccgcctggagaaagcggcaagaggaaaccagaaccaaactgcaaaggaggagggaggactgagcggaatgaggccctccttggagacactgggaacacggaaagaagccatttaacactgggcttgggaacagcttaccatgacctgccaagggttatgcaggctcttccatatgggcaaaaatgcaagcatccaagtagaaagggcctggacagtagggtggagaagagacaagagccattcatgcgagccccaaattctggaccagcttacactttctatcaccaaaggccctctaagctttcctgtttcccttctaagctttcctgtttcccttctgcatttggtagtgtccaccacagagtggagaagtgagtctacaaagccactgagaaagacctgacttgcaggctgtggttctcttcattgaggtttcgcaatgagacccaggtgatccattctgttgtgattctggcctctccctgccaatgcttgactatcatggcttcttttcaattaaattgatatgctgtcaaatatttcttcattctggtcatttccaactctggttgctagaggaacctcatgttaaaaagacacagctaggttttcgtcagccagccacactcgtgtgccaggctccgtgaaagccgtgtatttaaacaaccatggttgtctccttgctaaagagaatgatgaaggatttaggatatgatacagccaatcagaggccattgctcacatgaggtagagagggtcccctaagaatggcagtaaaataagcatggaagagacggaaagatgctcaagtcaaagtgataaggatgtggtttgttaatgagagccagtggccattcttgcttttaatgtaagggagagtcacttagtaa

SEQ ID NO: 18392 - DNA, 1176 bp, Mus musculus
caagataaaaaggagtagaaccaagctgttccctgggcggagtttcctcagaaaaaaagagacacttcccttgtgttcatagtccaccagctggaactctgcaaggtcctacttccttgcaaaggacaatagatcccaggtttcagggcccagggagaaggggaagtaagtttgttgatacatagcagcattggccatgttgtactcctccaggcagtctacccacgtcagcctttgtgcccacacagaacacttttattctcagacccaaatgtatcagctcacagtctcaccaggatgatgggtaggaaagtttccatcctatgaaaggagaggaagatggagccgtcctgctactggtgaacatggctactctagaaatgaggaaatctagtctaaccaggacatgtctcttgagaggatcgctcttatttgccacttcccttggcctctcggtctgcagaggcctgtgttcattgtcttctactgccacttgtaaagtgggtgggaaagtgggacttccctgaaggttgaacggcctctgcaggttgtatcttgctcatggaaaatcggagcacataccacccaaagttcactcttcaaaaacttagtagactgtgatctcagtatgcaggacagccagcaccccatgtcaaccctgtttgtgtctttcttcctcggcaacctaatgatcattatctgaatgactgcctgaaactagactttaaggcaggaagtctagaacgtgttgtagtttgcagcgtaactactggaaactgctgcaaaagaatccgtaactagtgtatcgctaaagagggaaaaccggtagtgtgaaatataatcagcaaggcgggagaaagcaaaagaagaaagaaagaaccaaaaaatacagaaaaggtacaacaaataggaaggaaaggtaaaatgtgtgtttaattagagacataattgcgttaaatatgaatagatcaaatattccaattaaaagagcaaaattatcaaactctcttttaaaaagtcggcatgctgtttgcaccataaggatacacaaaggctaacaagagaaaatttgtattttactgattgttcagaaaccagtgacataaaacgacagtgaattatgttgataattaggtacctggaaaggcccaccggggtgagcgcgcctttggttag

SEQ ID NO: 18393 - DNA, 1151 bp, Mus musculus
ctcccctgccctcttgcctctttccaggctacaagcctgctagccctgcactgtctcctgtgcctctccgagcctagcttttctaagtttactctgtcctctccacaactgactcttgtacctgtctgatgtgtgagagggaagaagagtggctgaggtctcttccttccccggtccctgccctttagctggagtctctcccctctacccagtgtaggaattccggtgttcagacacatgatttacagagacatactgaccttggaggtgagggcaatgaccctcaagctgtctcacattggcaacgctcaactccattcccctgctgtcttctccctccctcccatgcgcccagctccctctgtcctcagagcaggcccctgcacagggcaccagctactgcccttggaaacggccttccctcccgagatgcatcctcttcgccacccactgacctttgggccacttccttttcttctgcgctggtgagtcaggcatgccacagacatctgacgcgggcagcacagacacgactttagacagacacttccggttaggacagccgcccagttcattggagaagaataaagtgtcacttggtgtcccaaagctccctgcccttcacttgcccaccagcttgctaatacgtgccctgcgagggagtgggtaacacaccgcgagtgagctttatcctcctatgacgcgatccattcccgtgttcctgccccttcccaagatgctcttcttctctgttctctcctctgtcttctatctcttcctctttagaagctcgttcactgtaacctggaggcttcccaagcctctctatcctgtctggaggggactagagaaacctccagagtctttgtctggtttcagctccttcatcatactgtgtcaggcaagctgcgggacacagtgggttggttgcttgtgccgcctccgcctcttggctttgcagctggaacagggctgctgcccattgcggggaaacttagacgaatgtatccggaggcaaaaccctaaactgccctttgatacccaaagtccaaagatagctgttattgatgctgtctttctggtttgttgtcttttagaattcaccctgtgtctgtggtcatgcgggactgtgggttgtgcagacacaaccc

SEQ ID NO: 18394 - DNA, 1219 bp, Mus musculus
agattgagtcagggcaggtctacaccaggtcctgacagacatttcctctttctctcaggaaagagtggtcacctggaattttgtgacaaagaaatacatctatgggaaccgttatgagaatcgagtgagagtatctaacgatgctgagttgtcaaatgcctctatcaccatcgaccagctgaccatggacgacaatggcacctacgagtgctccgtgtcactgatgtcggaccaggatgtcaacgccaagtctcgagtccgcctcttggtccttggtgagtgtctctgtcttttcctgtgggaggagggtgggcagagaggcgctgtcagcagcagagccatggttctgtctctccctctgtctctcaaatgctctccgggggttctcggtggctagcagggtgtttctgagggcagaggtgtggctttggagtcaccccttgctcccgttgctcgttgccctccataccaactcttctttccccttccaaactcattactgaaaagaagtgaaggggatcccccaagcaatacacgggttctcatcttgtgtggcactcacagggccaatcgtgacccccataggtgactctttccctgctctcaactctgttccacaccagtttttccacccttcctctaacaaaggcacagtcgccaaccaatgggaagtatgtcccaggatagcatccttttcacaggagaatttgttggaatttatagttttggagaggcgaggaaactcatctgctttaatttctgagtaggtgaggcccacaggaagtaattgcctcaaaccagttactgggattgctttaatgagaatctagtctatgtgcagtgtgagcaaggccccacttctgggaggtagcatctctgtgcatcaaaacagaggatcctttttcctctttttcctttacactacttggcagaagctcttttaaattgtatgtggtagttgttggactcatagaaagccttatagcgtgtcagactacactgcggttatcaactaatgctgcctaaagaataggcaagacctcttccaccccgccaccatgtggcaaccagtggtaatgcaggcaggcgtcttagacttcgcccggcgttctcccaacgcacaccacacactcagacactttgctctttcctgtgaagacgtgagatattataaagcacttagcaagttgcttcttgacagcgcaccgtgaacacctca

SEQ ID NO: 18395 - DNA, 1507 bp, Mus musculus
cccttctccccagccccatagtcctgctcctccccccaggcattggtggagcacttctttctgtgtatctgcctcaggggcgcatcactggcctggctactgacgtcctacctgatgaccactgaaaggacccttcctcattgctaaatctgactcagggtctggccttctccctagaccagacagcatcctctgcctctcttacggctggcagggcctcctagaatctcggcacgatgcagggctgcttctgttccaagctcgccatacaggcaagcgccagcttcagcaccagtttcagaaggtgggagtctgccctgcctcaccatgcccgacactcagaggagaaccagtgatgggcctgcacgcaatattttgttgaatgaagggaagaaatcaacgataaggtgtagtttctgtgatttacccagcttaattgcgccccccccccccccatgctgaggggccacggtggcctccagcgtccccctctgctccatctcccaccatggcgtttctgttcctggacacacaccttcttaggacttctccaaacacagttccatctctgcctgtcaagggcctgcctgtccttagaactcactagtcttggatccccaaatctttcttaatcctgtgactgctaacacaccaggaggcaatgaagtcactttgtcccacacctagacctgggctgcatgcaaggccatcagagctacacttcctgctgtgttagagtaggtgccctggagcaaggtctggatcttggagcctggcagcctcaactggggacttgctctcatggacagtgctttgcctcctgggtgtgacttgggacacctggtgactccacccaagccccgtgttagtctggctaggtgggcagactgatttacaatgaacacagacaaaagcttacttccctcgcacctgccagctgccctgcctgccgcagcctcccctttccattactatccaggactcaggccagatgggctgctccaaatgtgttttactactggataaacctttctggatcaccagaaaagcaactgtatcaatcccttccctcctctgattttatgtacacatatattttatatacttggctaaattctttgtttcaatcaaaatgtttctttatcaataaagttactggtggaaattcacttttctttgttcacccatcttgtctttccttcctgccgagtacacctgtgcctggcgggtcggtgaggcaaggtgaccagctagagaatcttggggttctattacttgtggccaaggtaagggtaggcagtgactctcaaagttgttggggacaggacagaggtcagcctgatggtggaggtatattccgagagcctacagtgtcagaagacctggcaggcgtggtagtcatccatgtgcttccaagatggtgacagacactcccttgcctgtgatacctaccctacagtgccccttctgaggagatgggcagatcatcctgttacagagaaccatg

SEQ ID NO: 18396 - DNA, 4243 bp, Mus musculus
tctttgcctctgcttcctgcgtgcccgtccatacccatagactgtcctcacagccccgcccgtgtgcccttgccgcatccccgctgtccctaacactgccggtctctgtctcacagtggccatcaacctcatcgtgcaacacatccaggacatcctcaacggggggctctccaagcggcagacgaacggctatctcaacggctacaccccttcccgcaagaggcaggcgtcagagtccagcagccgaccacattgactcccgtgcccctgactccaaaccccagccccccagctccaagacacaggaggggtcgagaggctctggtcacctgtacatacgcctcctcagaaaattactgtatttaagaaaacaccacggagatgaaatgccttgatttccctttctgcctttttgtactttggaacagcaaatcttgatggaacttgaccctgagcttaagtgacaaactgtgccaactagtactggtgatgcctaattatgaacccaacgtgtaaccagttataaatacacacatacatacgtctatataaaaagaaaggatctatttttgtgtaactgtacagatactgtaaagctgtttgccataagtatcctgtaggaacctgtgcgtgggtgtcgggcctggagccccgctcagcagtcagtgttctgtgctctggccaccggggagccacgggagtcgggtggttgattggttgatgtcccttgttctcagcaccctgggcctcagtggggatgggactcaaccctcaagggctcccctgtcagatgccacctccttgaaactggagctgagggagatacttctatttttttttttttcctgttttgttttggagttgaaattaagtgtgatctcaactcacctcaatctcagggaagaggcccactgaggaagatcagtctgtctgcgttgtctgccgttccttcttgcctcgctctggttgcctgggcacctccatgactcctttcttcctgtgctatctttgttccccaggaagccagagctgtctccaatttccaggtggggattttttagggtctcatcctgtgcgaaaagagagaagggggtgggaggggactctgtctcctggagagtgtaaggaactagctggccaattgcctgacaaattattggataagaatatttatcttaatgagctttggttaacgacatctggtatggaccactgacatttatttgaggttgccccaggagttctacccatggagctggcaatagttttttgtctcgtctgagctggggctgtattgggaggtgacagccaatgcctcacccccagagattctcttgaagcagcagcatcaggatgatttcctgaaccacactgtcactgtgttaataaggtggctgcctagcaggaaggggccgggagaagagaagttatttcttagaagatgttaagggagggtagttaaatcatgggtacctaagctggggttttagattgaagatgcccaaggtagagatcttcagctcctctgagcacttcctcttggtgctgactcctgcctagaggaggttgatggatggcttgctgagaagacagctggagggaatgggaccaagcaagaagggacaggtgtgaggtagaggcctcagtctgtgctggctgcagaagagccgtggattgtcacgttggtggtcaccatcctgcgctttgtgggtcacatgcttagtccctcaacccatgggagagcctcatgtctgagtagcacttggagcccactgaggctcttactctgatactccacaaaccgcaccgaggttccctcgagctgtcccgtctgattccccaatcaggattcaaatttgccttcaattccgtttttctatttaggtgtcattaacccagtcctcagcagagctttgtcacttttctgaggcagtagggggccgaggtgcaggctctgtagcaagttcatatgctggtagctgcctttggagcagggagctctcagctcaggagcctgtggggaaggcgcactcaccaaggcagatccatctagagtatttggggaagcagtctttatcacatcaacttcgtgaaatcctgagattagaaaacggtaggttaggacctggcctcagatcccaagaacaaggacctcggtgttgcatgttgcatgtgctcatgggaaaaacttattcctgtgtacaagagccttggcagctcagtgggtagcacgctcaactttacttgaagcttccaggtgccaaaccacttcgtgccttggctgtctatcccactgccgtggaaaagggattcttcccatctctgagcctttattagctgctccctcatctacccatggtgttgggaccaagcctccgaaacctctgagcagcccacttgttgcagcttggacaccgctgtaggaccaccttacccctatctccgtgggaagttctggattggctagaagcagtatttgctgggtatagggaagggctggacgctgtactgtttccagaccgccgcccagctttttggccaattgtgcatttgaaccttctctacgggaaacattgtggtctgagccttgaggttttggttttgccattccattgtcgagtagggaggtaaagggatcttgaagccatggcatttgtcatctggggactcagagctgttctagagaggaagccgagctgggcagagctgcacaaccttgaacacaggtgcatagatccttccacttcagagccacccaatggtgcttgcttcccccacccgttcacagacgtctttggcctgagtgtttaggaaacgaaaattctgagtcttgtgtcacaggaaggtccagccttacacctcatcatggtaatacaaccccccccccccccgcccccctgacttctctttggataacccgaggctgaaaaagataggcatctgatctagcttgggtagagtaggcctggggaagggagtgaagcaggttcatgccttggggctagggcagtggccaagtcacctgtctccgaacgaacacttagcggtgactactcagaccgtgggggaagttggctccagctcgctctctccagggtgagtctcttgggaggccgctgggtcagtgcccctgagtagtcaaaagtggagaccggatcaaccttggcctcaaagcccccactgctgcagaggaatgcagtctctggcagggaaatgtttttcactgcccttggaacctgtgttgttcatgtccaagagtccaaagaaagggctgatttcctgaggctggggtcagcccctggtacatgcaggcccttgctttcttcgaaggaccagctggccttctctgtctcctttgccgttcatattttcctctgggccattgctgtatgctctttgtgtcaggacaaggaagagggcaggttggaaaggcacaattggatgcatctagtagtgtatacaagtcccttttaagattctggctctggtcctgctgtgttctcacggtgccagccacaggtgaccgagtttcagcagcggagtcctgtttctctcgggcagtgagttcctacccagccctgcctccagagcaaggttgggtggctagagacctaggctgttctttccctggaagatgctgcctcttcccgtctttgctttttactgccctgcctttgttcgtgctatgaaatgaccacaccctatgtacttggctgtaaataaagacaaataaaaacaatgaattcaactcttcactcctttgtgggtgcctggttagcagcagtctccgaagcctgctgtgagaattgggcggagggagggctgggccttgcatttctggaggaagcaggggtgcttagcctgcctcctgtcctggtcttgggatgtgtgtgggacagactcccagggctctcccagggttagttaccttgcactccctatcacatggtttctgggaggctgaggttctaggaacgctgacactgttctcactgatgtcctttgtgtagcctctgccgccttccagacctacccacttctctctgttgaaaaggagaactaaacctaggtggagtgagctaggggtggggtcgggggagggaaggtagcggggtggggcatgtgtaaggaagcttacattaatgacaactcactatgatgtgaatgaaggtatatgtgtgtacttttaaaacatacatgtgcatgtatgtatgtatgtgtactatatatgtgcatgcaacgc

SEQ ID NO: 18397 - DNA, 1145 bp, Mus musculus
catataaatatggtaatcatccaaaggaggccatacaaaatgacacacagctttataaagtgtgtttttaaagtctctgatctagtgaaggcatgcctgattgcctagcaacacactaaacttagaagataaaatattaccagttttagtggagcacacctttaatcccatcaataaggaggcagaaagaagcaggtatctctgtgactttgggccagcctggtctacctagtgagtaccgggacacccagggctacataatagatccagtcccaacaacccttctccccacacaaatggacttgtgatcctattggtaatgcctacttctgactaggactcagagctcagggttggaactgggggctgcatgtggcctgcagcatgtgtgggggcttcacaagcccatttctgctaggtgtgctgggggcagcatcacacagaagcagtgtggccgttctgtctcaggagagagcccacgacgcttatgtgttccatatttggttgtctgaggaagtcccattttggagactggtcctggagctgtgccatagctctcacgacttattgatctctggaggtcaaacatggtgttttgattagccaccgactgcatttcccctactctgtcgcttctgtggggaaagccaacatttgagagcagaacattatggagcaatacgccctatttgaatgagggaggcatgaacaccattctggaggaagagcaagccgcaggaccttcctggtctgctgtccccagtccccagagcactgcagctgggttgaccctttgtttccccagatggatgcacccgcactgaggacaccaccaggccttccaggggattgtgttcactgtgagatttgaggtcttccattgtaatccaatggaagcttttatggcatcggtcactgtgcccagttagggtggagacctcgcaggcttgtggcaaaagtgttttcaggtgagttggggacagggaacataggccttgtactctgtcaggctccagttcctggcctgtcttggcctgtttttaatctggttcttttgacctcatccctacatctgtgaaaaggagataaggtctggcttgtgagaacaccggccccagtgtatacacagtggtgtctaaaccggg

SEQ ID NO: 18398 - DNA, 1182 bp, Mus musculus
cccagaacccctttctccatgaacccctgtaagagtgggaggggctacctgtgcctgccaccctagtacttgggggtggagactggcaagtgctgggcaactagcaagacagcaagacagcttcagtgtctatgggaggcattgtctaaaaaacaggccaagagtgacaggtcaggagtgatggcggagaatacacttccttgacctctggcttccagacacaggtgcacatgcatgcacacacacctcaacacaattgttttgtgttttgaggtaggcctttctgtatagttctggatgaccttgaactcagatctccttgcctcctctgcctccagtgaatgctgcctttaaaggcctttgcatccaggcatgccaagggcctctagggctgtaaatggctcctctgtgttgacttgtttctccaggatgtattctccctagctaggaggagataactgttatctcagtcctaattgccttagcagttgagtctttatggcagctctcacttccttgactgccctgagtgtttgctcttggctttcactactgctccagtcagaagtgtacgctgtacatgtgctcatcggctgggagagagcgcggctgaagacacactgcttccctgcccagttaagtcttctgtttttttgtggtgctgaggttcaacacacaggacatcatgctgagcttgtacacccacccccccgccccccaactgccctggagccctcagacactggttgagcatttcagcctgtttgtctcattgactgctgggagatatggatagtgctgttcgtacttgggctttctcttggggactgggggtagggcggggtgggggagggggagcgtgagaggttcccttcccccgtagtcacgtagctttgtgtgactgcgcttgcttggtggccaggtgccatctgatgttccggttagtgagatgatgaactcagctgaaggagaggcttgagcgcctcttggctttgaaccacagttttcatctattttgtttaagtgaatgtttatcaatagggacggcatcttcaacctaagagatgacttacagattttgtaaacccaaagatctcggaaaaggtaggtctgccttgcctgggaaaaacccacctgcttcggtcagctcagagagtctcagcaggggctttttctaacagg

SEQ ID NO: 18399 - DNA, 1207 bp, Mus musculus
gcgccctgctcgcacggcgggcggcgcatgtggccggcgcccgcgggccgtgtcagttgcagcctgccaccgcgtggcccgcgggatcctcgttccgggccgccgcgctccggcgccgccagaccccgcgcaggctcggtgcgcggcgttggggaccagcggggggacccgggcgaccgagggtccaggatgcgggttcctcctacaagtcccccgcagggatggtgcgctccctcgctggttcccggcggcggctgtgactcgtggtcagggtcttgtgggggaggggcggaaagcggatgcttattgttttgcaagtcgggtgtaaggacccggctttcggggcttccctcggagccccggtacgctcctccgcccggcttggccctggccccggcccaagcctgtgggctgcgaggctggccgggatgcgcgaggtggcgcgcccgctgccgggagcccacctgggggttgcagggctttccgggagagccgaagctcgatgggcacagtcacggatgggatgacagcaggggctgctgtcttttatgcttagaagagaaaaccgcatcagtctcagtgagaaagttgtacaggctccatgctcttcggtgtccgggtcgctcgctccttggatcgcagggaaggggttaccgagtctgactttgcgaggaacctctttcctttgtattttctcctgcacggcagcgaggggcgacttgacttaacctcgggtctttactgcaggtggagaagggtggagccctcccagatggttctttctttactccccctcgctcccttttaggatgtggctgcttgttcgcctgccgtttaacagccgccaagttcagtgggcgctcgggctccatgaggggcgcccgagggagctgggcgccgcgtgcggccgctggtgaggccggatggtgagtccccaaggctgggcagcgtggagcaggaaggctggatggcgccatgagacgcgcgccacgcgccacgaggttttagcttccagcccatttctccttggcccctcctccattttgatttttacgtattttccctccaggtctggagtactttagctcagcagcccagattcggcgttgtgtgccgcagactccagtattgatgaatttcgcctctagtttagcttccatggctaggattctgaaatgctgtttaggtatcggaacttagggtcccc

SEQ ID NO: 18400 - DNA, 1243 bp, Mus musculus
actgcctggcatatgtacaggtcttattgttgtgatcttcattatattaaaaaatgacaccatcagcccattgcaggtagctatagttttagtttatatgcattctctttgctgatgtatgtaaaacactctttatagcttatattaaaattggtttttactgtgcttgctatgttgtttctttacagaacatccagaagattcttggcctcgccccttcacgagctgccaccaagcaggctggtggatttcttggcccaccacctccgtctgggaagttttcctgaaggaaagcagaattctgaatttcctgtcatactttttagacattcacatcagacttacagagcacctggccacattctaggtttgtgttatttctcagctatggatatgatcaaatgagaacactgcttaactaatgggatagtgctatggtcacggatggcttctttagtaataagtgcactcactggttacatttggatggcttatgtaaccacaaacatcatctttcttgtctcacttgagtatttcagtgtatgtgccatatacacagaagcagactgtccatgaacattaggagaaaaatagtttatgtaacaacttcactgtaattagttgttgtgttttttaaaaagccaaatatgtcactttgtgttcgacaatgagccaaatttttagatgtttcagttagagaaatgtttgatttttttgcatattaaaaagagtattttctgtaatctgaacataaggataagcattggcccaaaaagctaaaataaagttttgtcatgttcttttaccagccttgtctcctgttcaaaatgtgggattgtcccagtgtacactttgaacgtgttccagttggctttctggtgttttgtcaaacactggccagaaccagaagcagcttaggggaggaaaggggttttcagcctatgcttccgggtcatagttcaccattgggggaaaagaggttagaactccagcaagacccaaggcggaagctgtggaggatggctaccagctagctaactctgccttgctctcagttcgcctcctcttagcagccgggcccacccacctagaaaagctcacatactgtaactgtgcagggttggagcaggccctcctccatcactcaccaatccagagactctcacagacatggctacaggccagtctgacctagggaacttcttagttgatagtccctcttgccaggtgactctgggttcca

SEQ ID NO: 18401 - DNA, 1310 bp, Mus musculus
actctttaaaaaaaaaaaaaaaaaaaaaatatatatatatatatatatatatataatgtatatctgacactgtatctgtcttcaaacacatcagaagtgggcatcagatccctttacagatggttgtgagccaccatgtggtttctgggaattcaactcagaacctctgaaagaatagtcagtgctcttaaccgctgagccatctctccaggtgccaaacagaactcttaaaaaaagtccgatggggacgctgagttaactccacagccaatggcttctggcagaggtgtgggaggtgaaggactcagttctatttaaggggcaggccactgagagtttagccatgctccagtgagtatatagatagcacaaatttgactttttttttaattcttgtttttatttttactttcggggggtggggggtagatacgatacggcagcgccgaaggagcctccgttggccccggatagccgggtccccgtccgtccccgctcggcggggtccccgcgtcctccccgcagcggcgcggggtctccccccgccgggcgtcgggaccgggatccggtgcggagagccgttgtcttgggaaacggggtgcggccggaaagggggccgccctctcgcccgtcacgttgaacgcacgttcgtgtggaacctggcgctaaaccattcgtagacgacctgcttctgggtcggggttttgtatgtagcagagcagctccctcgctgccatctattgaaagtcagcccgaaatggggtggggagcaagcctgccggtccagccatgatgataagcctgtaagcagcacccctccatggccctcacatcagctcctgcctccaggttcctgccctgtttgagttccagtcctgacttcctttggtgatgaacagcaatatggaaatgtaagccaaataaacccttccctccgcaagtggctttggtcacagtgttttatttcaacaatagccatcctaactaagagaatgactgggtctggtttcatctttgctggataacaaaaaaatgtatctgactggaaattcttctgtccaagggcatgtgagtttctcttactcttcttgcagggaaacctttgtaaagaaataggaataaagacaagcaaatacaaagaaaacatatacaataaggactgccaactttagctgcaacatacatttttattttatatgtgtggcgtttgaataagagtgacctccacaggctcggagagtggtagtctatgagagggattgggaggaccggccttgtcagaggaagtgtgccactctgaggctttgagg

SEQ ID NO: 18402 - DNA, 1415 bp, Mus musculus
caggatttggcagagagaatggccgtgtgacgattgagtactactctcagctgaagacggtgtgtgtggagatgggcgacgtggagtcagccttttgaaacccagggaagcctgctggcgtagccaagctgtggaatgagttgactgccttgacaggcagcataactgaatagcttcttacatccaggctttgggtcattagtgtgataacgggtcagtgttgtcctctgtcttacagtcaccttcccagtttgaaaatgtgcacaagtgcctttcagatggtagccaggtaacctgttgtcccagcccctgagaaatatgtagaccccagaagcgcactcttcagacataggcaggccacagctctgctcctacacatttgtcccaccaacaatggcagctttctagtttgctttaaagcaggccttccttcctgggttcctggtgaatcagtacatatacattctttgttcattgacaactaaaaaacaaattcttaaagcttttatttggagctgggcagtactggtatgtgcctttaatcccggcacttgggaggcagagacaggtggatgtctgagtttagagccagcctggtctacagagtgaattccagtctaggaaggtctacatagagaaatcctgtctcaaacaaaacaaaacaaaaaaaaacccataaataaataaaaaaatgtaaaaagctgttattcttagtatttgtgggctatgtgactcattggcatttaaacagctgtgttctaactaactagcaagacagctcagtgggtaaggtcttatcacttaaacccagtgacttcaggtttatctctagaacccaccccttccccatatcatacactgcacaataataaaatctttctcaaacgctgtgtttttctgtcctttctttgagaaaccggaccacctggctagagagacaggtagttggtggagtcggattttacgcagataactgacttgcctcagtaaacactcatcctgtcttccacagcactttatctctgattcttgcagtacagcctatggccatagaaccgaagagaacctttagaatgtgtgagttatttgtacgctaccattacagtgaattaaaaacctattacactgctgatctttttgccgtcttaatttgagtctcatcttaaggctgggtaggagacaggagaaagcaccaggcaggggaaggtgagccctgccaagtacaaagggcagggtggggcatgacgactttttgtgccctgtccttccctgcagtgggcagaccttgtaactgcagaccgatgcagttaagcccagcccagtgctccttctggggaccagttacgtacagtgacggtggcatttagagataagggatgatggctgctaggcttctcagtctcttgcctttggat

SEQ ID NO: 18403 - DNA, 1222 bp, Mus musculus
agatggttctgccagccataaagatggcagctttgccagtagattaagtggcaagtggtcagatatctttggggcctcatgcacttcctctgtaaaatgggaattgttatccatggctcaccaagggtcttgtaagaggcccaagaaactgatcttgcttgtatttaatctccaggtctgatggtcagggaaggcagtctccctataatgaacatgtcatgctaggtcagaataatacatggttttcttgttctaatttctacttgttctcagtaccttgatgccatcaccatcatgagagtgtttcagaggctttctgctctgatttggttttggtctgtttgtcttcttaggatagagaagagattcaaaactagaggagtagaacctggttttattagtttcaacttgaatccagttatgagaccttgcaagtccttgtccctatgacaactcttctgcttcagggactcccaggaagaagtacaagagcttgagggctgagagacaagcccacagtgccaaacacattccacatgcagtgataaataggagacatgcttcatgtgtgtttggaggagttgggcctgtatacctggaacctgggggactgagtatttgaagataatgcagaacagaattgtttggcaaatgtaaatttgtccagctgaccccagtcactagaaagactgtcatctaacctctgccatgctcagaacgcgtgcctagaagggacaatacaagtgtgtgtgtgtgtgtgtgtgtgtgtgtgtgtgtgtgtgtgtggtagtgatgagaaccggtgatttttgtctttgtggcaggaatacattgaaaccactctcagaacaatggttggaccacatcattttccataaagcacattataagatttgctgaagggttctcttggaaacaagagtgaccccagctctggatggaacacatgaagggacatgagtggatcaggccacagcagtgccaccctcacagaatgcttctctctaggcagtggctgtgctgagaggcccacctacccagcacttcattaggcctcctgaaggttcaacatgtagccagcagtctgttctccatgcccactgtcacctccaatgtggcagccaccagatctctgtggtcaagcaaggctagggaaaactggcagcctccagatagaagtggaaagagtgtgcctctaaaaacttggctccctatgatttca

SEQ ID NO: 18404 - DNA, 1232 bp, Mus musculus
tgctcctttgtagatactcaagggtaaggagatgggagctggattgatggtcagggagcaagagagtttgctgcaggaacgtgagcttctgagtttggatcgcaaaactcaaggaaagagccagtgtggctgtgcaggcacctataaccacagcgccaagcaaggcagagacaagggagttgctaggcatgactggcttccagcgtggctctagctcaggagcaacccttctcaatggaataaggtaggcagtgacagaggggacagtccatttgagaatgtgcatagaggaactctgtgcacatagacacaggcaaacacatagatgtatgtgcgtatacagcacacatccagcatacacaccatacccctagacagaagggtaaatagactcctgagactgccaaatgacgaagcgaaaactgtccagaattcagctgaagtatgacttgccctttgatgtgactggaagatttgctgtgtcagtttaagatggagaaatgagcacagaggaaatgatgagaggtggagcaagaacccttgaagtgaagtaaaaagtaaaaaacaattataatatggagggcgttcttgtaaactgtatgggatttgtagagttcagttctgttgatgatcctattctgtctgtgatttgttatcattattcttcccattacatcatgttacgtctatgctgctgttggatacggagcacagacagtaggattttttttccagctagtaagcagagtatgagtttgtgagtgggtcaactttggattatggggttcatggtggtaggcttttgttaaaagaaaataaaatgagactcctcttgaggtatttgatgagagagagaaaactaagacaactctaattccaaggaagcctgatcttctctttgataagacaaggtagcaatgaatgtattggcagctttttctcggagtcgagaaatcacaggcatgcatataaaagagcttgtaaagccagtggctctgaaagacatgtcacatctgtaggacatcatagtgagtccttgtttccattactgggatacatccactgctgcagttaaacatctcaggactgagaagatgtttcacacactggtatctgttcggaaggtggggacatctgctgtctgtcatgtaattgggagatgtttttctcaacagtaggcaataataatatagtaagccaaacctcatattatcatgatgcattaaaactag

SEQ ID NO: 18405 - DNA, 1239 bp, Mus musculus
ttcggtctttaataacatctatactatagatgtattcattatgaacagcttattgtcatgatcatatttcactggaattaaacttagagcaaaagaaaatattcatgtttcaaaaaaaaaattttaaaaaccctgacaaactgctaggacgccatccggtacacagtagaagcagaagagttgacttttatgtgtcagatgatgagtttttcaaaccttttctccataaatcttaagagccatccctgagtatcagaacgctagagatggcaagacatttttatcataaaggcatcctatctctcgggataaaattctgaacaaaagtaagaaagtgatagatacataaatataatctccctacaacttgtggtatgaaaactttctggttagagtgtctctaattttgttgactacgttttcttttgtaaagatacagaggagaatgagtccacacccacgggcccctcctctgtctctgggaagcaaggggtggtttttcattcttcatcctgagtgagcccccacttggcaaaggctccatctcagggggaactcatgtttctcatctgcaaagcaaagctgtcacccccctgttctgttcttcgcggccttgcctgaggatccgtgttctgtgtgaaccatgagaattcctcattttggtagagaatcaggttccttagagatcaataagccagcatgctgaggcccagacactgcaggccaccgcccttctgaaggatggccccttctcttccccatgtgcttgtttccaggagacagtaccgagctctgcagtggtatggggaggattagggtccctgcggctgggtagtcataaccttaacttgccttgagagagtggattgagaaaaagcttgggttttgcttatttgtgagtttggagaaaacacccttttctggggttgtcaagttataaacatcaagttattcttagaagtctttattaactttttgctggcttcattgggaattccctctgttttattcctgatactagtatctgcccatggtcagcaaggcaggagcttttccagtttgctggtatttgcaaagaacctttgtttctgcctcatttttttcctagttatttacatattatccatatagattattagctctacttgttttaattatctttttgttttctttgacttaaagtaaaacttttctagttccttgagttaaaacttaggttccatatttggaaatctttct

SEQ ID NO: 18406 - DNA, 1219 bp, Mus musculus
tttcaataatgctcatccttccatggtctaaaatggccacagcaaacatggaaacaataggtgtaagttagacaatactaagtttcatctgatctttgacagaggggtgtgccatattggaaacatgttttccacacaggcaccccacaagaacagtgtgatgtgggcgtagaccatgtgttttaagtaaagaggaaatcagggggcgtgtcaggatgaagggaatgtgggaagatgttccgaagacatgcactagaaaacagaacggtgtctgttttcgtccagtactaaatgaaaagaattgcaatacattgcttattgcaatttttatcctaagttgaatccatgagcctggtgcttgcagcatagtttttttgttttgttttgaagcctatgtccttgggcactgtgtggggcaaggccctgatgttttggcaacatgcagattctggtctcctggaaaccttcatattctttcatattctagaaacagatgaatgtcattggcacttggtgaattaattagaatcctgagctaagagggaaggaagctgggtagtgacgaaggacttgagtaggctggcaggaaaggactggggagggaccatttagttgtcccgtgtttttcagaaatttctcattttgcaatgatctgagacttgaaagaagttacaaaagaatcagcaccttaccttggttctgttttccacacactgaaaatatttcagtctattttcatctatttggaccattttcaaaactaaaccctaggcccggcttggctttcaccagttttcctacattgtattcagttgctcactggatacttttagcctttgttggtttgtaatctggctttggtggcatacaggataaaggattctacctagatattactctacaaatgagagaaaacatcaaactgacaagctcttttatcagggaccagtactccagctgtttgctgaacccactttcgattacagctcatcattgctggacccagaacggccacagcgttacacgggagtcatatgtaatgatcagctctgctgtttggccacccaaacaatccaaggacaacttaagaaaagtaacaatataaaaggcttcaaagtggaagggaattgtaaacagaagaacgggacttttgttggtgaccagaggggtctatgataaagcggtactttggtcaagaattaagtggtactgaatggag

SEQ ID NO: 18407 - DNA, 1195 bp, Mus musculus
agagagggtggccagcggcaaagcatgaagttcttttctggctttgggattcacgagaactgatgcatgatcaagcaggagtcaccttagtgactaacttagtgaccctaagttttcatccttcacagactctaagattcagcagcaatctacactacaaaacccttaaatcctatagaggaaaccaagctgaggtaaaatagtggtgatctgcttctgtctatccagtcagcttgctccatggtctcttagaaacctgagagcttcttggttcagccttcagcatggctacaggacacagcagatgtataactctaagtcttgacattaatttcatagatcccattcgctcacagcacatttacctcctctcccatggcttttctaccattctcagcaagactaacttcgatcccagaggtaggagagaacattggattgggaactctggccctgtgctgcctcaagccaagtatgtcattttcccaagtcttgcttctctctgaatttgttttcttatctgtctcaaaggaaaaccgaatctatgatttaggaatctcttggagttttgctttgttttgtgcttgctggagaactagatttgtggttgatgtaggttcagttactgctcagacaattgtggccagtaatagtgatcccgagagacatcatttaagtaagagcaacacctgcattatatctgctttagagtgaccagtgctgcttcacgttatctcatttgatagttctagggccagacatgtttctttcacaactcttgactatatactcttcaggattctgcccccagttcactgtattcctttacaaatgaaatttccaggactttgctttatggaactaatctatcccagatggctatcaaatatgtatcttcatgtacaggcactttgtttttggtatgaagaaggttccaccttctggcactgaaacctttgtattacagacacaggtttagtttctagttacactagtagagtttagcagtacaggtctgagtagccaaccatggtagaaggtaaagacttactctgtagacaggtagctcaaatctaaactagggaaatgaaggtaggttttggaaaagaaagcagaaacagatgagaaactgtgggatcttgttatttccccaagtaactcgtgatcacgatatatgtgaaccatttatgtcaag

SEQ ID NO: 18408 - DNA, 1228 bp, Mus musculus
tcttcaagtacctctaactattacctccacaatcccttcaacaagacagaggatgtttaacctagtgagaggaaccttttatgcccttaatagaactgatccaagtgctactgaggactgctggctatgcctgtcctcaggtcctccttactatgaaggaattgccttcaatggagatttcaacagaaccagcagccatacgtcctgctcttggggaataggacaaaaactgaccctgactgaagtatccgcgaggagtacaggtctctgtataggcaccccaccttccacccacaaacacctatgcagacaaattcagtccgtgtccaggacggaagctaattactatcttgtaccttcccaggttggctggtgggcttgcaatataggacttactccctgtgtatcaactaaggtttttaattcatctcatgatttttgtgtcatgatccagctgttaccccgcgtatattatcaccctgcatccagtttagaagaaagctatgctggccagcagtcaaaaagagaaccaattactttaaccctggctacattcatgggaataggtatggcagtaggagtggggacaggagtgtcagctttgatagaagggagacagggaattcagtctttgagggatgctgtcaatgaagacctagcggcaatagagaagtccattgacgctttagaaaaatctttgacctccctgtctgaggtagttttgcagaacagtagaggtcttgatttgttgttcctaaaggaaggaggactgtgtgctgcccttaaagaagagtgctgcttctatgcagatcatacagggatagttagagattctatgcagaaactgagagaaagattagagcgaaggtaatgggaatgggatgctcaacgggggtgatttgagtcgtggtttgagtcacaaccatcttggatgacttctttgatttccactgtagctgaaccagtccttatgatatgcttagctttagttttcggcccttgtataataaataaagggatggctttcatccagagtagaatcgatgcagtaaaactcatggttcttcagagacaatatcaacctgtagttcaggtagttaggggacaccaatctctaaaattctatgattagaattagtctaaacagaagaagaggggaatgaaagaaaattaaacaaaataaaaggtttaaactaaaaaggcctgggactgagactacaaagaaaaa

SEQ ID NO: 18409 - DNA, 1241 bp, Mus musculus
gagaaagcggatagacttggagtcacatacatctgagttaaaaattcccgtctttctaggtactagtgatgtagccaaaggcaaattacataactcctctgagcttccttttctcattgattgtgaaagattatttgttaggcctcagccttggatgaaaattttattcccattgtagagacactgaggttgaaagtatttatgacttggtataggcaataagattaggaatgcccgtctgttcccacgtctgacatgtgatgggctcctggtgagcctccagggatgctgaggacaagaggaggctctgtgttgcagcatgatttgttttcttcacgtggaagtgcgggcgccctgagtctccaggatgtctgctacctactttctgtgtctgctacctacttgacgccttttgaagttttgtgtctggtgttgcagtgggtgagcctgcacatgctgcctttgctgcaagagccagagtgctgttctcacccttgccgtgatgggcacaaggtgcagaactccctctgcagtgtggaaacagtgtttgatgctgaatggttgtgatgaggtagaagctgtggggcatctcatcataggtgcgggacctgaggccagggacagctgagtgatgcatatggactgctgatgctctgtacccctggtcaccatgctgtgaccgcaggagaggttggtaccgccatccctttaactgccaaagctaagcagttggaatgcaggacaatggggatttttttatagtgagcctcaaagttaagttatccctttcattcagatccttgcagccagcctgggtcatacccatggggttttttgtttgtttgtttgtcttgtttctttcttccaatatttttctcttttagttagcatacaaagtaatggatttcattatagcatttttagacatatatcagacatagctcatatttgtttttcctgctgctttcttaaatagtctctcttctgcttttgtgtcacacatatgcatacatgggtatctctagtgaagtttagattctgcatataaagggaaacctatctctggtgtgttcattctccattctactccctggggcctttcccccttgtagtggctattcctggttgtcaacttgactatatttggaatgaactacaatccagaattggaaggctcaccagtcacccttatctggaggcttgggatagaagattctgatctggatcttggtatggagatc

SEQ ID NO: 18410 - DNA, 6407 bp, Mus musculus
aggtggcaggagagagctgatgtctgagagtttttctctgacctacacaacatacacaatcaatcaatcaatctctctctctctctctctctctctctctctgaattttaaaaagaatttagatactaaagctgtactttggacttaagaaaaatctgtgttttaacaaaatcctcagatgatacacagtcatgcatttaatatcatttaaactgataaacagcacacttaaacttacatgataaaacctacaaaactcctaggctgtgtgatgtagtctgatgtttctgggctacaaacctgggctattactgccctgaatactgttggcagctgtaatacactgaagcacagtaaaaacaccaggcagaatgagtgttcaaatctattataatcttaggcaaccagtgtcttccatggtctttgattgatattgttatgtggcctgtggctaggtctccattaaagttggtaaagcgctgatgtaactctgaagttatgtggtgaatgacgttgtcttctctaacctccttcaggtcttcgttgagtacgcgaacgctggtgattccaaagctgctcagaagttgctgactgggaggatgtttgacgggaagtttgttgtggctacattctacccgctgagtgcctacaagaggggatatctttatcaaaccttgctttaatcagtaacctaaggactacttcctgtttctcctcttccatttcttggattattatattccacagctgaatgcaggagcacccctttacccattttaaagggtaccttgtacatttatttaatcctactaatgtgcagccattgcccagacagtgactgcattgcaaacatggcactgagtaggacccgacctctcagctatacattgagggggttagagcacccatgtggccaccctttatttgtgcagtagggcaggtgctgctctttactatgtaacctaaaaagatgtcatttcatgtgatgatgaagcaaagatgagttgtttgtcatagtaaatactattaacaaatttgttagggttggtgacatcacagaatatttgtttgtattgtcaggtgtatctccttgttattctagctggcactggatgctctaataatgttaagtcattgtcaagcagcagttacctaccgtgttcttaacaatgagttgtgaatttttctaaaggagtactgtaggacttaatattcctccgaagaaactgcagtgagcctatcaatgtttttaaaattactattaaggcttttaaaatagaaagctgatgcttgatcttgcacaatttttatgtatagtgtgtatgcttgagtgggtgtgcaggtgtgaaagactatagagaatctgagtcagtgtattttacagtgtgagtcttgtgagctaacacactctataaccatttcttcctaccggtttcacacctgagagacttgggctataggtttcttgaaagttggtctgacagatagaatgtaattgacaagagagttcattactgtaaagtgcagaacaaagtggagtctagaccagggttccatgtagctcttcagagtgtaagttaccctgttctctgctctactgtagacccaagattggctcatctcttttgtactgaacctcttgtgataattgtaaagtttttccagatgtgattctttctgctataatgggaaattgaaatggatcagataaaagttagatgcacagtgacgggaaaagagaagagtgcagagaaggcagctcatcacagaccctcctcccccatctgccctgctgccctgccaccttcctcctttccccgtcgcctctgtctgcagcctgagggcagtgtcccgagtcatcggcttttgactgtaagggaaaagaaaggttgatgtattagaaggttgaagtagaaaggaagaaaattcagtttctaaaagaacaatagcaatctagtgtgtccttgatagaggatgcctgttgccacgagtttgtggacacagatggactgtggcttgagggatatgagtggggttcttcctgctctgtagtagtttgccttgaaaggtgtaaacgtaggaaacttttgtaaagcactgattatacaagataacccacagattgtacacttgtgacagagtttttcctatttccttacctgaatgaaagtgttatttatttatttttccttaggaaagagtgtttgtttctcttcctgctggcagcctgcttatatagtctcttgtccatgctgttcaagttcccaaaaactccattaaaacttgcattttagaggttgaattattttaccctgtttagacatttactgcccaacatttgtcagtataatcaaattgtcccgagctcccacttaggaagttacatttggtgtaaggggatttgctgctgagttacctctgctcgtctctcgtggtccctgatgagtgtcttgggaagaaggctttttcaggggttcattgtgtggttggttttcaagtcaaacttgaagaacatagaatcagggctgtgaagtcctaactaagctttcctaaaacataaatatttacatgaggagctgcttctgtggtcattagtagcaggtctctacgtttctactgatgaccacaagatacaagtgaattcttttgaagggcaagtatggttagcacatgttcccatatctcataaaaaagagatccttgcaaataaactgcaggtaggctgccaagctttaccgtgcagtatgctgctaacactgctgtactcacagcattctgtgaacctcatccatgcagatgtagctatgcacatgtgtagagttgacactgtagacttgttacagacgatgctagccagattttaagggagctgaggaagtaaatgagtgagcccgagtaattacattgagatcattgaattaaatagtttatattgaagtcacagacttgaagacaaaagataacctgctatgatttaaaccattgtgtgatagctcttagcccattttaccaaagaggacagctgcagattcctcctcctctgatactatcaggactttcattttaatatctttcttaaactgggaccaaataatactacaaaagatgcaattttcacaataaatatatgcacagggattttaattccttgaaattattaaaatcctagaattctcttactaaggggtaaagaagtgagcgctcatgttacttagtccctgtctttgggggcaaattttatctcaggtagtttttctctccctatgttaagatttgtgcttccttccttctctcttgcctccttcggttcgtctttattcttccaaagcactatacagtgcacattttgtccctgattaggcacagaaagcgattgcccgagggaaaacttggggttcttttgaagtatttggaggaggagacttgtagccattatcaaaactataactctgtagttggaagagaataatagtgctgggtaccccagaaaggtactgcctgcatttcaccataagtctacatttattatgactggatactcttcttcctttgtgaccattggcacagcgtctccctttgggaactcttcctctctgctaaactgatctaaatttatggctgcttttagaatcaaatgactaacatagttctactcatctgtctctgttttaattgagaggagtgtggtcttctcgtcgttatgtagctgctgaagatatgttaacctgccagcaactgtgctgccacccagagaaaggtgccgaagtatgaggggcataaggcttccttctgtcttagtctagactttccctcaggcaaggcaccacttagaggataacgtagaagcaggctgaggatcatgctgttttatggctcttctgaatgtggcaggtggctgacaacttggcatcattcttgttagttctcccgccagtttattaagcaattttatttttaacagtcgctgaaaatgagcatcatcgtgcctacctggtgggaattatagcagtacagtgggaggggacgcactggtgaccatgcactttacctagactctcacccaaagggtacgggctgggctctttgttcaggttagggtacagatcgtgatgtttcatctgttggatgatgtgtagctaaagttctgggcaagtcaaatattaaacctcacctggccgatgtcccaggggaactgcactgtcgcctttctcttggaataacttggattgattcgtgtgagtccagaattttcttggcatactttttaaaaaaatgtataaaatgatcccagtttgacttatttcagaattacatgttgatggaaaggccagttatctgtcacatctgattctgggatctagtttcatttatcaggttctttcttcagcacttactgatccagctctctctttcttgtaagttgtggacacttacacacccgtccttggtcacttctagttcaacagaatccccatttcttgaggtgctcggcaagttacctttctttgcctagggtttggcactcttcacttggcgttgcctgtctcctcaaatacacactgctcttgttgaggctgttgtgtggagctcatctggtatgtttagattcctgggaggttgggtgttcgagacaggggttctctgtgtagccttgtctgtcctggaactagattttagattcttaatcatggagaagcttggatattttagtttttagagtgtccccattttttttaagaatgaattttgatcctttctctaccttataacataggatggatcatgatttttatctttgccacctcccccagatggtggtcaccagtgactattgctttacactgtgacaagcagttggcaggtactaggtattgaagaaggtaaacaacttagagtatttttgctatgactttataggagaaatgagctgtcaaaagaaatatgtacaagccagggagcatttaggatagaaagtttttggagacagggttttgcagtgtagcctagacaagcccccagctcaggatcttcctgcttcagcttcccaagtgctgcttgtcacagatgtgcaccatcttgcccagctctgctaggaagctgttctatagatggtcataggtgtttttcaggatataagactaacacacaagtttacacaccttttgttgtcctgatagtgtctatagctcagcgcgttccctgattcttgtgctgcttacgggagtgattgttttaaacatgctgtttttgtgcctttcagagagtcatagtcatggtagctgtgtttgctggagttcatgggaacctcactaaaggatggccggagtgctagactggtagcagtcatgataatgccaagaaaaagtggtggctcttttgaaggctcagtgtgctttgtgaactgagttcttagtgtttagtggcaaggcaggcccgcttttgcttgccttacaaggtcatttcatctctgttgtacaaaacacggctgctcctgctctacctctctgttaaagcaaagcaagtcacattcttgaagactggaatgcttacttttttgtttgtttcttactgagaaccttgtataagcagctactactgccaccttcagctcctgatgatctgtgagcgggttctagccattctttaagatccttggtcagactcccttcccttcgctctgtcagcccctcttactattcctgatatcagacagcatgcagaaacattgtgcgcatgttgactcagatgctcctcagtgacttgaattctttcagctgtgttactctattagatgggtcatcagaaggctgtcagagataagaacagggaagacagagatggacatgagcagagaggaggaaaaatggctcccttactggtgtcgggaatcttccacatagaggtcatggtctaagaatctaaactttttacctgtagatttaaaacattgcctttctcatacattcctcatcctcgtttccccaaaagactcttgtcagggtttatgaggccgaccagattaaatacccatattcagtttctcttgattttcttaagaagtattttaattcccttgtgtatttggtgttcactactgttcttgtgactcaagtctcagagagaaactgcggtcagccacctcggtcctcctgttgcacgtgggtggcggcatccgtgtgtaccgatgcagttacggcaccttgtgaaaaggagtgtgagcggtgtctatccgaggataggaaacttcagtctgcacttctgtgagccagaagaatacaaagctgtcacatttccagcagtttagttttcattcttagctctttttgaaaaatcttaaaatactttaacattccttaagtagtgtcaaatctagggtagaaggcttttttccccccatcctaaaaagg

SEQ ID NO: 18411 - DNA, 1201 bp, Mus musculus
tggaaaccgtattccttacattcctgcttctactgatgctgtctgtaagaacctttctgagcctcgctctcagctgaccttgtttacggattgtgttccttgatttactctttgcttgactgctctcccctctcctccctcccacctaccctagccttctgcttcctaaaactgttttgtcattaactgttgggtcagctctctgggaaacggttctgttgctgtaagtgcacttacccttggatggtgtcactagttagtggcttttgctaaataaacctttctgatttctaaaagctttcccattgtctctgcttacttcttctatttaacctgtttcttctgtcccccttccttgtatccacttcctaagccaggtatcatcagctctgggacacaagatagaaagaattcacactgggcagtggtggtgcacacctttaatcctagcagtcaataggcaggggcaggtggatctctgtgaattcaaagccagcctggtctacagatccagccaaggatagaaaatcctgtctggagcatggggctggcatgcaggaagcgccctgtatctgcagcaggaggctctgggctgggacacggcttagagtgactttctgtcttagaaatcatggtatatcctcaggagaatgttccgtgtctcgcaacaactaattatattgcaaattattagggcttcattgtaatctactttattaatgaaaaatgacaaagcagtgtactgataagccaaggtgcttttgatctgtaatttcttctctaaaactgctgcatctggtacagtagactgtggaaggtgttgattatgtttcctctggggcctggtaggatgctaatccctagagcagtttaccagctatgtgtgaaattgaagcaggtaccatggatgacacgggactgcccaacaacacttggaaatgattgttaacatcacaggcatggcaccgaacactgtagagatgcacagtcagttgaacttagtagcaacgctggctttgtgtaataaaggaagcatttgtaacttaaaaaaaaaaaaaaaaaaaaagaaaatcctgtctgaggagaaagagagagagagaagaaagaaagaaagaaagaaagagagagagagagagagagagagagagagagagagagagagagagagagaaagaaagaaagaaagaaagaaagaaagaaa

SEQ ID NO: 18412 - DNA, 1243 bp, Mus musculus
actctggaagggacaaaatgaggccatgtcaggttctaagtccagaattggaacccttgcctctggcacctgtcttcaggtgacgattgcctcagaactggggtgacataggtgctatttctagagtaactgtgcatctgagaaatgttggatatttccacctctttccttttctggctgcctggatttctgatcaccttgcgcatcctcagccacagcagtccattgtgtccttgtggaatctgcatccttcactgtttccttcttccttcccagagtcaagctatgagaatcgtgcggacagtgggacaggccttcgaagtctgccacaagctgagcctgcagcacacacagcagaatgcagatggccaggaagatggggagagcgagaggaacagtgatggctcaggagacccaggtaggcaccatggctgcagaaggagaggacccaggatggaagagtagatcctcccctaagagccagcctattaagttacctaaaaactaattctaatcatttcaccattgcaaccatttatgtttttttcttttgttctctttttgtttgttttagttttgtgacaagtttttagtgtgtaccacagactgaccttaaatgtgaactcctcctgcctcagcttcctgcacgagagatggtgttaatgtgttccaataacaactagtgagaaataacacccactgtgactacttcgacaggaaaagaagttcattgacagtttaacaaagataaagtctttaagaatagattacatattctgcttgaaaaatggaaggctacagcatagtaatgaaaagaaaactcgaacatcataaacatgaattctgtgttttacatggcaaagatttctaacagcaaaggcgacatcatggtaaccttgggtacgcacatactacaccattccaaaagcctatggagtataattaaaatggtacccaagggaaaacacaaaggtcagttattggctttagcacatgagacatcctgattgtcagatgaattagcattcaagccaaaaagttagaaaacagagggggagaggcaggagaatcatgaattcaaggccaacttttttttatatatagactttgtcttaaaaacaaaacagctagaaaaatcacaaaaataaatcttatacttaaatagcaatattgccatgttggacagacagactcttggtttgcactgtagctaccaggctacatgtagtcatgggtatgttct

SEQ ID NO: 18413 - DNA, 1175 bp, Mus musculus
ttctgaacagtgggaattaaattttatcatatggagctttgagaggaacccaaattctgtctaagccatggaacacagctattgggaatcaagctggtcttggaacacaggctgtgtggctcccacaatctgtgtcttaatcgtcatgctgggtttgaaacatgataaattcagtagccattgctactatttattccttagaactactgaaaatgcaggaaggagaaaaattacaagtttttccctttagatattcccagaatgggggggggggtgggagtcctggaaactagtagctatcaagtagggcagaggacataaggtgctagatagtatgtcacatagtgcctccagggggggtcaaggcaggtttcagagtccatagtcctccagctaagaaggacagatgacaaaggagcgtctaaatagatggtacctactgggcctacagaagagaacacagggagactggagcaaggatgcacttgacatttgactttctagacaagaaggccacaaatcttgcctattgaatgctgagtttatcctgtggatggtagcaagctactgagatatttcttctgtcagagaagaaacggtggagagagttgcatacgctcagacagtgttgaggacagatgaggaaggcaaggctgtcagggctcaacctagagccccagagtagggatggagaagataatgtgagaggtgaggaccaatccaggatggtcctcagagactggatttctgatttatgatgtattttggaaagcagttgtggccccaacaactgcacagtcaacttctaagacagtcacttgtagaagtagccagtgcccctggtgtatcaggttcttagttgtgtgatgtaaaactccattttagcagacaggagtgagggctgctccctgcaggcagtgtagacctaaagagccaagttgtaagaagggtgtgtgggaggaactgcaggggccactaggagctgttcactgtagacttccagcaaggaagtgaggactttagttactatactacttttatattgctgtgacaaaataccagaatcaacttatgggagaaaggatgcattttgactgatggttgggagaccctaggtccattatagcctagaaagccataaagcatggcggagcttgtggtaggtggaacagctt

SEQ ID NO: 18414 - DNA, 4068 bp, Mus musculus
aagacatagggccttagtatttcttctttgttgggatgatgggataggtttcttcctcctcctcagttttcttgtgtatcagtctccacaggttgagggaagggtacagctcttactgaaccagtgaagactcttggagaactaagttgaggaaagggcagggcatattggcacgcagatgcagaagctgataaagctctgtagccttgcaagtgtattgactgctcccaccctgaaccctctgttgaatcctgtgtctgctcctctgcagataatgtgatcaatgggcaggactatgaagtaatgatgcagattgactgtcaggtgatggacaccaggatcctccacatcaaaagctcctcggttcccccttatctccgggatcatcagcggaaccaaaccagcaccttctttggttcccctccaacaaccacagagacgacccatgtggtcagcaccatccctgagtcgttgcagtagtgcccgagctgcgctggacagcagagactgaagagctggtgaagatgctgctctctgcctcttcggcaagcagagacttgccttgtacgcaactccaggggaagaggaagagagaacaggaagtgcgctgcttgtcaccgtccacccagtggggtggaacatgctagcgagcaattctctggtggcagtgcagccctgtgggcagtgtcgcctggtgttggttctgctgtgtcatctttagtgcttttctcaatgtgtgtttggttctcagttatcttccttcaggtcagacccacttcctcttctgtccactgcacttcctggtgcagtaaagagatttgtatttaaagctttagaacacatgctcatgtggtttccaccaattggctttctctctcctttggttcaaatccattctgaatgttatacttgagaaaacacatttcaaaaaaccgagcagccaaaaacatcccacaaagagtcaaaacagtttagagtttgggtaaagggattatctccagttggtaagagtttatttttacttgtgatttgtggttcagccctggacaaataactgttgtgggggtcacagagtgagccacacactggagacaagggaagggaaggccagtggtggaatgtaaggggaagtgactccattttcatatgtatttaaacacagagttcctgtggcctcggtaagctcagagctatagccaccctcagtgttggaactcggctaatcagcagagatcttcaaagatctcagggcacatgcttgcctctcattgtggaccctcagcccagagcatactcctgtgaaaccagactcagcaaagggacttggaggtcactaggcttaagcaagactagagagtttcccttaaggaccaacagtgcacagagcaagcatggcttcccagagaagctgcagcacagtatggtgaagttctcagtttttccagtggaaagatgataaaggaattaagctctctttgttgttgctatggctgtgaacatggctttaatcctagcaccatttggaaggaaaggcaggctttgtttgatatcagcctggcctacatttcaaattccaggacaggacagctaaagctatataaagaacccacctcaaaaaatagatgaatgaataaatgagtaaataaacaaatacaaacaaaaagcaaagttatgttcacatatattttattgtattttgcctgcttccttcaccatagcaagcagccacatttctattgcactgtacattgtacgttacaagttcacagaaatggatgccaggactcatgtcagtcatgtgctgcctcccttcccaggatttcagcaggttctcatagactcttcccagctggcttgccattgtcaggtggtcccattccagtaagcacaatggcggctaagtcctcttctctctacaaggagtgacacacagtcaggtcatcttttgcctgtggccccattatgcctggcactgttcaccaacaactgttccctggacagcactgctgccatctaagctaaggtgagatgttttcagggcagggccattcttgctgaattcagtgccgcagtccatcctgattggctctcgggtgattttcagacaagacctgtttgtcccgggggctggtcctctaatgggtgccaaggagaagataccaaatacatggagtacctttaggagtagccatttgtgggggaggtgggctaccctgtggccatgtccttcctgcctgtgaagcagctcaacacgaggatgtgactgtggctgtggacagaggcagcacacgcattcctgatgctgatctgctgagacacgaatagaatctgcagtgactccagtgtaccagtgcctcagatcaaagacctcaatagtgtcacgtttgctaaggctgatgcctctcctacaggtaacagtggggatgaccgttggaaggcacagccaaagagcagacagaagttaaggtggccacagcacaggtcagggatccaaggagctggggaggactgctcaaaactagtctggaagcttgccttctctgctcctgctgaccatcaggtcctgtcattaccactctcaggtccgtcttatgagatgaggaatggggccctcctcaggggagagtttcagaaatgagggaaaggcaattatagatagaaagaagtatcctgccatttaaattgctgaaagagctagaatccctgggctcggtagtttgtatcttaatgtttgtgcgctagcacaggcccattggagaggaaaagctgttgtcctgggagcaaagtaagcagccattcaggtctcattttttattttggtatgcttgcccttgggtgtttatagtccggaactgtaggagctatgtatgtacataatatatatattttttaatttattaagttttaaaatgtgatttttcaagattatgaaaaaattaaataaatttgagctagagaaatggctcagtggttaacttcgcttactgctcttccagaggacccaggttcagttcccagctttaagccatctctaactccattggggacaggctaggggatgggatcctctacctttttcaggcctctgcagacaccagacacacataatggtgcacatacatgtgttcaggcaaaacgctaatatacataaaaaataaaaacaaataaatctggtttttcaatcagataaattcccagaggaagtcactccacctgttactagataattttgtgccctgggctgatggtactgtgatgttgggaagtgttgctagaggctggcagtgtggtctttcctgtgtttgcaagccccccacttttaaattcagtgggagtaactgcatgttccctcctgttaacagaacagcttctctctgcagttagctcataaaacagcttccttagaatagaatggaaacccactttcaagttaggaggtgatgagaacggatgcttgagagatgaatgtcagcagcacaaagctgtcccctttgcctttctttctcattagcaagaagtagaccctgggctggccagatggctcaactgctgagagctcttgctgcatctccaggagacccaagttccattcctaacacccatgacacagcccataacccctaactccagttccaggagatctaatgccctcttctagtctcccttggcatctgtgcacacatggcattcactaacacagttacacataaataataatattaatcgtgaagcagacaaggaagtactcaaaaagttacataatgtgcgtcattcctgaattttcccaataactgtcacttgaaaacagagggaactgactttctctcgtatgtttaaagtgactgtcgtggttcaatcttgttggcccaaatctccatcctaggcaaatattccccagtcgttacagctgcccaatgctgttagtcatggctgccataactagaacatttaactcaagacaactcccacagttccactgtgagactgtaagactgggaatttatctaattaaaaagtcagtcttgctgttttactatgaaacttgacagaaatgtaccacagcaacaa

SEQ ID NO: 18415 - DNA, 1210 bp, Mus musculus
tttgagatgccagagccattggttatctgccgaggaaagcagctaacagggagtggaaccagcccaagagaaagaagtttgttgtagtcaacaaagatgaaaaaggagttggagatctgaagaatgcgttaacatcagccttggagatacagagtttggactttgcctagctggtttcctgtcttgctttgaggataacagttaagtgatttgatgaatctcagaagagactttgaactttggacttttaacattattgggactgctatagcctatggggactttggaaattggactaaatgtattttgcattatgctatgtttaggtatggtccccatatactcatatgtttgaacaagtctatggggaccagggagtagaatgtgatggtttgtatgtgcttagccagggagtgccactattagaaggtgtggccgtgtttgagtaggtgtgtcactgtgggtgtgggttataagtctcacattctagtttcctggaagccagcattctgctagcaaccttcatatgaagatgtagaactctcagctcctcctgcaccatgcctacctggaccctgccatgctcctaccttgataataatggactgaacctctgaacctgtaagccagccccaattaaatgttctttttaaaagttgctttagttatggtgtctgttcacagcagtaaaaccctaagacaatgaccaaaaagcaagttggggagagaaggatgtatttgccttacacttccatatgctgttcttcattgaaggaagttaggtcatgaattcaaacagggcaggaacctggaggcaggagctgatgcagaggccagggaggagtgctgtgtactgatttacttataggacccagaatctccagcccaggggtggccctacccaaaatgggctgggacctccccaaccaaccactaagaaaatgccttaaagctggatcttgtggaggtattttttcaataacttccagacaactctagctagtgtccctgaagctccatgcctgttggcatggttgtggcagcttcgagcagcctcatttgtttatactgcatgtgtggttttctctgagcactcagatgtgaagagggtcagaaaggtttgcacactgagttttctcagacccaaccatttcactgagatggcagatcaagacaatatcttttggaaaaactaccaagtgagaaagta

SEQ ID NO: 18416 - DNA, 1202 bp, Mus musculus
tcagggcaggaactcaagcaggaactgaagcaaaaactatggaaggacattgctcattgccttgctgtctggctcatgctcagctagttctctttgtagcttgcctgcctaggaatggtgttgcccgcagtgggctggcctctccacagccatcatctcagtttctcacagacacactgacttgggcaatgactcaactgaggtttcctcttccctggtgaccctaggttgtgttatattgacagtaaaatctaaccaaaatattgtctagaggaagtgaatggcatttctgaggatgacacccaaggttatcctctgatctccaaatgcaagcacacacaaacacacacacatataaacatacatacacactcacttatacccatacatagatacacaaatgcacgcatatacacacatgtgcatgagcacaaaagcacacacacacacatacacacacacacacttcatgtatataatttttaattaaaaaatattaaatacttacctggcaggagagataccatgatcacgaaggtggctttcccagggcgaggctcacccattgcactttggggtgtgctgacccctgcgatttccccaaatgcgggaaactcgactgcataatttgtggtagtgggggactgtgttcgtgctctcccctttaaaaaaaaaaaaattaagcccaggcctggggagattgctcagtggttaagagcactagctgctcttccagaggacctggatttgattcccagtcaattttaactccagttccagggaatctgacatcctttctctggcctctgtgggcaccaggcatgaagctagtgcaccaatataatgtgggcaaaatgcccatacacataaaatcaaaacaaaaatggttaaattaaaaatatctatattgagctggactgaaacgttgtttcttgggaggacagctgtgtgctccctgctgcttcactgttggtcctgaaaaccccaggctttcccttttccctgagatagtccacatcttttttttttttttttttttttttttttttggtttttcgagacagggtttctgtgtatagccctggctgtcctggaactcattttgtagaccaggctggcctcgaactcagaaatccacctgcctctgcctcccaagtgctgggatcaaaggcgtgcgccaccacgcccagcgatagtccaca

SEQ ID NO: 18417 - DNA, 1191 bp, Mus musculus
atactcacgccctacacgcagacccagataatccagccccgcacgatgtcctccagcaaagccgccccgggtcctcaaagccttttgctggccgctggcccagcgccctggcgcctgccaacacgctaccctcagccccccgccgcccctagcgagccctcccatcccaaccccaaccgcggtgagctccgggtgtgcccgaacaggtcagattgtcccacaacctggggttatcgctgcgttggtggtatagtggtgagcatagctgccttccaagcagttgacccgggttcgattcccggccaacgcataacattttttgttgaatactggatctttctggtgcctctcagcttgtatcgagactgcgtgacctaacagaggcttgagatattttgaggatgtggccagcgggaggagtcttttggaatcttctgtttacggttgcccatcaaaaagctaagttaatagtaatgaacttcagatcagatctaggtattcttcgcgagaggaacctcctatcactccctggtggtctagtggttaggattcggcgctctcaccgccgcggcccgggttcgattcccggtcagggaagtgctttttcttaaaacttactctgagatatttactccactagttcttagttttcctacctactagttttctaatggtccttatgctgcccagcaccacctcaccatgcgtatgtttagaatttctctatgactctgcactcctgtccatttaaacacatttgccctcaaatgcacacctcgttcctgctctttcttttcggagtattttacttttgcacatctcaggctttctgcttcccttggcgcccagccggaagtactgccaccatcacacgcccacacacacaagcctcgcagagcgcccagacttgtcaaacacatcaccggcccttaactcagaaagaagtcccctaggaatggttcttcctggttatcaacttgacactatctggaatgaactacaatccagaactggaaggctcacctgtgatccagatcttgaggctgggagatacaagtttctgatcttggcatggagatcttgaggcatagtgactatagatcccaggagactagggtaaggagatctccagagttcaaggtcatctgggacaaatcctggtggtacacacctttaatctgggccacacct

SEQ ID NO: 18418 - DNA, 1688 bp, Mus musculus
tacactaatctgaatcatataacaagatcttccccaccccagccgagagctgagcccagggccgttggcttcctagacagatactctcttccaagtcaaacccccagccccaataacaagattctatctcagaaaacaaaactatgttttgaaggaagacttttccagaaacactgatctcgatgtgctgtcagctagagagaggagattatgtctgtacagtctggaagcttttgtgtggagggcctttggcattctgaagagcagtcacccatcagtaccacatgagatgacttgattttcatcactggggctttcagaagtgtgaaactgggacatagggatatgctgcttttctcggaaccccaaaaagggaaggaagtacccgttcagtaggtagaacatttctgagacaggaattgtaagagtgactggaattctaattgctgaaaattaaaataaaaacttgtcttcccctcttttttctacagctatgggacctaggaaaaggcctggcaataccccaggtctggctgtctggagtggcggtcgtggttcttgctgtgttgtcctctggcgggctggccgccctgtgaagagctggagttcccagcacccctgtacatcatcaaactgatttatattcctgtttatcactatccccacccctcccccccagcctcccaggttctcctgatttgtttagatgccacatgctttcaatccccttggagtgcagtagagcggcttaaagacctgttgtagtaagaaagggtcatcctccctgggcctgggagcccttgctccggttccacatttgactgatttgtgctgagggtcagctttccgctgctttctgctgagacagtggaaacaatgccagttctgtgaccgccccgagtgccactgcctgtgggctgctggcttaaaggacacttctgtccattggtcagcttagggcctttagcacccacaccgcgtgactgagaggagagaggtggaggaggagggattgtcctgctcagctagagggagataaagagcagcctgggagcttggagctcgagcctgggaacagatacagcttttgatgtatgaggaagatcaaaaaaaattgtattaagtttctgttctgtttttcatttctaggaaaatacacctttaatgtcatattttctaatctaaattcttgtaccatcttctttggaaacgattaaagtactactcattttatgcttgactctttggaatctagtgacaggtgggtagaaagggtctaatctctgcccctccctttggatcttggacatttacaccctccagtatggagggaaatagtttgcccaacaactaccactgcgaaaaatgaggtaatcacaaccaagtagtggagagattttggtcaaggaaagaacataagaagtcagctaagcatgcggggagcttttggggtgttgtagggcccaggcctgtggatggccagcttggtacttaagcagaccatttggttatggacacctagcaccagtggaggtggaggctaagggctaaatagatttggggggaggtaggggaagtagaagagaattttttaaaagcagggcaggattggaggcatcagagttcttgaagatggatatacagtgggaaacgttgcttctttacccctactgaggccctggatcctt

SEQ ID NO: 18419 - DNA, 1208 bp, Mus musculus
aattggagttgcaggtgtgtgaacattgataccacttgggtgctggaaaatgaacccaggtcctcggaaagtgaagccagtgctcttaactattgcgcctacatgttttgtaaagtatatttttattatttttaactatgtgtatagatttgtcgggtatgtacacatgagtacaggtgctctcgaaggctggggggggttatgattcccctggagtgggagttacaggcggtgccagcttctcagtgtgggtttctgggaaccaaactcaggttctctacaacatcagtgtgcacctgtaactgctgagccacctccctggtccctcatgcatggttttatgtggccctagatttcaaaaccggggcttatatattttggcaaatgatctacatccctagatagcaacaaattttctcttatttcaaagtggtttaggattatatcaggtgtcaagagctgtcataaaacccagtttaatacattctgttctttgtaactgatagctgcgtgtcctctctcaggggtctctctttttggcctgtcggcactgctgcttcctgggaactttgagtcatatttgatgtttgtgaagtccctgtgtttggggccaacactgatctactcggctaagtttgtgcttgtcttcccgctcatgtaccactcactgaatgggatccgacacttggtaagtttcttgtgggcgaagagcgggagggctgggaggctctttccttcatttctgagcatagtgttcttgcaccttttcctaccctcccatccccctctttttaatgctaaggtcactgaaccaagagccttatcagtgctgtacctttgagctacacctctaaccttagagctagtctttgtttgcttctgagacagagtctatcactatgtatccctggtgggcctggaccattctatatagatcaggatggccttgaatttgggattttcctcctgactctgcatcccaggtgctggaattataagcatgagacaccacatatagcctaaccttatttgactatctgttttaattttacttatttatgttttattcagtgtgtgtgtgtgtgttttgtacatacgcctgtgcatgtgtgtcagtggtcctgggcttgccttttcctgagccgtcctaccagaaccattcttttttttttttcaggaccattcttaaggctaattgtactgggtct

SEQ ID NO: 18420 - DNA, 1208 bp, Mus musculus
ctctcaagtgctacaataacagacatgagctcttgtgcccagtttgaggattttgtagtggtggtgtttgatttgttttgttttgagacagaaacaaggtctgtggctggcttagaattctctatgtagactaggctggcttcaaactcatgaacgccttccccagtgctaaggttaaccgtgtatactcccacgccggccagcctttgggtgagatttttaagagctcttttctgcagacttgggtttacactgttgccacccccatttctgcaggctggtttggacaagatgtctaagggacacatgttggcagatgtcgtggccatcataggtatgagacctttttattatatagcaagatgtttaagacaaggggtttgggattctgtatgggagcaaaaaccaaacacttcctgttcagcatagactgtgtcctggcctctgggccggagtttcttggacatcataatgtcctctggacctctggtgataacatttcattctctaaccttttaggtacccaggatattgtgttcggagaaatagaccgatgagcgaaagcaccaccctcgagctgccttgcctgtcagctgctccttcgaggcctgtgtctggtgggagacaaggctgtgtgtctctgtgtgtgtaaacaaacgtgcacgtgctcgcacttagctgcgcaggctttctgtgcatgaactagaaaaggagacattatattaaattagccaccttttggcccctaagctcagcttgtaatgtgtctttcttggtgtcttgctgcctttcactttgtatttctctgacttagatcttaattttcccagctgatctccacccccctctctgagtcttactctttccacttctccattcctcatttcccctttcccctcacttcctcctgctccgaccctcttggtatctataaaactgctaactcaaatgacaaatgggtatataaagttctagataggaaggtaagggttatggtgggtgtctagcggagtctctaggggcagtttgctgcctacatagcatgcatctgagtggtgggtggttaaatatggcagatatagacaacctttccccagcatgaaagcctgctcattcagtggtttaggttggtccctgaaagggctgagtcttagaggccagatcgtccagctccccaaaatggcccttccgggagctgcctggtctgt

SEQ ID NO: 18421 - DNA, 1366 bp, Mus musculus
cctggactcaactgtgatgtttagattccagattctacccagaatgatctgtacgatgagccctcggctcccacatacttctttctttaaaagaaaaagaaaaaaaaaacacccatgataatatatatttgtttatttactgtgtgtgcgtaaatgtgaaacagtatacatcaaggcgtgtgtggggaggtcagaggtcagcttctggggagtcggttccttcctacctaccatgtgggctccagacttgttagcaaacgcctttctctgcagccgctgagccatctttccagccccttccatcactccccgtctttccgtctcacagtgctctttggagagatcacacggattttaaaccatatcatggctgtcaccacacatgccctggacatcggtgccatgactcctttcttctggatgtttgaagaaagagagaagatgttcgagttctatgagcgggtgtctggggcccggatgcacgcggcgtatatccgacctggaggagtgcaccaggtgagtgagctgctctctggcctctctcctctgccaccactggagggcagtgtgggctgccggagctctggccttttgagaagcggtgctgtgacaggatcaccacttggcttctaggacctacctcttgggcttctggatgacatttatgagttttccaagaacttctctcttcggattgatgaggtggaggaggtgagacagaactcgacgcgagaaagatacctttatctcccagaaaggctggtggggttttagtacccagcagagcgtaagtacagaggcgtttagagattgtcacgaagaatatcagcacactggacttgtccgtccatagatgctgaccaacaatagaatctggcgaaataggacagtcgacattggggttgtaacagcggaagacgcacttaactatggattcaggtaggagaggccgtagaggtacagcccggtgtacagcccagtgtcttgtttcaggtgtgtttggtgctgtcctctccatgcctggagtttctgttccatagccagatgtggggagggagatgggaggcatgcatgtcctctgttgtggggggtgggagggaggtgggaggcatgcgtgtcctttcttgcggaggacggtcctatgcccattatgccctatagtggggtgatgctccgaggctcaggcatccagtgggacttgcggaagacccagccctatgacgtttacgaccaggtggagtttgatgttcctatcggttctcgaggggactgctacgataggtaagattcgtatcatggctcagctcttcattcctgcctgacttctctgagctctgtttcctagtatctgtaggagcccgtggaa

SEQ ID NO: 18422 - DNA, 1198 bp, Mus musculus
gttttggagcagaaagaacccgtgggcacttttcctgagcccaggggctgttttctttttcatcttctctgaaagtccctagcccatttaaaaactttgcctcagattttggcacaagccccaaagcccttctggctttaacgaggagccttccacagttagggtgtggagcattttggtgccgcagatggcctcaatccatcccagctgcagcccgggtaccatgtcccagatgggcttgcatcccaggaggggcttgactgggcactggctgcaaagattccaaccctgcttgccgcttcacactgtgcagtggcggaggctgctgctgctggccttcctcctgtccttagcgtggcccgccagccccctcccccgggaggaggagatcgtgtttccagagaagctcaatggcagtagcatcctacctggatcaggcgttcctgccaggctgctgtaccgattgccagcctttggggagatgttgctactagaactagaacaggaccctggggtgcaggtagagggtttgactgtacagtacctgggccaggcacctgagatgctgggtggggcagagccaggtacctacctgactggcaccatcaatggagatccggagtcggtggcatctctgcactgggacgggggagccctattaggggtactgcagtaccgtggggccgaactccacctccagcctctggaaggaggcgcccttaactctgctgggggaccgggggctcacatcctacgccggaagagtcctgccagcagccaaggtcccatgtgcaccgtcaaggctccttctgggagcccgagtcccatttcccgcagaaccaaggtaggcaactctggagatcatgccccgtgcccgtatcattcctcccgccatgtctgccctactgacccctattcaccctctctcctcccacttccacttgcagctttccaacttctctccttctctctgcctttcccatctccactaccctttctttgaaaaatcctggctactccctgcttcggtcctttgctttgctctgaggattccctgaggtaggtcagattctctgggccggaatgacctctccccctctctcccccgccccttcctggccctggagtctcctgctgacacagttcccagcagtaaagctctcccaacagcctgttggcctaggctcttttctctgcc

SEQ ID NO: 18423 - DNA, 1302 bp, Mus musculus
ggaaaatccccacaggtaggaaagaaatgtttattggagtctcgggtttcctgtctctttaggacactctacatgtccctgaattctagactcttcctttgagatctcttaatcttacaacttctcaccctcagatttgacctcctggtccgtacccagaattcttggacacaagatggaatgaactcactaacgtaccgactgctggcaagagagctgggtcctctctataccaacatcaccgcagacatcgggactgaccctcggggtccccggtctccctctggtccccgatacccacctggttcctcccaggccttccgtcaagagatgctgcaacgccggcccccagctaggcctggccctctgcccactgccaaccacacagctccccgtggctcacactgattctctgcccactgtaatcatgagactgaattggaggggttgtgtccctcacacctctgctcctcactgctctcagagggatgtgagggaattaaccctagtgctgtgctagggggcagggacctcttctcactgctagattggagctgggctcctctagacctggaggttcctctttctaggggtcacctgtcagggcttatgactgtgaatctttgatgtcattttatgtgacgaatcctgggagtcctctgcccctggggtaggagcagggctggaccccaagtcccttcctcgtccatggacattactcttttccaagagtgacctggcttctcctgggacctctgtgaatatttattctatttatggttcctaagaagctgtctggtggaggaaacccctagccgggcatttcctgcgagtgctggaatggctgctcctcctctggtcttggccccggaggggcgggggctgggattttgatatcttttctaataaaggactttgtctcacctttgcttgtgatttctgcatctcaggccacttaatcctctcccaccaccctcacccctgacaagtctatagggtgatgaatagtaaagagcaaaccaagctctaccaacttttactttcatgagtaggaaagtgggggtggggacgggacagggggcttgtcagctgttagattctgtgcccaggacagcaactgctgcctggcgcccactctctatacagtcattgacagcaaccccctcataggaggctccagccaaagtcaggggcaacctctgggccgtcaggaattgcatagctgagtctgaaaggtaagggtgaaagcgttttagctgaggtctgacaccctcagcacagccgctcgtccgtccagcagct

SEQ ID NO: 18424 - DNA, 1209 bp, Mus musculus
  misc_feature (20)..(20): n is a, c, g, or t
gtgtaagttgggggtgtcangaaaaagcaacttaggtgagggcaccctgacctaacactatttgctgtttatttaggtgtgtgaccgatgtcggcagaaaacccgaagtaccaaaaagttgacagtacaaagattcccccgaatcctcgtgctccatatcctaatcttcacgttcttatttctcttagggtatctcccatacagtgtctcctcgccttcgtttgagtttcccttagggaaaacctgccaccctgactttctttgccacctttcaggatgtgttgggggaatggagggtactgaatttattactgcagtcccccctagagacccttagcctccccagtgctccttaaccagggcttagatctgaaccgattttccacctcccgaggctccatcaagaaaagttcagtaggtgtagacttcccactgcagagactaagcctaggggactttgccagcgacaaagcgggtgagtctggcagggaacctcctaaagaatcttcaggagggagacacaactgggtgtggaaactgatgttatttaacccgcaggaagccctgtctaccagctgtatgccctttgcaaccactcgggtagtgtccactatggccactacacagccctgtgccggtgccagactggttggcatgtctacaatgactcccggtgagaatagcctcttgttcaactcctgccccctcccaccgccccccccccagctccgaaaagataagttcctgacaaaggataggtggagagtctctcctgatctccacctggctactctgagtcttgtgggatggagggggaatctacaagaatgaccactgaccacagccgtgtcccgtttctcttctcagcgtttcccctgtcagtgaaaatcaggtggcatccagtgagggctacgtgctgttctaccaattgatgcaggaaccacttcggtgcctgtgacaccatcttgaagccctggcacctgtgaaaaccttcccaacacccttaagcccccagttacctcacagacgtctatttttgtgtctttttaatcggggaggggaggagggttggttgtagctcccgttattttttttattaagaagtacccttccgccttgttttcctgtcccatgtacagaaaccaccagacccttgaccatgtacagcccccagaacctctgcaatctcacttttttgtgaataaattt

SEQ ID NO: 18425 - DNA, 1180 bp, Mus musculus
tctcccccaaccccttcagttctatcctcccaattcccatggctcccagcccttcaagctggcagttacatccgttttccccagtttgttccttcctagagattttctagccacagaagctcctcccgcctgcctgctctcctagacattagcattgaatcccttccccactgtcaaaccaacagcctttgcagatgtgattggtgccctctggcaccctgactcctgtgaagctgtgaatcccacccgattccgggctgtcttccagaaatacgtcccttccttctctggatacaggtggggaaactgagagaatgggatttctctctggctccggttgggggcggggacaagctgaggctctggcagcagtgttgtaagccttgagatttcctacactgaggaaacgggaacccacatttgggcagggggtactgtgtggaccacgaggggatggatcagatgcccatattctgtctggctgtagccagcaggatgcccaagagttcctgaagctcctcatggagcggttgcaccttgagatcaaccgacgagggcgccgggcaccgccaatcttggccagcggaccagttccctctccaccttgccgaggaggaggggctctgcatgaagaacctgagttgaggtaagggttgttcccccttgctcctctccgcagtacttctatcagctttcagttatcacggaactgagctaaccgaaactgaaatgtagggcctaggagagaccctttagcacaggaaaaaaaaaaaaaaaaaaaaaaaaaaaagaaggaaggaaggaagggaggaagatgggaaagtacatatagaggcagaaaatagagtcagagatgcactgagctggggaaggagagaacgtctacaatcaaatatatcaaagagcttgtagaggaagatggccctgtgtatatgtgtgtgtgtttatatatatacatacatatatatgcatgtgtatatatacacatacatatataaatgtatatgtatgtgtgtcctttcatcttggatttccccagaaagttcccaggggcattgcttactcctttgactaggaatttagggaaggagctggtatgtggacagggaccagggttccgtggataatttccgtggttggggccgcccagtactatagctgtctcacaggttgctccctt

SEQ ID NO: 18426 - DNA, 1441 bp, Mus musculus
gagagagagcaaaggtagccttagggaagagcccaagagacaatggtttccccagagcctgctccagctgctccagagtctagggggagtccagctctcctctgtcaagcctgagcaaagtacttagctgaccttgttctccattctgagcactaacaatcttcctgtgttcccaagaggctgctctacgttaagactgtctcacgtgtcaatgctttcctctcgtctttctcacaggggtggcaaaatatgtctgactgatcatttcaaacctttgtgggccaggaatgtgcctaagtttggactagctcatctcatggccctgggggtgagtttgttaatttcggtgtatgagaggaagagggagggttcagggataagtaatatcctacacgtagctgagactagacattccttgggcatgtcctcctaggctctaggacctagagtctccggggaggagactcaggtggaacaagaggcatggactgtgacagtaacttcacagggtttcccttgcattgcagctgggtccttggctggcagtggaagtccccgatctgatccagaagggtgtgatccagcacaaagaaaaatgcagccaatgaaggactacgcccctgaggccggactgagggaccgtggctaggctccattcctgtttgctcctttttcaggattccttcaagggtcacctctggctgttacaaagtagctggagggacaaataagaaaacccaacaatagggcaaggtcacaaagtttctaaatgaaactgtacagagagatgaaagatttgggccttgaaataggcggtttgtatcccttctccaagtagagccctggaggcattttggaggcctggggtgtaacttacagcacatagctttttggtttctggagacaacctgtcaataaaagctgcttcccctggtagcctgtggttctcattgatggctgttaagaaggtgaacaagcaaaacgcggaggtacatgaacaactacactaggttgggaggagggtatgatagaagaaaatctggtttctttccttgctgttggggttcactttttccctttagcagtgaaccatgttttacttaactgcctgagcctacaaagaagcttgaagaatgagttttacaggtccagcgttctcttcccactagggatctccccacccttaggtggagttgctaaatgcttctctattggtttgctggctagacctggacctgcatgctgctttctcactgcatccctcttgcttccgaagaatctgtgttgtaagcccttccgttacttttcgactcttgggctcttcatctctatggaccatatatgactgggtgaggggccttggcctcagggacttgcagcaatggtttaaagaccaccatcaggcagggcctgaaactagtggttctaaagttggctgcgt

SEQ ID NO: 18427 - DNA, 1823 bp, Mus musculus
cagacctgtttctgccacaatcgcctcgcccacctaggatggagtcttaccacgtaggtaaattctactgtgtgccacatctgcagcttcctgcaagaaaccacctgctgagcagctgagcttgttttcctgagcagatcctggcatagtgggggatgggttcccccctttaaaagtcagaccctagaattaaaggtatgggatttcccagtgataggttaaataaaattttattgactttaaatgtttaaatgtcactaagacagatatcacagttgctgaaaaacactgaattttagaaagtattgatgaattaaatcagcctatatataccttaacttcagaatagcgggaaggaaataggttggcgaccttagctgcccagttgtaccccctaaccaaagaaggggaggtgtctgtgtggaccccagatcaccagaaagcctttaaagagattaaaaaggccctactgatggccagcctatgcctgacctaaccaagcctttcactctttatgtgaaagagagagcaggggtcaccagaggagtccttactcagactttgggactttgaaaaagcccagtgacttacctatccaagaagttacaccctgttgccagtaggtggttttcttgcctgaaagctattgctgccataatctgcttgtcaaggatgctgataagctcactctgggacaacaaataactgtagtggcatcccacactcttgaaagcattaccaacgctcctgtgacacatcagagctttttgttgtctaaatgagtgaccttcgcttcattccacctgctgtcccactgtgtgagactgcacctactcatcactgcgctgacattctggcagaagaaatgatctgaattatcagatcagccttggcctgagggtacgagctggtacactgatgacagtagcctcgaggttaaaggtaagcaaaaggtggggacagcagtatggtggtgaacagaaagcaagtgatctaggccagcagccttcctgagggacgtcggcccagaaagctgaacttgcgactttaagacaagctctataaatggcaaaagaaaagtctacactgacaacaggtatgcttttgccactgtacgggacaatatacaaagagggctgttgacatctgcagaaaaagacctaagatgctgtggctaaagaaaatcagatggcagatctaaccgtcaagcaggtggctcaaaaaacaatgatcctggcagtcaaggagtctaaagattattatgacatcagagagaccagctttagatacaccgctgagcactatcaagctatagacagtatttggcttggcctgggggccaagaaattcaaaggtgtggttaggtcctttgactactatgttacaggactctctgacttagcagaagaaatagtcaaaagcttcaaggcctgtgctataatgaggtagaatttctaaaagaaatcttcccaaggtaatggacctgcctttgttgcccaggtaaatcagagactggccaagatattagagatcggttaaaagttacattgtgcatgcaggccccaaagctcaggacaggtaaaaaaattaatagaaccattaagagacccttaccaaattgacagcggagactggcgctatgattagatagctctcctaccctttatgctcttcagggatagaaacacccctggacagtttagactgacccccctataaattactctacagggggcccccctccactggtaaaaatagcctttgtacatagtgctgacatgctgctttcccagcctttgttctctaggctcaaggtgctccag

SEQ ID NO: 18428 - DNA, 2084 bp, Mus musculus
tggcctgagcagagtcattgtagggcattgtagggcagctccagaattgaaaccagtgacacagtgaagaactagttctggggagaggtaaagaagctgtgagaagagggagggtctcagccttgcttgcttgcttttctagctttggttgtaaacacaatccattataaaccatgctccttaaaattctcccagatatcaggctccgagttcgggcggaatactgccagcatgagacggctctgcaaggcaatgtcttctccaataagcaggacccacttgagcgccagtttgagcgctttaaccaggccaacactatcctcaagtcccgggacctgggctccatcatctgtgacatcaagttctctgagctcacctacctcgacgcattctggcgagactacattaatggctcattattagaggcactgaaaggtgtcttcatcacagactctctcaagcaagctgtgggccatgaagccatcaagctgctggtgaacgtggatgaggaggactatgagctgggccgacagaaactcctgaggaacttgatgctgcaggcattaccctgacctttccccttctcacctttctggggactgttcgctccgtcacctctggagctgacatactgttctggggtttgttctctaccctttccaaccaatcacaccgcctttttttttttttttttttaaaaggaaaagacaaaggaaggtggaagtggtgtccctgccctccctgcacccatgtgcctgggcttccccgtttcctgttgccacttaccctattgtgtgtctacagccaccttaccactgagccgtaagacaagtgtatagggacagggtctctggaacacagcctttgtaagggattgaacactgctttcaggtgcattgaggggtaatcaatacttatggctttatgagggctcttaaattttgtctgaaaaaccaaagggctgtgagtaaaggagctatgtggaaggtgggactctgaagtgtattttggaaattaattaccaccttcttccaaattatagaattttttaaaaacagagaagctgtggccctttgcagtctctcctggccttggtgctgctcctctctgcctttccttcattccacagcgggaactgctgtcgtatggatccctccttgtccctgtcaaatgttcagcaaacttacagaggactgggccagcctgatcgatcaccctcccaactgcgatgtgtatgtgaacaccagtacacaggacagtggagtagaggctgctagttggagcacactttctctgaagaggaggagggggtggggggtatgacattttccttcccttttccagtgaaaataactcttaccccaccccaaggccctttccctttgcttccttcttgcttgagagaaagtggggtatttagtatcagctcctcctgttcctctgccctcccttctcccatcctttggagagcaggactagtacatgcactgagcaccgcactttcttaggtaaggaggcatgtttgaggcaggaggctgaggagtgaagtccagtcaagcaggtacaattccacctccccttctagcccccaaaagacatgtccagacattatgattattatatttttttttcaatgccagtgctgctcagccctcagcataacttcagttttcatgaaataaacagtgactatataaaatcccacttttctgaaactgaaatctgaggtcaggtcaaagtctcttctttcccatggacttgattaagcctgtgttccattaagagaggttaaagttctgcaagtgaagggaaccgtgcttgtgtcctgcctacaagtcacagtagcatcacctcccagttggctgtgtctgtgtcttaaccaacagaagttaaaagcattaagagagtggatgacccagactgccatagaggtcaggtctgcggtgctggaacacaggcaggtgttggcgcatctgttgtagaaagtggagatcaattcgagcaaggcagaggcctggtccctcggagcagcgggccaccactgtgccccacgggtcaaccaccatgctatggccataacttgc

SEQ ID NO: 18429 - DNA, 1200 bp, Mus musculus
atctcaaaagtacaaaacacaaacactcctcctttctacttgattttcttccttttcatctggtgaggaaattcatttcttagctaggtgtgagtcatgttaaagagttagttattaactctagttggttagtgagaagattgggcccacagtgcccgcttcttgtcacttgcctattaaacgctgtatgttctggagtcaacgcacgtctcatcctcaggtgctgctgcgggcccgcgccattgaatctcagtgctatgtaatagcagcagcgcagtgtggacgccaccatgaaacaagagcaagttatggccatagcatggtggttgacccgtggggcacagtggtggcccgctgctccgagggaccaggcctctgccttgctcgaattgatctccactttctacaacagatgcgccaacacctgcctgtgttccagcaccgcagacctgacctctatggcagtctgggtcatccactctcttaatgcttttaacttctgttggttaagacacagacacagccaactgggaggtgatgctactgtgacttgtaggcaggacacaagcacggttcccttcacttgcagaactttaacctctcttaatggaacacaggcttaatcaagtccatgggaaagaagagactttgacctgacctcagatttcagtttcagaaaagtgggattttatatagtcactgtttatttcatgaaaactgaagttatgctgagggctgagcagcactggcattgaaaaaaaaatataataatcataatgtctggacatgtcttttgggggctagaaggggaggtggaattgtacctgcttgactggacttcactcctcagcctcctgcctcaaacatgcctccttacctaagaaagtgcggtgctcagtgcatgtactagtcctgctctccaaaggatgggagaagggagggcagaggaacaggaggagctgatactaaataccccactttctctcaagcaagaaggaagcaaagggaaagggccttggggtggggtaagagttattttcactggaaaagggaaggaaaatgtcataccccccaccccctcctcctcttcagagaaagtgtgctccaactagcagcctctactccactgtcctgtgtactggtgttcacatacacatcgcagttgggagggtgatcgatcaggctggcccagtcctctgt

SEQ ID NO: 18430 - DNA, 1103 bp, Mus musculus
cagcttttataccattctaggtacttgcagagaatagggtcagttcttagatcaatgacaaagtagtcagacaaggctataaacaacgagaccaaacaaggcggtaaacaaagccccctggtcactgtttctaggggcttatcaggatgaccaagataaaaggaatgccacacattgagctttgtattagcccaaatgtaaatactcccatctgagtctacttccttgagcccagtgataagtgcttggcaaatttctacaaggttccaaaagctctccacaatctcaggttgaaagccagactggtaatctgtattcagagaccttgtctcaaaacaagcaagaaaccatgcacacaaacaaccacatctcccaacatatatatcaatagggaacaaattctatgtcacacttaaaaagaaatctggggctagagaaatggctcagtggttaagagctagagaatcctggggcagtggtggcgcacgcctttaatcccagcacttgggaggcagaggcaggcagatttattgagttcaaggccagcctggtctacaaagtgagttccaggacagccagggctacacagggaaaccctgtcttgaagaacaaacaaaaaaaagatctagaggatctgggtttaatttccagctcattactggtatggtagctcatgctttgggggatctgatgccttcttctagcctctttgggtcccaggcatgcacatagcagacctatacatacaggtaagtcacataaaaataaatcttgggggggaaatctttataaaaataagtttttgaaagatctcgtatgtgtaaataataagaatataaagagctctatgtagtaatacgaagtgatgttgatttagaaattaatttaattaatttctaaatcaacatccttcgtattattaattaattaattaattaatttaattaaatggggctatttcagaggggaactttacatacactatgatttaatagggtaaagagactctcaacattgactagtctatccctgtttacatgagactattgaggtttggtctgttgctgtgtattgcaatgcttaaatactggcccccaaggtct

SEQ ID NO: 18431 - DNA, 1187 bp, Mus musculus
cagaccccagagcagtattagcgatgcagaggttagaagcgagaggtggagactgtggccagatccaggtgtgcgggcacagctggagctagaatctgacctccaaagtgggggagctgtgttcccaccccttgggagcaagtgagaagcagacaccgcgggggtctgccagaggccagaactgttacagaagccctctgccctctggtggcctgtgggcctgctgcatgtacgtaccttctgtaaattaaactccaagggagctagcttcctgagttctgcttagactcccttaataagagaaaaagaaactttaaaagcagagaaagaaagaaagaagaaactttattgatgtgtgtgcatgttctttactgggcttgtttaagccaggccaggccacataggcattcaaccaaactgtctagcagaccacggcagggattagtgcctgtggttctggaaagttctcttcctaggatgccttcacccacagaggttctggggagggggctgacagctggaggagtctggaacctggggtatgaggtctgaacactggataagagactagggatgggggggcttggctcccatggcccctcgaatcttgtcctcgctgtgtctacagtggtttgtaccttcacggcgttgggacttgttgtcaaggactcctggttcagttgtgttgagggcagagggtaggtcgcggggaaggtggaagttcaggtgaagagaaaggggtgttgtgggtgagggtgagaacaggcccttccccaggggtttctgagtcattaatccggggctctctggcactttgtatgtgtggagcctggggtaagatgtttgtttttctttagcctgcccaaacttacgcagtcagaatactgggatttagtatccaacccttgtgtggcctgaaatctgctggtctaaaggagaaactctcatttcattcccaagcagcccaggacttatggaccccaaggatctggggtcttagtatgtatatttcatgtaaatatatgtatatttgtacataaaatgatattctgtttttaaataaacagataaaacctttttttgtctgattcctgtcttgccccttgaactgggtaagtcacaagtgctatggactgagtctctatgtgattccctcccagggaaagggcccagatacagctaagaaa

SEQ ID NO: 18432 - DNA, 1167 bp, Mus musculus
cacctgaaggcacagaggggtctgagcccaggagtcggcttagtctgccccctagagagcttcaccctgttgtccctcttgtggcccctcagcgccagacatatgcttttgaaacacagactaatcatgggaaagatgaaggggtatgattaggacaggacaagaggaaccaagaaatcatcaccaatctctggagcacttgcctagctgtctttgctgcctcggcagctgagatgtctaattccataggcttgggtcctccagcttcttgttttgaccatgagaggtacagacttggtggatttacttatgtttgtgttagacacaaagccacttatgtcttagcagagtcttaagaaacatagaacaatcttgtttccagggagttaacaaaaacatagggtaggtaaaagcttttttttttcttaaatttaaatacagtgggggaatttcagccaaacttttgccctattctgagctgtgaatatctcttcacagaagcctactgtagatgtgggagatataggaccagatatagaatagctcacccctgatttgttcctagatttttggctgtcttctgaccctctttagtttcagagtaggagaaacatccaagaagctctttaaagtcctcagtgtttgctgaaggaaatgggtggcatcctctaccttcaattattttgcagaagaggtcctcccattttaggaaaagggaatgttgggctgaagagatagctcagaggttaagagcacctactgttcttccagaggtcctgagttcaattcctagcaatcacatgatggctcacaaccatctgtaacggaatttgatgccttctacgggtgagtctgaagagagcaatggtgtactcattcatatacataaaataaataaagaaagaaaagaaaaaggaaaagaaaagtagagggaatgtcactcaatttggctctagcactgtctctgcacaggctggggctacaggccaccatttagcaatggtgggtatttgataataaaagctgaattttttttttaacatttaaacagtgtatgtactttgtcttattaaagttttgggtgaatggtatcacattccaaagttgccaaaatgtatatatcttgttttttcttatttagatattcttcctcagttgtcatgggaa

SEQ ID NO: 18433 - DNA, 1237 bp, Mus musculus
gaggatgggaaggctggcgggtcactctctactttgctctgccccacagtggagcgccgccgccgggacaagatcaacaactggattgtacagctgtccaaaatcatcccagactgctctatggagagcaccaagtctggccagagtaaaggtggaatcctgtccaaagcctgtgattatatccaggagctgcggcagagcaaccaccggctgtctgaagagctgcaggggttagatcagttgcagctggacaacgatgtgctccggcaacaggtcagactaactccaggatggcccccttggcagccccgtagccactgacccagtttggagtccctggaaaacacttgccattgtccctcttggctgtggctgtggggctgagttcatggcttagcggtgtcaatcttgtttttcctcatcatttcctctccgtgcaggtggaagatctcaagaacaagaacctgctcctgcgagctcagcttcggcaccacggactcgaggtcgtcatcaagaatgacagcaactaactctggggactcaggggctttgggccaaggactgcagccggcccaggagcaacaggctaaccccatgcccctctccttcactgcctcctctggcatgggactcgggggagtttggcaagtgtgtttttgaactgaggccctgtggcgtggcagtctgcagtgagtggtgtgaaacaaacagtgtgggcgtgcactgacagcccggcctgctccctctgtgcagtccccgggtctggtgcgccttcggcacactgcatgtgctgtctccttgctggacactggacacactgaatctgggcttgccgtgtgctcgcttggagtgcctgagagagggactgcgggcctagtacttccactggctcttcctttctctggagcagaagttaagatgcgtacctgagtactctgggaagcaggcttactcaagaggtgggaaaggatgctagctggctgctatcccaggagtagaagggggcccaatgagcagccgaggcccctacggaaggctctggagccagggagaactgtaggcaggggtgggttcactgagagccttccctgctccagggatgggtctttttatttctttccttttttttttttttttttttttaaagataaaattgtttagagccacagttgtctgtcttcctcctttttggggccctgggggaagggagagtgcatattactctttgaccagtaag

SEQ ID NO: 18434 - DNA, 1441 bp, Mus musculus
cagtactcgaagtgaggtgagtgtacctgccccgaggaggggaggccttgtgcttcaagtggccgtttctagcctctttgcgtgtttgtgagcaaaacgagactgtgaagttgactggatgttttatttcccagggggaattcaaacagacctcgtcgttcctggtgtgacctgctgcggctcctccgttgtccatttgccttactcaggtgctacaggttccagccccctgctggctgtagctgcacaggatgccttcaatgtcttctaggtcccacaggaccccttgcttttattctagctagggtataaatttaaaaacatcatctacttccccctcctctttcccaccctccctcctttccttaccaccattgggtggcccgagactaattacaaagttttcgttccccattcctatgtgggattgggcaagagtcctagactagacagtaatagtggctgggctgacaggaacccaaaccaatacctggctgtaaaggcctctgaataaggactttaagcctagctccctgctttctcctccccggatggggtgccagctactctagagggggagctgcagaaaggaggggctgaggatggtgacctcaggtctctagtcttcggagcctctcttctgtctccacaaaatgtgccactgggattctcctggattcaaagtaaactgacatggtgtccgtacgaggtgggagagctctgttagctcccaagagacttggagtaagaaagatttaaagtgatctaaagaaaaggctggaactggtggccattagtcactcttcatttggctggaactaccgcatggaccctttgaagatatgtgtggatggagaagatacgagctttatagtcttggctctttggtggcctcgtgtgtgtgtgtgtgtgtgtgtgtgtgtgtgtgtgtgtgtgtgtgtgtgtgtgtgtgtgtgtgagagagagagagagagttgtaaattgatattgttatatagaagggctttctagctctttggcaaggttgtgtttctgtgtgtttatatttgacagatgttgctggaaataaaaacttcatttgacagacttcttttttgttgaacatggaatattttagggattgtgagctactttgtataaacaagaaaagacacaaaagttctgcttcccagcaacccatggctgattcccaggactatattcttaactcaaggcaaagcttccgggcatcagagctgttccgtagcctcctgctgctgcgtgggcgaggaaggtgctgctgtgctggagggggatttcgtgaagtgggcggaggaagtgtctgtgcactctcctgcctggccttcatggtggacctccccaagtcgtcctctaagggagagttcctccatcatcaaatgtttgagaaagcagcaattagcaagataggtctgatggtcat

SEQ ID NO: 18435 - DNA, 1267 bp, Mus musculus
cctcgattcacccggcgctggttacggttcagcttaatgatgtcgtccaaagacatgtccatcttgtcggccatggcgggcgcggatccgggcctgactggcccggccctcgcggtgcagaccagaaagtactcaaattcaatgattcccccgccttgactccgcctctccgaccggtgctggaatcacaagcgcaccaaaatcacacttggaaattggaagtctgtgcgcttgtgaatctggctttcgctctgacccctggtggccgcccagcgcctagagacatctgggacaaattcgaggcacttccggaaaccgagcgggccacgcggcttctccgcgatatttgcatacccacaatgcagtgcacacagatggttgtataatttaaaagggtagcgtgttgttttcgttgttctgttttattccttttattccttaatgtgatagaaccttcaaagatttatctgatataataaagtagtcagtgtctttaggagtaaatagtcaccattagttgtctaggaaatacagtcggccgagaactgtacactaggacagctgggtatactctggtttctcttcagatcgtataaatctttcgccttttactaaagatttccgtggagaggaacaattctgagtcttacactaattttttgaggccttgctttagcaaggctattaataatgtttaaagttagaattaacagtctttattgtgtgctctatgtatttttttgtcttcagtgttaaccaaagttagaattaacagtctttattgtgtgctctatgtattttcttgtcttcagtgttaaccactgtaaggtaaaaatggcttgagcttaggctaaagagacagctcattggttaaaagggctcagtcgcatggcgttgtgtctcataaccgataaagtaaataagcctttaaaagcaaatactaagtttttgtgggaagtctgtagacatgttatttattaagctgttttttatctagctgcgttatgttgtggtctcagtgaacatatgtataaaccattatttttaatattttatttaagtgcaaggtggttatggacttaaggcacgtacaattttctagcaagatggctaacccagctctgtagctgaggaagaactagcgcccccttctgacttccatcagtgccaagcaacgctcagatacgcaggcaaaatattcatacaaataaaggcagatacattctaaaaaataaatgcagccactcgagcagaagggacaggttac

SEQ ID NO: 18436 - DNA, 1224 bp, Mus musculus
aggggttaggacttctgtgaagatgggggaagcagtcaccatcctggtctcagttcctttttgctgccttatggtgttccgggagccattttagatctaatgtggtgtatggctgatcaggactcttaaaggagctgcaggagcctgtggctctccatcccactctttcctttacaaggctgacctccacattccccacattacagatccatgagcatctaatgagatgatcgtgtgtgtgtgtgtgtgtgtgtgtgtgtgtgtgtgtgtttatttcagtttgttaatatggtgaatttcattgactgatttttgtacattgaaccatccttgcatctctgggatgaagcctttttgatcatggtggatgatctttttgatgtgttcttggattctgtttgtattttattgagtatttttgtgtctatgttcatgagggaaattgatttgtaattctctttctttgatggatctttgcatgatttgatatcagtgtgactgtggtctcgaaaaatgaatttggcagttgtagtctcccctcccccagcctgaaacctgcttgctcggggtggagcttcctgctcattcgttctgccatgcccactgctggaacccgaggagccacacacgtgcacctttctactggacccgagattattcggcgggaatcgggtcccctcccccttccttcataactagtgtcgcaacaataaaatttgagccttgatcagagtaactgtcttggctacattcttttctctcgccacctagcccctcttctcttccaggtttccaaaatgcctttccaggctagaacccaggttgtggtctgctggccggacacaacaattggcgaaccaacgtgggactgagaaacggcaaaggatttttggaagagacgctgctggttcggagctccataaaataaaggataagggaaattcataccggagaaggtatgggctaagctgagacagcattaaacccgagcgctggttcacttaggttcagcagtgaggagctgggtatcaggcggtaggccgtagctctccgaagctacatgaggtgtgagaaaagaaagggtttattaaaaggaataggcggattgccccagttaataaaaaatgcatcataagggaggaaaatgtcccaaaaagcagagagaaatatctctctgggccttatagcaggagtactctgttcccttttgtgtcttgtctaatg

SEQ ID NO: 18437 - DNA, 3425 bp, Mus musculus
agagtttctcttgggggcacagctctgaccctagaggaccatggtgccaaactcctgtgggacaacagctaatcctatcctcggtccctacgcttagccctgagtccctgggcaaggatgcacctgtgacataatcccagaattaggattctctctgcagtcttgctcgccagtgttacagctgtgcttcctggtacacacacacacacacacacacacacacggacacacacggacacggacacacacacacagcacctcacagatacacacactcacacacacacacacacacacacacacggacacacacacggacacggacacggacacggacacacacacacacacacggacacggacacacacacggacacacagcacctcacagatacacacacacacatacacacacacacacacacacacacacagaaacatagaagaaggggaagtgcagtcttctactcaggagtctttactgctgtttctgacttgtatggtcatgtgatcataggcaaacagaggtggaacctctctgaccactttaccagggctgtggggaaggtgtaatgtgtctttcttagacaactcccgagaggaagggcaggatagacccctgaggttggagagacccttgtcactgacctcacttgtccctctgaacccactgacctgttcttccccacccttccccatgaaggatacatgttgacttcttaaggactccatgacatgcagaccctgaccaaccttggggtcgaagacattttgtgttttgcgccagctaccacagtcctgctgaattcgggctccgagacctgtggcctcgtctcttatggggaggggccaggaactccttctcatcccctgccttaaatccagttctttgcctcaggggtctctttaccatggccttccagggtcccatcctcttttctcccgcctcgctttctgggctctttatcagggtgagggaccaggattactgccttttgtgggtattagctcctcgccccattctaactaacacagcctttgcagcaaatctgaacgaatctcagtagtcactttgagcaggattccctaaccctctaatggatatttttcagagtaaacttgagcctttaaattagacacctttaaattattttttaccacaaggactagaaatagggaacacccacatctttctttctgggatccatgcggatgactgtcctggtggcttcgatggagaaatgtccctgtgtcacttctttaaataaccctcaaagcccctgcacgggcccttcacgtccctgggtattctgctggtatttgctgtgcaaagcacgccctaagatggggtacctttgatctcaccgtgcggctgcaggattcaaagtggaagcctacctaccagttactaaagggcttgtccattagggcttactttgttctcatgggaatggtctttggagctgacttacgcagggcctcgaggttagcttagggctgtgatagaggtgcctgaataaattccagtgaaattacgatgtccttgggtaatgggaaggtatcttttctttaaaaaaaaaaaaaaagaaagaaagaaagaagaagaaggagaagaagaagaaagaaaattcaggtttcagaggagaaccttttgagtcacgtaaatacctcactatcctggaaagcagggcccggatggtgattggggtcattgcctttgtgggcaagagcgggttttgctgttgctttgaggagtgggtgggtggggtgggccgaaggaaaagatttgggatcttagttgatgccctaggttaggggcacaggagtgtttattttaagaacctgccatgttttttaatcactgtgatatttccattccttttatcctaaaacaaagagaagaagtttccctgactccctgtctaagcactaagggctgtgacttaagaatggtagcgttttggtccttcgtgtcagaactgtggtatcttcgtctgctttggttgttattattttttaagatgtcaggatgaattgtcaaatgtatggctctgtgtgtgcgaggtgtgtgtgtgtgtgtgtgtgtgtgtgtgtgtgtgtgtgtgtgtgtcttttgcttctccagaatgggaagttgtcttcatgctgtgaactgctatgggtgggcagctgacccagtctctctgagcagtttcctcaaccagcgctgtcccaccggtggctccgtggtttctcatgcttgcactgcgggcatgagactagcctgctcagctctctcaccataggggatgctgggctgggctactccagtgcactctgtgtgtgtgctccggctgggtggcatcctggctcatccccactacacaacttggcctttgttttcatgacctcagtgcgggcttaccgctcttccctctacaccaggacgccgtgcctccacaccaggacaccgtgcctccgtccatcacctacctcgccactgtcaccctccccattggtccctttccagtttctccttaaatgtatgtctttgttctctctgttgatctcccacttcctctgatccctgccattacgctctgtgctttcgctcctagctggctggccacagcattcccgttgtgaatcctgatttaataaagacaaggaggcaggattctcttagtccctgtttgtctgggtccctgctctccctgttggttgggcctagctctgccttgtcccttcctggtgtctgtctgtcggtcttttttctttcctctcttctccccgtggggcagcatctgctgatggattctgttctgattgtgtgattgttgtaatttgtccttctgtgcgcaaaaggaagggcttcttgaatctcttccaagtgagattgtaaatgtagaactttccattgttggatctagattttttaaaatcctttttcttctctctctttcttttcttcttttttattttcaaaatttttaaaacaaatttttggggctattttttttttgtttgttccagagctgagaccttgtgcatgcatgtagaaaattgtaaaatgtaaattttttttaatatataaaaagcttgtttttacatttgcagtggattaaacattatggcaattttagggacttttttttcttaaacataggaactaaaactgtacaaaaattttttttatatataaaataaagacatttgactttagtgggggttttctgttgcttttctttttttcaaagtgggagctaaaggtggtcagggaggagtccgggcggtagggggcagtgtgggccttgtcatgccactgcctccagccagtgtggagaatgaagggaaatgagaaactgcttgctgttaactggattctgaggtgagagagctgtgatggttaatcatctgggggtggggctcagggtgagtgtcagcct

SEQ ID NO: 18438 - DNA, 1574 bp, Mus musculus
gtagcagaaccagtgcagtgtgtgccggctctgcctgtgcttcccactagaagtctcctctacaccaatagcttgagagcatacttaggagagctctgttggacctaagaaggtcttctagtctctcactcctgcccagcctctactgtctggcacagctgggatgagtcagtcaaatagttattgagcccctgttataagtaagtcacaaacataagtaataagcacaactcaatgccagacaaccaaagccatgggtcctacaaagagcagagagagcccggtctgctaactgggaaggcgctgcctgtggttggtgcttgttccactttagtgccagaatcgtgatggcgtttcttcccgagttacctaaggctgtggccttctgagaacgcttttcttccctgcccacaccctcacccttacagttcatcacgctgatcgtgggcttcagcacccttgtcttctccctcatcgtcacctactgcatcaatgccaaagccgacgtccttttcgttgctccccgagagccaggagctgtgtcttactgaagaggactctagctctccctgcctgctctgaactttacttcccagaccaggtgtccggctgggaacaaaccactaatttgtcactggactgtctctgggcctgcttagacggggattgacacacagaatggaactgtgagtggagagatgaataagttgcccccccagccccccttcccatttgtttctccttctctaatcccagggactatggtagagacttgctgctcctaactccccagttacccaccctcctctgccctttctcgggataccttctgtccttccatcctgccctgtactgccctctgactccactgtcacccgacacccctcccccatattcagccacctgctgcaccaggaagagggtgtgaaagattgtgcatctgcattcaactaccctgaacccttagggaagaaatggattccctggctgagccagtgtctctttcccactgtcctttctccaggtgtgcagatggcatgttagtgtgggcacgctgttaagtgggtatcccacctccagcccacagtgctcagttgtactttttattattaaactataattatctatttttgttggggttttttcctttttttttttttttgtaagtatataaatagcaagtttcattaaaattatgcaatacaatttgtacttgttgtttggtattcttcccaggccaccgtgtccagtgaccctggaccagaatgcagtgtgtgctgctttgctgttcagaaggaacatagcgttaaagtgcaggggaagtgaagaagggctctgacagccccggagcccgcttaggagaacagcgttagcgttagcgttagcgtcgttcctgagtattccttcactctgagcaggtacagagatgaagctcacacggcccttcagccttggattgcttggggctggagtgagagacaaggggagatttacgagtagatgtaacatttaggttaatagacgaaagctttgtgatgtctccgtctgggactcagggcacttgaggtgaccga

SEQ ID NO: 18439 - DNA, 1215 bp, Mus musculus
ctccctggaaagccagagagggcctccacagctagcggtctcagtggggtccatctcctctccagtgctatcaagatcacaacctgggtcagaatggctctgcaccaagcttcccattgtgtgctatgcagctcttctcacacatgcacgccgtcatcagcactgccacctgcatgcggcgcagcttcatccagagcaccttcagcatcaacccaggtaggtggctccaagccgtgcaggtggacccaggcagcaggcactgggtgggagagttgtgaagagagccggagctagaccagttgaaggtggagaaatggcccttggggtatatgaggactagtctgaggtatcttgaaggccttctccataactactctctcccttagccctattgatctctgtttgtgtcccactcagaaatcgtctgtgaccccttatccgactacaacgtatggagcatgcttaagcctataaatacatctgtgggactagaacctgacgtcagggttgtggttgcggccacacgggtgagttctgtccctctgcagcatactttaggtatctgatttcaggaagctgggaaaggagtgggagctgggctgttggactcctcagcccaacacacgtgcattctcttgaagcaggagaaggggcttgggcttggctctgatggtccagttttaaagtgtaccaccctttcctatcttctgctgttccagctggatagccggtcctttttctggaatgtggccccaggggctgaaagtgctgtagcctcctttgtcactcagctggctgcagctgaagctttgcacaaggcacctgatgtgaccactctatcccgaaatgtgatgtttgtcttcttccagggggtaagggctttctgcctagggcatgatgacaaagaagaaggggatggtaatggtgggagaggaattattgatctgagctgttaatcagagtttctgcatgggtctctctgtttcgctttgaaacaccccccgcccccctatttttaggaagctcctatttcctgaaattacgtctcctttcttccctatgttgataagatttatttgaggcttcttttcatgtttattgtcccagtccctgtggtgtgacagcctggctgtagtataagttaatagcagccagaactgtggagagtagaagagtctagaagcaagtctgtgacagctggtgtttgctttgagc

SEQ ID NO: 18440 - DNA, 1177 bp, Mus musculus
tctctgaagccaaagagagcacacagctcttcttgaaattgaaggtgtttatgcctgagatgaaactgaattctacttgggcaagaggtgtgcgtatgtgtataaagcaaaaacagtacagagactcctggaggcgaaccaaacacgaccagagtgacccagggaaagtaactccggccagagaaacagaggcatgatttgtgccgaattctgaagcaccttcctgcgaaggccattggacagagaatttgtccaatgggtgatgctgtacccatcccaggtttaaactaaagaaaattaaatatatgaagtggatttgtgcttttgtttaaaagagaaagaaccgtagtaggaactggtgaggtggctcagagtaaagcagtgctgccaagcctgaacaccttagttccatccccaggacccacatggtagatggagagaactgactgcagcttgtctcctgacctgcacatgggcacccaatcacgtacacacaaataaatcattttttaaaacacctttgacaaagacgttagaggatagctttccttactggtctttgcctgtctccttccctaggtccagtgcgtggcattgacttccataagcagcagccactgttcgtctctggaggcgatgattataagattaaggtacaggggatctgtcatggctgggagtaataactacgagaatgtggtggtcaggtttgagaattatggaaagaagtgagagacagaattcatgtgtacaaactttgacttctaacattatccagagcacttccccagcaagtgcttactgaacacttattgtatgccagaagcttactgtgtggggattgaaagatagatacaaagtgacttctgctctcaaagagactttaacacagggataaatgtacactcacataatatgtgtagtttggtgaatgatataataataaatactcaaagaacagtccaggtacagagatggacgtggcatagctggatgtgtttgagaatctccagttggtattggatgagttgggaaggtctagagagatagatacccataagaatattatcttataaatgcgttggcaagtgagcagagcctgaacttgggcaacaccatctgagtagagaggaaagcttaagggtacttgtgatgactgctggagggatagggagaa

SEQ ID NO: 18441 - DNA, 1176 bp, Mus musculus
atacacagtgcagaacaagacagaaccttggcaattatttttgtcttttgtttggggttcgttttgagatttaacaatacaatcaaacatatttactgacattcacagttaccagtttctaaatggacacatatttctgaggacacagttctgagcaagttttgaaagcacgcaccttgcctgtagaggagatcaattgcacttgagacttgctaggttctaacctgttccctctgcccttgccatggtagggaagggaggagcattggctgctgacattgacatcgacactgtaggcactgaaggctggggagaggacgcagagctgcagctggatgaaggtaagaacgctgccttaggactgactgctgagctgttgggctccatgagcagaaaggatttgtggagcagtctacaagcttctggttcatggagccaataggatcctgatactttgcctttggggcgggattcccatgcaagtctattttgatcatgaattatccttacagatgggtttgtggaggctccagaaggtttgggagaggatgttcttggaaagggacaagaagaaggaggtggctgggatgtagaagaagatttggagctcccacctgagctggtatgtgaggttcctgctctgcagtttctctcgatttcaccctataaaaagttggtgcgtgtctctctctgtctctctctccacacatacacacactcacacacacacacacacaccacacacaccttgtagtgtgcccatcctgaagtctgaagtatccacaaaggagaggttccagaaagtcctcctattctgatacatagctccacttgagatggggtagccagcgtttgttgccttgttgtttcagttcatgtgtagcaaaggagaaggagatgtgcagcctccctctaatccaatgcttatctttcatttgaaagagggaagtgtttaatgtctgaactgcagcttatgataggtcattttggtcttggtgaggtggctcccattctgtctttccattaaccatcacctcttttctcaagcaaaggttagcatctaaatgtagtgtgttgatttcaccagaacacagtacttggatggctaaaatcgcctgggaacgtagctcaattggtattacgctttccgagcatgcacaaagcccttgattggat

SEQ ID NO: 18442 - DNA, 1539 bp, Mus musculus
agaagtgtccactcagtggggcctgctattcccctgagttcaaggggcaaatctgcagggtcactacagtaagtactgtcctcaagaatgtgtctagcagggttgggatccaataaaaaaaggacgtgtgtgggatgttgagggaagggacaggagaaggaagcgcggtgctggttctctcactctgcatttgccccgctccctgaggcagggacactgggaaagccagcactttccccactgttcgcttcccagcaccaagcgtccatctgactgctcatcggcggtctagggagtaagccgtctggagttctctaacctgatgctgtttccacttccacaggtgacagagattggcaaagatgtgattgggctgaggatcagtcctcttcagtttcgctaaggcccttccttcgcgtgcatggttaaccccatactgttcttcagagtctccccttacagccacattcagcttgttgatgttggttctccctaaaacgtcatgtcctctctctgctattgcaaatcagaagtttcaagcttgactttctggttcttgcagacctctgccttgacggttactgtgcttgtgatcatagatgactttgcctttcagcttaggccttccaaggaacaatgaaaactatgtgctggccatttgtttatcagattcttagtatatactcctcccttcccaccaccttcctgtcaattccagtacgagacagaaggattcaataaacgccactttccccagccacgcgagttgttaactatcccatctttttcttgggcatttaatgtcataaataggttcctcctttatgtggcccccacacttcaggctgagaagaagccatttggttttgcaaaatgtgtaccatttttcattgatttgtttctatcctttataacataccatcgtcgttatgttctgttgccctcactaaataaagtaaatttctgagagcctcctgcttgccgtttccctgtttgacactcactttcatgaccctgtcacactgtagctgtctctctcaccagagcagatactctgcctcaggatcactttttaatcattagatgcattatattcattttaaactaataccctcgactagggaaaaatgatacagtttttcttagagacatatgaaacacctacattgttggggactggtgtaaagagttccctgtaccatgtttactgcaactctattcatttcaaattacagccagaatttgctgggctcctattggtgtccatcactgttctatgtgttttacatattatgtgcacataaaagagaatgtggccataataaattacatatttactagaagcatatagttgtcttagcttctgctcccattggggtgataaaacacccagacaagagcacgttaggggagacagggttcatttgactcaatgccatgtggcagtacgtcattgcagggaagggaaggtggctgaacctgaagcagctagtcacatgatacccatggtcaagagtgggcagcactgacttcaagcct

SEQ ID NO: 18443 - DNA, 1576 bp, Mus musculus
ggacttttccttttttttttttttaatctcttattctttccgttttctagttacaggccttgggccatcctccaaaagagctggctggggagatggtgagtttgtcttctgtattttaacccagttttcagtttgcagacgccagtaatccttaggtaatccatatagggtgatcactgtggctgctagggacagaccttcagaagctctgacttgaaatatgagtgattgtctcagtccctttgtctcttctccagcctcctggcctcaactttgacctggatgctctcaatctgtcgggccccccaggtgctaatggcgaacagtgtctgatcatgtgaaacacagcacagtttcctccctgagccccagccgtggggaacatctggagtcaacagagtcactgggaactgaggcaggagtatcatctgtgggagctggctgccccacccacactctccatcccattcaagactgtgccataccagctgatctgtaggccttttctatgagtcctactccatcagggtttctgctgttagaaacaggccaattatctgccaggtgaaggaaggcatcccttgtggggcatttcacttcttcccactccccaaataatgttacacatggcagtactcatgttccccttgattcccagggacgtcgcgccttgtttctcctccctctctgtgtctggggaggaggagctgagtcctgactctgtgctcctgttaggcagggcctctgggaagaggagaaatgtagcctgagctggggctggaggctggtcaccgcatatccttgccttcctttggaattctcttaagggaaaggaattttgcacttagccatggtcgggttggaagcaaagccttgggcttttcctgtccctaggtgctgagccccaatccccctttcctcctgagaactcatgttgctgccctggttctttctacagctctgggatttagggggagccaactcttggccttcctttgctccctgactgtccttacgtcctctctgtttagagtcttatttattctgcccttttaaccagtgctgtgatggatgaaggccaatcttgtttcctttcatctagtacctggaccattctccctagacccttgccttcctccctggccaacacatacttgcagtgtcagatctggtacatgaatggccattctacccagataggttttagcttatatataggacatcagattccctggaatccttggttcaggaaggtgcttgggaaaggggtgtagccagaatattttttccctgcaagccctatggggtagtatctaataaatattctgagcaagtgtgtgggttatttttcatccaggtctatttctaatcttccctagtttctataaactgcagagtgagatgtgttaggagatggatagttctgtatagtgttgttaggctctaccatggcccagccctccagctcagcaaaagaatactgtcttcgtctccttggcacttatttcagtcttaacgttttacgatatagctgatgttagtgattgatatattatcaacatgttttctaaattat

SEQ ID NO: 18444 - DNA, 1201 bp, Mus musculus
ttcccccagtctccttttttttccaggctgaccttgaacttgctgaagatgactttgaactcttacatcctcctgcctcttgtcagccaagtacttgggttataggcatggatcagcatgcctggctagaaatcactctttataagcatttggaaagtaaacacattttctagaatttgtttcttggtcttaagtgtagcttttttagaccacaaggtgaaaagtctttctgaccactgtcctaattattttccttcttttttctgcatctgtcctaatgttcaggaagtctgtccagcagcccagaggagatgtctggagctgaagaggggagggaaacatcctcagggattgaagtagaggcatcagacctgagtctcagcttgactggggatgacggtggccccaaccgcaccagcacggaaagtcgtggcacagacacagagagctcaggggaagaaaaggactctgacagcatggaggacacgggccattattccatcaatgatgaaagccgaggtcatggccactcagacgaagaggacgaggaacaacctcggcaccgtggacagcgcaaacgggccagccgtgaccaggattcatcagatgatgagcgagccctggaagactgggtatcttcagagacaacagccttaccccgacctcgctggcaagcccttcctgcgcttcgggagcgggaactgggttccagtgcccgctttgtgtacgaggcttgtggagctagagtctttgtacagcgtttccgtttgcagcacgggcttgagggccatactggttgtgtcaataccttgcactttaaccagcgtggtacctggctggccagtggcagtgatgacctgaaggtggtggtgtgggattgggtgcggcggcagccagtactggactttgagagtggccacaaaagtaatgtcttccaggtaaggcatagagacataatataatagcaactgagaaagtcaaacatgaggtaaaaaattgagttgctgtctagacagaagatagtagcaagttgtgattggaatgaggtatcggggtttgctccagctttgactccatagtaacatactgagagacagaccatggcagccttttgtttccttgcacagaaggactttattaagctgaatctggacgagatgcttggcactcatgcaggtgtgtcagtataagacagtaggag

SEQ ID NO: 18445 - DNA, 1187 bp, Mus musculus
cccttccccattccctgcatggaagaaagcatgcaggatgtctttatgactctggctcaattacttaccagcctatgctcttcaaacagcactagaacgtctcttcatgttttctcccagtcctcagaatagcatagtgcattttcttgttttgtagttcagaatagaacaaaaacaaaaacacctctttttgggagtggggggggcggtaaagattagaatttgatttcctactgtctctgttgatttttttgttttccacttttcatgaccatcttggatctttgaaggtttttttttgttttgttttgttttgttttttttggtggtagtggtgtttgttttgtttttgtttttgagacatttctctgtagctcaggctggccttgaagtcactatagcccatgctggccctgatttcaggtagtgaatctcttaagtgttgtgattccacatctgagctgccatgctgagctccatctgggtcttttggaggatataataactatatgctttttctacttttgaaaggaaactagtggtgacaaaagagaaggagaagaaagtggggctgtatacaatctatgtgaaccctgccaatacccaccagtttgcagtgggtggaagagatcagtatgtaaggtgagttcaacagtcttttgtatgtttgagaggttgagacttaggatacattgtatattgcccgatgctccccagtgctaagttagaaaactgtaggaattcgttaactaccatgttgaactttttacccttttgggaatgcttaagcaccttctgagacagtctgttccctattacaacgatttgaggagttttatggtatacagattatcattttcaaaaattaatcttattaatttatgtgcatgaatgttttgtttgcgtatgtgtaactgggtgccatgttcatgagtggtgtttgaggaagccagaaaagagcattgaggctattgtctgttatctttcttttttttgttttttgttttttggtttttggtttttttcaagacagggtttctctgtgtagtcctggctgtcctggaactcactctgtagaccaggctggcctcgaactcagaaatctgcctgccactgtcttgcaagtgctgggattaaaaacatgcaccaccactgcctggttattatcatcgagtcctgggattatc

SEQ ID NO: 18446 - DNA, 2351 bp, Mus musculus
cacatggcttaaaacacttgctgtctggctttttaagaaagcgctgagccaggtacagtagtaaccataaccctagctaccgggaggctgagggacggagagtcaacagcccaccctaggttatttaatctagaagaaaaaataagttctgccgattcctgacccaatctacatctaacagtcttgtccttgatccaaggacattactaacaaggatttcccatcctacagcgctggcgagaacctggggttggggccacagatgcagactctgatgagtctcccagctcctcagacacatccgacgaggaggagggccctgaccgggtgcagtgcatgccatcctgaggccccacacctaggagggatgggctggggctgccaacccgatcctgcctgggcaactctttttcagtcccaggcccttacattcaacagaaatgcactttggactttttgtttaaataaaagaaagatacctgaggaggacagagcacaggagacggaaccagcagagagcccctagaagtgagagatgagaaggagcctgaatgagcttccatggaaggtgcaaaggactcagagaaatgggcctctccctgaagccttttgtcaatgggcttggataggaagtggggcttctttttctttaacctcccttgtttcttttgggggtggggggtaccaataggccagagagaaggctgggcatgccactctctttggtttagggtttcaccttttttttttcctttgttttttaagaagtctgacagttgctttgttttttgcccgagcaaccacgtcccatcccaggatcctgtttttctgggaaatccttaagagcccccagccaccccagcactctgctctcccttccacaacacttactctctgaccttaccacagtgctctgcactgctgcccgttgtctccttcactcactcgtcatccagcgccctctaaatgggggctgggatggggactgaggagacgtgggagggacaagagacggaaaaacaggaagaagttacctcttggttttggttttaactgttcagtggtggcaatttccctgtccctatcactgttagaggcctacttttatatctataaatatattaaaaagcaagttaaacttggatgtatcaagttaaaattattgtcagaagtttaaatacctatatattctctatgaatccaatgcaataaaggggctgcaaggaagagcaagcgatcgagtgatgctgaagaggtgacgtgggtcagatgattcatggctgctctcagagcctagggcttacctgtagctttcccaaggctcaagggtggaaacatagtcagctgtgcccttctctgcctcagtactgagctttagaaaaacaaattcctctcaactttgcctcaggtctcctaatttctgtaagtctgtgggggctcccaagattgctcctctcattagaggctggcctgtctctaaaacatgactgaagtgtgacttcaggaagggcgtcactgctgcagactgtctcctggttctgagtataacggaaagcacactcgccccctccctttagttagctgcttgattctttaagcatccaactccacaccagctcccttcctaatggaaggatgaagggagagcttcctgggaatcaagggacaagccagtaattggaggatttattctggtgcctggggcttagagccctgtcttcagcactggccactgagtatgaaagtccctgtggaattcttaccctaaatgcttgtgctgctcttcctgtgccccggtgttcacaaggtccagtcaggaggcctacaccatgggatggaagttggagagagagcggagggtggtatcctacacactctttcctcttgaccccatccagcagcgcaggccagatgccagctcctgggcttccttcgtggcagggagtgtgtggtaactgagtagtagtcttatgtcctcactgctagagggatgatgaggtgggcttaaaaccatgcactctggaatttgttgtatttttttctcagtaaagcttttcccctgactgctgctttgtgtggtatgtggtccatttattgtgatagaggacatagtgtacagtgtattccttccagatacatgcttgattttgctcatacttaaaaagtgaagtctgggatatccctgtttctagtgcttgagccatagaagaatgttgtaagggaaataggtctgttaatgtcagtggtgcttaagagatggggcactttctttggggttgttttctagtcccttgttctatactgcagtgagtggtgatagggaaaacatggctacacaccccctcccagtc

SEQ ID NO: 18447 - DNA, 1217 bp, Mus musculus
caagagcctggggccagaaaaggaagccaggcggagagattaggtctgtctcccagccaaggccagtcaggaaccagaggggagctgggctggcaaggaaaggttggggtgtgctggctgaaggagagaaaggagagaaaggaaagaaggaaagaaggaaggagagaaagaaagaaaggaaggaagaaagaaagaaagaaagaaagaaagaaagaaagaaagaaagaaagaaagaaagaaagaaagaaagaaagaaagaaagaaagaaaggaaagaaagaccacaggtttgtcatcttcagcctccaggtaggtggggtaggctctggctctgtgtcctgcctttagagactagcacaccagcaaaccaaattcccatctcgtcagagtagcagtaagggcaagcccaggggggtagtgtgccacccagtgacccattgatccttgggtaatggtcctctctgtccataaggctcaggagtcacagaaggtccagctatctcaaccccacactcttgggaacacctccccgcctttttagaacagtaagttctctgtggcctcacactgttctgagagccccattagctgccacttctccctgtgctctctcattcccttctgcttcctgcacatctgctgaacccacgtcatttccggtactgcctagttagtcctggaaaaggctctcttggccattggcaggaatcagtgtagaaaagtttccaggacatccctggctttccagagcatgcagaatcagcgtagctcatgacactgtcagacactttagacatgagagaaattcttaagagacctatgcctttggcctctcagatggcacggccgctgtacacagggaagtgttcactttccttgagacgggaagctggcttcaggttcctatggaatagagttttctttccttattcccttttcacctaacagttttgctcttcggacagctgcccattccctaagcctcgcctagaaaccatagcatagatgtacctagatgaatgagccaagcaactgagaaacagcaaggaaactggaaggcttgaggtgggaatatgaaggtcaagacaagaattagggagctgaaaagatggctcatcagttgactgctcttccagaggtcctgagttcaattcccagcaaccacatgatagctcgcaaccatctataataggatccaaacactcttctggtgtgtct

SEQ ID NO: 18448 - DNA, 7573 bp, Mus musculus
tccaggaccggactctgctggtgaggtacaccgacatagactaccacgtgttcacggacgccgcgcgcttcgtcacggaagggcgctccccgtacctgcgggcgacctaccgctacaccccgctcctgagctggctcctcacccccaacgtctacctcagcgaactcttcggcaagtttctcttcatcagctgcgatctcctcaccgccttcctcctgtaccgcctgctgctgctcaaggggctggggcgccgccaagcctgtggctactgcgtcttctggcttctcaaccctttgcccatggcggtgtccagccggggcaacgcggactccatcgtcgcctccctggttctctcgaccctgtacttcatagagaaacggctcatcgcgtgcgccgcggtgttctatggcttcgcggtgcacatgaagatgtacccggtgacctacatcctccccatagcgctccatctgcggcccgagcgcgacgatgacgagcgtctccggcaagcccggttctctttccaggctcgtttgtacgacttcctgaggaggctgtgtagctgggcagtgctgcttttcgtagcagttgcagggctcacgtttgttgccctgagcttcggtttttactataagtacggttgggagtttttggagcacacctacttttatcacctaactaggagggatatccgccataatttctctccgtacttctatatgctgtatttgactgccgagagcaagtggagttttactctggggattgcggcgttcctgccacagttcatcttgctgtcagccgcatctttcgcctactacagagaccttgtcttctgctgtttccttcatacgtccatttttgtgacttttaacaaagtctgcacctctcagtactttctttggtatctctgccttctgcctctggtgatgccactggtgaggatgccttggaaaagagccgtagtcctcttactgttctggttcataggacaggccttatggctggctcctgcatatgttctagagtttcaaggaaagaacaccttcctgtttatttggttagccggtttgttcttccttctgatcaactgttccatactgattcagattatttcccattacaaggaggaccgcctaacggagagaatcaaatacgactaatgtgttctggatcttctgcaacattctgattttgccgtatggactaggaggctttggaatttttctcctccctgaacattctaagcactctagtgaaagttcctttgttccaatagaaattaaaaccagtgttggccttatatataaagggggcccaagaactgaggtccatggtccatcctttagaagtcttagggctcatttgcttgatgagaagaaagccattcctgtttcacagttgagaagccggtgaagctagaagatgctgaaatatttttgaacagtagaggaataaggtctctagcagcgtttgttcctgtcacatggtgctactgttgtaccttcagcccctgcctttttttttttttcctgcagttctgacagcggtggaagttgacaaaatccctaaagcacaacatttttacgtattaagtattaacagttccatgctcggttgggaaagtctgaaatttttgtagtaagtgtgggggcttagaagagaactaatccaaagaatctaaattgtgatcatgtatttgttttgtaattgagtttttcagtattagtaccagtggtattcattttatataaaaagattaaatttaaactcatccactgtagacctgagtttaagaaaacgaaatggagcattattaacatgtatatgcttatcctttttctaactgctaggaagacttttcctctagagtttcctctgagagcggtgtgttgtaaaagtggtaaaatttagatgctaaagcctaagttttgagtataacttcacttgctctcttctggttttatcatctaaattgttacaaaggagaacattgtttataaggcataaatcctacactctgaaaattccaggatagaaaggaagactgcttgctgtaaagcatgagtgctgcgtgctgtcattggacaatcaagaggtggtaagggatttgaggaattacagaaatgaggctgtgaggagcaggtctttctacttatcacttgaagtaaacacagtgaaactgtatgaataaactttctcaactgtatgaataaacattctaaaatatttttagaaaacatagagcctgtctgtgttgagggttttctaacattcaaagatgcagtagcaatagatgagtataattttttttttaaagaataaaattatcatctttaaatgcaagttcaagagaagataggatttttgtttgtttgtttgttttttttttggtttggtaggggttggtttttcctttgtctggttttttttgtttttttgttttttttttttgacccagggtttctctgtgcagccctggctttcctggaactcactctgtaggcaaggttgactcaaagatctgcctgcctctgtctcctgagtgctgggactaaaggagtgtgtaaccacactcagcaagaagaaagttttaacaggctttaatttatttttacttttaataagaatgttgattttgaatgtttatcagctagttctgattgttttatttttctttgagatagcactccattctacagcacaggctggcctcaagctcactgcactcttcttgcctctgaagtgctaggtctacatgtctgagccactataactggctttctgattgttacttctaaagcaagattttagggctaagagaacaactgctgaaagttgtcctctgacttccacgagcatgcagtgacgtgtgcttgtgcacgtacatgggtgcacacacacaaactaatgagtgtattctctcaagaaagctatttaaaacatgaaaaggtctagatgttttcagatataaaataagttgtctcaatgctgatgtctaacgacttttagcaaatgtggtagtaaacaatcacataaatatgtttttggctttaggaaaaggactttgttttttggagccaaagtctcactgtggtagcctcggatgcctcagactcagtgtgcaatcccgaccaacctccaactcatcctcctgctctagcctcttgggtcctgggattaaaaatgtgccaggccagtttttactttgactgccatatgcatatccttaccatgtttttctctttctttgtaaagttccagcttccatgcatgtacctgggtgacatgagaattctaaaaaaaaacaagctagaaaatagttctgtctccagcctgcataagcgtagatggcgataatacagactctctcagtaggtcctctagccgcttctgttattccacctttgacttcgattcctcttccagctgcttacccagcctttcactctgctccgccttctgctggacggcatccaactcagccagggcgagctttagcttttccttaaagacattcttttcggaagtcatttcctcttagagcagagcatcagagtgtcctttcctaaggcgctcctgaaaagattcaatgacccttcgggttgtgctccatctccaggtgcttatgatggtaaaacttgagaagcaaactctccatgaatataatttttgtgatcatgatgtttttgtttttaaattggattcttttccagggtcagcaacaacaaaaaactcctgaaaaataagcactactccagaaaagtagtattctttccccctgtcacggcaagcctagaaagcctttgaggataaaatctttataggctggtcataattaaaaattctcttaggggcagcatttctttgctggattccttttgggattggccttaggaagaagaataggtggcttttctgttgcttactgtatgtgagaaaagtggtcaattgtagaaaacagtgacctttcctaaaatggcaagatccatatttctatttagctcctaacagcacactgcttaagacagtttaagaagtggctttccaattatggtacatgaaccttttaaaattattatggtgattgaaacccctattctaggcaagcagtctgccactgagtaatgtacccagccccaagtgaatatttgaaattgaaaatttgagcaaggaaagtatatattcatgtgtttttataggcctgacttttgttgttcttttagacagtcttagtccaggctggccttaaactttgtttgcccaagataaacttgaactgatcttcatgcctctacctcctaaagagctgagattacagtcctgtgacactgtgcttggctcagaaattctttatcaaagaaatgcaagtgtttcttaagggatgcagaagatatttgcagttagtctgctgcaaacctttatttttttaatttgctttatatgtataggtgttttgcatatatgtctgtgcaccatgtgcattcctagtgcccaaggtggccagaagagggcattggatttctagaatagatggttctgagccaccatgtgggtgggtactaggaatccaacctgaaaatctccgggaagagcagctagcactcttcaccactgagccaactcttcagccccatgctgcagagacatttagtaagttaagcggagaaaagacctgatttgatcttttggcttttacttctgttttgcagcttttaaagttttatttggggaagaggcacacataccttgtcctgtgtatgcaggtcagatgcacttgtggacggcagaggacttgtggtagtccatttccctctttccattatgctggccctaggatcaaacttgggttgtcagtcttggcagctgtacctttttacactgcactgtctggtcgctttgtcttttttccgtttatgatatcttttgtttccttataagtccttaaataataccttaaaattgtgtcgctctttgacgtattttctgtgtaattctcttgttcttatactacctgcattatctttatgtcactgtagcaaatgcctatcataagtcaactctcaggagccataatgggacaagctaataactagcaggtgatcatcctgaagtggcctgcctcggattattatataatctgcgacaggtgcgcccttattaagaaaggctgtaagggactcattttaggaaagatgcctgctattaatgtgcttttcctgttactattaaacatatataacaatcactaagtagtagcacacccctgtggagcagatctctgcagatccacaaagagcttgtcgtgttgctatatagacaaatagatgacttaagtcttcatgatgatcctataagaattcctaaaattatatctgtgtttattaagctcttttataacaggactgctattaggtccttttttgatagtcaaagctgcaatgagaactctgcccaagtgtccccagttaattgctcttagatagtaaccagactttatcctattcagagtacactccaagaagttgtaaaacaattaaccaaaggtcataaaaagggaactaatgatttattataggtgttaggacagaagataaaatatctattgggcttatctatacaaaacttcactgataacttagttatggttttaaaccttcagggaccctgtagagctgagacaagtgatggatgtttagccagataattactcctaactgttaggagcgtgcatgtaaacattcactgttgtaaacttctatttcagtttatgatttgattttatgtgtgaacttgtgatgaacttgtaacatgtgatcatgtattctggaagatatataagtactgaggacagagagatgaggggagagaaaggagaattttttccctttccccacttagagaactttttccctttccccactcaggatctttttgcttagatagctttcataggaaacttttttacaacttagtaataaactctataaccacttttctaagtgtccttttttctccctgcaacttccaactagcaggctgaaagttagagcccagcagcaattcctgctgcgatagaacaaaggctattaacttaatcctttgtggtttgaggaagaggtgctaagtgccagaaactgcagtctctgcctcagaggatcacagaaggcaggtcagctacaatagcatagtaacttagaattagacaagtaactttttagtatatagcaaccctaaatataagaaccaagaaccctccgcctacgcgctccccctctgctgtctcaagaagaaccaagaagaaagaacaaaacccccaccagagctgccccccccaacagtcaatttatagagagaaaagatttatttggggccatggattaaaagtttaactttgagattggttggccttgtggccacaggcctgtagtgaggtagcacactgtagcatgaggacacgataaaacaaactgttgacgttattgtgggtgcagaagacagagtctgagacatgggtctctgagatccttttgagggcacacccctaatgccctaaaacctcacactgggctggcctaaagtttccacagtttccagtagtgccgcagtcaaggaaacaagcttttaacacctgggccttggggagagttcagatccatactatagcattaactgtgtaggacagactgactgacaggcaagcagtcatgattagattaagaagaatgtttctccacacaggttgtgatttttttttttttctgtaactgcttttctgatgtccccaaaatgtcattaaaggtctcaagttccctggattgggatcattatcgtctgttttgttttttagttgtaggagatagggtcttatatagctcaggctggtctcaaacttgttatgtaacagaggctggccttgaactcagcctcttgagtctacctcccaagtactagaattaacaggtgtgctggaccatgcctagtgtggattaggttctttggaaaagctgtgagaaatatgtacactactgggcaactcagcaaaaggattcttaaaactgtagatctcagtcactgacatctcgccatctggattttataagctgtataatgatgtttcataagttgtataaaacttgaactttaatttatggctgaatatattgttctttttttctcttaacatccgttattttatattcctacctacactctcttgccatctgtgatgtaagttatcagtagaaaagaaaaacctgaaaaattctacctgtggtggtctttatatccaatctcttgtcatttccctcatgctttattatttgtgtgtgtgtgtgtgtatgtgtgtgagtgcgcacacctttgagctggccagattggctaggttgactggccagcgagccctaaggatctgcctgtctttgcactgggattctaagtatctccatacctggcttttgttttttctttaaacattagccatataaccattacttttctcagtctaaacagaattggcagctaagtaacctttccccttcaccagagttgaacacataacttttgtggacaattc

SEQ ID NO: 18449 - DNA, 1101 bp, Mus musculus
tctacacctaaagagcttaggttagatcttgagcaagatctccacatctagatatattgttttccatctgtaaaatgggggcaaacatataatcagaaaattgcttggtaaggaattagagaggcaggcagatttctgagttcaaggccagtctggtctacagagttccaggatacacagagaaaccctgtctcaaaaaaaagagaagaggaggaggatgaggaagaagaagaagaagaaaagaaagagaagaaaagaagaagaagaagaaattaagccaggcatagtggcacatgcctttagtctcagcacttaggaggcataggtggcagatatctgagttcaaggccattctccaggacggacagctacataatgagaccctatcttgaaaaaagagttaatatgcttaacattcttgtgttggtactaaatattgaaggcaaaacaaacaaacaaacaaaaacagtcaaatctcgtcagtaaatgggctaatgacttgaacagcagttctcgaaaggagaagcaaacggacaataaaccctgaaagggaaatgcatcttaaaagtgaggcttgtcctcacccgggacagaatggcttaagtcaaaaaaatgaacgcaggtgaggaggcagactgctgggacagtaaactggggcagctactgtgggcatcaggatgcgggtgtctcaaacagaaatgcagctaccagaggaaccgactatcccactcccaggtccaacatctaattctacagagatatggttttatttctgtttattgctgcacaatttacagtgatctaaaaggcagaaccagtgaataaagaaaaggtgaagtctacataccagagttttattcagccatgaaagttatggcattatcaaagcaaaggattcgattggaattatatgtatatattatgtatatgtgtgtgtgagttgggattatatattatggatgtgtgtgtgcggacacaggagcacacatgcacacacacacactagatggtggaataagaggagggaattattctagagttccaaaggaaatccagacaggatttctctgtgtagccctggccatcctggaactagctctg

SEQ ID NO: 18450 - DNA, 1714 bp, Mus musculus
tttcttccaggaaagaacatggcttgtgtgcagcggacactaatgaacctgggtgggctggcagtagccagggacgatgggctcttctctggggatcccaactggtttcctaagtaagtgtctgtgggaaagccagagggccttgctggtacagtattcttgcctattcctatctgtagataatagagtcagtcattacaaagcatctttaaaattccagaaggtggtggtggtggtggtggtggcagcaatggctgtccttttggagagacaaagaggtgctttggagtctcagaagcagagtgggtgtcagcttatacacctcagggaagaatttaactggatagctagcccctgaccaccccctaactagtactccctttctacccaggaaatccaaggagaaccctcggaacttctcggacaaccagttgcaagagggcaagaacgtgattgggttgcagatgggcaccaaccgtggagcatctcaggccggcatgaccggctatgggatgccacggcagatcctctgatcatactctctctccttcccctgccctccatgaatggttaatatatatgtatatatatgttttagcagacattccctgagagcccctggattgctgaactcccctctgccagggtccaggccagcctatcttgtcaccactggcagggcctgataattgcctctctctctctctctctttctctctctctctctctctctctctctctctctctctctctgggcttactaatgcattccttcccccacaaccatcaaaactggaccaacaaaaaccctgggaccaaagttgcctccccacagcatctttcctgctttcctgatctcttcttttagtccatcccttggctaggagtcagagattctgccccatggcctgatgctgcaccgacccttccttctacaaggaggcctctcctacagctgtggctgcagggacttaatttatagggaggggcctgtggctgtcactccagccacagctgggctgtacttaccacacgtctgggcagctttccctagcagaggctctttggcttctttctttccattcctctctcactgtggctaaggggtggagcagaggtaggacggctgcccaccatgctctggggcttgacgaacacgagtttgctgattttaaataaaaagatctcattttgttttgcatggattctggctgtttctagggccactgcgcccatttcggggtaagggagtcataccaggcaggcagggaggggacagatgagaggttgccaggccaagctctgtctttattttccccacaattctctgtcatctggtttaggggaggacaggttgggtttgagaaggaaggattcagagctgtcatggggtaggagccttaatgcagattgtgtgatgtgtgtctgcaagatgggagaactttactcctcagcgacttgggcaggtggcctgctgttcctggcccgacaagtacaggcctcatctaacaggagatctttcagggagatggggcaagatggcccccatgttgaagcaggccgttccaacttgggttgctgaaggtgtgggggaaggggggggcgggggaggtcatagtggctggctggaaccaagagctggaaaatgagcaaaagtgagttggtggctgtggagatggacgctttgccccttggtcctactcacctgtgggct

SEQ ID NO: 18451 - DNA, 1203 bp, Mus musculus
cttctagaggacttgggtcttactttcaggaactatatgatgctcacaatgatctataactccagtctcagaggatcttgtgccttcttgtgatctccgtaggcactattcccacaaagcatatgtatatacatgcagacagatacccataaacacaagatataaatacataaatcttttaaaatatgaaaaataagctgactccacaaagttgtcaatttatgttcatacatgtgctatgaaatgactagtcaaacacagagatctatttgtctgtctgtctgtctctttctctcagacaaaacattcataaatgaaaaatactttaaaatcttctttagaaaatatgtattacagtttcagccatgtagaatgaaatgtaagaagatgtgaaaatatgcatatgcaaggagattggacatccattgttgtaatctgatggtgtatttggggtggtataatgctttctaaaagcgtgctatgacacaggaagaataactattataaaacctggagcaaccacttaaaagtagaacaaagaagtttagctactaagccaacattggctatgagatataatcttaaaatgcaattaagtaatacaggaaaagaggaagatggaacaaagaagagttgaatcatacagctgaatggcaaagcaatggattgagcccaactgtactaataattacattatgtttagttaaaatacagagactgtcagataaaatgaaacaaaactattatatgccttctcacatgaagcatactttaaatatgcagaaaaacaggtttaaagtaagggcagaacattatatactgtgcagtcactacgttcaacaacactgtaggggctacattaatattagatttgctatgtttaactaaaggaatactgttcctttagttaactcagacataggagatatttcacagtgatgaatgagacagcctgtttatctgaaagacagtattctaaatcaggacatgtctaataacagagactgaaagtatcatacaaaagcacagcaaaactaaaatgaggatagacaaatatataattaatgttgacaatctcagtggctctctctattatatatagcaagtagagaaaaagttaagtcaggaaatgccttaaagacactttcagccaacttgcacaactgtggcagacaggaaacttgtctagcaaaatgacacgaa

SEQ ID NO: 18452 - DNA, 1189 bp, Mus musculus
gctaagccatctcactgggtcttcaaggaacctttttataaccactagtggaaatggataagaactctgattaatatttagaagccacatttaccagcatacaaggaaaatgaggatactacacatttgagtaatgtggtgtgaagaaaaaaaagctgaatggtcaaggacttgtttaggcgagtttcagtgttagagtttctcattttggttatgttacttttgtttgataacattctaactatagcatggaaattcgtacaatggtcaaattgggaataaaatagggtaaataaaataaggatatcttttaccatggactacatagaaaatatattacaccacttgtatatattaatattatggccttttgtgtagatattgttgaaaataatgaagtaaggatttacatgtgtgcctaagtttatataaatcatatgtatgcttaacatttgcccattcaaaatgtctatctctataacttttggagaaccatcagtgaacactttttgaaatgctttgagtaaaatattaaaattgtagaaaatgtgataataagattatgatatacattcataatatatatgcccattgttttgtgtgtcaataacctatcacttattcttattggagactcttaccacttctaaaagctagtgattgcctttaatattcaaaggtaacttccagagcctttgggagaatgccctaatagcatcaatagcataatcaatagcaatagcatagtcaggaaggcaaagatttatcttgtagaatattcttccctgttcaggggtactattctaattttatttctgttattgtgataaaatactcttaccacaatcgagtcattggaactattctagttttatttttgttattgagatagaacacacttaccaagaccaaatcatcagggagaaataacatatgccttgtaattttgggttacagtccattatccaagagaactcaaggcagaaacctgaagcagcgagtcaggatgcacccccagtttggagcagaacatccattcatttctctcttctctgctagctttctttacttatctacagttcagggccctatcagggtgggtacttcatcccacatccatgaaagtaaccaaggcaaccacacatagacttgtccaccggctgacttgatttaggtacttcctctttat

SEQ ID NO: 18453 - DNA, 1162 bp, Mus musculus
caatgagtctgtcttattgtcttttatcattaaataaaaattaaactcagagtttgggaatggtaaaatgagagaattttattcagaaagcttttggtaattaaaataaaatgcatcaaaacagaagcatctagtcaactgtatgtccagtgacatggggaggaaatgtatattttttgggaaacatggtaaatagctgctattcatcagtggccaggcaaaccataagttacattgggccagcaatttgccatgcatccttactgctctcagaactcctcttatctcctgtaacaactgtaccccatatacacacttatgtgatggacagacattggctcgtggtacacagaggtgctgcatgagaaagatatccatgatattcccagtttactaagggcacaatacagttcaatctccagccattttcctccagagtatttgttcttcataattaaatgaaaagtatggttgtggaatatcttctttgaatatacatggagtctcaaatgatgaatttaaaaaatgactttgtatttattctgtatgttaaatatttaatgaactgtggggggggaaccccttttcacattctaacagatgttgagaaggtcatagactatggtgccatgcaatgtgacattttgttagttaaataaaaatgtatctgattaattgctgccgtggacacataagcttctgtaagcagtacaaagaaagaggatttgtggcatttaaatagtgaatcgaggcagatagccactgtggttatgattaggtgatgggttttcattgaccctacaacacataacagcctctctccagtatgccttcagcgggtagtgtctaatcctaggcagagcataatgggacatgctgcccacaggataaatgtgcgcgcataacgcaacctgtgtattcagaggatctatgtgatgttttctactaattgactgataggtgaataactacttattgtgatagaccttaccatagatttcttctctttgtcagattgcaatgttctttccagagtgagggagagaaactatttagaaaggttaaatatatcctttataggatatatttcagcctttggagatgcagttggaataaaaaaaaaaaacaacagaaaaattgggttatgataaggagaggcagt

SEQ ID NO: 18454 - DNA, 1235 bp, Mus musculus
gagaatcatcaagaatttaatattattcaaatccttctattttttaaaaactttaatttaaaataatagtaaaactttaatttgaaataatagttaaaaaccagaaagaattaaataaaataaagaaaaataaactgtgaagaattatcaaatagactcaacctaccagaagaaagaatgagaatgtcaagaaggaacagcaaggttgaggaatgtagcatcaaacatcaagaaaaaaaaaaaaaaaagaaagaaagccaatgaccatgatgacaaccttgggacataatcaagacaaaatcaacaatgggataaaagtaagaactgttattgagaatctattcagtagcaaaagcagaaaattccccaaatttaggggagaatgtagggatccaatcacaagaaacttttacaatcccaaatgggtatgatgacagaatttctctatggcactttacaagcaagacactaaaggtatgaagtaaagaaaaaatgtcatagaaaagtgccaactcagaaagacaaacccactagaatactcttatactgtgtgacacaaaccctaaaagccagaaaatcatggaatggcacatgtcaaacttaaaaaataaaagtaaaagtgaccaaaattgctgcatacagaagagtaaaataatagagatggcgaggataaggaggagctaatatcagaaaagtccattgagatgtaataataaggaagatatcataataagacctgttattttgtatgctaataaaaaagtaagtacaaacaaaacaaaatccactttcttcatatcttgtgtttccttacttcagaatatcattggaaaatgtcagcacagttcattacaaggtagtatacaacagaactatgtgttgtactgactcacaaattcactgtggctttaaagtacactcttacattagattccaagtttatgcttgaaggtaataaaacaaaacaaaacaaaaccaacaaaccaccccccacaaccaagaactggctcctggggttaaaataaactaaatgcttttataaggctattctgaaaaggaatatcatattaaaggaaagtaatgccttaccatttatgagtctctgtcagggcagcctcctgtgactcttggtcaattttagctgaaaatgaaagaaaaagatgtgaaataggtgctaggctctaccatctcatagagtatacaatctaaacaacatggagttgatttaactacag

SEQ ID NO: 18455 - DNA, 1169 bp, Mus musculus
ttctacctcagcatcagttggatcttttgaagggagaagacactgcagtgaccacttattcttaactgccacgatctttctactttctgcggggtggggcaggggcggggctgggcgaggggcggggccggggtgggagaaatcgcataaccttgagaaggactatattaatcactttgtaatcccttcacagtcccaggtttagtgaaaaactgctgtaaacacggggaacacagtttaacaatgcaacttttaatgactgttttctttttccttaacttactaatagtatgtggatctgataagcaagggtgtgtggttgaagaaaacctctgtggtgggcttaatcagtcactacatgcaaaccctaaaccggcaccctggtgaccgggggcattcgtataagaaaagcattgtgtgtgactctgtgtccactcagatgccacccccaccatgatcatagaaaatctgcttaggacaccaaagatgagaactagacactactctcctttgtgtataatcttgtagacacttacttgatttttttttctttttttacttttcaattctgaatgagacaaaatgctggtgtatcttttaatacagctagcaaaccagaataagttatgctcgttttttgtcttgttttgtttttttcaaaaagggaagtaaacgagaaccgttgactcctccgtttatggactcacacacagcagcaggagtgataagcccacaagctctctttcccgcctcgggaaatctacacagccaaaagccacttagccataaatgacacttgtcagccttgaagcatccgagataactagctgagtaaaatgatccttttttggaatttaatgaaaaggttaacagtacccaatgaacccacccaagtgatgacgtgggaggagcgaaaccgaaatctctcttgctatataaaggacactattttttaaaaaataataataaaaacagctcccgctcgctctcctctctccctcccttctctccctcgcctctctctcctctctatattctctgttcttcattgtgtaccagtgtccgtgaaagaccgcagtaccacttacctcagatgaagcctgcgtgttacgtcctgtaacacctttcgttttgacataagatggctagcccgggtgcattatcttggt

SEQ ID NO: 18456 - DNA, 5067 bp, Mus musculus
tggctggaaaatcttaggaaacattgagaggactgaagggccaatgagatacacattttttttttttaaatcctgctggctattgtggaggaagcccagtgccacccatggatgcccaggtttcaagggcaaatggacattgttcaaccaagtactgacggtgcagagtcccctagagagtcttaggatctactttgtaccagagagtattttcccctgggcttggcaacctttttcccttctttatatttatcacctctgatggctgaagaatgtagacagtataatgatcctgctgtcgccaaaatctatacaccaaggtgaacaggtgtttgccttaccagttttggagtttttactttcagttataggtaaattagctttttctcagatgttaaaaccttgaatgtcctttatggttttgtttatattacagtagtatttattttttagtggtaagaattgtgttgtcatgttagcaagcgcagctccaattcacagatcattgcctgcgttttcttttgacccatgtgcaaggaatgtacacacccattagaatcatgcactttttctcctatgttaaaaacaatggtaaggctctgggactgtatctgttggttagaatctggctagaatctctgggagaagagatgctgtgatttaaccccttggagctgaaatgagagcatccccaactacccagtgccaagggatggatgtgagaggatagtctggcagaaagtaatggagaaagctgagacccaaatgatgatgagaaatgaactctactcggcaaaatgaacacatcacaagtattcacacaataggaagtaaaggataagaagctgatgtgtttattcttatcaaggtacattcattactgaatcaagccatcagggaaaacaacaaaacaaaacacctctagcttttatttttctgtacatattcatgtctcccaacccaaacatttctcactgagaggggacatgtatgcaaacctcatctttctccttcattaatgatgatcttcagattaaccctttggtgctaggagctgacactttccaaagcagactatgacgtccaaggatcaaagcctctcttgcagcaagcaagagcaactgctgctccaaggcgtgatcatggaagtggaagaccacagtgtgacacagtggtactgcattgtctttttcagtaggaagtcatgttctcatgcaagtgtcttggcctctaggctcagacttagagaagcagagccgctgctggcagtggctggccgctgggactgctggggtgtaaagggcattttcctaaggcagctaagacagactcagacatagatttttgtcctaatttttcatgtttctacctgggtgagtttaccctcagtgggaagtaggaagttaaacaggtgtattcttacatctgctgtcttctgttttcctacatagaagtatgttgaatgttgcacattgacaaggaagtagattagatggtaagtccttttaagttaccctgcatccattctgtaagaaaggaggaggagaggaagaaaagcaagctgagcctggccgatgttcagaacatttactccctcagagggagcagacactgtacactaagcacacagcttcttttgttttgtctctccttccaagtcttaaggtaatttcatgaccttggccaaggatactttgtgaagattaatgaggggacattgacaatgcctcaggctggccactcctcacactggcccttggtccccagccattcaaggggttactcatcccatccctgactacctgagtgtcactacaggtgggttcttggctttgagttcaagaattctttccttacaccctccaccagatgtcagtggaaaggcagaagtagaaccgaggtgtgggaggagattctaaaagcttgtgttgcccaggcctctagcttagggttctggcaattgagacggcctgaaacctgacagcatcatgtccgggcagctctggctttgtgagtccagctcctaccaactccaccttgacctcttgtctccatgcagggctgtctgggaggaaactggccacttctgctcagactgctgccagcgctctcacagctttgctctctacactaatgacatagattattccagtattgttcccatttcccacctgacctccagcttctcggagctgacttcttgcaggggccacatgcttctttccctcactaactgcagggtctccaccacacctcagtgtacacactttgctgctaccgtctgtactgtctacatcacggttcccttagcttgctcctggtagtgcattacaggcaagcatgaaatgtaaagtatttatttaaataaaaaggaaacctctgaattggtcatcgagtcacctccctgtagatttgtagtctgtgacatatttcgactttctagtcctgctagatccatataagatctggtcatctggttaagggtttgaagcagacatagctatgaacccggatggtatcatcactgtcacggctggccacactacagatgtttatgtccttacgtttatgacccacagggtgtgaagtaacttccaagaacctgattttgtacactgtccactctcagtatctcacactctctgatagggacacacattacttccttcgtacagacagcttaaataaagccctatgtcaatctgctgcttctctgtttgttgttgttggatatggctctgtaatttcagaaaactaaatttcctccttttctggaaaaatgattatagccccagctgttattaaccaaccctgtatgaaggtgtgataggaaaagaggtaaatttctcttccataaaacacatacggggtgtttttacttgaccaagatgccaatagcatgcttgtacaaactgataaagggctaggtgtggagtcactggccaccagcagtagattttaaggcacatctactaggatgccagataaagagtagattgcagaccctaaaggtcttaataagaaagggtgtgggcccagaatcctcaaggaatgcagctcatcactaatgtcttcctgataacatactgtgccacacccttcctggcaagggtgtctttaacccttcatgtcaatttgacttagacatgagtaattgatggctagaatgtctggattacatggttttggacggggtgtctttctgatttttacctcataagctacaattgtagaacttggctttgctcttgtgagttcaacagagagaggaatgacttttgggaccagttaggcatgcatgtgtatttctcacagccaaatttggggacattcttacatgtgctgtcctcaaaatcaactggggttggcagatacatgaggctgaaataaagtgacctctacaactctctaaaggtgctatttttagaatattgtataatttattcctggtatacataaaacaattgaggacagttaaaacctgtgacagctttatgtctagcacatttgatgaaacctgaaacttctgactcggaagttgtgctgttctaggcttgcacctttggcatgccccagagatgaggatggcccatgtgccatcatgctgccagcacaccatggcctaagctgtatgtttgtgaagggcaggctgagcatgtggacaccatgcctccactgagagccctgggctgccgggcagccgggcagctgggctgcgggcagggagaggtgaggtctcacatgcaggcttgcccttagtgtttcatccctccctcagacgccatgaccatctcagcatccgggctttatctccatctgtctgtttggtttttgtttttgtttgttttgtggtactggggtaggaacccagggcctcacacatgctgggcaagtgctctgccaccgagctacaccccagaccttccagtgtccatttgtattcctttgaagcatttgagggcttgactgtatagtagaaatactattttagactaagaatatgatctgtgtacagatatttgatatactgttaagtaaattttctaatttcacatacatttgtttttaggctcctctcaaatactgctattgaagacaaaaatctgacaccatcgagccaaagatgcctttttggggggaggggaggggtttgctttgtgttgttcagagaatgggaagaaaaatgcagagtgcttcctgagtgcacacagttcgatgggaaatactggatgctggctaaaggtagacatggtcatgagcgggaagaagcagtggccggcaggaggaggggtggtcttcagtccacgttggctgacttcaaacatgtgcctttcagtgtgttttgtcattgctacaaaatgaaaaggaaacggaacaactcaagtctttaggaaggtcattttattaatccatgtgtatactttagagacaacgtaaatcagtgacttgaagctgttctgagcacacactcccaacgagccctagccagttgatgctgaagcaagcactccctgtccatagcacagggacagaccatggcatgaggaccagccccccctgcagtccctggtggtgtctccctggggaggtttcggtgcactgtggcacattaagtacaaatcagatgaatgtaaatatctctttgtaaatcatttatttcactctgtttcatccaggtcagcaatcagattgtggcatgctgggtaactggaaaaaaaatgataataaaaagtaagtttaaatagatcatgggtatttgttttctcatttgctggtttggtcagctgttatcactgaagttttggaggaaaagtttctgttgctaaaagtgtgaaaattatgtgtagccaactgtactaaaaatttgtaccttacctgctgctaccagagagcaaagaaagccctgtttgtatatcggtatcaagccatacactttgaacgctttccttctgaacgcagcctgtactccaggcctgtgtgtacttctacctgtggacagttgacattgtgacggtgtgctgaactatgtgttaggaaactgatcagacattagatgggcaaacggga

SEQ ID NO: 18457 - DNA, 1164 bp, Mus musculus
aattcaaaatatgaattttaattgatgaaattcatatgctagaacaggtttcctcaaagctgaggaaagggtcaaataaactgaggtttagtatcaactctaatgtagttatgtaattaaagtaggatgaggaatattccatcaagcaagaatcacatttgcatttgagggtgtggtttagtggcaaaacacgtgcataaggccttgggttctagttgcagctccataggttgtcattggtgatagtaaatttacttcttttgaataatgctttaaaagttaatgtacatgggttggacatggcagtccagaggcatacagacagatctctatgaattcaaagccaggctagtctacatagcaagttccaggccagtcaagaatatatagtaaagctagatgatgatgataagaatatatagtaaagctatctgatgatgacgatgacgacaagggggaggagcgagaggaggaggaggaagaagaagagccaagactataatagtgaagttgctgctgctgctgctgctgttgtgttgttgtaaaaatttgtcatttttctggttttacttctaggtattagaagataatgactatggccgagccgtggactggtggggcttaggtgttgtcatgtatgaaatgatgtgtggaaggttgcctttctacaaccaggatcatgagaaactctttgaattaatactaatggaagacattaaattcccccgaacactctcttcagatgcaaaatcattgctttcagggctcttgataaaggatccaaataaacggtaagcttcaatgatggtccataagttactgatgaattggttagagtgatttgtgaaattaattcaaatatgcctgatttctggaagcattgtatttggtataaacatttttccactgagaaacttgtcttatttatgaatgcatagtacaaaacagtttaaaaattcatcagctcttttttaacttgaaagtattatacaaacttaccatattagagggtttttttaaatagaaattctttatttgtactatgaaaaaacaattttttcattatcttaaatcttgctcctttgggataggaagttcccttttctcctttgagtctctagggcttcctattcctactgactcacatcaaagaaagaaaagtcg

SEQ ID NO: 18458 - DNA, 1137 bp, Mus musculus
tatagatgtcagttaagaccatttgatctatagtatagttgatctctcaagttgctttgttaatttgttttgtacaggtgaactatctattgattataattaaaattacctgtcattactgtttctgaacttgtctgtcatgttagttttgtctagtagtgtttgttttatgcagtagggtgtaccaatgactgttgtatacatacttgcaatcagtttattatttctgtattaatgtgtaatgacctttattttcttattttttccttattttaaaaatgttgtatccatgtgcacatgtatgcatgggtacatgcctgtggagagtagaggagagcgggctcttcttccatggatctgcctgattcccttggtgcagcatctcccactagctcacagagtttggctagactggtaactagtaagatccagtttctcctcacagcccactcttcctccccagcactgacgttccaggttacgtggatgctagagatctcaacttaggacagttgtgctcatacaggaatcacttttagccactgagccatctctctagcctcttctttatttcttttgactaattttgagataacttttgccaggtatgaggatagtcacccatgcttgtcagcgtccatttgcttgatatagtgggatttagttttctaccttcactcttggtatttctttgccaataaagtatgattattgtaaacaataaatagaaatagttttaagatactctattatttttaattaattgattattatattttttgtgtgtttgtgcatgcacacacaggtgtcttgctcatgcatgtatgtgctaccacataccagtgggagacagggaatgggatttgggagtttattttctccttgtactgtatgagccttgaatatcaaactcagatcatcaggctaagtgccaggaacctttgccacctgaaccattttgctggcctggattttgttttaatccagtgagttaatccagaaataggcagcatttataggttattgttgagatgtttgtcagttccctcaatttttttttgcgctcttcttttgttctattctttctcctctggtcatataagaagttttctggttcagggagttgggcattattca

SEQ ID NO: 18459 - DNA, 1370 bp, Mus musculus
aaaattatttaatttccttagaaaaatagcaccatttgggaaaaaaactggtgttacgaagaacataaatgcactgtctttatttttatttttattttatataatttaaattgacttttcccacgtctttaagtttgaaactgttaagctgaataaaaacttaagctgcaaattgataacttcgctacattacaaggaacatataaatgtttacaaacggcttaaagaattgcatgtgcagtgtgcattcataccacacttgtaattgcacagaacccatgccagctcagagtttaggtgtacacacgtacccagccgagtgtttttagaataactactgcacaaattgacaataggtcataggtcattctctctctccctcctttttgcttcccctttctttttctcccctatttcctttccttccccctaccccctaactcatgaaaagattctatggactgaaaaagccccaggctgaaaggactgaaccgccttgattgacatggggaggggggttagtagactgtgtatcggcagcagaggctgcagcccgatgtgtggttctgatggccagcgcggggcagaagcgttttgcacactgtttgttttcctgtcttgcacttacaaataaggtctatgggagtagcatgggaaacagtggttgtttttccctttttcttttttaattgcttttgtttaaaatttgatcgccttaactactgtaaacatagcctatttttgtgcttaagatactgaatggaaaactccattgtgtgttgctggactgttttggaaatatttggtcaaatgtatgttaatttggctgtaatggcatttaaagcaaacaaacaaacaaacaaacaaagctgtgaaaatggccttggagcattatctttagttacttgaagagtttctagtttttttttttttaatacagtttatgttaaaataatctttattaatctagaggagacaatcaatgtctgtggaagaacggacttttttggattttcttttttaatggtcattgtgagtgattgctctttcttttacttagtttcacattcttcctttgttctaaatcttagactgacatctagctttgacaatcatagtatgttttatttcctgagggggaataacttataatgctgtttagttttgtactattggtgtgttggtgaatttttaaactgtgtgctaactgcaataaattatatgaactgagaattccttgtgtgctttttgtattatagtcgcacaacagatttggagttagtatagtgcatgacgtcttcattttaatgtcaagttttattcagcttatgaagtattagactgctttagggtcacccaaatggaaatgt

SEQ ID NO: 18460 - DNA, 1434 bp, Mus musculus
attcattatactttaaggaataatattaacagtatacaataacctttaagaaataatactaactttaaaaaatttcacgtcagtcactcatagttctagaaaaatcctattacttgactgttttgaacctttttaaatacaatattgctttgatctgaatgtgggagagctgggagtttagctcttgcctagcagtactgtcctttccttacccaagtgtgaatgcctgagggacttgatgctattttcttatgttttccagttaaatggattggtgtaggtaaatccagagagtccatgattcagctcttctaaggattgccagcaacgcatgagacactccttaagaggaagggaaaaagacttaaacatttctttgtgatctgcaaattcaagaataaagacattgaaatgagttttcagctggcgttggtttgcagtttctgatggatggctgtcatggccggccttgtgctctcatccagcttcccggctggcatggctgccacatctgttgctctgcttctcatggtgccgcacagtccttgccatggttagaactgtataatccccagttgacatctagaacttccagtgtagcttttcttcattatggccgttgtgtttgaggttgtaccccgattagatggtgagaacagttaatgcaattttgcacaaatatttttacattctgatcattcacttctgtcattgtgatctttgctgttagaaaaagaaatgatggaaagataagggttctgtcaacatttgtaaagctaagaattctgtttaaattgtgaactgcttttttttttcctctgctgaaaccattgcaaaattgagctttggtagggtagggggagtatgttcatgagacttttaatttgtataaaacacagaacttagttctctctgcaatttatttaatacagtcaacattaaattgagtgttcaaaaagaagagatgtttccctacaataacaaccttaatgtgagaaaataattattaaaaaaaaatctgttgtgatatttgatggatatttttctttgttttcagatatgatctcaaatgtttgtcttttctttttcttttttaagcatactgttgtttctaagaacagtgggtttgcttacatttcgcctgccagtatacctacaaaatgacccacaagtaacccgcatgagtccaagttgtcagccatattttgatcatgccctcatccctcctttcttgaaaaagcaaagagggatcacctggcccttggctttacattgtgctgagattagccttccctggaccattaaatgtttaaattaggcatcacctgaaattattttataataccaccaacagctgattaaaagcaaccaaatatttccagtatgctttgtgtgttgtttttcttctgttcttgataatgctagtgcggatga

SEQ ID NO: 18461 - DNA, 1177 bp, Mus musculus
atcctttaatcgagcttgtgagcacaatacagtacataagataatataatgaatgtgtcatggcttcaggatgaagctgggtgtcaggagagcagtcctaagcaggagcagtcagttttgggagaggtagtgggaacatgtccatgttcgttctagatgaagtgcctgggaccgttcactgagaaatgaggccccagtggagatgaggcacgagataacaagcagaggtgttagctgtattgtgggctatgctgaatgcgttattttattaaatgtgttaaagcttaagtagagagctggggatgtagttacatggtagaaaatcctgagtacttaccagtatcaaatacttgcataattaaaactcaaccaagtttatttataacaatacttttacaggcatgctaatgaaactgcaaaggatgtacagttatctttcagcttaaaaattacactaattctcaaggtttttgttcttttgtttttgtccttcaatgtctaggcctgtagaaaacaaaagcagtattcataacaacttcagagagagtaatcaaaactagttagaaggcattaaggttctaccccatgagagtcattgttctgattatactaatggcttcctggggcctaggaagagctttgtcggggtactaaattaatttttgaaaatacagctctactgctttctgtcaactgtttatttgttgtttttctagttgcttttaaaaacttctctgataatgaaaaataagtatttaagtgcaaatgcttttgtattcagaagaaagtgtatggcatattctagaacctcagtcataactgacttgcaaagttactgttaatgaaacaattcttaaggataattctagcacctgaaatacgttagaaaggctattgtcttggcaacaggataggaacatgataataaactaatcatatgatagcagtttgaagtacaacatgacagactgaaattcactaaagcgtaaacaaaatactcaatcaccatagtctttaaaatctatagtcttccaagaaaaattgctatgatgatttttctgtttcctttgatcaaaagtgacacagcctttgcttcttttacagattaattttgacatttgaaactttatttaaaattgtagtttatattgtcttttgcatctggcctccactgaac

SEQ ID NO: 18462 - DNA, 1380 bp, Mus musculus
taaaagcctgaaatctcatacagcctaggccacaaacactgtggatgcggcatacgtaagtttaaaaacccagccattaagggtaaagtaaattatgttctcaatacctcttaaccaaatcacttacattaaaaggagataggagccagccagcgccgagcgacgggcatctctcagtacaactggcacaagtgccgcaagaccggcggtaagcaaaaaccctaccacaagaagcggaagtatgagctgggaccctgctgccaacacgaagattggccctcgccgcatatacatagtccgagttcgaggacaaataagaagtaccgtgccctgagattggatgtggggaacttttcctggggctctgagtgttgtactcgcacaaggatcattgatgctgtctacaatgcatccaacaacgagcttgtccgcaccaagaccctggtgaagaactacatcgtgcttattgacagcacgccttacggacagtggtacgagtcccactatgcactgcccctgggctgcaagaagggggccaagctgactcctgaggaggaagagattttaaacaaaaaatgatcaaagaaaattcaaaagaaatacgacgaaaggaaaaagaatgccaaaatcagcagtctcctggagcagttccagcagggcaagcttctagcctgtattgcctcaagaccaggccagtgtggcagagcagaccgctatgtgctcgaaggcaaggagctggagttctatctgcggaagatcaaagcccggaaaggcaaatgagcctcatgatagtgtaataaaggtgtctgctgttctatatgacaaaaaaaaaaaaaaaaaaaaaagaaagaaagaaagaaacaaagaaacaaagaaagaaagaaagaaagaggagataggcgctatcctaggcaggaaaatctttctactttgagtgtccttccaaaaactaaatgtcactcactcatctgtagtctcctcttcatgttttgttgcctaagaaaatgcatttgctgagtcctgaaaacttaagtggtttaaatttattttcaccatttacaacagattactggacatcaaagatccattgcacttatgaacaaagagccttattttcaagttctatataattttgcaaaactgtacaatgagtgggtgcaagtctttttcagtttgggagaaaaatgtttacatatgtaaaataaaaatttatatattggtggtgcacctctgcaatctcagctattgggaggtagaggcaggaagaccaagaattcaagtcaccctcagctacagcagtgagtgaggccagtctgggctgcataaggccctgtctcaaaagtgccccactcagcccacgatttgtctaaaggctgccat

SEQ ID NO: 18463 - DNA, 3184 bp, Mus musculus
acttcagtctagtgtcagccaagaactccaggatgaactagaagaagcagaggatgcagccgcatccagtgccatggcaagtgctgcagctggtgccagaactgggcgtcacactaaactataagacctctgaagtcaggccttcagaactgtctctggcagttgagtatcactagagaaaaagaaaatagagttaaatgtcctttggatattttgtatgcaaagatggctctcccccaaatcccagtttttcagctcaggattatatttgtaatcaaaaacaaaaaaacaaaaaagaagaaaaatagcttggcgcaggagggagaactttgtatgaagctgccctcttttcttttctttttaacccacttgtaaatttggattcacttcctctgttttatacgagctctgttaaattacgtttacagtattttgtaccactgtttacaaatcttgcatggacttctgccaccatgaaagaagaatatcctcatcttcaaatattaggcagatgatctttgtacacttcctgacagttgccagagctacagcataggtagtaggcacaaggaaaggcttccacagccgcagtcctcatcgctgcttacaagctgtcccggagatctgtatttgttttgttaccaatgttggcacccagataccggaatccaaactggcctgacatgaaggagcacacacacagccagagggcttgggtcctggtcagttcctctccacacccttcttcccattctgagtagcacatttcccaaggtgcccgtggagcagctggtctcaccccagatatgcccacctcagcagggtggtactcttgtatctgcctggcttgatgcctctgattctttaatgaagatactcttataactgatgagtgtttttgcacatgtgttaggagaggggcttcattttattttaatacattctaactcctccctgtacaggatattttggtggggtgggagtatcctaacctagcttcctgagcagcagtacaagctgacactgaactgctttttaaactagccaggctaccttttgtactggatattgaaacctagaatctaaaacacaccccaaaggtaattctttaatagtttgtgtacaccgtatcagaaatggcttattggagtttcttagttcatgatgggagtagccgcacctcataatagagattctattttcattgatatcttgttgaaaattatacttttgtgtgtcttaaattcatttttttatgttctcaaatgtatctctcttacataacatactcttgggaatgaggttgtgctacagagaagtcttagtgaggaagtcatctgttagagtccaaccccagttgacccttggatgtagaaccaatcattacatgtcacaatcaatgttctgccttaagagtgagtgtcctgtgtaagtagtggatacaacataggaacatccaaggtactgactgcagctttagatacgtgattagtgtgagagtcacattctctgtgtgaagatacatgtctttgagtaaatttcatctttaatttttccatgagctgattttgattgatactttttaacgtaagcacaccctctttatagggaaagtaaaccttgagttatttaacactggcctgaggaaaacgaagtcactttgtactgtttgactgttctgtttccagagaagaaagctgctgcaagttactctacccgtgccgggtggggcagagcatttgtttcaggaacggtgcagcaagacagaatatgtggtctttatgaagagtcaacttagttcaggtctgaaaatgagacttaggacaaaacactaatgctccccaagaggtgtcaccacgagagcccaagccctcagcccagcttggtaagaaagagatgcttggtacagttgacttgggtttttgttgttgttgttgttttattaatagtgtggatcatggtgttttctaatccattgagatataaatgttttgacccaagggagtggcccctcagttagacacttctgggtaaatagccaggtacatctctgtgcttaccctcatttcagcagctcagcacacaagtgacttgctgttctcatgcctgactgggacatttgacgtttgaagaaatgtaaaagtcttctaggaaataaacagctcatgtgcaggtcacctgagagtcaggacacaagattccttgcactttggtgtccctgaggttggaaggaagaaaatctctttagtgagaccaaccttctccacagtgtagattagcaatggattaattaactttgcttttcttgccctcagaaggtaacaatgagttctccacatgaactcataagaaaaaccacaagtcagaactccagtcatgaatttacatgagtttacatattttgtagttgtaaccaagtgaaactgtttcttctggtaggtgtttgaacaataatagcagtaatagatcagatagttggtttctggtgcttgttttaaatatgcttgggctttttaaatcctcattggtggcattggctttagaagtgtgacttgtgaggctgtagaaagtggtgactgtcctagagcacctccaggcctgaactccggccaactattgctctgcttcacagcaatagcatacctaccatcaccagcatcttacagagcagggaattccagggttagtccattgatagccgtgtgtgtgtgtgtgtgtgtgtgtgtgtgtgtgtgtgtgtgtgtgtgtgtgtgtagattaagcactgcagacagctgcaggactctgtttccatggcttcttccatcataagtcgggtagaaccatgttcactgcttcacagctctaacccatgtgttgtcttatggctccattatatatttactatagctttggtgtatgctatgttttctttttaaatgactaatgttaaaagttagtttttcagcagttagccatcctctcattacatcttattcttgccggtatggtttgagagtgtagcttgattgttagactttcattgtctgctcagtctattcacacacatctccactgtcaacaagtgggacagctgtcaacaaatcttcatggatctgaagagaatttctgtgaagttgaatgcaagtgtactgtcattcacagtgtttataaaacaccaggaaccttcacttttgctaccttg

SEQ ID NO: 18464 - DNA, 1053 bp, Mus musculus
tggtcagcataaattctgtgtagaaaacattataatagagctgttttaatttaaggaaaatactcactggtcaccaagaaatgtccaagtccagtcacaatagatcctaatgagccatagagtatagattctcgagcacatggagtgttctcaacatctaaaatacctaggagcttgaagggctaggataaaatgaaaaagaatttagcctgaacaagaaaatagttaggttcctattcaatttttaattaccagtcagccaacttaaagtgttctaatctgccacttcaggatttacttcagcatttgaaataatgagcacagtgattaacctctagcatgaagtgaccagtcttccaaggacatgtcactcagcactggctcagagatgggggtcaaaacatttttcacactctgttcatgcaagtcttagacatctggtggtttgtgactgtaatgtaatcccagcaatcaggaaaccacagcaagaagaaccacaactacattgctgtgaattggaggtcagtctgagcttgaggatgcaagactacacataacttatatgacagagcatgtgcgaaaagaagccattctctatttgtaccccagccctggaagcacagatgttttctgcaatgccactcaatgcttctagaggatgactgcataagagatgaaacgtaacactggtggggaatggagtaaaagacatgttaggttcggttaaagatagggtagagctgcactccccttagctcaaggatctgcctgaacgtgtgtaacctggctttcattaaagtaaaattgttctttcactgatgacttgcttctcttgtttttaatcatacacccaatcaatcattgtgggctgttctcatcatcaaactctcaaataagaaactacaggtctactggggagttcacaccatctctggaaattactcctatgccaactagcatccagtacatgatgaacatggagacattctggtagcgttagtgaaaccagttgtacctatgtacctaccacctgtattcttgcctagttcagat

SEQ ID NO: 18465 - DNA, 1141 bp, Mus musculus
cagcttaattgtgtagatgggatgagagtaggttgaaatacgctggatatggctcacacctataataccaacactaggatgctgacctaggctaggttacagtggaattgtcaagtacaatattaaagggttcagtggtcaggggattatatatataatggcatgtcccaaacaagtgaaggaaactaaatgctttgtgactctctttatccagttgtgctgctgtgaaaatgagtagtgaagatgtttccagccaagagaggtctccctttcatggtaagatataactgcagaatggatgataaagctggaaggaattaaaatacctgctttttcatagcgatatggctaagaccataaaaataagtacactgtccacacaaactcaacaaaattgtggtttctaccagatgagtaacttttcagtgcccaccactgacagttacacaattctctacaccctgtctttactgtttgaaggataggtgaagaatagaattgtcaaggttggctcatcttgacacaaagttctaaggccagtaatggatatatatccttgcttgggtttgatttctccttcaggctgatggtacttttttgtgaacatgtaattaagctgacaccttgggagggttttacattccatgtttttggcatggtctaacaaacatactgtactggcagtagagaacaaaaggatttcatgtaaaacaatacagtttacacacgtttgagttttttaatctatggttgatttacaagttgtttgggttttaaagctgattgaagttgcttagctgctgttgttggtcttcatttttctttcaggatcaaggtgggtgctttcatataaaatcttattttttattccttctctggcaattctttcctggatcctctgcttagcgaaattatacctacagtggaaccttgtaagaatgaaaaagaaagtaagctactagttcctatatatgagcaacctaaggaattttaattcacagatttccaaaatgcttataaaggactatcccaaaactaaatttaaaggtgtttatacaaatgttctttataactacataaaacatagatttctgtctccttagaataattatacctgttgtagaacaaacactgtaggaat

SEQ ID NO: 18466 - DNA, 1979 bp, Mus musculus
ggcagcagggtgtaagtagtttcttaaatgcttacataaattatgtgttatgtttacaagattgagacggaagttcttacctaggaattgaagagttttatactttaataggacaaggtgtctataaattgttactgtgttattgttactgtaaccatggataggctggattttaacattactttagataaagtaatatttaatacatatggttgttttactacatggtcatttttaatagttttaattacataaactaaccctaagtcttgtgtttcctttggtaatgtgtattggtaaataatatgggtaattggtaaattaaaattaagtctctgatctgatgtagaaattaagtgtgataaatttgtttccagcaattactctgaattagatcattgtcatttcctaaaaacaatttgagtggcttattgatgtttttttctttaaaaacaaaattttctcttacagcaattctggggtcagaagccatggagtcagcattatcaccaaggatattattgaatacccaaataaaacgaactgatacatatttctccaaaaccttcacaagaagtcgactgttttctttagtaggctaactttttaaacattccacaagaggaagtgcctgcgggttccttttttagaagctttgtgggttgatttttttttttttcttttcttttttgtacatttttaattgcagttttaaagtgaatcgtaagagaacctcagcattgtgcacgataagagaatgtgtcagtatttcagggttctacattttatctgtaaaatgtgacttttttttttatcacaacaaaagtaaaatgttgctttgtacctggtgtcttttattaagcatttactcccccatttctcacagagaataacagtcgggagtcattgtcacaataaaatagcaatgttagcagccagattcatggaaggactaaggggtcctcatgaattgcattaagattctgtactgctcatgatacactccatcctctctagactgcctgccgggtaatagtggacgggtaatctctgacaaaacgggaaggctattttttttctgtttgacaatggaattggcataattgggaatgaagataaaatttggaaccaagattgagaagatggagtgtatgtagaagggctgttcaaaaatgtaaacttggttgcattatatgtggaggctcaaacttgtgaaggttaaataccataaaattttccatttgttctgcattttgattctgaaaagaaagctggctttgcccatttcttattaaaaaaacttgttgtaaatccagttgtctaatgggatctatatgaagttagctatgtctgtatgcccttctcccacaaatactgtattactagtgtgcttgtagtagttaactccaccatctttgtaagctaatgaaattgtgagtcacccatttatatcttaatttttaatcatgtcagttcttgaatgggtatctccttagcctgctgatttctttttctttctaaagaaagtgggtggagaaattaatttagacgtttgtttgcaataaaaagaattcattttactcttgtttgggattctcgccatcaaggtctaaatccctttatagtatgactcccaagaggagaaactttaagtgtgtgctttctggacagcttattctttactctgtacttcggaacatttaggttttaaaaacttaaatgtatactgatgattgattttataatataaagttgaattcttcccttcccctccccccaagactgcttttaacatttatgaggggcaaaggtactggctgggagaagttaatgttcagttgaccatgtttatgaaatgtgagtggctgtcctcacctgataatagacatataatacatgaaactttgggaacagatgcttttagaagccatcatgcaagccagtcattgatttcactactacacaatgctgctaactta

SEQ ID NO: 18467 - DNA, 2749 bp, Mus musculus
ttcaactagctccagctttagtgacaggaagttgcctaacatggaaccttggacacacaaaagcagttgaaactgggaaaatagaagactgttgtttgaaggatcattaacacattttaaaaggaaaaaaattggtctgaaaatatgtatctaaggcctgattcttgggatttgttgtttataaccattagttcttagcattaacctaaacatggtaacatgtgtgtcttggtgagttgagagaccttacagggagtttaaaactgatcttttttagagctgaagcgatggctcagcagttaagattattgactgttcttccagaggtcctgagtacaaatctcagcaactatgtaatgcctcaaaactatctataatgggatctgttgctttcttctgatctgattttttaaaaattctattcaacagaactttgaaactgatgaagttgaactctcttatgcgaagaatggacaagatcttggtgttgcctttaagatcagtaaggaagttcttgctgaccggccactattcccacatgttctctgccataactgtgcagttgaatttaatttcggtcaaaaggaaaagccatactttccaatacctgaagactgtacttttatccaaaatgtccccttagaggaccgagttagaggaccaaaaggacctgaagagaagaaggattgtgaggtaagttttattgtgtgatggtgtggattgtgttgcagttgacattaggagaagggtaaaaaatgagtgggttatagatttgttactatttactgctgagagacaaagtcgtgatggcgcttctttttctcactgtaggttgtaatgatgattggcttgccaggagctggaaaaactacctgggttactaaacatgcagctgaaaaccctgggaaatacaacattcttggaacaaatacgattatggacaagatgatggtaagtaacaattgaaatgaaagtgttgagaaggcgtggggagtagagcaaagggcgagcaaaacactataccctggctttagtcttcagcactatgacaaataaacagggtcagaaattatcctgggttaatgttggcttgtgttttcatttattttaatatcttagaggaaatgatttttgctaaaacaaattgggagtactttttatatcttccagtgactgctttttcataagtcattaacagcagtaccaaaaactatgtattttttggttactattgaaaggatacaactgagtatttataaaatgatgcctggttcctgtagttctaagctttttacaatattttgttaggtggcaggttttaagaagcaaatggcagatactggaaaactgaacacactgttgcagagagccccacagtgtcttggcaagtttattgaaattgctgcccgtaagaagcgaaattttattctggatcaggtaagtagtagctttgaagttaaagagagaaatcaactgataattggtaaggtgtaacattaacgtctttaacattttcccctcaagacaaatgtgtctgctgctgcccagagaagaaaaatgtgcctgtttgcaggcttccagcggaaagctgttgtagtgtgcccaaaagatgaagactataagcagaggacacagaagaaggcagaagtagaggggaaggacctaccagaacatgctgtcctcaagatgaaaggcaaggaattcactttatttttactgtcttaagtacggtttggggatttatacctagaaaatatcttcacacttagagattatattaatctgctaaatagaaacttgtatggttattatacaaagaatgtgatgaaggccgtgaccagataactgaaagttgaaagaattaaacacattcagagataaagtttatagaatttacatgttcataattgatttataagtttgacttgattccctgtaggaaacttcacccttccagaggttgcagaatgctttgatgaaataacctatgttgaacttcagaaagaggaagcccaaaagcttttggagcaatataaagaagaaagcaaaaaggcactgccaccagaaaagaagcaaaacactggctcaaagaaaagcaataagaataagagtggcaagaaccagttcaacagaggtggtggccatagaggccgtggaggattcaatatgcgaggtggcaatttcagaggaggaggcaagttaattttgcctgttggtatttggaatttgaaaatgaatgagtttattttttaagttaaataggaagttagtttctttgataatttgctgccatgtttgactaatacacaatgaggggagtgtattgggtatacttaaaactgggcattgcttactttttcattaatgataagagataactgtatgaactcttccttaaatgtgtgacagctaaactaaaccctttgtgcatttatttagctcctgggaatcgtggtggatataataggagaggcaacatgccacagagaggtggtggcggtggaagtggtggaattggctatccatacccacgtggccctgtttttcctggccgaggtggttactcaaacagagggaattacaacagaggtggaatgcccaacagagggaactataaccaggtattgatttgccctgaaatgttgtagatgaatggatgttgggagtcttaactggcggcgttgacatagttgtgaaacaatttagttattggactttgctttttcaggtcattaataacagcagtgag

SEQ ID NO: 18468 - DNA, 1356 bp, Mus musculus
gccgggcgctcgggagcgggcctagagcaggaggccgcggctggcgccgaagacgacgaggaggaggagggcatcgccgctctggacggcgaccagatggagctgggcgaggagaacggggcggcgggggcggctgacgccggcgcgatggaggaagaggaggcagcgtcggaagacgagaacggcgacgaccagggcttccaggagggggaagacgagctcggcgacgaggaggagggcgcgggcgacgagaacggtcacggggagcagcagtcccaaccgccggcagcggcggcgcagcagcagccttcccagcagcgtggtgccggcaaggaggccgcgggcaagagcagcggccccacctcgctcttcgcggtgacggtggcgccgccaggggcgaggcagggccaacagcaggcgggaggtaagaaggcggaaggtggcgggtgagtgttgcgtgatgggtgcgcgtggcggtggggaccgtgccccaggcctgccggggcccctcggggcgagcgccgcgggagggtgggggcgggggagccccgggaggctctgctcgccatgccggcggcgcctccattatgtatgtcgggcgccggggtggggggagcgctgcagctgccgcggtgggggggccggccgggcgggagcgccggccgctggggcgctgcgtgcgcgcggtccgggcacatgtcggcggtggggggaggggagaagcccgaaggtcccggagcgggcgggctttggcggcttagcgccgcggtattgtgcaaggagcgcaggggctcgtggtgacgtcacttccggcggcaggcgcggggagcggggcggaagctcagtacaatgcggcggcggggcacgcgggctcgtgtgggggaggggaggtgggcccaggcttccccccccctcgtttgagcgcggccggcgcacgtgggcccgggcggtgtcccgctttttttttttttaaactctttttaaaaaatgctttctggaaggttgcggtaggctggcaagttcagtcttcagactgcgtcactgtgtccagtccaagtccagacttttttattttcatttgtcgattaaaaaagtcaaagaatcagtcagaaaaaaataatcagtaacagctcttgaggctcgaaacacaaaaggtgcttaactgcattatttagttttcggcctgatgctttaaggcggtgttctgtgtcgttataggagacggcaaaacagaacagaaaggtggagataaaaagagaggcgttaaaagaccgcgagaagatcatggccgagggtattttgagtacatcgaagaaaacaagtacagcaggtagaggctcctcacccagttttaac

SEQ ID NO: 18469 - DNA, 1173 bp, Mus musculus
taacaacaaaaattaaccacattagttaaaagattttgattggtttttctttgtgtttatagattaattgaaatgggtaagcatttctgaccagaggagactggtggctctgccttcctcaaccctagggaacaaagatctgattggtttgagttactttccttataaggcagggaagagagatgctaaacaataggagaatcattaacaagttactccaggcaagtcctccccttccccccaaagattaaaacagaaggattctattatcttgcccattgaaactggctttcgcggggaattctgtttggctgtgtttaactttattatgggtgactccagtttttctttttaagtctgttttgggacctagtataggagcttaatccaaaacaaaagtctcttgtaatcatttgctgtgtgagctgaggctaggagaaaggaagcgtggatggacagtccatgcccctggagcttcatactccattttgctttccagaaagatctctggttgaacatgaaatgaaagttttagttgaacaaagagagaccttcggggggggaaaaaagctgcctagaccaccagttggagaaacatgtaagagagttgcttttctttgcttgggggcagtgagaggttgttggaatattaacaaggaatgagaaagaaaagcaacgaagtagaatttgtcctgtcttcttgctccttatacttggtagagtccttgtttattcaatgctatgttaaaaagaaggagtttggaattttaggttgatgcagataaacttgaagtagtaaaattgatgctacaaaggatttactaataagcttgcttaggaaatattaagttacacaaagtggaatttagctaaaggagtgcctccaatatgactataagttaagagctatactcaccagacttgttagaaactgtaggaatgaaaaacttgtactataatggaagtttagggatgtgaagaaagtttctccagggcttggagagatggctcagtggttaagagcactgactactcttccagaggtcctgagttcaattcccaggaaccacacggtggctcacaaccatctgtaacgggatctgctgacctcttctggtgtgtcagaagacagagcacttatatacataaaataaatacattttaaaaagttta

SEQ ID NO: 18470 - DNA, 1212 bp, Mus musculus
ccagatgtcactatggtcagttggtttccttgatcattatctttttttgtgtgtgtgagacagggtttttcactaaaccagaaactcatgtgactttggctcgacagctggctggcaagctctgggaacttcctattcccttccgtgcccccacctgggattacagacgtgccctggcttttgtctgcgtgactactgagaatccatgctcaggtccacgtgctggttcagcagatatgtgactgagccgtcttcccagaacgcccccctttttggttagcaaaggatgaagttatagttgtaacatacatagatgagtgtaggattgaacatagttcctgaagggcttttgcttttcttagcaaataaaatcagacacatgaagcatgggacacaatagttaaatgttcttatcaatgaaaattgaaacaagtattctaactgctaggatagaaaaatagaagatagtttaactggttttagtaacacaacatacagtccatatatttggtaaagtcattatataagtatataaatgaattatactgcctttaaaacgtatattaagatacttacctggcaggggagataccatgatcacgaaggtggttttcccagggtgaggctcacccattgcacttgggatgtgctgacccctgcaatttccccaaacgcgggggaaactcgattgcataatttgtggtaatgggggagctgcgtttgcgcgctccccttgggaaaaaaagtatattaagggggttggagagatggctcagccgttaggaacactgactgttcttccataggtcctgggttcaagtcccagcaaccacatggtaacttataaccacctgtaaagtgatcagatgccctcttctggtgtgtctgaggacagctacaatgtacttatatacataaaataaataaataacttaaaaaaaagtatattaagatgaacaagacacgaaaatagacaagttcccaatgacgacatgagaaaggaaatgtttttttcccatgtcgtttgataaaggaaagttaccgttttaggcactactcatgtttattaaggcaactttaaggactgaggaatgtgaactctgggctggggctgtaagctcagtggataacagacgtttgtaaggcttggtctactcttatcaaccactggatgcttgtcacagaagctatgataacgtaccccatccctcg

SEQ ID NO: 18471 - DNA, 1167 bp, Mus musculus
atgggaaattcaagaccagggtactggtgcctatgtaagggctgctgtctgcttccaatgtggcgtcttgtcttcatgaggtggaagacagaagggcaagagagaccaggcttttctgagtggccttctgaaggttcagccttgtaagatcaaggcagtgatgatcaagcttcaacatgagttttggaggggacacattcaaaccattgtgattgttgaatctaagaataaaaaaaaaatattttctttctttagatagtaaacctcttagtggttacctatatttcagaattctagtctaccgttctttcagggaaagaaactttaaaaataataaaagttcaggctgtgagtgtaccttgtttgatagggtgttcacttagcttgtgtgaagctcaggagtggatcttcagcacaacataaatagggcatggagtgatagcagtagaactaaagaagaaactggtacctctgctctcaaatcggttagtaatgcattgctactgagcatgaaggccatttcaagtgtgtgaatcctttagcataaatcttacatcactgagaagagatgatgtggtagatagtatatggttagatttccccttgcgctgacttctcgctaattacatactttgctttctatcataaaaagtacacaaaacccaatggaggagaccctgtcattgaaggttgagacaatggaaatttcactgttatttgaaaagcaatgagtagatactgtatcatgcgtggagttgcctcaaaccttggaaaagaaaatgaatccttcagatggcctcatagcttcacactgagttttcaattcccaaataatccaaaaaagcatcaacaactatggagttgttttcccttcagtctgtctccttcctgtccccgtccttaaactcaatgactttccatttgaagatccagttgcactatttttttttcttgttgattaaaaatgtctgtcctgggtttgaattttctggataaactctagtgttcaatagagcattgctctctgtggttactaatcttggttgtcaacttgattggattgtgaaggtcagtagaacccacttgctggaattcacagagagtctgatgatataatgagggaaaaggaaggaggggagactgacttggaagaagctgataccgtgg

SEQ ID NO: 18472 - DNA, 1185 bp, Mus musculus
tgacatcacctccaggcgccgataaggactgatgggctctgagccatcaggccctctctcccccaggacttcagcaggacaccgccctcccaagccctctgtgctggcaacacccaagacaacaggatgaggatgaaggttggtagcaagtctggagtgagcgtggagcgaaaggcgatgtttcctttgtttgccataggaaagaaaggtacagacaccaacatgtggaaggaggaaatgatgggaagccccgtgggactgagaaagcactttgaggaaccttgaagaactctgtacataggaccgctagcaaagagactcttaccttgcggctgtgggaaaggggagggtgacatgggattaccatggagaacgaaacaccaacaagatgacccagaatgatggattaagtgccttgcaaatctttatgattatccaaacattgtgtccgtactttcttgtgtccagatggtgctagtcaagaagaaatcaacaaaacagaaaactcaacccagtttttgaaatgtattgacggcttgttttctcttggtatttttctcttgtttctgatttgctgtttgtttctaagaagttgtgtttgtagtgatgtctcctaatcggtattgcagctgaataaatgttaactgtctttcatggctcttctggtaaggccactcagaccgtggaaaccgcgttggcatgagccggtgtgtttcccagggaggtttggaaggacaggtgatgggagagactatcttccaaagcggcaggtcagctggcagacccagggttgggcatggaataggtacacatgagctttagtgacaaggagagatgtctttaaggggaagagagatgtgagcccctgtccctgtttgtttcatgggcttgtggctctcaacacaagctcatgttcctttctagcccaaagactggctggaaagcttgggcaaccgcagccgagtcccatttctttgtttactgtggcatcactgatgcaaagtggggctgtctacatttcgactctctgggctcacacgggcttggggttgcatcgttttctgccatccagtgtcctgtccagtagcaagaggccaactctcccctgtcctaaagcctccatggcttgtccctgccaccttagtatcctaagaaagagagagaaaccccatccctaaattccag

SEQ ID NO: 18473 - DNA, 1142 bp, Mus musculus
ttgctctgaatctcagcaggcagccaaagggactgagacaaagctcttcctttcaagttggcatggcaatcaacttggaaatcaggttccccgggcctttgccttcctaacaaaggatccagcctcctccaactgggtctccactcagcccctgtagaaaagtgctgacagtattaagttctactcttccctaagaccccaggaggtcctcaccgtgcatagatgtgccatctgttcttgagaaaccaaagcactttagtgagtcttacaacccataatacttacagtatttgccctctgaaaggtggaaggggcttgggctaggtctcatttgagaggcaactagagctaggaggaaaagcctggagctagacagcagggagctaagccacatctgcaccaccacaagctatgaacctcgggtaggttgctgaattttgctgccccccccccctagacagttgtggggaggtcctaacagctaccctcctgggatggcagaaaaggaagggaataatataactggtgggacacgctttgaagaaatcagaagctctctccagaggggagggaggatcatgtatagatgaagaagttgacatccgtactcactgcctggccaggttcacagtctcacagcagaactgggacatgagccccgccacctggagtgtccctgatagagcacctttcacccagagtgtgtacatgaacacaggctgcttctctgtgccagtgtgtgcacatatgtgggtgtgtctgtatggggggtgtgtgcagcacagatgaacgtaggacagaaactccgagtcctaattcctttctaacagtcgacctgtctgtggcctgggacacacaaccaactcttctggacctcagattttctaagtcataaaacaaggacattgtggcatgggatctttgtggttcttccaactttggtgacgagagcccctaacgggtgatgtatgtatgtatatatcgatatgcttatctgtagaaacgggcccattgggaaattggagacgaggcctgcccgagtgcattgacttgtaacagaatcggcaacttcacaagtccgtaagccttcattttaaaagtcgatgggatggtgtcatttactgtcattgtttcaaattcac

SEQ ID NO: 18474 - DNA, 2037 bp, Mus musculus
cccctaggcagtgctgtctctgctagccacagtagcttatagtgggcatctgaaggccgtttcacaatgaggaaagaagtctgacgtcaggtgcactagaaccccaccccagatttgctaagtaactctgagaggaccttgacctcagccttttgaaaggccagttctatccaattcaacagatatctattaaatgattctgatgttttcaggaaacgtgcacacaaaggccaaataaaacttgcatgacctaccaagtgtatactgagagaacttgcatccattagcttatgctgtatgacaaacagccccagaacataacttggtttagctcatagtgctgtaggtcagcactttgagctggacatttctggtttgttccgggacttattggttgtgaatcgttgctgttattggtaggtcacttgcagaatcagagtgactaaatgatacagcaccttaagttggctaaccagttatgtccacaggccaggagagttccaggatcagtaagtcaatcaactcccagccaaccagtgcttttcaagcctgcttctatcacattggctttagtccgataggtcaatgcccaccccaaggcatggatatgtgttcccatctctgtagaaacagctacagtccctcagcaggggcatagccacaggagtggggaatggtgccatctgggcccttcaccatagcagccctgaaactatctatatgctatggaacacttaacaaatatgatgaaatatacactctgtacttccggtaatagactagaataatttgccattctaatccagattcttagaacactccagggcccatcggtgaattctctgacattctcatcaaatgaaaaacaaacttcctacattctggaaagatgggggtgggggatggaaccaagagatgaggaccaagagaaagctgtattgtttgtccccctttaactcactggggaaatgaaagaccccaagagaaagtcagggagtaacttccatggcccatgggcagagttcgtagataggatgccgtgcttgccagctttctgaatgaaatttatcagtcactgatgatcctggattaagagatttgtcttcacgcctcctagagaaaatctgatgggctttgaaatccctctctgccaacttacagtgtgtgaggatgaaggcaccctgcgtggacccagttttaatacaaagcaaacatttaagcaaaggtaaatatttacccaataaaattacagcaaaataattttggcaaagagggaaacggtcagagaacacaatttaaaatccgtgtcgccagtgactgaggattgattgcggccccagcctctacgaagccttcccattaatccatggtcattgtagcggcaggcttttctcacgtcagtaacttgacgccattagccgctcctctgggatgagaacacatttgaactgaaaatgaacacgccgggcataatttatagccgtgccacatgaatgccaagagtgtgaggaggaagctgcttgggaatccactcatggtggctacccagacctgacttcctctaagcaagagccagacggctgcaaaccacaggcccccagttagacttggctgcagggagggagggaaattgcatacaggagccagatgtcttgaaaattccctcctagtccagccagtcaggagtggaggcaaggctcccatagcagagcccaccggggttcatcagagagagggttctggaccttgtgaaaaccgtgaaatcttcatgtcaagcagtcacggaaggaagcccctttcctctgaggtctgatgggagaacacccgaatccaagccagaagcctccctaagactgggatcagagtgaggatgctctcggcgtgttcaccactaatccaaagctctgaaagagcagccgaagcatctctcctgcccctacatttactattcaaatttgctttcaattggcatagaaagtgtgcccctgcctatggacctaacctgctattccagagggaccagcttcccagtcccag

SEQ ID NO: 18475 - DNA, 1216 bp, Mus musculus
gtttctttgttagatttttatccttacagaattcatcagaaaaaaataggaaaaaaaaaaaaacctttagtttgcttcaaaattcaggaaaaaaattacttcattcgaatgttagcaaatttgatttgcttggtctgactttttgttggtggtttgctttccctgctgttctgaatataaaatacatttaaaaatgtgaattctgtaatcatatccctcaaattcacagccatttgagaatgtttaaaatctcaaggaccagccacagagcctttagcctcgtatttttatcatccatgttatatatgggtctgccctcttgcaggcactacactcttgcagcttaatacaaaccagatgcctgtaaagcaatataaccagaatttgtttaaagtgtgtctgtgcaccggtttactttcagatttgaagctgtggttttatcagactttgaaggggggccggggtggggggcgataatgccacgctgcctagctttcactaagaattgtttggagcagcagaggcgcttgcgaggactgcgtaccttttcctattctcttcccttctgtaaatctgacagagagatttgccatctcagccttttctgtagaaactctctaacaagtcggcattcatttgtagtcatggtctgtctcaaacatggttgtgtctcctttcctctcaatgggctttctatatttcttcctaaatttatatctctggccctacctgctctccaaattccatttgttcgttcctagtctggcttggaagtggcccagggccatttgaaattcaccctaacaaaacaaaggggcacattcctcctcaacacacacacatacacacacacacacacacacacacacacacacacacacacacacacacacatatacacacacatacacacacttacttggtgccagacttgtcccttttgccttcttcctcctcccaataaatgacagcagtggtcagccacttagaagccaaacaccaagtttatccacgactcctccgttccccatctgcagctccccagtgaaggctgtggcagaggtgccagctcctcccactcctgtcaccagtgtccaagccaatgcgtgcattatgaagtgacctctgacctgtgtgctacacacgcatgctcaccattgaacaaacagctcgttctgtgcatagcagtcagagaaatcccttgggaacagaaatc

SEQ ID NO: 18476 - DNA, 1134 bp, Mus musculus
gtgttaatcccgtttaagagcagagggatcaggacacaggcctttaggacaacccactggctcattacctagtgtcttgcagagttaataaatgctctctgaatggagaaataagcaaaattagtgatcaagtcaggctttaaaatcagatcttatagcctcagacccagctttttttttttttttttttttttttttttacctcattgcttctctataagagatttgggtgaacctaaaagacccgttgtgctctttactgttccctgtacagtttgcttgactttgaagaccatgttagcttcattgactccttcattctgtgctttagcctgtaactgctaactctctccttcgcgtccctcctattttcccacagctacagcttccttgttaaatctattacttctggagtcccagcttcctgggtataaatctgcgatttggtctgtgatctggatgaatgacttaaccactgcatctctcagaatcactagccttaagccgaagatactagtattactgaccacaagagcttcttacgaaattgatgccagtagacatgtacctaaaataggtctttgtcattgtgatggctggttttatgtcaacttgacacaagctatggtcgttagagaagagggagactcaattgagacaatgcctccataatatcagactgcatagggcattttcttaattagtgattgatgggggtgggcccaacccattgagggtggtgccatcctggggctggtggtcctgattctataagaaagcaggctgagcaagcctgtaaacagctcccctccatggcttctgcatcagctcctgcctccaagttcctgccctgcttgagttcctgttctgacttccttcattgaagaacagtgatgaggaactgtaagccacataaaccctttcctccccaatttgcttttgttcacagtgtttcatcacagcaacataactctcactaagacaactacttatttattctttgagactttgagacaaaaatatattcatacaatatactttggttttgtttttttcttcccccaacttttctcagcccccccccctccacttccctacctactcaacttaaagttctttttctcttagaaaaaa

SEQ ID NO: 18477 - DNA, 1242 bp, Mus musculus
ttatgggagaaaggcgggtctttctcggtctctctctctctctctctctctctctctctctctctctctctctcacacacacacacacacacacacacacactcataaactatgtaacatctttgtatgccaggcctccaccacacatcctttcacctgtgcagtcagtgttcattgttttctgtttgagaaggactagcagtaagtaaacgggccattagggtgtattgttttgtttccttgtaatatcctttcgactctgcctcctccttttgtcctccagcctggcctggtgactgctggctttcagcatgctggaggactggaactccccaaggctgcattcatctcctcgagttcacattatcttgtctttgcttccgtggcagcctctgtatggagatggagtgctgtctcctgtagatgagcaaaccagagcttaaggaagttgtctaaatcttgacagggagtgagctgaggaattaggattgcaaatcaagtccaggtcgtgatgatgaaattgctccaccatatgccgaccgcttctcagcctccagagctgttttggttaccgtaaggaaaagctgtgctgtgtatcttggttcttggggcaatgagaatagtttatggtctttctgttggactatcagttgacaaaaagataggaggagtttatatttgttaaacatctccctcttttttcctcccctccccgccccccagccctccctttcttttccttttctgacagggttttactatacagcccagactagcctcaaaccctgagttctcctgtctcagtttcctgagtgctaggctagggttgcagttatacccccaacacgcctggcctttatttatgttgctgtggcttctatttattaaataaatgatattatcgcttttgttttgtttctggtagcacctgtaccgcgtgggcctcccagggaaacagtatttcctttcactgtatcttatggtcccccctccccccacacacacacacagatccacacatcttaccagttggcccatccacagctcaaccaggcctcaaccttacatagccttcagggtgacctctgattctcagggctcctgagagcagagcatcccacagcatgaggaagcccgagagcccgaatgcgttactttgtttaaattcttgccttgaagttcctttagtgaaggagccagattggcaatcctacgagaaacagttgtgtttcttagttacgc

SEQ ID NO: 18478 - DNA, 1179 bp, Mus musculus
gctacagtttacttacatataataaataaatcttaaaaaaaaaaaaacacttaaaaaaaaaaaaaaaaaagaagtcaactcacttcctcattcagaggtttttattctagtggtatggcctatttttgccttcatgaagaaaaagagaaaagagacttttagtataagtaccccaagtgtctccttttgcacaggcataacactactgagtgatagcctctcggccaagtccactctaaatttcatggcaaataaatagaagtggtcgcatgaagccacagtatctgcctttttgtctggttgtacgtgttctgttaaacagtttttcctactttggagctgatgtgaatcacctcatacacatttgatttccaaagcgtacatcagcacgtaatttttagctggtatgtatgtccatggctcatggctcccagcatcccacccctgtatcttgttacagctatttctgtctcttgtgtcaccgttgagagtttgagggcatttaaaatgtttatttataatgaaggtgagcacccccatgcagtggagattcaaataggaatgaaggagaaagaaatgggtgctgaatggacatcagctagagctcactgggctgtttgccctttcagcaacacttagagtccttcccggatgttgcttatctggtttagcaagtaacaggacagtgcagtgggtctcaagtggctggggctggggtaactgaacaattatgtccaagtgtaggtccaaccctctttctacagcatgggaaaaactagggtgaaaacctttgtcctaagtatgatgcctgaaggaggaatgaccatgtccgccactgaggaatcagtgggaggagcccaaagaattattagatgataaaacaggaaccatctgccccttttcttttcccttgtttgattttgttaatctccaagtgatcaagaaagatgttctgctatttgagcaatgccatgccatttttaaccatttagcaaaaatggtagttgagatatgattagggggaagtaaaactttgtgaagtgttcgctcatgaaagctgtgtagaattcttaaatcagtggttcaaaataggacacttacattccacagagcttgtcaagtcctgcacagttcaaagcaacgtttctttaaactttttttttttaaacaatgtatctg

SEQ ID NO: 18479 - DNA, 1132 bp, Mus musculus
aaccctctttgctgtgttgtgatgtttctggttttggtgacaccccaagatggcattcctgatctcagaatggtgccgttcattgtccatttaatgatcagtttccaaaacatgttctcttttacttcctacaaaaatcattttgtggtcaccccatgatcgaacaagcctttatcgttgtattgaaaagacctggcattagtttcctttgattgcaggacataagagaaaaatggtccacattgagaaataaatacaccgaccaaacaaaagagcttgcttctatctgtggtgacagacatattttgatgagtttagattcctttcattttccagagtataattaaaatagcaacaattataaaagcagcttttcttgccgaaattggaagaatttcaaaattaaaaaaaaaaaagtaaagatccccaaataaaacagtgcaaaaaaaaaaaaagcacaagggagaggcagactcagtttgcagacgttgtctggtttcaaaatagtcctgtgttgtggcacagttagtgagcgtatcaaaaaataatcacaaggtaagataaatcatctattaggataatgtcctagaaaagattgctttgtagtgttacaagcattgcaagaatactcaataaagggaccagcatttgcaaccatagcatggtgttctgtcttgaaagctctcgttttcagttaggacccagccctctcagagcaggaccttctcttcctccttttggtggcttcactgaagcagtgaggttagggaaggccatccttcatcttcctgactttagtcaacactcagtaaatatttacttagcgtgtatcctaagtcaggcacatggctccacgcaggaggtgctgactggtgtaataggtggccctgcccttttagacctcacgatgtagcaggagagtccactgtgtaaataaccaaccccagtacattctccactggttatgtacagactgtactggaggcaggtgggaagagtggtgggttgggggtgggggtggcacggatacaagcttgctggcctgtgatgcagtatttataaatcaaactaatgaccatctaagcaaggtcattaggaatcaggaactgtgtcaagtacaaagggtgcagag

SEQ ID NO: 18480 - DNA, 1105 bp, Mus musculus
tggtttctgatacaggaagcctccctcagaaagtgcactgcagaagcttctctctcccatggtgcttttctgccaaagggctgagcagtgctaccctggagagcagaggctggacctgggtcctgccccctgcactccttcaccacaccttatgtggggcccataggttaaacctcatgaacagcgacttccagcaaagctcaccctgtcctcctggtgtgagcaattccaggatgagggataactacatgcttgtaggaagtggtccttgatggatgactcttaaccctcttgttcccagagcaaacgggagagattccatgcctccagagagtcctatgatgccagtgttctggtctcagccagctttctttatccctggctagaaaagaatctcgaaactagaaaggggacatttccaggtttggtgttagcagtgtaacccgtacaacaccttatattcagaaagcatttactgagtatggccatgccctgggctttgttgcagtctctgctaatgtggtattaaatagcacaggagccttgatctcatgcaagagaggtctgtagtggtcattgtgatagaatgagcacattctagtgataactatacatctatgtgttctgggaacacacagggagtacatttctaacacgcgtgtccaggctgtgtcaagataatcctagatttacatttcagaagcagacagacagaggcaccgaggaagtcagatgagatacttccccgtgccccatggtaaaggtgggccctttccagttcctggagcatagaatgtatcgagcttccttttacttgggaagctaaagcagctttgcttgtggggcttcttggtggctgtggtataaagtatagactttattatgtagtccacaaagggcagcttatagcttctaagcagatgaataaatgaacatgctgatttggaaagatagttctggtaatagcatgaaagatggattagagagtttgggagagaaaaaggagcctaactatgaaactcacagagtagttcaggcaggggaaatgaaatgcaaaattggactcttataaaaaggctggacccatctgcaagccagggaggag

SEQ ID NO: 18481 - DNA, 1155 bp, Mus musculus
gtcctttggcagtgcagccttaccttagttcatttcttcactgtttcctgctctccttcttgcacgtgtttgtggctgcctttgttattttctcttccttctgcttcgtgtggagttattttgcgttgcttctctaggttttgaggtaagggcttggattgttgatttgaagtcgtctttttttttttttcttccactttttattttcttttgaaatgtttatatttattttagtgccagagcgaatgtgcagaggacttttgggagttggttctctctctgcaccatgttgtcgttcccgtgcagctgtttacctggttactacagcctctcctctccctcctcctcctccccctccttttcttcatctagaaagataaatttataatatttcattctcccctgctcctcttactttccagagtgttctgtttaaagcaagtgactctgtttgtagttttgggacaggtttttagatttcccgtgtccatctttggttgaaagcatttgtgtaatgtcagcctcaacattcttgtcagataacggcagcacttgatttacctgagcttggtttatgtcagttacctcgtctgggttaagttgacattcccttggattttagcacgagcgttttcagctgtctccgggccattgaagatattatgagatgttggacattacatccacacactgttagtggacttcctcggacactgccagtggagaaggaagggagccacttgttgccaacctggacgtaggtagaattcaagctctgtgctgtctttgaggggccacccgtccactttctggcggggtgcagttcaggctccctttgggctctgctgatgttctgcacgtgaggaggtaaggaggcctcgttaccatttctacattgcttccatttctacatggctatcaggtggagtgtgtgatgtgttactggtagagcagagcctttaccgcattgctgtatggtggggatggaggtccagtctccccatgtggtcctcgctgttactagagagagggcaattgtctttatcagtcagcctgtgattcctatttgggctcccttttgtgactttattatacaaccctggctcccaacactgctttagtctttgctgacacaggtaggaaggggcctgtaga

SEQ ID NO: 18482 - DNA, 1214 bp, Mus musculus
agaaatcttcaatccattgggaatttgcttgagagatttttccttacgaagctcatctttcatttgaaccatgggtccagatctgtaaactcgggagcagaagcttctggtgctgggattcttgagaaattcaaagcctcacgatgcattgcctggcttgaaggttttcaactctgctagggataaatagaattatgctagtctctggggtgtctaacaagaacagcagaataccgaaaacagagcaagaatccccaaagcaaagacaacccaagagggccagtgaaaggacactaaagctgccattgaggcaggggagaggagggatttctttagtgctactgggtgaccctttcatggataaagagggctcctagtattacaaaaaaagaaagaaagagagaaggaaagagagaaagaaagagagaaagagagaaaacaaaaaaacaataaaaaacatcctttgcatctgacagcaaacatgattaaaaagagcaacttgagaagagatctgtgttagcttgtttccttgatctacatacaatgtctgacagaatggcagcctggctttgaaagcctgacttcatgagaaaatgtaattgttgtagtctctctctctctctctctctctctctctctctctctctcacacacacacacacacacacacacacacacacacacacacgtgtttgtgtagccagatgtcatatgcacctgtgggcacatgtgcatgactctggaggccacaccttgatgtctggtgttttcctcactcgctcctcaccttagtttttgagagagtttcttactaacttggagctcatccatttggctagtcaactggccagtgaactatagtgatctggtcacctctgtcctctgtccctattctgggcttatagaaacagggctgcacccagcttcttatgtatatactgggggtccaaacagacatcctctttcttgctgcaaggcgcataactgataaagtatctcctaggcccttgctgtagcttcctaaccaggtagagtgttatgatgaagaacatgggctctgggacaagagggtagtctgtcccttgtctgtccctgggcaagttacttacctttgtgccttgattatcttgtctgtaaactgtgtactcaaaggtacatgaaggaaccttccaggcaaggctccagcataagttgaggacaggcaaaaaaatgta

SEQ ID NO: 18483 - DNA, 1204 bp, Mus musculus
gtggcactgtggtggagtgcacgcttatattctgagccctgcgtttgagctcccacactacagacaataaacacatcaacagttacaaacagagttgaatactggtgcttcagtggaaaatgtaagcgaagaaaagagcagtatgtgttgagcatctgagctgccttctgggcatctctccagtggatgtaccatcacacccggcagtttgtgaccagcagatccatttggtggagtggatcccacctggttaggaatctgttctctcatgttccaggctgtggtcctaggggcagggccagcacacgctcagtgagtgaggacaccgttcccctcagtagcccacgtgtggtccgtgcactcgatatgaccacagcctagccagctctctggagatgacttggcctcagatgtgagactgggcagcatggtggcctcacctttctgtcactcaccagctgcacacagattctaaaggaatttctgaaccttttctgtgtgagaatagccatacttgtaagaaccatgcacggcttagaggacccgagtttgagtaccattcttacccttacgtggtgaggatctatggccggaatctgctgctctcctggagttaccgtctaacagcgccgcttttacaagaggggagctctgtgacgtggccagtgctgtactgatgtgaaatgagtcttgactggacagaaagttacaaacttaataataatgtgaaattctactttctagcaagtcaccttgctattctttagtttcagagcaattataaaattgtgaacgatttggagtaggaggaaggggtctggttaactcagccaggcacgattttctccttataagtgtctctggcctgtctagtagtccggtatgttgtggacactgctcattgtctttgaactttttatcctttggtgtgtgggataggaggagagtggaggtggagatgggggagcagcggaggcatttgcttctctttctagctcctgggtcaggtcactccttacagccacctgctactctgccaagggatctaatcccctcttctggcttctgtagacaagtgcatgcacacacacgtgcacacacacgcacaacaacaacagcaataataacaacaacaacattttttttcctcagaagaaagcaggtcttaaggctgctggctcttgtcacggacacactggtcatg

SEQ ID NO: 18484 - DNA, 1140 bp, Mus musculus
gtattgtgattgcattgctctttaaaagtgcacacgggttggagggaaagcccagcagtcttacaggagcctgcatttgtctcccagcaccctaacagtagctcacaagtgactatagatctagttccaggggatacccttttctggcccccgtgtactgcatacatatatacagtcaaaatacatataggaaataaaaacaaataaatctttttttatagttgcaatacatctctgagcctgagttgtctacttcagggatcaggtgtgggtgtgcctgtgtgtgtatgtttttgtttgtgtgtgcttgtatgtgtgtttgtatgtgtgtttgtatgtgtgtgtttgtgtatgtgtttgtatatgtgtgcttgtgtgtttgtctgtgtgtgtatgtatatgtgtgtgtgttcctatgtgtgtgtgtttgtatatgtttgtgtgtgtgtatgtgtgtgtgttcctatgtgtgtgtgtttgtatatgtttgtgtgtgtatgagagtgtgcttgtcactcctctctcatattatcagcaccatccactcaggctgatggatatggaagcacactcggattgtgctgagggaatgcatttgttagtctctatgagtgtttgttttttcaggttgctgtgttctgcctctaggctctgaaccttggtttctatgtcaacagataggattcttgtggagtgtttgtaagacagctagctggctgtcaaggatacttgttgtccagaatggcttgcattcctgaggctgcacatggatttaacatctcacatgataccacgataagaaactagtttgtttgtttgtttgtttccttctttctttcttttgaaaagagaagggaatgagaggccaaagtttcatctctgatgacattagcaaaagtcacagacactctgtggacttctgtgtcaggtatagtgaagtgacagttcctctctcatgtgtttattggagcactgaattgaatctatgtacaagcacagtgcctagtacagttcctgggggtaagctgcttacccctaactaaccctttctcctctgtgcagcgagtatctgtgtccctgtctgctcagcatccatgcctctctcctccaggaccagcctctgggctttgggtggcttca

SEQ ID NO: 18485 - DNA, 1176 bp, Mus musculus
gcagattgaaaataatttttttttacgtcatgcgtgtccaagcccccttttgtagtcagtatggcataacttttgtttacacatcatttgcattgtacgtgaagcaggggttgagtgtgcatgggaggatgtgtgtaaggttgtctagaaatactctgctatttatctaggatactgagcatcgtgacatcttgctgtctatgtcagcttcttggattccaagggctgattgcgttaccagcgtgtcctgggcattggtgtgtgctcttctgtcggggttaagcctctctacaccgctctgatgttgactttattattatctcctctggaaagataaattaacatagtggatgagaactgaaatactttgtgcgttgtcaccagacctttgcagctgcaagctggtaaatccgcctctctctctaacgtccatatttcccttgggtagaagaagcacacgcgcgcatacacctgcaaacctcgccaatctgagaactctgcacagcttcaagatataaatgaccagtgcagttcagcaggacattactgagccacgatggcgttttcctcccagggaaggtaaagctgtggctgtcctactgaatctgccagttccctcttcccaggcatcccgttctctcttctcaggcatcccgttctctcttcccaggcatcccgttctctcttcccaggcatcctgttctctccctgcgcaaactatgcttgtaggttcacactttcacttttaactttaaaaaccaagcccttgttgctgggttggagtttggcctgtcaggtcattattagttaaacttgtgtaaaataacaaaattcccatcatgtcagatttcggtgtttctttggacttgaaaggatccccacatcgcacctgtgtttctcgctcccgtcccacttactggctttgattcctctctacaaatgctcgttgttctcattggctgtgtttccataaaataaaggccaacccacaggctgtttatcttagcagcctgaggcttgcctctcctgccctggtacgcttcttcttcctgccttgtttccagaggcaccctgtccatccccaaccctgtccatccccaaccctgtctcccacgatggccattagaagctcattctttctgtcactctccttccttccctttttggaacttcctt

SEQ ID NO: 18486 - DNA, 1184 bp, Mus musculus
tatagaattctcagaggaacgttgtaaatcattttttaagcatttctcttttttgtttttgttttgttttgtttgttttgtttcgagacagggtttctctgtatagccctggctgtcctggaactcactttgtagacctggctggcctcgaactcagaaatccgcctgcctctgcctccattttttaaaattctatttacaaatgaaatagaaactgagaaatccaggtatttgctcaaaacaatgtaccactaataaggcacagtggtccaaaccccaagtttgatttctgaatttggcttcttattacattaagtacttctctatgacagactcgataatacaaaccaataatctgtgcttgtctaaaatggagaatcagatgaatgtgagcacaatacctattcatactctaatcccagtatgatttagtataagtgggaattaacattaacaatgtgttgttttggtcggcttttattttctgagtcgaatttgcgctatgatgctgtggcagtttttctctccagctgggaaggttttgattgtctgttgagctcctcctggctgtgtttgggtttctctgagttttactttaacacccttccgattgttggcaaatattcatcatgcagcagacctgcccatccgttctgctgccaacccagacatcacaacaggcacaacagcagagcagcctctgttgtgaatggtgagacaggggagtcgtggaaaagagaaggcagatgtggagataggtacaggctgaacttgtcaagcaaaatcctctgaagcctaggactttctgagtgctcagagaatcaaagattcctattttgaagtatttcagatgtctgtctgtctttctgcctattttgatgtaaggattttctatatagcccaggctggcctcaaacttgtggcagtgtttttatctcagctgtggcattttaagtgtatcaccacatttggtcccaagatgtcagatttttggattgattatatattcaacttgcaaagtcaggacacaaaaatctccaaatctgaaaaattcccaaatatgagagcattctagcctcaagcatttcagattagagatagttactctatatgggaatccgcttggggatgttcagagttcagtacaaggaaagctgaagacatttatgccagacattgtgttt

SEQ ID NO: 18487 - DNA, 1139 bp, Mus musculus
agataagagagaaggagagaagagtggctgccggcagattccatcaagggcttccctcagtcaggcttcttggtgggtttgctcagaagggaatgagacgtgtgtgaagacgagacgcattagtcagcggtgccgaaaaggcagagcagtgccgaaaaggcagactactacccagagatgagcacacacggagatgtccgtcccggttgcagagttaaagaaaaccgaaacttcagcaatttgagtatcattgaggtatcatttgtctacgcattcagaatttttcaggactaacggggaggatcaacttctgatagtaatgaagctttctcccctatgtaaaaccgttgaacctgtgtattcaaaaaagatttgggcgtttgtagtaggcaacagacaacactgggaagctctacagtggcagtattcagagtgcttcctgtcctttctctgtgatgctggaatggacaaagcagaaagactgatgagttggctgtgcagaaggccggctctcaggctgggggccttatgtgctgcagcgcagtagaactgcatcgcccccgtcaaactgaattagtgcgctacatgtcacgggtggcggggaaaccgttttgccgttaataataccgtgttttgaaacaccacatgaagtgattatggtgtgtaccaatgatgccctcggttctctgttttgcatgcgtcacatcctatttataaggtaacgttttacaaaccagacggggcggggggaggggggaaaacggtcctgaagatgagggatcttcttcagtgtcaccagcaaaaggttcattctctccagtggcttgagtcagcatttcagaatataaaaattggaatgtgaagattagtctgggcatgctattgaagcggggccactcaggaaagtaaaaggtgcagcgggctgcatgcaggcgcacgtgggttccttaaagaatcaaatacaaagagggttgcgcttcctgatgctgttcccaggtgtaaggagatgataatgaaattctttaaaaaaaaaaccattcaaatcaaattagcagatactactttaataggattcctccctccctcccttctctccttcctttcttatttttttaaacatctgtatcaagcctggccct

SEQ ID NO: 18488 - DNA, 1195 bp, Mus musculus
gtgcaccctgtgcatgtctggtgccgtggatccccacagaactggagttactgccagttgtgagatgctgggtggatgctgggaattgaactcaggtcctctggaagaacagtcagtgctcctaactgctaagtcatctctccagcctccaaaaggaatactttatcttaagagtaatggcatgtagagatgatgaaacatggtaatgagcgtggtggtgttcttagaggcagtaagcatcccgaaaaggaagtccgggtggggcactctgaaaagtcacagacttaggtcgaatttgtggaactggtttgcactggattctgtgtcaccccctgtgccaccttaactctttctgttttatttcaggcacggatttctcagttggatcattttcatgatcttccatttcctacctcctctcagactcatccttagaaatactcaagtcccttaaaaataacagagattttcttggtctgcgtttcagaagtctctctaaattatgcgtgtgctgtgtcatcttgcagggccgtgggccactgtgtggtgggatgtgtgtaggggtacagtctgtgccactgccggctttgccctgtcttaaagcttccctggcctctctgagctcatttcccagttttccactgccgaagtggtaattcctcatctcagcaggccaggaagtgtgtctgtctccttgcaaaatgcttgacaggttgttggcatttaatagacattaatgtttctgtcttcatgtccttatacataaaatggattttacttataaagtatatgattggtatcttggcttataactattttcaacacggttgtgggtaaaaatgttttgaaaaatgttgactttcaagcagcgtgtctctaaggctgctcttgcctttcccttccccctcctttcccttctgttggaacacacgagggctctcacgggctgttcctagttgaattaactcactacattaattaaaaattaataattaattgcatttgctgtgttctgccatgtacctgtctgcatgtccctgaagcatgggagctctttggactgtttgctcatcttttatccgttcacccttcgttcttctctgtgagaaatttctccctcaagttctgcttcccttactgtgtcctctacaagtgggcatggctgcttctccctctgtctttgcttggaatggat

SEQ ID NO: 18489 - DNA, 1191 bp, Mus musculus
tttcagctgcttctccagcaccgtgtctgcctggacgctgccatgatgattagggagcaaacctctgacactgtaagccagtcccaattagatggtttctgttattagagttcccttcgccgtgatgtctcctcatggcaaggaaaccctaaaacagacatttaaagtatgaacacacatgagacttttatcaaaatttaaagatcaggaaagccagccagcatcacctggataccaaagccagacaagaccactacagggaaagaaaactatgacccatatcaccgtatgacataaatccccaacagggtactatgaagccagattcaacagcgtattagaaaggatttacatcgtattgaaataggatgcattcccggagtgcaaggctagttcagtatgtgaaaaccattgcagtgtgccacattaataaagtaaagggggaaaatcatgtggttatttgattccatgcagggaaagcatttgctaaaacttaacattttattagttagggatataaccttagtattaaaaaaacagccacgtgtgaaaagcccaggcattaaaacagaatactggaagactggagacttctggaacatgcctgtattccacttttgctcagcctaccaccagcacctgagccaggttacataaggacaagaaataaaaggtctacactggaaaagaagtagtaaaatgatctctgttcacgagctgtacaatcttctatgttgaaaatcccagctcatcatttaagaaatcatgaaagagtacaaatgtacttttagagactaaaagcacattggcgttttcagaggcttggagttaaaggggggaggagatgggagttattgtttaatgcatcaaagtccagcttatcaatactgaaatataaggagtgtcgagggttgttctgtgttgtgttttcattgacctgaagctatatgcttctaattattgaagcagtaactttatgttatgcatagcttaccacactaaacattttgaaaaaggtcaagtttcaacctagaaggactttggaagtatagctgatactttgaggaatgaagactttgatataaattcacagtattaagaataaaatttcagccaatagagtttgttgtctatattttaaatatccttaactttctgtgagtaaagcatgtgtctggcttattcagaatc

SEQ ID NO: 18490 - DNA, 1193 bp, Mus musculus
acacatatatacatacaaacatacaaacacacatgcatacatacacacatatatacatacaaacatacaaacactcatgcatacatacacacatatatacacacaaacatacaaacacacatgcatacatacatataaacacacatacacacacacatacatacttccttcattccccaaattagctgtgacatgggttgggtcagggtgactttctcgaactaaccaatgggaaaacagtactttgattgttcggcttgtactgcatgctcgtctaggggctcaatcccaatggctcacacatagattgtgagaatgatgcggtaaaggctcgtcacgtggtgcctgcctccaacggccttgttcactgcctgtctccttcttaagtttctcagatactgagcatccatagtacatgcatatgccacgttgctttcgatagggccacttatttattcatgtatttgtcaggaatttacttgttgccaatgatgttgcagacattgtgtaaaaggatatgaaagcagagataaaaattttttaaaaaagatatatcggatctcgcagggaattaagcagccaatgtgtgtgatttagtctttaagtggactataaagcttaggagatgtcaggcttgccatgagtacctttggcacgcaacaattattttgcacgaaatgggctcttgagatgttgaagtttgtacatgtatcttattaaaacacagtttactacttcacgcttgccacatagcacgtcttgcttagtgaccatttattcaaactgagaccgtagagcattcccgccctgtgttgttctctcttgtccgtctgcacaggaagtttcctgtctctgtgtcaggttcccctggagctcaggaattctagcactcacctttttctctgttgcctcacaggtccgttttggtttatcttggctcccgtacaagcactgtacagtgggcagtgaactgtcgaatctcttgaatgataaaaatgagttgtcaatatggaaaccggtttttggctcctgattttattttatgtgtacaaatgctttatctgcatgtatgtcagcacatacatatatactatgcctagtgctcacagaggccagaagatggcagcgccagatctcctgaaactggagtagaggtgggtgtgagcctgaggtgtgagccttcacaagagtgc

SEQ ID NO: 18491 - DNA, 1177 bp, Mus musculus
gcctggacaacttgtctcacttcagatttttcattccgaatttgtgagccccctccttccaaacagaagcatcctccacagagcagttaggggtgttgttatgttacccaaatcttgcttctttattctttcctgattttatacactaatggtggagttcattaaaatatctagtttttctagtatgcttaccttgttacaactttatctcctctcacaaattgattgatgagatattatttatagtgttatgaatttaatttgaggagggtgataggtggtctgttcgtacttcattgctctatataattaagctctctatttgtaacttactgctaaatcctcctttatccttcatttcataaagggtgtctttgatgctcttttgtaagaaattgtagcccattgctttccacctcactggctacaccttgacctaatgttcttatgtttgttcttttgcttacttctataccttcttaaaaatgtctattaacagggctggagatggctcaaagtgtgagagtgctcgctgccctaattacccagaaggctccagtaccttctagagagccgaggcctgtagcgattcaagtgctctctgcttaactccttctcattgtgatttcaagagactgaggtttacactatcctgtaaaagcctggactctttaatggtggcaataaatgtgggaggcttgaatatattccctgggtcagggaactgtccttgacagggtgaagcatttttgaactagtttgtaaagctgcacatgaatatgagggcacacaatcagaggtcatccaagcgacaaaacaagaaatggcacgtgcatgtgtgtgtgtgtgtgtgtgtgtgtgtagctaaatatcatgtgttcctttggcccctaaggtaatagccatctgacttggttcaacttcagccctgagtgataatgatcgcctgtagtagttgagtggatttttctacctcatcagtgctgttgaatttcataattagttaattacaaggatgcgatcagatttcagaaatccacttctgcttgccaaggtcttgctgctaaggccttgagggttttttattgtttgtctagatgaatcattttattaagaggtgaaagtagggcggggcttctgagttcagtggcatctgaacagatgtcccaggtagagc

SEQ ID NO: 18492 - DNA, 1222 bp, Mus musculus
tatattgattaaatatttatcattagggacattagagataaggccaaatacaacaggactcagactatttcaaattgtaagctgcctttagctggtgtgtactattagggatgggagtgctggtacacaggctacctcataattccagtaaagagcagacagaaagaaaaaatagttacataatcctttctttttaatactttctcttttttctttttaattctgctggagactgcattaaaaagaaagagtgatgctgatcttggtatatctgggcatcagggtagaactagaacgatcagttgatttgtgctagctgtttgtgctgctgtgctggtgttgggtgactcccgccctctgcgccgtctaatttgtaggcagacaattacctcttgctttgaaaggtcatgagtgtgcctgcctttgccatttgatggcttcaagttcacctccaacaaaattttagagcctttttcttgatgagctccgttggcttccgctacagcagcttgctatcacggagtaaggaaagcaattttttgaattaataaagtgatggattgtctaattacaaagctgatgtgcggtggccatattgtaactttgactgcattactagatgatcctagtgactgatcagttgggcctgggttccattaagggaaaatatgctattaaatatttaatactgagagtgagcagacgcgccaggactgctaacctccgggcaccggagtgcacgtacctatatgtttggcagcgactgcttgaagaggcactgtagtgtgctcagagcagctcctggaagtcttagttgtggggattaacttcttggttggtgtaagacaggcaaacagccaagactttaagtgaacaatgatcctggcattctaattacgagctggtgacaacagtcatgatttatatatatattttctttattataatagattgagtccccaagtagattcaggagacatttattctcaaagatgcacgtcagcccttcaaggaaagtgaagtttgtaggacacttgggctttgaaggcaaaacaaatcattgcttgcattttaatgatgatatttgtatattccgttctttactttgcatttggttaacattcctcttcatttatgtgtaaataacctgtgacagctgtgagatagatcatcgcagttaaagacccaatgccttctaacttctgaaggtgggaaggattat

SEQ ID NO: 18493 - DNA, 1236 bp, Mus musculus
gtaaagtgttacctggcctgcatgaggctctgggtatgatcccagcactgcacaacactgggcatatggcgccaacctgtagtcccgtgacttggaggtgagggcatctgaggctacatagccagttcaaagccagcctaggctgcatgatgccctgtctcaaaaacaaacaaatagacagacagacaggcactatgtaggaaatgatgaagtagggcttagcggttaggaacactgactgctcttccaaaagtcctgagttcaattcccagcgaccacatggtggctcacaaccatctgtagtggggtctgatgccctcttctggtgtgtctgatatctgtgtgatccagcatagggccaggctgacatgagcttggtgtattctgagccctgagatgggcaaggtcagtgctgggcaccctttctccatgcctgaggaagccctgataccagtctgcctggttagtctctgagcctgcctcccaggttctagtgttataaataagatcctgctacaaaactctgccccctctgtctctgtctctgtctctgtctctgtctctgtctttctctctgtttctatctctctctctctctgcctctgtctttctgtctgtctctctgtctgactgtctctgtccctttctgtctctgtctctctggcttttggctaacacatagcttctagcatagcccagatgtgggttctttgaatacaaaagccaacaaaaaacaagtcctatggggaggatatcattcatagcaaatggtgacggatttttgttttgtttttcaagatagggtttctctgtgtagccctggctgtcctggaattcactctgtagaccaagctgacctcgaactcagaaatctgcctgcctctgcctcccaagtactgggattaaaggcgtgcgccacccctgcctggtggtgacagatattttaatggaagcatttaatatttaatttaattattaattaattattaatatttaataattatggcagaagctgggaaggactacctccagctgttgtgatcaggtagagcagtgttttgccttccagtgggagcggctgaggggtattcagcccaggctcctaggagatgactggactgatgctcagccttgactgccctttacggaagtcaaacagctggctcggtcctaatacggtcttatttatctgaattagggaactaatttggtaggttttaaaagtgatggagatga

SEQ ID NO: 18494 - DNA, 1231 bp, Mus musculus
gggctgcagacctgcagcaccacgtggcttcataaagatttttgagtgagtgtgagatgtgcagaaggatctcaggttggtgcagatttgtaggaatgctgtgataaggatgatggcccgtattaaaggtgtataccaccacgcctggatctgggacttgctttgtcccaggctgattttaaattcagcttgcctcagtctcctgggattacaggcatgtactaccttacctgggcctaagcttttcatggccactgtgcctcaagatctccatgtcaagaccaggccagaaacttgtgtcttccaagcctcaagatctggatcacaggtgagccctccaactctggattatagttcattccagttatagtcaacttgacaaccaggaatagccatcacagtgtatatgcatgtgtgtgcaagtgccctcggagggctgaagacggcattgaataccctggaactggagtcataggttgtgagcctcctggcaggggtgtgggaactgaactcaggtctcctgccagagcctctagtgatcttcactgctggaccaatctctccaacccgctttgtctcttttgtaactgttgacgtatctgggcatccgttgccttgaactcaccttctcccctctctctgcctttctgccctgatgcttcctcctcctcactgcctctcctttgtcccccaggttccagccatggcctctgtctcctggccactgacagtgactcatttgctgtggattggagccactccggcaatgcttaggctacttattagatcaaaacctttgaaggtgggacccagacattgtaattttcagttaattgcctactcaatattttcttctcttattcagtttgtaaataaaagaatgagtttaactggacacattctaagttcacagcgtttcacttgggtgctgtccactccccagagtggtgtatgagcttctcctctgtctctttctctctccctccctctccctccactctgagcacatctgtgacacagtacacacgttgaggtcaaagacaacatctgagagtgtagttctccttcctctgatctggagctcgaacccaggatgtcagtgttacgccacaagctcctttacctgctcagccatctcgctggcctgtctccacccgattttatttactgagtttggaaatcgttttacttatttgtctatttatttgtttgcttatgtatgtgtgcatac

SEQ ID NO: 18495 - DNA, 1206 bp, Mus musculus
atcataaacaatgacaaattagtaatggaatgatcagagattgtcttttgaacccaggtgctctggaagggcagccagtgctcttaaccactgaaccatctcttcaacctgagatgttcttttttgtttgtttgtttttgtttttcgagacagaaatctgcctgcctctgcctcctgagtgctgggattaaaggcatgcaccaccacacctggctgagatgttctttttaaaaattttgctatatatatatatatatatatatatatatatatatatatattttatgaagtactggagttctgtacaaatattgtcttggagctgattttgagtcatacgttagaaagaatctcccattttccagaataaagtacacaatgagcctgacttttatcatttttctttcgagaaccatggtgattcaagaaccaaaaaaaaaaaaaaaaaaaaaattcttgaaaggttgttggggaactctcagctttgctttaagggtgggagaaacctggatgtgaagatgaacaggaaccaaatcagaactgccctgtagtggtcgggctgtagtctgggccgcatcctgttggtagcaccctggacgagggactctgctgtgctctttgggaagctaattgctctctttcttggattagccgagcacaggccactgcttaccttaactgacaggtgagaaaggattgttctttttggctaaaaggtaggaggcagccctcacctctcagggttataaacaaatgccaggaatccaaacaagtgcatccttcaggctggctaacagatacttgcttattcgttctttacacaaaacagttgatttgtgtttgctttgggttgtcacgctgtatgtatgctggaattcacttgcgttataatagcaagcccttcacagaacacactcgtttctatggttgtagggctctgagctgcctagttgagaatcattgcagcctgaaaactgtattagtgaaatgctggtacattcttaatgtggtttcccatcagtaatgatgtgcatcattgtggaatacattttcctgttcttcttcttgtacgtggagtttgtttgtttgtttattattcaccatcacttataaagtgagaagaaggtgttgtattgttgagtttttgtgttctaatgcagagcagacatagctctcattttgtaatatgagtgtctggcaggatta

SEQ ID NO: 18496 - DNA, 1209 bp, Mus musculus
gaaggtggaaaagttcacgactgccaaccggggaaacgggctgcgtgctgtggctccactgcgccccggggagctgctcttccgctccgaccccttggcttacactgtgtgcaaggggagtcgtggcgtagtctgtgatcgctgcctactggggtacgtacggaacctgagcccggggcgcgtggctctgcgggtgggggtgggcctcgagggcacagctctgtggggtgtctgcagcaccctaggctgcggtgggaattgggggaggcagtggtgcagatgaaggggaagcgtcgggcagataattttgctggggaacaaaaatattcaaagcctgtgcaacgagcttcattggttgtggaaatcagaagtggcaggggggtgtgagtctgggaaggagtaggggtgtgtacgtcaggatcagaactgaggccccacctgacctgtcttgcgggaggagcgagaagcctggtgtttatgttgtactttgctggtctggattttacgtggcttgggtttaggaagatgaatgagacatccctaaggactggagcaaatgagaattaaccgtgtaacaaaagagcaaaataagagatgcaaacagtctactctaggagcgtaggactcgcggtgtgctttgccctctagagattgtgcggacaaatgtaactcaccacctctgtgtagatgcaacagtttatgtgacagtgtttcgaagtctggaagcacggtgtcagcggagggtgctttactgtttatagagttgtgtaacatatacacttccgtccgcacacatcgggttcccaccatgcactgggataaggactctgaggtaggtaggttccagacccatccctctgtgtttggggtgggtagaggtggggagtctagctttactatacattccaggatactcccctcgctcccctctcctccctcctcagtccccgccccctcagacagggtttctctgtagctgctctgtagactaggctggccttctctgcgtcccaaagtcttgctgttaccaacgcccggcttccacaatattcttgtttagtttataactgaagacttcgctttgcattttaaagttagcaaataataatgttatctgttatcttctcaagtggtgatcgaaatgacatgcacacacctgcacgcgatttgttgctgaaagagcagcgggaagtttgtggggttaaagca

SEQ ID NO: 18497 - DNA, 1168 bp, Mus musculus
gcttgctgtgccagagtgttcttctgggtgacaggtcttagagaattcagaactaacaaattaatctgtgtgtcttagctgtcttagcttttttgtctgtacttctcttaaatcctgtgtgtgtgtgcctatgtgtgtgcctgtgtgtatgtgtacatatacaatacatatttttattatatatgttatatataatatactttttgtggtacagagaattgaacctaggacctcctcctgttaggtagaagggacccactggcatgttactgaatctaaagtaacaactggtgatgccataaaacatgagctccgaattgcatcttacatgtccgactttgaccataagacagacttttctaactgtccttcaaattcatgtggagtcacgtaaggattctagagattccaactctggtcctggtgcttgtgtgacaaccactttatccatcagccttgtctccagcccaagatatattcattaaaaaaaaatcccatgatcccctagtaaatttccccaactcgagaggttcaaaaacagcacataatatctaacatatagttctataggttaggagtctgcccttgctctctgggctaaagtgaggttgtcagtcaactacgttctttgtagatactcttaagggggtttctagactctagccagtctctctgtctttctagcttctagcccagtgtgtggctcccatcctccatctttgcagccagcaaagacttgtagagtcctcgcagatgctatttggactctgctgccttcctcttctgtatttaagggttctcgtggtcccacaaagcagaacctccttgttcaaagataactgatgagcagccttagatctgtctactgcctcagttcctctttgacatagataatgatatcattcatgtcattgggacataatcattttttggagcctttattctgcctaccccgaaaatatcttaactaaggcacaatggctttatataacagaaaaattctgtactttataagtactgccattacattaatttgtagacccatggagacctcttagtcagcaggtgtttattgagtgttatgtaccatctacccttcaactgctggggagcctgccttcctgttcctcgtgctcaggtgagtcagcgaaggagctaacaggcagtc

SEQ ID NO: 18498 - DNA, 1198 bp, Mus musculus
gccccgagttgagaactgacagacctgtgtcgatgaacttgacaggcccaaaggcacagggacagaactcccaggtcccaggtgagagttcactctggcttctatgctgcctcaagagatgagtgccgggctctgtgcgcagctcaagagaaacttactgagtgtctgttatgtcctgagagcctcaggagagcatcctgagtaaggagtggttgccactgtgcaggtgtttagggcaggtaaacccatactctgacgaatgaagcagactaccacgtgtatgcgtactctcaggccgtgcgcttaggtgtatggaatgtgttcctctcgtgggctcattctagaatgcttcatgggctcatgaagcagaaatccagtcataccctaaagagacaaatgtctagtgttgtttaattctgtcaccaggtggccattcctcatttgcggtacagtgatctaatgtttaggaggccttcctttgactttttatattcgaggcaacatctttttttaaaaatcatgaattatagttttttagcaagtgaccgttatgttctgttttcctgtcgggatcgtttggaaggaaggagaaaactggctttgcaggtgttactggctggcacagtaccttcctttgtgtctctgcttatttatttggagtgtgaacttaaggagcttttttatgaattgagcgtgcgctgctgagcctgcattccttcatcccaccgctgcctatttaattagatgcttagtgtttggattttataccatttcagctccgtgtatttttagacttattttgaaattgactttttattttcacttataatactgcgtggcttatctcttatgtcaccataaactgtaatattttcgatgggtatagatcagagttatttatttagaagtatacagaatgctgaaatttagattcgttatacctaaggctgattttattagaagattattttaatgtcctactataaactttaagactttgtattcatatcatatgtaacataggtcccatcatcctggaacagtggttctataggagccacgagcgaggtcatctgtgcaggctcctctcgatacacagacatttcaccctcatgatttctagctgcggggatttgatgatctttgtttctgccaattttatgtcaagaaaagttcaaatctccctcctgttcacctc

SEQ ID NO: 18499 - DNA, 2118 bp, Mus musculus
tgagtatgccccccggcacacatggggacgcggtgggtggtgaggccttaaccctgcctgcaagtccactctccaggtctctgcgagagaagcacttgaccagacagcactttgtgcccattcctacttgactgtatctttctttcagaaacacaggaaaaggaagttcttggtcacctcctcctgtagaaattaagctggtttctcccttggcgagtccagtggatgaaataaagaccggcaagccaagaaaaactgcagaaatagcaggaaaaactcttggaaggggcagaaagaagccatcttcttttccaaagcaaattttacgcaggaaaatgctgtaatttttagcccaagattttaacacgcacctgtttgtaaaagtcaacagtatttgtgtggattattaaagtcaccaatttggatggaaatactttatataaattgtacaattttgtaagcagtaaatgagtaactccacatggagtgcagttcttgtagtgcaggcgttttatacgacttgatgcgtttatatcaatgtaaatatgacttatcattgggaggttaaataaactactgtaaagtacactgtgtgtctggtagatttttgagaggagctttctgtttgagttgtaattttatatgctactggacatatgttcatatcctttctttacagttaagatactagaactgtcttaaaatgagggcgatgaactattgattatttttaacattgctgttttataatgtatgcactttgatgctgttcctcggatctctggtcagtacctgtgctcattgggctttgcctgatactgtgttgaatttgaattgtgggcatgtgattttgcctttttgtagttttacaaatgttgtgtaatctacctcaaatgagtaattttccagtactgcatcggtttcctagctagcagttctcttcagtaacttaaggactatcttgtctctcagttcagagacttaattatccaggttagattgaccggtttcactgcttcctagcaacctcatggaaggattgaagaaagaaataaaacagtgcaccgacgtgtgcctgctgctgagaagaggagccgacaaggtttagacttcccatgctgtgaaagagcttgcgacttcgtcacaggagcctctctagtattcaggttttaaactggtaactgccacagaacctcaggcacaggttacagagaatggaagagtgtgagcagatgtcggaaaagaggaaaggaaccctcttttctgcagcgtgtgtaccgttggtaatggcgcctgatggaagccatgatgttcatcaataaataagtgttgtcaaataatttatgacaggtaattgatagtgtgtaatgaatggacgcttaataattgatacctaaaagcagactttgtcagctaagctttggatgttttcgtgagcagtgtgctttgtgtgttatttttctaccgagtagcatcatggataatgagaaaatggggagagtgcctgtgccgagatcggacagtgtgagagtggccgtccgggtgcggccgttcagccaggtcagtccatgctcattgccttgctgacaattactgcctgattttattaattttttaataatagtttctgaatttgtatttaagctgcttgtcatttatgaaatattaaacttatttaaatggatttgtcaaatgattcacaaaagctctaagcataatttagtaaacatttaatttcattccttggtacaagtagcacaataaaaaaaactgacaagagaaatactgtcaagttaataattatttaaccagtgcagtttgctaaatagagatgtgcggtgtctgtttttactgcatgtcggtgtggggcagagatgtcagttggtaagtgtgcttgcctaccgtgcatgaatccctagggtagctcatcagcactctatgaaatgaggcacagagatgtgtggaatgccagcttgaggcgaggcaacctactagaagctcagtttttatccttggctatgttgtacattcaaggccagcttgcactacatgaaacaccaagaaatgtttatcttaaaagtaagtcttgccacatgtggacacgtcagtgatcccaac

SEQ ID NO: 18500 - DNA, 1228 bp, Mus musculus
agccttcagcagttgccactcctaagaagagaactagaaaaattaaagaaactcctgagtcttctgaaaggacctgttctgacctaaaagtagcacctgagaaccaactgacagctcagagtcctcccgctcctaggagaggaaagaagaaggacgttagccaaggcacactgccaagttctggtgctgtggagccggagccggaacctcagggtacgccgggaagactgaggctgagaacgcagccacccgagccagcagctgaagaaactccttctagaacaaaagtcaggctttcatctgttagaaagggaacccctagaagacttaagaagtctgtagaaaatgggcaaagtacagaaattctagatgatctcaaagggagtgaggcagcaagtcatgacgggactgtcacagagctgaggaatgccaatttagaagatactcagaatatggagtataaacaagatgaacacagtgaccagcaactgcctctaaaacgaaagagggtcagagagagagaagttagtgtgtcaagtgtgacagaagagccaaagcttgactcatcccagttgcctcttcagacaggactcgatgtacctgccacccctaggaaacgtggtagacccaggaaggtagttcccttagaagctgatggtggcacaactggtaaggaacagacaagtcctcagaagaaagatgttccggttgtccggagatctacacggaacaccccagctagaaatgtgagtactttagaaaaatcagttttagtgccaaataaggaagctgctctagtggtgacatctaagaggagacctacaaagaagtctgcagaggaaagctcaaaagatccatcagcggcagtctcagacctggcgggtggagcagcccacacagagtccgctgaccgaagggacggactgcttgccgccgctgctctcacgccatctgcccagggcacaaggactaggtctagaaggaccatgttgttgacggacatttctgaacccaaaactgagcctttatttcctcctccttcagtgaaggttccaaagaaaaaatcaaaaggtatttagttttattcatttttatctttcttagaatacagagcctaaaattttgagggttttgttgttgttgttgttgttgttttagttaattatttagttaatttccttaaagaaaaattgtgattaagacagaacacctactcccaaaaaaccca

SEQ ID NO: 18501 - DNA, 1212 bp, Mus musculus
atttaacatgccatccctcttcttattctctgtccatggcttccttttccagttgccattagtgatatctgaggtttttacttttctcttcctgccgaggccccttctggtgccattccactgccgtggtctaggtatttgcatttgtttccgcctttgccatgtggctagatctgcctttctcaactcagttcctctaaaggattaaaccacagacgtccattgtaggtattagattagctgctggtgctagctgtctactgtctttggggaaatatttgttgaaatcactttctagtcttattgtctcaaaggtctaaagtattacctggaaactagtaaagggagaaccttctgatgagaacttctcaccaggaatgtcagggtgtaagtgagactcaagtgacagaaatggttttcataagtctactgaaatgtgaattaaatgttactgtcatttggttgtggttatgtttaggttctttattctgtttttgaaaaatagctgggttttttgttttgttttttctttcttgcagctctgtctcccgataccagcgtttctgtctttacctggcaagtgaatatatatggacagggaaagccttctgtgtatttagggctatttgacataaatcgttggtatcatgcacaaatgcccgattctttaaggtatgattactatgttttctcaccccctctccctcagatattgttatgtatagctgatagtgtctcagtgctttaaaactttttcttctagatcaggagaatctctgcataattgctcttattttgcgttgtggtcattggattcggttgtaagtaggacttctccacatcacatcttggacatactagtacatgagaggagtttaaaccgaggggttcctccttcctacccacctccagagcaattttttaacccaagtacttttaattttggtaagtattttcataaatttttgagaaaaataatgtgtaaatgtagtatgtcagctgtatgtttcatatctcactatcatttataacttacataacttctgatacgtatttatgtacacaagaaatagagtatgtttataaattttgagttttttagaaaatgtcagttaatatattagtaataaagtttgtcactatctcaaaaggaatttataattgctgggcagtggtggcacaaaccttcagtcctagcacttagaggcagag

SEQ ID NO: 18502 - DNA, 1193 bp, Mus musculus
caatttaggcctcctttctcttggtctcttctaaattgttgtccctacagttcttttagacaggaacaattctgggtcagagtttttgactgtgggatggcaaccccatctctccacttgatgccctgtctttctactgcagatggacgctacagttccctctccccactgttgggcatttcatctaaggtccctccttttgagtcctaagcttctttcacctcccaggtctctggtacattctagagggtcctcccacctcctgaggttgcctgtttacattcattctgctggccctcagggcacctacattccctgccctcaccccccttgtgattgctttcttctccctctcaagtgggattgaggcatcctcacttgggcccttccacttgttaaccttgagttctgtggatttaaaaaggattccatcttggttgtgtgttattctttttatgcatcagtggatttggtatgctttaaagaatatttgagtgtttaattttttttttccacttttttattttgggatttttggagacagggtttctctgtgtagccctggctgtcctggaactctctgtagagaaggctggcttcagactcagagatctgtctgtctcgggctcccaagcactgggattaaaggtgtgagccatcactgcccagctggtttttaaacctatttttgatacagaacttggcatgtaattttcttccaataccttcatcagatttttggggggcttgtctgtgctggtcccatgagaagagtgttccctaaatgttttactgtattctacaagcttctaaaatagttaccatctttccttatatgattctggagtctgttactaagataatacatttttacaatggattttttttaaattatgtgttagttttattgtgtttacacacctcacataacttttagaacttaatattgtattgatcacttactgattcatacgaccattggttcatcttatttttaaattcatcttactagggaactgtcagttttctttgctttttagtagttaacttctagtctcttcagttttgctgttgtggattaattcttgttgtttaatattttgttttctgtggtattaacttgctatttattcttctaatttactgaagtagattatttaacttttttatttttagctcttcttttaaaatgt

SEQ ID NO: 18503 - DNA, 1201 bp, Mus musculus
ttgcactatgtccacctttgtgtgtgtgtgtgtgtgtcctctagggtgagcgatgagaaggatgcacgaggctatcttcaggccttagcttctaaaatgactgaagagttggaagcattaagaaattccagcttggggacacgagcaacagtaagcaagctctgccgtctcacacagagacacatctcttgctggcagaaagcacatatacatctgacttctgtaaaagttcttgtgagaaatattttagatctttataagaaaatataacatattactgttagctcttatgtatagctacttattattgaaggaactgaaaaggaaaaaacaattatttgttcatttatgcatatttactgatatttctggatttaatgaaaatgtattttcacaagttgtgcatcagttctactcagttatcagtgatattgcttataaaatagctgcttgattcacttgtattataaaatttaatcttaagaataaaatagggaactaagacatagccatattattctataggatatgccctggaaaatgcgtcgttttgcaaaactggacatgtcggctagactagagttgcagtctgctctggatgcagaaataagagctaagcaggccatccaggaagagctgaataaagtcaaagcatctaacatcttaacagaatggtaaggaccaatcatctagtcactacagtagtttataaacttgttgatgttacgtgtttcgttgcctgttaagggttgttctttgtttgtttttttaagcaaaaaatgatgaccagaagactaggaatacaattcagtagtataatgcttgcctggcatgcccaaggccaaacgtctgccccacctccctgacaaaagtgaggaacaggtttagggagatagctgtcataaaagtgcttaccttataagcataaaagcctaaatttgagccccacatttaaaaaaaaaaacaatgctgagagtcatagcatctgtctacaatcctagggctgaaaagagagaggagagttagagggagagggggagagatggagaattccagctcactggccaggcagctagccagatcagtgagctccaaattcagtgagagactttgtctctgaacctaaggtgaagagctgttgaggatggcactgatgttaccctttgtcctgcacatttgtgtacacacaccagacacacac

SEQ ID NO: 18504 - DNA, 1115 bp, Mus musculus
aagtcagagtggaagtcatacacgcgtgtatatgctctagctccacggtgatgtatgaagaaagtctaacaggattctcaaactaaccatgtaatcattcagctcagggtcgtcaggtgtttctacaacggcacgtgcagcctctgctcagtccttgctcacagtgtggcagcagcagtcctgtcctgagtcttgtcatgcgagggactgagctagggcttccttcacacagccaggcaagtcctctgctactcagcttcatcccagacctggaagccaccatctttacctaaatgaatgagactggcttgctttattaatttgtatactagcgggtggcaggctgcatttgtcttcatgcaatagttagcagtcttctaatttagcctcacagacatttaaaccaaataagcccagctacacaaaactaatgactgttttcctttccctgcttatttaagtaaactgaaagattcagagaagaagaacttggaactgttgtccgaaatcgagcagctgataaaggacactgaagagcttagatctgaaaagggtatgagattgtgtgtttgcatcagcgcttgctgtactgagtggccattactgcagaggagccagcttactgcacagatggagaagtctatacgttagcaaccacacatgtgcacacccttgagagttcatacacacatgcacacacactcaaatgcgtatatacacgtgcatagactggctgagatattaggtattagttaatatacattatattaagaattttaaattacagaaatgactgctttgccatgaatttgactgttttttcagtgttaaaatatacttcatgagtaacttttgagttgggataaaagtattttgtgatgtatttataatgttctcacatatcatatgaggtagacacttcaacagtggtaacattagaacttagtgtagaaacttgaaaagggagaagttgatttgggggcagagtctggttgaatagcccatggtgttcttgatttaagaatcctcttgcccacttccccagagtgctaggattgcatttattagcactgtctatggacctacagtatacaaaatcttatgggtataggaaa

SEQ ID NO: 18505 - DNA, 1582 bp, Mus musculus
ctcccactccgacaacgtgcctggcagcagccttgccttccgcactgctgcaatggggattcctccgcagccaggcccgcttcaccctcccctcaacccccaggtagcttctgtagacagactgcgcagacgcagcgctaagagtagaccggttgtgttctcaccgtagccctcacgtagcgcccagcagcctccatgagcgtcagccaactgttgccaggaagtaaaccctcacgaattaaaacaatgcatattttactacaatacagagtttaaataaatacatagatgtagaagttaaatactgaatgtaaatagtcaaagaagcatcttgtgtttgatgaaagatggatgcgtatataagaaagatcatttaatttaaagaaatgtgttgtttcttgtctgtttcccagctatgtcatatacagggtagaaaggcctcaagtgacactgtaaagagatcagaagtcaggtccccatggtgtctcttctcaagcctaggcaggctgaggtcacagggaaatctaaggaatgtttggagattagtgccattggtgggatgtgacctgaacaccaccgggggtggtgaagccactccagaggctcacttgctctgaggcatcttgcctctggttctcagaccatgtcccccacttacaatattttggtatctcgcacagatgaatgtgaaacaattctgccaccttccagcccttcccatcctaacggggaattcgtggcttctgaagattatgggatggtcacgcagctacttttctgtccctgccaaaccttgccccctctaggttgcaatgaggagtctctggattaagcacaacttccctgttggttaagggtagttttaaacacactgctggggacaggtctccttactaaatcacagaaaacctcagaagcataggcttgaatggccttgaccaaatatgccttcccacgtgaggggacggtggggcttgtggtgtgctggccaccgtggactgtgagccagcttcccctctggatatctactgctgcacttgtcccaggaagcatgaggagaccacagagtcctctactcagacgtcctccagctacgcacacaggaggggacaggtggaaactagtgctcatgacgtaaagaggccctgcctctcttaatcctctcctcttccgggatggaaaagccaccatttctccccactttaagccacatctgaaatagatctccaagctgacctttacacagctgccaggccctgcaggtcagactccccaggcatgcagctttatgggggtgttaagagagttgagggtgggctggggtctttgtaagcagcagctttgacagacactctggagtctggagtgagcaagggttttttggggtgggcactgtgtcactctatatttatccttttggaaacagatcatataaaaataacttgtgtacacccaaaaacaagggtcagatctttagtttggccagatccctatacatctgcttcaacttgacactttgcttgaaagagctgcctccccttccctccgtcctttccctcttctttctccttcccccagcaga

SEQ ID NO: 18506 - DNA, 1239 bp, Mus musculus
agggtttaagtccccagattggaagtcagcacagcaggctttatatcctaccatagaatctagctggctcccacaacgtaaagcaaaagttaacacttcgacgtagtgtttgctatttccagacactggtttaggcacattttgaatatgtatacaggactaaggacatagtatgggtaacagaatgccttcctaacatgcaccatgccctgtgattggtcctcagcaccgcacaagccaggcttgttggcctagtgacacgaacctgtaatccagcactgtagtggtggaggcaggaggatgagaagttcaaagtcactattagctacatcaagagtttgaaagcatcttaggctatctgagatcctgtctcagcaatccctccttacctctaacacacgcacacacacacacacacacacacacacacacacacacacacaagagaaaaacaatttgcatattgtcaaccttataacaacactgtcaggtaggcgttgttacaggcttcatttacactagaaattaaaattcaaagaggcagctctctgctcctccctgttccagagacagtgcatcttcttgtgcagtgccagcctcgtcccgtagacaaaatggtgaaggccggtgtgaacggatttggccatattgggcgcctggtcacgagggttgccatctgctctctacatggcaaagtggagattgttgccatcaacgaccccttcattgacctcgactacatggtctacatgttccagtatgactccacccacagtaaattcaacggcacagtcaaggctgaaaatgggaagcttgtcatcaacgggaagcccatcaccatcttccaggagcgagactgccctccccccaacatcaaatgggatgaggccagtgctgagtatgtcgtggagtctactggtgtcttcaccaccatggagaaggcgggggcccacttgaagggtggagccaaaagggtcatcatctccgtccgttctgccgatgctcccatgtttgtgatgggtgtgaaccacgagaaatatgacaactcactcaagattgtcagcaatgcatcctgcaccaccaattgcttagcccccctggccaaggtcatccatgacaactttggcattgtagaagggctcatgaccacagtccatgccatcactgccacccagaagactgtggatggcccctctggaaagctgtggcgtgatggtcgtggggctacccagaacatca

SEQ ID NO: 18507 - DNA, 1221 bp, Mus musculus
ccaactgtcacgggttctgctcattctcttggaatttatagttatgcatttaagtttactaagaatgaaaaatcaggctttagttggttttctgtgtcagcaatgtggaggctgcaaagcagaatactacacttagggtcagcagggttcgctctagacatacctagaaaaaaatgcaagtgggtgaggtggaattatttgggcgaacaaaaagcctttctgggacaaaccgacaaaaggggtggcgcctgtcagattccccgggtccccgccctggccccttcccagaggcagagaccagcgtgcacaggcgcagtcgcgctgggacccaacctcccaaggacacgtgctgaagccccgccctatgagctgaggccccgccctccgcgcgcgagcttgggggggcggtcccgccgctaggcatcagtaatctatcctgagcggaggcggctctgcacgcttgcgggggaaaccgacacgttagcggagcgcaccagcggcggcgtcgggctgccgctgcagcacgagaaggaggatggcggaggcctcggagaggctttatcgagtggagtacgcgaagagcgggcgcgcctcttgcaagaaatgcagcgagagtattcccaaggactccctccgcatggccatcatggtgcaggtgcgacggggccgggccggaggcgcagggcgacgcggcctgggcggctgtgtgggctcggggccgcctcactccgccctgcggctcagccggaccgggagagaagggcgggaaagacccgcggcgctgccgcggaggtccttgaggcccattgggccgaccccttccgggacattgcgcttaccctgcaagaaaagcccgggaagtaagagcatctggcgtaagtgcctctggctttgtaaagacaaggggcctgcctcttcgctgggtctggatggtcgcagagtttttgtttatttcactgccttctcggcgtcggggtggagggtgtgcgcgcggtctttaaagctgctctgatttgggcctatcttgtcccggaagattattgtcctccatgaatacagaagatttttttttccccttaagcctatttttgatgatcctttcaacatccgctcactctcggtatttctattttagttatgcaaagcagtgccatttctttacagtgcattcgctttgggcctgatttctacttggaaataacattttctccaaacttcccg

SEQ ID NO: 18508 - DNA, 1959 bp, Mus musculus
ctctcctgtctaatcagagaaacgtcacagaccagcctcccttgccaccagttcttgtcaggtggagtggatgactggctgtgttgctgggaacagtaggaggagggatgcctgtgcttgccagcattcccttctctgctgccatgattcattcagcattaattgtattatgaagtgtgagtcagttttctgtgtggtagatgatatgatgcccgagatggtccacctgaggaggaggaggctgatgttggctcacggttccaggcatctcagttctggtccatctcttagtcctgttactttgaacctgtcatggcatcctatgtggcaggagcacgtggcaagggaggcctgtttagtttgtgggatataaaagaggaagaccaacgtcttaatatcaaataggcctgcttctactacctcccaagaaagagcgccacagtctggtactagaaggacctttgagaatggttcaagatctaaatgtagcagacatgaaattaagaaaagtgtagttgctaaatgtcctctcacctttcaccattagaaactggagacaaaactgtggtcctcttgcctctgagggagcagcagctgctctgtgttctagagtttagtcagcctgaggtatgcttttctgaattgtcaggacccctgttggcccaattctttgcagctgcctcacaggtgagaaacttcaggaatgtcagtcatgcgaattgtacacctggcagattggccagagccagctcctgtttcttgttgcaacgtaattggaccttaattatagcaaccagagagtccacaggagggtgaggatggacagaaagtccctattgggataagttgccacactaaagccatcacagagtgtgcagtgctactgctgtccagcatactgtgtcagcatcttaacccatccctggggaagtgttagcactcactgtgtagcactcaccattacttgtctaagtataggtatgtaggtagtcatttaagatgtgtaagcaaggtctttattagcatagcaggtcatgtatcagtctcatggagtgtgagtgctggggcctaagggtacctcacagtctgtgatggtgtaaaactcagaatgttttgagagcttcaagctggcttcatgtgcctttgtttggactcaaggccctaggttagctggtccttgtcctgccttgttattccctagatacctcatgattttccctacagggccagatgcgcctgtccaagaagatggtggatccagagaagccacagctgggtatgattgaccgctggtaccatccaacttgctttgtcaagaagcgggacgagctgggcttccggcctgagtacagtgccagtcagctcaagggctttagcctcctctctgcagaagacaaagaagctctgaagaagcagctcccggccatcaagaatgaagggtaggtgggatgtggttagaatgtacagttctaggggagcctgtggattccattcctctgataatgatgatcagaaagagaggagctctgaggctataggagcagagggcatctgctgctccagtacccacccaccagctcgccgaccatgacatcttcccgggcttctgaacctctcccgactcctgcacccaggcgttagtacagcagactgccactttctcatacaaggccacccttgtggccatccaagcttccttgctctggtgatggctgtgcttccaagatctgcatttgtgttcctttaacgttgccttagtcacgcagcagaggtgtctctgtgtctgcatctctgggagaatcatgactgttcacaaaaagatgaacagcgggaagggcctggaatcagaacagatgggcccacatgtggaatcggcatctaggatgggaagggtctcagtcttattaatgagcatgctgagccttgtggaactgtaccatgctcatcagcgacacccat

SEQ ID NO: 18509 - DNA, 1183 bp, Mus musculus
caacttagctcagtgtggccatgctaaccaaaccttttagctttgtcagcaacaagtctgatttgcaaataagaactgtgctttcttactcaggagttaggagaggagagtgtgaagcactcagagctctccacccaccttcttctagccttctggtctctcatctctctagatgcagcctttctagtctgccccccccccccccaagcagtccccgggtagccagcctgggtcacctgttctgtgtgtggcctatgccctacccagttttctcagttgcagaactcatgggttgggtccttgatttgctgttctgccctctgtttccccgctgcctgttggcgcctgtcttcataaagttttcccaaagaaaagagtgaagaccaaggctggccaggctctgtggcttctatggtttctcctaaagccagctgttttgtcttgcctccattcatcctttcctggggttagagttgagtggtcgtagcctgttgcttctgatctcttaccccagacaagcccctgtctaacatgaagatcctgactcttgggaagctctcccagaacaaggacgaagcaaaagctgtgattgagaaactcggaggcaagttgacaggatctgccaacaaggcctccttgtgtatcagcactaaaagtaagttcagtggttcaaatgtggtgaaggttggtgtggcacagctaggggtcagactcaccactgtagcctgatgtaaagctaggatctgtactgtagtatatgtgttcacagtggctcagtcccgtaagcttacactgctccccagtgctccatggggtatcctgggtcctctgtaggtaggtggaggttattaattactttgtagtctggtgatggagcccaggcccgcatttatgttatagactttcctgctgagtgttaggggtctgggcctaagagtccatttcagttgtgtgcctcctgataccacactcaaggtttagagaaggtagcctcccttggctttgcatacccaaggggcagccaggcgctggagcgtgactgctgggatgagattcagctatagcttgggagagaagttggtggtgatggggtcattggcgttgtcgggctgtagtgaggatgcgttcagtctatcgttggggttttcctttctccctgtctggttgtaaacagaggaggtgg

SEQ ID NO: 18510 - DNA, 1187 bp, Mus musculus
cgcctttggggtctggcatcccttagagaggatttttttctgttgtagagtgttatgagctctgcattaagaattagactttagaggtcaggtcagtttgatggcacacgattagtcctggtgcacagggagcagaggcagcagatctcactctggtcttcatagtatatttcagggtcacctgagttacggagtgacaccctgtttcaaaaaaataaacaagtttataataataaacaatggcgactgagcccttggacttagaggtggacagggtagtaccctcctaagcacttgtttcagaatttttttgagaaaggtatagaaaataaaactgcccaagattaactgtaacacgtggtactcacccatttctgccttcatggccaggattatgccacacacactctctccaaagaccacactccccatagggggcacaacgtgagacattttaaaagcagaacccatgaagctaatcttggacacaatccttgtcctctttccccccttccctgaaggacgaagaggcagtaaagaagctgacggtgaagcctggcaccaagtcgaagctgccgaagccagtgcaggagctcgtggggatgatcttcgacgtggagagcatgaaaaaggccttggtggagtacgaggtgggtgttgagtgaggcagctctcgctgctcattggctgagcgtcatgagcgtggttggtacacactgagcttttgagctcatgtgttacctttcctttctaagaccatgcagctgcaaacctccatcccacccagctcctgcttgcccagtcactgtcgtgggacatgcagtgtactgtggaggactggccctgggccctggcccccattgctttttcccactttgatttctgtgttagggtgggtaggtctggttctttggggctcagacttaccagctggctgatgccgatggaagtccaagccttcgatcactcgcagaaagagaaaactgggtggaagagagtgcttagtagataagagcactagctgctcttccagaggccctggtttaatttccagcacccacttggtggcttccaaccatctgtatttttagttccaagagaaccagagccctcttttggcttccacaggtactaggtacccaagtggtacacaggcatgcaggtaggcaaagcagtcatagacataa

SEQ ID NO: 18511 - DNA, 1195 bp, Mus musculus
gaaccctgtgcctctgagcagggaactaggtccctgcttccacgacatggttcgcttcctgactcaagctctctcaggctcctggcccttggtagcaggcgtggactgtctttgccactgcaacagggcgatgctccccagcatggtggacagttttcgttggttgtctgtctgtttgagatgggggctctctgtgtagcccacactggcctagaactatggagacctggctggcctccatctcacagatccgcctgcctcagggtgctgggattaaaggtgtgtgccaccaagcccaggtgaacaattttcaaacaaaaaaaatcaggacttctacagcagtagccatgagtgcgcccccccccccccattgattctgcagtagctctttgtatgaagtgtatgatagcatcgttcttagtgtaaataaataaataataagcagttacatggccatgatcctgcgtgcctcagtgccacgactcttggtgagaaggtactctaatgaccctgcttgtatagacagcagctgctttaggcctgtgtccttctgtctgtccccttcccttccaggcagtgtctcaaggcagcagtgaatcccagatcctagatctctccaatcgcttctacactctgatcccccatgactttggaatgaagaagcccccactcctgaacaacgcagacagcgtgcaggtaataggcagtggagtggggccagcactgggtcttactgagactaactgccctccttactatgtttgttaagagtaggatctttcctactcttcctttctttcctttgctttaccaagtcagtctaggaaattgtcattagccaagaagaccatttctctgtctcacataaaggtccccatgaatccctggcgtaggtcactttgtggcatccttagtggcatctatgttcctgcctatcattcatgtttaagagttctgacatcttctcttcacttccccaggcatcagagccccattagcattctggaaaatgcctgtgagtgcccagcattgagtgaggggtgatggcagggtctggccagcacaggctcttcccccacctaagggaagatgtcgggtgtcatctactttctgcatgtactcctgtcagggcttgatgtctccttccctatggacttagctcccaggtctgtgttctgtccccaggccaaggtgg

SEQ ID NO: 18512 - DNA, 1749 bp, Mus musculus
cccctgttaaacctagaacttgactcttccatcttacaggtttgggaaaaaccacccctgacccttcggccagcatcaccctggagggtgtagaggttccactgggaacagggatcccatctggtgtcaacgacacctgcctgctgtataatgagtatcctttcttggctatgctgtgtgctctggagctgtaccagcaggtatgcatgctcttagatcccaggacaacttgcctcttgggtggtctcctgtgtcaacttgaggtctgactccctgctgtatggataaacctgtctctctgggcactagccttccctactttcaggagattgcatgttgggtaagagatcttggggactcaactgttggctccttgacaactgccctccccaggtacattgtctacgacattgctcaggtgaatctcaaatacctgctgaaactcaagttcaattttaagacatccctgtggtaaagtgcgaggggtgggctgtgcccagcacccagggcctagggggcaattctccctagtgcctctgcaccagacaccacaaaacctcagccatgctgccgccgaagggtggccccctcaccgaatctccttaggaagggttttatacagacaggttaaagggctctggtttcaagtcccttgtccatgctgcactggggcaggccggttgtttgtggtttgtcctaccagccacagctccatagacagcagctggcagtagagcaaaagttggggagaggattttgttgtttgcctagactagtcctgagggaagaaacaccacgtcacagtcacgatgtctgccttactggcttccccagggaaggaaaaatgtgcttcctcccttttttcaagggttcatctttgctttaattttggcaaaatgttaagcatttattttgagctaaaaataaaagttaatttcatactatatagattttcttttttatcttgtatgtccccctcttagtctgctgagcttttgttttgcttggttttcagtgatagacatgggatagccaaaagaagggactacctgaaacccctaactggggcgactgagcctgtagtgtggtcagttcaaagttgcatttgggattctatgtcttccaaattgaaccgtctgtaatcagtacagccacccaaagggctatagttctcaattaaaatgcaaatggatatctactctcgtgttgtgtgcctcatctcctctgacagggctatggttatcttcacagtgaggagtctccataggccctgtaggtatgagcttctatagcattgagtcccaaaagtgtatctccagattcccagtgcttggcaaggcaggaggactcagctatatgagtgcttctcagccttcctaaggctgcaccccttttaatgcagttcctcatgttgcggtgaccctaagcataaaactgtttttgttgcttctgatcagaagtgtagtttatctgctgttatgaaatcataatgtaattctctatagtttttccatggtctcctataaaagagctgttcaatccccaaagggttgcaaccccaggttgggaatctctgcactgtactgtcctaaaaccacgggccatctagagctagctggaattcgaaaatcaggcttgactgttacgttcagctctgaaagtcagggcccctcctgaccttccacagacgagtgcaggactgacaggcgcaggatcgactcccaccatccctaactcaaggactcacaa

SEQ ID NO: 18513 - DNA, 1515 bp, Mus musculus
tccacaaaattatttcctgactgccacagttatgccatggcacacacaataataataatgagtttaatgttttgtttttcctaattttgcaatagttaatcttattttctcttcctttagttgttttcagaataacgtagaaatccatgttgcacatatccagagtggcctgagtcagatgggaaacttacacgcctttgcagccaacaacacgaacagagactgagcacaggattctggtacccagctgcacacagccatggtctgaggagtcctggtccttaacccatgcttccaacaccagataacctagctgctggaaaaccggagaactgtacatctccagatacggctttttaatacactctactgcttcttcaaccagcattgtgctgaccagcatttatttattgttcttttattatccagatgcagtagtgttgcttatatttcctgtttatcagcaaacatttttaaccggaaactctctgaacgtactatcccatggaggataaaccactgttttatgcatgcatgaattctgctcagcacatgcagacgactcctgtgacagacagagaacatgaagaagcacggtctttccatgcatgatggtgggaatcccatccgagagtcaccggtccagtggagttagttggcattatatcttgggctgcaaaatagacgtcatgagtgtgagagtccgagtcgtaaggaacccgctggggtacagatgggaaacacggacttaagtgtatgtttcatatactgacagtgggacatggttctatagatcaattataataataaatattttaatttatcataatttataaaagctttgttgtttatcagcagaggaaatgaaggagccggaggaactgtactgtgccccgctggatcccagcgggtggacttggcatgccttccatgattcagggcaaaagtgttaagtgttgagacttattttaaaaaagactgatgacacactattttcgtatttttttgtttatttgcacaactttaaaccagatgactggttaaaattgaacagtacacaatttataaagtgaaaatcttttataaggaaagcatatgacatgtgaatacacagggaggtttggctttggttgttttgtttggttttgttttttctttttaagaaaaaccctgcctaaaataatcttgtaaaaagtatgtattttaaaatttttgttttaatatagaatattataaagccaaaatataattgttttcagatttggagtttaaaatagagctatagaggtggttctgattctttgacgtctcataaaatgagacttttgtatattaatgtataataaaactgaaataagattattttccttgaaatttttgtatagtttaaaaatgcttctgtgttctttgttggtattgggccactgcagatcttagtgcagagtttatatttagctagactgttatgttaattaagaaatgcataaatcttttattcttaatatttgtaattct

SEQ ID NO: 18514 - DNA, 1594 bp, Mus musculus
gaagatggactcgtaggagatcagcacagttttcttcggtgttccgtgactaagattgttatatataaggaaggagttaggaactgagtagaaacagaatgggtaaaacaaggccaggaatgtgagcagcagttacacggaaggctggggtacaggttgttacctccaccctgtgtctgtcactgcactctcccagcccagcaactgtacatggtggtggtcaggccttcaagtgaatgacgaacatgcgcctgcatgcagagttgaaactacctcaaagcgtgcagtttgattgcttgtgagagaggtgattgctgggtctaacacttgacttgtgtcttctgttctttctcaccgtctcacagaaaatgtcacttgtgaagaaaaagcaaaaaagaacgccaacaagcctctgctggatgagattgtacctgtgtaccggcgggactgtcacgaggaagtatatgcaggcagccaccagtatccagggaggggagtctatctcctcaagtttgataattcctactctctgtggaggtccaagtccgtctactacagagtctattatactagatagagctgctgttccagggtcgggagtctagggttgagcacaacatgacgtttaatttcctttgacttttgtggcgcataggagtccgtgtttatcttctcgattttgttctgagggtttatgaactcattgagaaccaggattccttgagactctttagcattagtgctctgaggttaaaagcagttcggaagactcatctagcccttgggtgctgaccagcagagctgctagtggatattggagttacatgagctacgtgttaatattcagtctccagaataaacgtcccagcgttgccctgacctggctggagggcgcattgctgtctgtgcctgtgttgtgcacagccacagttagtaactggggaagcttctgtactagtctccttcaacgcagctggctttgactgagtgctttgacagtttgagacttcaccaagtatagtagaaaaacaaatggcctcaacttgatcttacctgagtaaccaaggctgcttttgctttgggtacagctatttagttagttgtgttacaaagaattattttctgagagaatcttaaacttagaatattcagatgcagtagatactggcgtgtggagattcacagacgacctcagcacccatcccaccaggtccctggactcacggcctttccttcatttgccattcacattgctgctcacaaaacagaactcggtgactttgttttgatatagttttgtggaccatctcaaattaaaactattttctgtaaaaaatctatagccaggagttttataaactcacctggcacctactgagctaaaatatgcaaaatctgaactaaaatatgcaaaatcactttaatataatttgacatttgaggagtaccattgcactaacaggaaatcactgccggagacagcccacatttccttgtagttgttattagggcacaaaccactccacagtcccagtgtggagtcacagtctagagagaattggaaatgcacgtgcttaaatgatacagctttaat

SEQ ID NO: 18515 - DNA, 1195 bp, Mus musculus
cactatgaggggaaacatttcattctcaaaaaaattttttttcctcttcttcctgttatcagtagttctgaatgttagatattttttccatggggtcaaaggtacctaagtatatgattgcgagtggaaacataggggacagaatcaggtattggcgtttctccacgttcatttgtgtgtgaatttttaatataaatgcaagatggaaagcattaatgcaagcaaaatgtttcagtgaacacatttcaacagttcaactttataacaattataaataaacctgttaaaattttctggacaatgccagcatttggatttttttaaaataagtaaatttcttattgacggcaactaaatggtgtttgtagcatttttatcacacagtagattccatccattcactatacttttctaactgagttgtcctacatacaagtacatgtttttaatgttgtcagtcttctgtgctgttcctgtaagtttgctattaaaatacattaaactatacctgcttctggtctttattattaaccttacagatacaagtttaatatctggtgatttgacagaaactcttgaggtataggagaaagaaggttggcgtgaaaaggaacaagctgattactagtcagcagaatcttgccataagccatgctatactattaaacatttaatggtaaatgacaatgtgtaactctaaagcagtgtttgctattttaaagtgttcttctatattaactgaagttattcaagcaccagtcattgagtcttaccttttttagttattagcattagtgtttatgtagaatacatggtgatgttcaataatgacatggagttttaactgggcagggaaaacaatggactggagccatttggcagactcttggttatttttttagaaaattataggtgcttattaaagtttgctggggcagaaagtttgtgaggagaagcagatttcttgacttcaggcccccaaggccacagcaaaatacattggggcatgtagctcattaaagaacttgcccatcacagttttcggtccccagcaatgtccacactggtgattcatcctagtcccaacactagggcagtcagggtataagcgtaggggatcagaagtttgaagctatgcttagctacatagttcaaggccagcctgggttacatgagttttgtttgtaataatctc

SEQ ID NO: 18516 - DNA, 2426 bp, Mus musculus
ataaaattatgagagtaggcttgctctgtattataactggtgaaatctgaaaagaaagagtaacgttaacaacatgttctgagctgggagtgctgggcctcacctctaacaccccagcacatgggagggaggcagaggcaggagtgctgctaaatgttttaggccagggatacatacatagcaagacccagtcttaaaaagccaaaaacagatgccaggtatggtggtgtgtgcctgtatcctagcccttgagaggcagagacaggaggatgaggaggatgaggagttcaaggccagcttcagctacataagcaaattcaaatttagctttgagtatatgagaccctgttgtgggactggggaggaactgtatgcttgtcgctgtcgtgagtgtgtctagtcagtagcagggagaaaatacagcgaatggcactgccttaaaatagaatgtggtgggtcttcagtcttcacaggctggctttaatgcttctttttcccatcaggctcttggtctggaagcggtggatctgtcagcattcagctctgcagccgagttggagtcgctgggtttggagaggctcaagtgtgaactgatggtccttggactgaagtgtggggggaccctgcaggagcgcgcagccaggctcttctctgtcagaggcctcacaaaggaactcattgacccagctttatttgccaagccttccaaggggaagaagaagtgaatttccttggcacacttcctccgctgtgacagacttgtggcctgtgttccttttgatactaaaagccaattttttaataattcggttctaactagtctcttttcaaactagtctcttttcagtggtacctgaacttgaggttttcgttggaggagaaaacttttgtatgttatttttctttgtttttgatgtttttgtaagagatactctgtagcccagactgaccaagaactgtgtggttcactttggtctcaaacttgcagtgatcctcctgtctcgcatgagctgctgtgcctgctttgtcagaggtttatacatttctttggctttatatactgtgtcacttgagtaagatattttcaagaaatttatttgtataacccaaagcagtcaggtttgtagacacagatattcataacattcattttaaaaacttgtttctctttctaggagagagaaagagagagaatgagaatatgaatgtgtgtgtgtgtgtgtgtgtgtgagaccagggatggagcctagctgcttccaggcctctcactggggatttttattctagctagggacctattttgtttggttttcaaagaatcagttttttgtctttgtggatttttctcagttgttgatctcattggcatttgaattgtatttcctctcctacatgccttgtgtttatcatttttctttagctccttaagtctttgatcactgattatagattttatttttattattattagtgtattgcccaattagcaaatgtttgtgttttctgtaaatgttttattgatagtgactctctgactattcaggacagaaagtacctggcatccttgttgtgactgacccaggatagggtctgacatgatctgtgctgtgtgtgttggaaagaacgtaccatcagccggcagcagggtgggttctggacacctatcatgtgagtggttggtcggatcggtcagatgaccgccttcgctggttcattttcataaggaactaagagcaaaatcaaatctcaattaggattgtggcaattgccttttttgagattaaaaataacttcatcagcgtttgctaagttgtcagttgtatattaattcagtgactttatatgtctggctctgggctggagagaccgcactgactgctcttccaaaggtcctgagttcagttcccagcaaccacataatggctcacaaccatcagtacagctacagtgtactcatatactatacataaaataaataagtaaataaatcttttaaaaaatatatggctctgatgggttttggatttttttccccatctgacagttcacgcatggacactgcgtcctgattaggtccacagtttctacttctctaactcttctggtttactttatatgttaaagctactgttcagttcttacacttattgaacattacatcatgaaattcccttcatctctggtgagtttcttgctcacctgtattatctaaagcacagctttgtccttgtttccacagtgcgttttctgttcctctctccttgctcctcctgtctaacacacagcaggtgtgtctcgcatctgtgtctgacttcttgtcatcatcatcactgtcatagccatgattgtcattgtcatcatcttcatctggtccctgtctctgatgacaggtcagcagtgagtcacatggttgtttcggtcataac

SEQ ID NO: 18517 - DNA, 1439 bp, Mus musculus
gtcaccttccttagaatgaccaaaaccagggtgggtaagagggcctgttgttcctatcccagtccacggcgcttcctcgatagcctatgtctctctagacttcttgctctctcctccagtgcattccgacagcccacacaacagagaactttgagaagaaaaactgagggcagaacgcacaaactcatcttgccccaggtcgctcagccttgactggtaaatctaccctacttggatgtgaacccagacgccctgcctcgacaccctcctgaagccttaatctcacagtcaacaatcacacaattccagtaaaagggtggctttgggtggcgaagcttatccaccgttcattcagtcaacatcagctcagcactgtgggtcatcagacaccccgctcagagctggggaaataaagactccataataaggaggctcggagctggggaaacaaaagaccatggatctacccctgaagagttcagttgagcaaacactatttgtcaacagaccacgaccatagctatgacagctgggctgatccacctgatactaatttggagaaatgtggattcacattggcttcccctgactttcctttccttaaggctggaagcgtctgtgttgactggaccagactcataggcctaataccttgacctggcttgtctcttagctggaggacttgtgccaccatctgggttgcaaagcaagtgtcaccctggcagtcctacagtacagtagtcagactgctgtatgcgccaggggatgtgaccagactcacaggagcatggaggattctgtactcagaacacttaagtgggctgagcctaaaagaagtgagtgataggctagagctcttactgtctggtttccagcacccaacagcggcacacacctggctgttaactccagttccagggattctgacgccctcttctggcctccaatggcactgcatacatacggtgtaagtatatctcaggcaaaccactatacaagtaaataaatcataaaaaggaaaaagaggtgcttgagagatggctcagcagttaagaacactgactgctcttccagaggtcctgagttcaattcccaggaaccacatggtggctcaaaatcatctgtaatgggatccgatgccctcttctggtgtgtctgaagacaatcgacagtgtattcatatacataaaataaattaatctttttaccaaaaaaaaaagagaaaaagaaataattgagacttgtagtgagagttttagtttctttgaaaaacagaaatattatggaactatgtttccattttaaccccaggtgtgggctgtggggctgctgcgcagcaggtgactgtgatttgccttgtgctctagcagggggatgattttgccagctgcaaattgtgtctgtgactgtgtgacctttggaattctggggacttttca

SEQ ID NO: 18518 - DNA, 1141 bp, Mus musculus
aaacagacatagacaacttttcaggtacaaactgacaggcagttttaaagccttaaagttgtgttttctctctctctctctctctctctctctctctctctctctctcatgcactcactctgtgtgttcttctttttccactcacacactccacacactctctctcctcacactctctctctcacatacacataactcaccttctctcatctttcactcacacacactctccacaccatctgcatctcactctctctctctctccactcgatgacccactctctcacctttttcttgccctagtcttttattgatactccaaatgcagataggaaaaaaagacattgtataatagttgccaaatcaaaacaatacccacatcacacaaagaatcaagaattacaattgttcttccaaagtttcaagcttcccctattcccaggcctctggccaaaataatatttattgcaaacttatcattatttaaactttaccttttgacttattatactccagagctcagagctccgaagtcggctacttgcattttcccgtgaagctctgataataaatgacatgggcaaagctgccaggcagtggccagaaagactcaggttcacccttaacttggcagttctgctagctttctgcttctgcacattgcacacagtgaccctcctaagagtcccggtgttttggcttagttttactagtataagattttatgcattctgtactttcttatccatatatatccaaaagagaccaggaactactcttaagtgttgtgcaaacctcatttcataaattcaatagctttttcctctctaaattaaaagtaccccatgtttatgttcccttattccatttcttctttatcccaggattatgtctcttgtactaatgcttttggggggggagggcattgagacagggtttctctgtgtagccctggctgtcctggaactcactttgtagatcaggctggcctcaaactcagagatctgcctgcctctgcctcccaagttctgggattaaaggtgtgtaccaccactgcccggccatgctttttcataattccaataaattccttcactttctggtaatggatcctgtatgactctagcagtaagtggctctg

SEQ ID NO: 18519 - DNA, 1816 bp, Mus musculus
cactatgtggctcaggctgtccttaaacctgcagccctgcccagcatgtctcaagcctataatcccagaattcagaaggctgaggtaagaggatcccatgagttttgttttgttttttgttttttgtttttcgagacagggtttctctgtgtagccctggctgtcctggaattcaatttgtagaccaaactgcctcgaactcagaaatccgcctgcctctgcctcccaagtgctgggatttaaaggtgtgtgccaccactgcccggtggtcccatgagtttaaggctagacagcctgggctacagagtgagtttttggatcagactctgatggtaaagaataaataaagcaacctgctgtccttctgtctcagtgtggacagacatgcgccacacacccagctctgtctattccaagtatgtttttaaaaaacatttaaaaagatttattttcttaattatgtatatgtttgtgggggctagggaaggtgtatccacataagtgaaggtaccttcagaggtcatcagatcccctgcagctatgggtactgggacccgaacccagggcctctggaggagtgcacatgtactcctagctgctgagctgtccctctagccctcaagcttatctcttcctgttgccttgtggcttctggacacagagcacttccttattacaaatgtgtcgactagattctccacatcttttcttttttttagatttatttatttattttatgtatatgagtacactgtagctatcttcagacacacttgaagaggacatcggatcccattacagatggttgtgagctaccatgtggttcctgggaattgaactcaggacctctggaagagcagtcagtgctcttaaccactgagccacccaccccacatcttttcttttaataattatttcttttctggtttatggtacctttgtacttcgtcaaaggtgaattcattaaccctctactttttgcaaattattgaagaatgctttcttaatccaatctggtggtatatatctatgtctcagctctcaggaaggctgagagaggactaagcattttggataagaaggtttgtaggccagcctgggttgcatggtgacactctatctcaaaacaagacaaatgccacaaacaataaggacattttcttttctttcttttttaattttgttttggtttgtcttcaaggtttctctgtgtagccctggaacttgctgtgtagaacggggtgacctcaaactgacagagatccgcctgcctctgcctctggagtgctggggttaaagttgtatgccactactaccctgcctaaaacgctttcttttaaaaaaaccaaaacaacgtgatgtttgaattatttatgttttatgtgcaaatatgtctgtattagatgtgtatgtatgttttataagtaccgtgtatgtgactggtgcaggtgccagatcccctggaactggaattatagatgactaactgctgagttagcacccccaaatgtcttctttatgccaatacctacaaacctccatatctgaaattccagatttgttttttgtttcttggttgattggttggttggtcttttgagactgtctatgtggctaatgctgccttaaaactcattagatagccctgactgggctcagtcttgagatccaagccaggtatggtactgcattcctaaaaacccagcccaggcaggaacaggcaaatcaggggttcagggccatcctcacttagtaaatgtgaggtcagccggggcagtgtgaaactgtgtcaacactcagctatcctcgacctggt

SEQ ID NO: 18520 - DNA, 1205 bp, Mus musculus
atggccatctcctccacatccgcgctgtccagggtgggggcctggctgagctgcagctgctgcagtagactgctcaggacctgttcctcggtcatcgctgccccagggccagccaggggcagtacccagagtgcccagcaaagccacagggacttcatggcgctgcccaggaggaatcgtggatatatgcgtccctaaaagtgccctgaaaagttcttgggacctagacggtctgctgagggctggcactggccttctttatagttggccctggggtggggggcagggaggaaggacaagaaaggtcacacccctgggacctcctgggaactcagcatgagacaagcccctgcgccctgaggaggggctgtctaagaaaggacacagagagctgtctggaagacacacggactgagatttctgtctgtggggtcactgcctctcaacgatactgttcgctcttgttggaattatctgataatatcaccgtctgttttgtgggatagagaattcctcggggcaaaaaacagagagactctttcaccagttgttgaagtactatattacctgcatagccatggctgggctgaattcttcagaaacgactctaggtcaggcggaccccaaacttgtgataatcctcctcccatcatcctctgcatgctagaactacagctgtgtatcactatgccagacctgtttaagactctggaagattctccatgggccagtggaggtctagatttgtccgtggaggaacaaagaggggcagagtcctgtattccagctgtctctggtcaattccacagataccccggagtcaaaggaaccgtatacatccttcagtacccccacgggtctgtccaggttcgtcacggtcctcatcacaccccacccctcccatgccagaggaagacagatgccgctaactagagattttgctagcatagtctcaggaaacatgaagactgcgcatgtctctctgctctcagagtgccacagaatgtgcctcttcagacagcaactccttctgggagggctcgcccactaggctcataccacaagcgctcaggcttgtgtcttgctcataccacagacttagagacagaaaccatccagaggccaaatctgcctggaaacatgtccagtccacagctgcaggcacctgactggccctacttcttctagctcccagtttacaacag

SEQ ID NO: 18521 - DNA, 2332 bp, Mus musculus
gtagttctggcataccaagactcttagtaagcactttatgttctagacatttatttgttctttaatcttcacagtgttctctttgaagaccttgggaaatggttggtaggacttccttccctgccctgtcaggtgacctttgctctctcacccctacagagctcaaggcaattgtgaccccgaggtaccagtgactgaaggcacccgatgctgtcgccaggagatgtacctggacctgcaggggatgaagtgggccgagaactggatcctagaaccgccagggttcctgacgtatgaatgtgtgggcagctgcctgcagctaccagagtccctgaccatcgggtggccatttctggggcctcggcagtgtgttgcctcagagatgacctccttgcccatgattgtcagtgtgaaggagggaggcaggaccaggcctcaagtggtcagcctgcccaacatgagggtgcagacctgtagctgcgcctcagatggggcgctcatacccagggggatagatctgtagtctccctgtccacagatgtattctcagtgagcttgtcctaacttagtgctctcgtcagacctttgctctacagtcttggttttcttgtccatcacccagtttaagcacttacatgggtaaatcatgtcactccagtaggacacactgaccccacttagccaaggacatggctatgcagtgaacaggttcgcatctgagtctgttttctggccagaactcagcttaatgtacaacaaaaccctacggtgagaacaggggaatcaaaagctcgtttactcttacaccgtgattactggcatcaacgtaccatgtcagggactgcccacagcaggctgggagggagacatctcagaagcctgcggcagctccttgtgaaaaaccgttgttcccatttctcctaaccttagccctagacaagagctgtatagatttcatgtgtgtgactgcttttcagttggccttggtgttcatagttattctatattatttgactttcctactcctttctccttctgccctggtgaattctatgaaactagatgttccttgatgtaatgattcttaaacaattaaaaagttgaggcatgggacacagcacagcacagtcctgatggcccaggtgcatgctgtagatgtattctgtgtgctcttatcttggaaacaatgcaataactttgcaatgttagttcagattaatgtttgacttgcaaagaaagtttgaagaaattattagaaagtgaaatagagccaacactgggatcccgaaaagaaaaaagctattgaagttatgaaataagttttgcacaaaatttgagagtgtttcctggataagcaagtatagaatacataaaatcttatattagtaaaactaagccaaaacaccgggactcttaggagggtcactgcgtgcaatgtgcagaagcagaaagctggcagaactgccgagttaagggtgtacctgagtctttctggccattgcctggcagctttgcccatgtcatttattgtcagagcttcacgggaaaatgcaagtagccgacttcggagctctgagctctggagtataataagtcaaaaggtaaagtttaaataatgataagtttgcaataattattattttggccagaggcctgggaataggggaagcttgaaactctgggggaacaattataattcttgattctttgtgtgatgtgggtattgttttgaatttgatttggcaacgattatacaatgtctttttttcctatctgcatttggagtatcaataaaagactggggcaagagaaagggagagagcgagtcatcgagtggagagagtggggtgtgcatgcagtgtgcgtgaggtgagtgtggagtggagagagtgtgaggagagtgtatggagagtgtgtgtgagtgaaaggggaacgcacagaggtgtgtatgagcatgagagtgaaaagaaaactgcacaggagaaaagagcgtgtgtacagcctcaagctgcaaacaagcaagcaagaaatagaacacacacacaaacacacacacagagggagagggagagagagagagaacaattttaagcttcgaaaaattgcctgtcagtttgtactcggaaagttgtcagtgtctgtttattatgtgccttccagatatccctgcttccagttgagaactccaatcctgtgtcgaggctggaccccgacaagtgatacataaattaatttacacaaaacagaacaaagcaaacagaactccaacatgccctagataggagaatatctggaaagagcccaccaggtactgacccattccagacttgtt

SEQ ID NO: 18522 - DNA, 1163 bp, Mus musculus
aggtggaggaagacctcattgatgctatcaccgggctcagcggcagcgggcctgcctatgtgagtggttctcacttgcccactggcttgcatgcatcctgggcagcaggaggggctggcggaagagagggcagccggcacatctcttggacatggctggctggtggaaggagctgaccttcaggattggtcccagtcacctgagaaagccgcctgtggtgtgtgggtgcgcggatgcttggttcctgtgttcagagaatatctccacaggcattcatggccctggacgccctggcagatggtggggtgaagatgggcgtgccgcggcgcctggcggtcagactgggagctcaggcgttgctggttagtgtctttgcgcggttggtggttggttttagggttgtgttttgggggaggggcaccgagctgggcctgggttgagtctaatgctgctttgtatctcagggagcagctaagatgctgctggactcagaggaccatccaggccagctcaaggacaacgtctgctcccctgggggggccaccatccatgccctgcacttcctggagagtgggggcttccgctctctgctcatcaatgcggttgaggcctcctgtatccgaaccaggtgcgcgttctcgctctcccctgtctgagttcttccgttggtgttactcttgaagatttcatgagcgcggtcagagtctgtgctctgttgataaccacagttttaagcttcctttaaccaagggtttgctaacctttctctacttagttcttagcgcacttctgatggctatgattaactttgtttatgtagatgggtacattcgagatcaaacagttaaatgatggagatgggattcaactgctgactggcttcaaattctataacttcccctagtttttttttttttttttttcttgtgtggtcaccgatatcactggaacactgtacctagcttggatcgcaccgggggactgggatatcccctgttagttatttgactcttaagaagcttggagcttctctggtttgggattctgagtcttggtggcgtcgggttgagagtctgggtctgtatagctggggaaggcgcaaagctctggctccgaggtttatcatcttcctggtggggctttgtttacagagaactgcagtc

SEQ ID NO: 18523 - DNA, 1099 bp, Mus musculus
gatggacaagactacaggtgcacattccagacactgggagcaggcatccagcagagaacgtgagacctccgcgtcgtctccaggacccaccttccatcccatgctgggattgaatttagggcttcacgtgtgcagggccggtgctgctctaccactgagctattaccacccctgtcctgaatgtcctaattggtcagacacccttaagtcaatggtgaagtatatggctaacagacagcggtgaccagatgttctcagtccagacaggcttttgtgtcctttctagacagcccctcctcaggactcaggggcttgtttcatgctgagctcccaggaggtcccaggggtgtgacctctcttcttcctccctgccccccaccccaggaccagctataaagctgttccgtaccgtaccattcctccgcagactcaagaccctttcaggacacctcagggacacacacatccaaggctcctcttcccggacagcaccatgccattcctgtggctctgctgggcactctgggcactgtcgctggttagcctcagggaagccctgaccggagagcagatcctgggcagcctgctgcaacagctgcagctcgatcaaccgccagtcctggacaaggctgatgtggaagggatggtcatcccctcgcacgtgaggactcagtatgtggccctgctacaacacagccatgccagccgctcccgaggcaagaggttcagccagaaccttcgaggtgagccctcccctgttgtccttggtctctaggaaaggccggctgatcatgccttccttccacctgtggtgtgtatggacccttgccttgtggtgctcagagtcagtcatgggggtggggggcacagggtgaggcggatgttagaggggagaagatctgggagggtgggcactggggatctggctgtgcactgaaggagtctcaggatgggaaaagcggggctgtgcttgctggtaaattaaggagcagagaagagggaggagagtggaagaaaacagaacccctggagcagtcagggccaggtagaacttcctggggtcactgcctggacgagtggctgactatgtcttgccatg

SEQ ID NO: 18524 - DNA, 1491 bp, Mus musculus
tcctttgctacggcagtgggtttgaaatctaggccagaaaattcctaataagctacacacccagcccagttcttcaatactcgaagaactagatcttacatctctcccagatgctcctgacccctgccctgtcaggtgacctttgctctctcacccctacagagctcaaggcaattgtgaccccgaggcaccagtgactgaaggcacccgatgctgtcgccaggagatgtacctggacctgcaggggatgaagtgggccgagaactggatcctagaaccgccagggttcctgacatatgaatgtgtgggcagctgcctgcagctaccggagtccctgaccagcaggtggccatttctggggcctcggcagtgtgtcgcctcagagatgacctccctgcccatgattgtcagcgtgaaggagggaggcaggaccaggcctcaagtggtcagcctgcccaacatgagggtgcagacctgtagctgcgcctcagatggggcgctcatacccaggaggctgcagccataggcgcggggtgtggcttccccaaggatgtgcctttcatgcaaatctgaagtgctcattatactgggagagctggggattctaactccctaatgggcaatccctgtgtgtgctctttgcttcctctgaagtagcctcatccctaaatttttaccttcgaggaatgtgactcgctggcccctggaggcgctctgacccagtggtctctgtccttcatattgttcactgcactgtatgcgaagcacttacatgtatagatactgcaaaccaaggacagaatccccaattgccattgttcccttaatttgtcgctgaatctgggctgagtcccagtcttgactctggacctaagccacaagttgggcaaacatgtccaacctaggcaatactggctttgctagatgtgaataaaatatgctttgttttgtagcttttttgtttccttattttctctctctctctctcaagacagggttttgtgtgtgtgtgtgtgtgtgtgtgtgtgtgtgtgtgtgtgtgtgtagcctctgtcttgtttccccatttaaactacatctgtgtaaactgaggcagaaaaaagaaaggcctggtgttagatcaacttaactgagaactaaagagcttgattttgctaagacttgatcgaagtttcagcgataaaagaagccaacttggtggtgtctgcttttcagaactgagatagaaatgtttggctgttgagattttggctttttgggtccaacaattagggttttatttcgattctcgttgcattaaggaaaaaaaatcttattatgtcaggtgtggaggtgtgcacctttaatcccagcagaggcaagcagatgtctgtgagtttgaggccatcctgtgacatagggagtttcaagtcacccagcactacactgtcagaccttgtttcaaacaaacaaacaaacaaataaataaataaataatcaaaaatcaaagtc

SEQ ID NO: 18525 - DNA, 1225 bp, Mus musculus
atctaactctttgcctttgccgacagccctatgtgcctcggattctgaacggtttggcctcagagaggacagcgttatccccacagcagcagcagacctacggtgccatccgtaacatcagtgggactcttcctgggcagcccgtggctcaagatcctagtggcactgcggcttatgcctaccaggaatcctgagagtggacaagctggtctggcaggctgggagcatctaggaataccgagggacacaaggggctagagccccagacaggctcttgagggttttgctgcttaaaacccccgtattgtgagaagaggaaaccagcgggtcgtggggctctgggtaaccgggctgagggtatccatccggtggggctgctgtccctgggagccatctgtaaggtttcttttctggtcccagtgtggggaacatttacagctccctcttgtggtcatctgaggatatgcacttttattcccccatacactgctcaggatgctctctgtagtgagcatggtgtatgtccctagtggtttgtggccaagatcatgtgttgggcttttgcctttagggagatcatatttggggacttctggttgatggggagatgcgtccaggaaagacttagtccctctgagccctggaacactgcttagccttctgcaagctgatgaatagcgcatcagttgggtctgagatggaggccatgtggggccctacagtactgtcctgcctgcagtcccttttcagggatccatggattagctgtagggaccggggaataccttgttcttgttgatggcagcagggcagcaggctcatgcccactggtttgtagctgcctcctgctgtgtttccgggtttttgtatcatgttgcctgaatctgggctgtgactgggtaaccccacagcaggtggggacatgagaaccattaataaagtacccactgggctggtggtgagaccctgcctctcatgcttcttccgggtttatgtacagattttccacgtctgtgcaggattcttccagcctctacctgataagtctgctctgtccaagatagcaggggcagtgtcaagggcaacttggaattatgagaggtcagagtggcaggcacggagagaacagggtgcccctccatttcttcggttttgggcagctcactctttttccaaagtgggacctggggttgggccctagggggcaggctgagatgagaaggaa

SEQ ID NO: 18526 - DNA, 1430 bp, Mus musculus
caggggatcctgcacttctggcttctataggcacctgtgctcatatgcatgtagcccctcccacccccacacactttttttaaaaattaaacatatttttataaaacaaatggaatatattcaaaaggtatttttagaagaaatgttgtaatctattttccacccagtaactgtcttctgttcaacttgtaccacagcagacacagcttgtattttatgtccaggccaccagaaataaacgcacttagacccagcattcagttgtcaagaagagctgatatggcagatagtgttttcatttggcatattacaagtacagcagcagcaggctcaactgctcagattcactatttaagactttctgacatttacttctaattctccagtcacgctcatcatctacctctactgatccggtttggtttttctctcctctgttggtctctttctgggaaccagtatgttctcctttatgtcctccattgaacagaattatcattctgcttagtacctacaaacctctgccaagccctcccaaaaaagggagtcatgctgactttgtaactgtaatcccgattttattcagttgtattcttccaactctgtgtggtgtgtgtgtgtgtgtgtgtgtgtgtgtgtgagagagagagagagagagagagagagagagagagagagagagagagagagacacgctgggtcagagtacaacttttaggaggtagttccttttttctaccacatgatccccaggatcaagatcaggttgtgaggcttagttagcaagtgcctttacctgctcaatcatctcaccagcctattatcaattccatttgtatattcaatactctgtagactgcttgacactctgttcttatgtggtgttctcaactcagtagaatctttagacattcacattttatagaaatatagattgcgagtttgctaatactaacaagaggagcagaggctgggaagctcctagattagcacttggaagtgctgttggcatcttggttgggaatgtttcttaaccaaggttttcatgactggctcacctgtgcccttcacaagaacccttgagatcttactcttccaatttaaggatgagaaatttacctaaggtttggagggatgactcaagggttgagttcagttcccagcaaccacatggtggctcccaaccttctgcaatgggatctgttgccctcttctggtgtgtctgaagacagcaacactctactcatatacatcaatgaaatctttaaaagaaagaaatgtacctatgtgggagtgcccagaagtagtacccagatgtgggaaagtggcacgttggactcaatttcagtttgctttgctgtcctgccaatgatcttactctattttgtcagggtgctctttcagccagccccaaccccttaccactgagt

SEQ ID NO: 18527 - DNA, 3632 bp, Mus musculus
actctagatgcaggagcaaggcagaatctctgggtctagcagttaggactgctatagcaaagaccataaacaggcaccttaaacaacagagacaaccgtctgagatcaagatgttgtcttgtcagagttctatggtttctgtcccatctccacatgtccatctagttttgcactctgtgtccagacttcctcttgtacggcaaccccagtcacctctgcagaagccctgtctccaaagctaccaccctctgaggtcctaggggttgagcctcaatgtaggaatttgcgggttatgccttccatcccataactgattgattagcacaatgtggtattttttatcctcacaggatcaagtgatgtatgaagctctgcagaggtccctcagtcagtgatgtttgcgctacctggcatggaggaggtgtctagtgtgtggaactcaccacgaatcacagttactctggagggtctactttcagcttgacaccaatgatcctttttttttttttttaaatcagaaccagttatctctttattttttggaaagtaagttggctgtgttagtaaaaccacatctgctagtgtgggctgataaaccatgtgctaggccccaagaaccctgagccactgtcctgaccctgctgactgacaggcaagggacagccacccaagcccaataagaggagtaaaaaaagtagcaaaattgcattcaccactgtctcccaggctttgaaaggtagcagtctaggctataaaagtctagaagctctgcatagggagtgttaagcctgcagcaaaacaacttgtaaaaactcaataaattatagatagacttgtaacagatatctattaacatctgaaccttcttacaggatcagtccctccctgggcacaggctcctgcctggaatacatagcaattagaataatctgtatgaaaaataccagttcaccttgaaatttttaaacatctcctaaagaaagttcctatataaatctaatccctcacaaaagagggccgaaggcaacaggaaacgctctctggcgccattactaactaggagagctagctgctcatgcgccaaggggctatgtccagcctggcagaggccagactcacggtctcagcaactccctaaatccagcatgaacctctttcactgttaataagttacaacttaaaatgtctgaaataccctgggactaaatgctgtaccctgaggttggggactggagctctgggagttgataaatatagctttacaaatatacaggtccagtacaaacaaaactgccatgccagaaaagtcccttgcttctcagcctgttcttgccagtttactagtgagccccatggagtatcttgctcccttgggcttcagctttgccttttttcatatagatgtgtgtgtgtgtgtgttacacaacatctatttatataaatatacattttcctctggaatacacctttctgatagacattatctcccccccccctttttcaggtacctgtaatttgtgtctgagaggcagggtgggaagcaggcagcctggagatgtcgagctatgacaccccctagatataaggtgccatgtaggagagaggcttgccacacagagcagagcctccctgcaagctcagcttggggcaccaaagaggccaaggcccactctctacaatggtccctgtaaggtagcagtgagaaatgagagggccagaaccccagggttgcacagggtgggcctcttaacgttctcatttggtcttcctggccctggccactcaggagatcactatacagcagtgcatgttcccaaggggcaggggcctctgcacccaggagctaaggataaacatgcaggaagtcttgtctattgttgacccattgcactgggctggctagggtccactgcacaccagcagtagcagggcgggttagggtccacagaaacattggctggggcttggtctgtgggactgcaggcctttcacatccgaggtcccccattattgggtgggggtagcaactcatgggtgaacaccctgtcatccctggacaggctggagctaggagtgtcccaaccacctggagaggactgctcaaatggcacggagaggtccaagtacttgtcagttgatgtcacagtgaggatgcggtctaaatcctctacctactgcttgaaggtgggcctctgaagacactgcatgccaatatccccacgtgaccatgtacaggccacgtgtgcagttgtggggcttgtccatgcagtggccctctgtaagtagcttgaaaagctcttccactgggatgccaggatacggtgagatgtcctagcggaggacaccaaagaaccagacatcactctggtgggtgaagactctgtaaaaaagggcctctgattccatccacttcacaggtagcaggccacttgtggtcttcttgtagtaatccaggttgtgcacgtcttgggccaggccaaagtctgtaatcttcatcacattgtccgaggtaaccaggacatttctggcagccaagtctctgaatacacttctgggaagccaagtattctgtgctccatgttacctggtaggcacagaacactagatccttgcaggtaagctgttctcctggcagcctgcagtccatgcctggaggccattatgccagaaggaactcttgaaaattgccttgtctgcatactccaccagcacatacagagcccacccagtgcaggcccagcagatcatcatctccatctcagataccaggtccaacagcatcttcacagtatcttctgccatgacagtctgtccaaagcagccttctcccagtcttaccaagtgtcagttgggtcctggatagttcctacttggggtcagcaggcagctcaagttcagaaacattggccataataggaccttctcctgaagacaccaagcaatccggataagggctacatttgaagttcatagaggaattagattccaaggacacctgtcagttaagcggggaagtgccttgggggactgggcagaccgtcaccacagctgccaccactaggatgaagaggaagaagcccaccccgtagtcgctgaggacacccgcacacatgctcctcagctgtgtcttcagttaggtccttcccatcttcattatctcctgaggatggagcatctgtcacatgcatactgaagcctctgagagcccaccaggatgcagtgggaaaccaccagttctgtaccattcttagcccagactgtgggacttgtgggggcacctctacatgtcagctccacggtgtcctcactgccaaaggccacctgctcctactggctaggttcaggccctggaacctctgccgctctctttacagctctggaccagaaggctctgaagtaggtccagccatcactgccatgcagaatactttttttaaaattaggtattttcttcatttacatttcaaatgctatcccataagtcccccatatcttccccccactcccctacccacccactcccacttcttggccctggcattcccctgtactgaggcataaaaagtttgcaagaccaatgggcctctctttccaataatggccaactaggccatcttctgatacatatgcag

SEQ ID NO: 18528 - DNA, 1281 bp, Mus musculus
tacattgtttctcgagtaattttgtcttaagtcagctgctttatgaacatttagaaatgaaatagaatttcgtgagatggatatttttggccaagtgcctatgtttgcattatctaaccctagcttaaaatttagaattataatatcaaatcaatctctcttctctctctcttctccccccacccccagccattttggcctcaaacttacatagtagctgtgggtgactgagtggcattggccactaatactgacctagaaattacttttatatttcttgattataattgatttttttatttcaccaaatatatgatgtacttagaaatatatctcatctagagatattattacaatgcatagttcgttaaattcactataacttagagaatcttggaatacttatttaaattacatgtaactttgtgtaaattcacaataacttagataatcttggaatacttatttaaactacatgtaactttgtggttcacattgttttcctttaactcttatctttaaaggatgaattgcaaaggctgttggggttgctaagagaccaagatcccctctcagaggaacagatgcaaggactgtgcattgaattgaacgatttcattgttgctctagcagaagtccagccttctgccaaaagggaaggctttgtaactgtccctaatgtgacatgggctgatattggtgccctggaagatattagagatgagcttataatggcaatattggtaggtatacagctatcagggccattggcattggttgtgagttaagatctaaaaaaaaacctgcatgcatgtctaccagattatgtcattaaaaaatttagaccttcttattttatgtgtatgagtgttttacctccatgtatatgtttgcactgtgtacatgtctagtactggtggagtctgaaggcatcattcctctggagttgacgttatagattattgagaaccgctttttctgggtgttggggaatgaacctaggttctctgcaagagtaataagtactgagccattgagccatctccgtagcccctaaacacatgtttaaaaatagagctttcctgagagtcagttcaaatataaattcagcttcagtttgtcatcttttttgttgtaactgtctcaacaatgaggcgtcgttctctcgagatgtttcatactcattgttttgtttgtgtttggttcgactacatagtgagttcaagaaaaacaaatttaggtttcactcgagaccagtgtgtgtgaaaactaccttcttgg

SEQ ID NO: 18529 - DNA, 1210 bp, Mus musculus
tgagtaggtttctctttctggtaagtacatattttatttgctctgtaagtatgtcccgcacaagctatttcctctacaatacacttgcaatacacttgcaaaacgcttaaaagtggataaaggaaacaaaccaacctgtgcttattgtctttatagtacacagcatagttcccaattcacagatattagcataagcttttctggaataaagctgggtatgtagttagagtagtgagcatttattcagtgatttgtttcatcttatatagcattcattatgataccatcagtacagattaatgtataagctttcaagtaaatataggtaggaatttactttttttttttaattaggaatttacttctactaatagtcgtggagtctgaattttttaaactatcttttctgcagaattctccaaacgttgtgccgaaaactgaggcttccggaaacttttaatttttgtcacttagcacacctaacaccaggctttgttggtgctgatctgatggctctttgccgagaggcggccatgtgtgcggtcaatagggtcttgatgaaacaacaggcgcagcagaagaaaaagcctgagattgaaggtttgccctctgaaggagaccaggaggaaaggctgggagctgagcccacttctgaaacacaggtgttctttctcttaccttgtgttcatgccttgacacgactaagatttagtcctttacggaaaacatttgtggtttcctgccaaagcattggcatttatatgacacttctggttaagtggtttatcataaaagctcattgtggcatacagcattgtgtaatttgggtatgaggtttccttactttgttaccagagacactaggtgtaagaggttgtactttgctagacctgcctggtctctcctttgcaaagctcttttgtttcttttttcttatttgaatccatcgttactcctgtcaaccatgatagatgcgttctttttataacatagcatacaattaggatttactttacttttctttgtttttttgtttgttttgaggtagatttggtttttttaacaatagttttgactaacttcaagtttcatcttctaatgtatggattataggcatgagctgtcatggccacaatgcaggattttagcctgatttgatgattggttgattcaaaaattcagtttagtaagtcaagttttctaatctgta

SEQ ID NO: 18530 - DNA, 1179 bp, Mus musculus
ttaccccctttcctggtttcgccatcctgtgggacagcattgctgtcttccccaggccccactgttgggctgttcccgttgtctgggcgtgccttgcacgtgacccctgtgtgctgtcactcatgctgctgctctctgtagaacttctgcctccgcttatggaaaccatactagctagccctttaggctttcctgagtattttcttccgtgaagctgccattctccagtctcttgctctgttacaatacttagtttatcgtaattgttattaaacttcttgaaatgtgccatgtttccttacttaactgctttgtatcctcaggagattgtgaattgctgctaagaaaggcaggctttatcttcacatttgttgcataaacaataaatgtttacaaatatttgtgtatcagactacataaattctctccaacttttaaatcatttgtgtaagcattgttgtcctcaaatatcagatgtcttgttctctgttttctacatctggttcttagatctgaataacgtggcagctacagctcgggtcctagttattggagctactaacaggccagactcattggatcctgctttgagacgtgcaggaaggtttgaccgagaagtctgcttgggtatcccagatgaggcagccagagaaaggtatattcttgtagaatgatgttgtttgtgtgccactgtgtgagctgagtcacatggagttgatgtctgttctttctttgtctcttcattgctgtgtgtgtgtgtgtgtgtgtgtgtgtgtgtgtgtgtgtgttgggaattgaacggaagacctcaaatgtgtttgcaatcaacctaccctgagctctttcccttttctctctcaaattgatttgaaaaggaaaacataaaaccctgttttaacagagtaactcaataggacatttgttttagtttgttcagtaatgataatcattgtgtttcttgatagctgtttgtctgatattcttgatgccttctgtgctgattggcttatcagcttaaggggcagtgtctgtaagtgtggagtagcattgggccatctacttcctgtactagttaggtctgagtgccattgcactagtctgcccaaggctgtggggctcaatcaaagattttaatgaatgattcttagtgatcgatgtagaaagagcaaagagctgtat

SEQ ID NO: 18531 - DNA, 1221 bp, Mus musculus
tccccaattttggtacgaaagattgcataatacgtttgtggggaagttaagttttatttaacctttggtctttcttttctggatatgtgcacaggaacttgacttgccgattctgaaagtggctgctccagagattgtgtccggagtttctggagagtctgagcagaagctccgtgagttatttgaccaggctgtggtgagtcagctgtgcttacgtgagcttatcgcctgctgcaccctttcagtagagtctgcctttctgtgctagaattctttcccacctgctgaccttccttttgtacgaacgttcagtggtcaaaatttaaagtgaatttaatggtatagactcttggctatgtcatgtttcatatgaaaccaagtatataggtgacaagcttatactgacaagctttgggctgccatacccagagttaaagttcagaacatactgtcctgaagtcacttcatttactttgtctttccagcttatgtctgactgaacaacttgcaaacaccataagaattatcataattataatacttagggttatgcaatcaccgtaagactcaggatcaatgctgtttatatgattagaggggtgaaaagaagattctcataacagagattatacagtttagaagtggatattgggatccagttaaagtccatcttgagcatatactacagtggttaaatgtctgccttctcactgggaacgaacgctaaggaccagttcagtgctctcacacaatgcgatgggaatggtaaaatacccagttttcacaatcagaagattcactcatttttccaggttgtgtgttgttgccatgttatctagcctgccttaaatacattcctgacaaccaacctttcaacctcagccccccaagtgctgtgattatcgatgtacaccaccatgcccaactgaaagaattaaaacctttaacattgtagcaagagtcctgtagtcatgacatttgcacttgagcagacatgagtcaccgctgtgactaaaactaaaaactggcagggtttacatcactcagtctggactcaagcttcctgtgtggctgaggatgactttgaactgcggaccctcctatttctatccaagtgctggaattacagttgtgtgccaccacactgggtttaatgttaggtctttatttgcatctaaagcacacaattgctcataaacataaccattgtaactacctgaa

SEQ ID NO: 18532 - DNA, 1274 bp, Mus musculus
gctgttctggaactcactctgtagaccaggctggcctcaaactcagagatccacctgcctctgcctcccaagtgctgggattaaaggctcgctcatgcacatgagtgcggtgcccgtggaggccggaggcattaaccccctggagttccagtagcttctgtgagccacctacatggtcctctggaagagcagtaagtgctcttaactgctgagccatctctcaagcccctatttgttttttaatgacagccacaaattggttttaaattttactctccccctctcatctccgtgtgtgtactgtttgagtgaaaacgttcgaggccgtccttcatctgagcactcgtctgaggcctattctaggactctttcacaggggactgcagcggctgttgcttgatgaacctgtgcatgcaggtctgaatgtattggattccaggggaaccctaaggaaacattagtaattccagcttcttctttccacagtatgattctagctttgataaatgactgaagctggagaagccgggttgaagccaagctatactacacactgcacaattgaggagccagagactactaaaccacccttagaaccatgaccagagcagtatatattttggtctttgaacaaaaaaaaaaaacctatttttgctgtatttttaccacataaagtatttaaaaaaaataaattgagtttttgtagatttctgatttctgaactccagcaaatgaaggtgttttgtctcctctgtggctgtttggtagaagtaggaatgtgtgccagctttgcatgccaaagagagaagggacagacctaaaagagccattaatacagtggttcccagcctgtgggtcaccaccttttaggagtcaaatgactctttcacaggggtcacctaagaccattgaaaacatagatatttacattgtgattcataactgtagcaaaattacaattacgaagtaacagcgaaaatggttttatggttgggggggttcacaacatgaggaactgtattaaagtgtcacagcattaggaaagttgagaaccaccaccttagtagatgagctgcactgtctgaaaagccagagccgaaagcaacacagcgaatctggatatatgaagaaagtcatgttaatgtggcttaaggattgggggcttttcagctatgactttcagtagtaatgacattttaaaatatatttatttgcagtatttgaaaccttatgagccatgtgcccaaatacaatgtaattcctgcttccagaaa

SEQ ID NO: 18533 - DNA, 1919 bp, Mus musculus
tgtgtgcttccccagaagattaaatttttaaatgttgcatgtctctgtttttttaattttttttcatttgtttattttatgtatatgagtacactgtccttgtcttcagacgcaccagaagagggcatcagatccctcttttgagccaccatgtggttgctgggaattgaactcaggatctccggaagagcagtcggtgctcttaaccactgagccatctctccagccatctaaatgtcgcctgtctgattgagtgaggagttggtagcagtaagtgccaggacactgagtcccctgttagagtgggagctgtgctctgaccaaacaggaaaagagggttgggagggcatgcaaaggaaacctggttccctgggcctctgtaaaagccgggaaatgctacctataataatcttatgtttctgcctagaaaagggctaagcagctgcaccatgggagttactttatacttcctcctactgtttccctgtagggcaccttctgcttcactctaccttccagtgccctcaccgttattcaagcttttcaaacagacctgctgttggcttcatagaactgggagacacaatggagggcttttgtctagaatgtttgagcttaaactgaaagccatggaactaagcacctttgggctgtcttgttgggcctaagctgcagaggaggactgactgagaaagctgccttgtctataaagacccagcttaactctgaaacactagttatgaatggacacctattcctcatactgcttgtgtgtatcaaagccaggaaaggagagagtcatttttctggggtttttggaggtaggagggatgcttttataaatgctgaagaagaggatgtgtggcctaagtggctacggctctgaagcttgaggtgctgctgtatggtgatgagggtgtttgcagaggagctgtgagatctgagagggggggggaggggggaatgactagaggttgtcagagttctcaaagatctgaacattgggagctcagctcggtgtcctcttgtgctctcttcctgcctgccctctgtaaaggctctaaggttgaaggcctggccagtgcagcctgctgtggaatgcagccacattgtgtcatgtttccttaggcttttaactgtagcagatgccttgtgtctagagctgaggaagcaaagcccaagatgcggcacccccccacccccacccccacacacacatctaacatgtctcttcacaagaagacaatgtagcaagagcccagaggcttccttctgacctgctctgactttaaacctctgtactgtttcctgtgggaagtactcgccactttccatgtggcatctcttgtatgcaaactagattgtgcgctcctagagggcagagtccactctgatcacgtttgtgttgtcttccttacccttctggcgcctaatacagtgccttgcacacagacacaataaatggcagttgaataacaaattaatctgattgttctattgcttgtgtctgacttacgtcctttagttcacagaagcagttacggaacaccataatcaaagcctaccaccctatttccttttcttcaaggtagttaactttagaagtattctttttttcttaaatggtttgttttcattttattgtattggtgttctggctgcatgtaagtctgtgtgagggtgtcagatccatgcaactggagttacagacagttgtaagctctcatatgggggctgggaattgaacccaggttctgtggaagaacagctggtgcttgtaacctctgaaccatttcaccagcccaatagcacattgaacactagcagtattgtaaagccatctagacatataaaagatatttttattaattgggtataattctgactgctgaaattgattttgcttacaagtaacattt

SEQ ID NO: 18534 - DNA, 5098 bp, Mus musculus
gaccccttccccccagtgacaatgtagaaatgggaaattctaattactcattccctttgtcccttattcagcatagtcacaaggttacaatttaatgtatcacctagaaactgggagagacaactgttgttcagtggttatgaaagtatcaataatttgttcattgttacttaagtctactgttcttgatgctgattttgaaactttctaactggtatctttttctctctttttccctgcacatttcatccggtcttcattcagaggaatgcagtagcatggatagttgatggcaaatttggagcagacgacttctgtttaacttaaaattagtcgtattttaatggcttgggatttggtgcaaacaaacatgattgatagctggacagacatgctcgtcatgaaaaaaaaaaaaaaagaaccattttgaagcccgattggggccaaacatttacaccttgcttcctagtaaccagttgatgaagcgcgtctagaacgttgttggacaccatgttgaattattccccatcggttgtgaagaactgtgctacattcaggcttacccattgaactcagtatatatattttttccctcctgccttttgtctggtgggacaccattcttgttgctcttctgtgtaatgaagttcaaatgcttgtttggaaactttatttaacagtttagaaggcttgataggaagaggtcattagtctgaagagtatacattggacaggaaagaatttcctttcgtttctccaaatctttccgccttatttagcgtgagatctttgcagcttggttcatggattctagccttgcccgttgcgcagtatatgctgatcagatgataaaccagtgaactatgtcaaaagcactctcaatattacatttgacaaaaagttttgtacttttcacatagttgttgccccgtaaaagggttaacagcacaattttttaaaaataaattaagaagtatttataggattaaagtgacttcatttgtatacatttggaatctaaaccagcttaaaaacagtgtcctctgtgactgagatatgcagtgtaactgatgctcttctggagtgccacgtgagacatggcatggtcagaaacagtgttcagaaggacacggcacaggaaagccagagagatactttcccctttttattttattcctgaagggacatcagtacctgatactgaagaaattcaagattcaaaaggaaaattttataaataaaccagtacagaagatcagcatcagtctaggttttcaagaaagcttgttccaagttctctgaacttgagggaatcgttttgatgtgatctagcagaagtagacatcagaagatagacctactttgggaatttatagtgtagttaaatcttagaggaagtcagcaggctacaaacatttatgtaaactggaattaaagcctgagtcatttctcctaattgcccttaatgtccaacatatagggacactcatttaaagaagattccttctcagcttctcagatgttgccataatgaacctcattcaaactggtgctgtggacagtctttccctctccctccccttttagtttacgggaatgtttcctttatggaaaaaaagtgacttgtcattttgaagaccctatatctaacataagcctgattgatgttcatggtgttttcaactccataattgctgggtctaaccagtctcccttgaaatccatgttttccaataggagataaccagggtgaccacagctcttggaaggaaaagtggaattaactccaatgtatcctgatgaacaacaacaacaaaaatctggtacaacttgcccttgaggccaagccaagtccatagcattcaccatgatcatatgcccctcgggatcctgagagaagagagaggcttgtactgaggggtcttcccattgtgggggtcgcagggagggaaaagccaggaaggcagtggtcattctcccaaagtccacccatcgtaaggaggtgacagatcggagtcagcagattagtaattcaaatgggtaatggaaaagattcctttaagcttcatttttcagagaccatcactttagaaaatcagagaaatcctgttttgatacttcttagttaaaataatatgttaccgtttatctggtacttcattttcttgactaaaattacttttcactttaagcttgaataaaaattttcattcataactgtatataattaagtggcaactcctctttacctcagtgcagttaagaccatcttttgattgatataccctgaagccattaatccatacacctcagtctacagtaacaatccctaacaccatgtgggcacagaactccacagctgtttacagatgtggttacagtgtaccacgtggcatgtgcatgatgctccctgagggctgtacccatcagggcagttttgtatccagctgcacctagacccgcctgttcactgcttctgaagtacatttaaaaacactgggaggtaagagcgtgccccgaaggtgagggccatgaccagaacataactcctgttagagtggagttacaactatgcaaaggtgttgatagtagctaggtgagttcggtttccaagtctgtcttaactggccgctccctctctagactggtacttgactgtgccaatttgctgtaagcatctgtttcgtatatttgccatgaagtgagtgtggtagaaaggtgaagaaagctagggtttatggtggaagaacctggtgacaggattacgtgaaaatctctgacattgtgataaactcgataaaggcttaagagaattctgtcaagcctgccacaagatgctaaccaatgtataaactgaaaagtaccaatactttttgcacatagatcaaaatagtggagaattttggctccaaaaatcaggttagtaggctcaattccatgtgcttaaaatgtttctgttgttaatgcatcgattaagggctagagtaagaatggaattaaatgtctttttcctctaaattaactggttattagtggtaaagtgttggatttggggggggggtcactgaggttggtttgtgggtggtgatcaaaagaattagcatgggagttaggggagatgacgaagcttcacacttggggtttgaattccattagtattcgtgccagctgtgtggcattgctcttcctggccagttaaatgtcctggtaacccaggtaagtagtaaaaacagggcattttacttgcaaatgtccccttaaattggctcattttattgggtaggagaacaaaaactagaattctccgactataagtaattaagtggacctgctaggcaaacagaagcagtaattccgcaagagcagttgatgaggagcagtctgccttaaggggcgtcctgtggcattaatagaaaatcctttcccacccctccccatcttgaaattttcttttctaggatgttggttcctgcaaacaagaactgaccctctgcctcccttgggtacacgtcttgcacatctcttgaacgggggcaatgcctatgtcgtttactttacagcagaagaatgggaggagaggagatacattgtcttagttgttcccattttaaaaaaatatatttttacttaattttactttgatgtctcatttagacatcaccaactctccctttgtgttgctggccaaagcattcccaccatttccaaaaccatacctgatttcacataaactgctaacttaaagggtgaatttgcatttacacttagacactttctaaaaacagggtgaaattaacctaaactttgcagtgttgagttattgttatagtcgctgccctagagttgcaaaaacaagctgtaaaagcccatcccctatctacttaatccagattgcctggatttaatgaagttaaaagagtgtgtgtgtgtgtgttttgtgtgtgtgtgtgtgtgtgtgtgtgtgtgtgtgtgtgtgtgtgtttgagtgtttgagaaagaacttgattcctaaaatattctagaaacaacttttaggttgtcatttttactgaatgtcttgtgcacatgtaaagtaccctctcttgagtttaaggcttggttaatacttgtctatttttataaaacttaaaactgtgtcccatctttaacttagacatttacattatcaggatcaacatgctagaattaaataacatttgtaggctcagtgagggtaaatgttattggcagagagagagagagagagagagagagagagagagagagtgtatgtgtgtgtgtgtgtgtgtgtgtgtgtgtgtgtgtgtgtgtgtgtgtgtgttttcctgagggagatcccgaaagcatgtatgtgcttataaaccaagctgtagagatcatgtaaagacgctgggtgttgctctggaggtttctgagctatggaaagggatagggcattgtggtgtgatgtagctaacacagagctcttggtatggagtaacagttaactatggactgatgtttccagacgattgtgttcttaatggggtttgcttttttatttgcctctcagattatgtttagtagtttaaatttctttgttttattatttcattaaagtataaaaacttcaggtctcatatttattttcacttgttctactaattatttacaagacactttttggttgacatttattttataaatgtgtggtatattaaatgtctttaattttttttgttttattgaaattacagtaactttgatttgctttactgggatttttaaattttattttaattccactttttccatgtcagtgcacagcacttgcccagtcctttgtatcccctttctgtcgattcaataaacagaatgagtaattaagtaattctcgttgcgttccatctcaccagactgccgaactggtggccatgacgtagggtttgtgaatggaatctaaggaaacatttttagtgtacctgaaggccattgagcacccagtcatggataaggtagattccaaacctgtacttaagtagaagcgcatgtgagactcagcttggagtagtggtgggttaagatttcaattttcaaatcactcattagagggaaaaca

SEQ ID NO: 18535 - DNA, 1118 bp, Mus musculus
tatagaatgtgctatactaacatgaactgtgtctgatggtgagggacggaagaaactaaaacgccctgtgctgcctttgtgccgagtagtgtgctcagagtatttgctctcacatatgttcatggtcttgtaagagaaacatttttattttcattttatagggaaggaaccaaaatatggcagagctcgttaacttgttgaacgctgccatttcggcaaatctaggtctggaaagttttccccaccaccttgatacttgaagatgaagaaagtcataaagctaacagatgaggacaaattcttgattaaatataatagtactagagagaagtaataaattttatgtaaatatcttttctttttcctcaaagagaacaagtaaaaacgtctcgtttggaaggaaatgacttacagattgttttgttcaatgtattccacctatacagttggtgtttttgttttgttattttcttgtgtgtgtgcctgtgtgcccatgctacctggtatgcatgctgggacctgaatgccagtcctgtgcaagagtaacaaatactcggaacttctaaagccatctatctctccaagcctctcacctaaataatttagtaagaaaaatgtccaacagttttaactaatgatttccattggagggaaggtagccttcttttgttttttaaatatataaatagagagatgaagctggggtggtgatggtacacaccttttaaggcataggtgggaggcccggtttacacagagaaacctatctcagaaaaccaaaaccaaaaaactgcacacagagatgagtgagaatggaagcaagcatgtgagccgcacgagtggcaatgctgggacgaggaggcaccttctcctggaggtgttcactgctgcctgcctgtcctgcgtgggacccaggttcctgcccaggcccactctctcagagccaattctgtagttttttattttgttagtcattcagaacgtgactgggagaataggaaagtgctggtcatgcggtggtggcagctcctgagagctgttgacccacagtgggctaagagtccactttgtactccattactttagtcaatgtggtaattcacatgcgtgggtttgcc

SEQ ID NO: 18536 - DNA, 1195 bp, Mus musculus
agacaggtttcggctccacttgcaataattttggaatactgttcttcacattcagaaggctttagtaacctcatgttacccacatgttaaaaaaaaaatgtatagttgtcttgcattccctagtggatctggtcttatctcagtctttctttttggctagctctcttttaaaaagccttttgtttttattttatttttagttagctcataaattatgtgtttcagattgtacggtgtacctttctggaaaggttttaatctcttgccatctctgtgaaccctttgtcactgttgccgaattgctaggcttgtttcttctgaagacctcctgtcttctccacagcccgattatgtggagtttctctgtcaagactcagctcctgccaggcgtgatggcacgcgcctttaatcccagcactcgggagacagaggcaggcgaatttctgagttcgaggccagcctggtctacagagtgagttccaggacagccagggctacacagagaaaccctgtctcgaaaaacaaaaacaaacaaaaaaaaaaaagactcagctccagtgaacctccttaggggagtgtctcccagcttccagcctttggtaggactatgacttgttaaggactccccaggaccggagattgcggatgagctcatccgctggctctcctgaggtcacttaaggggaaccttctagatctctgtctcctggctttatctcttctgtcctcctacaaaagaccaagctggggctaggactaagtcaagttgcctcttagggaaaagttgcatgtgtatttaggtgcttaattaacttctgttctactatatggggctctatatgaaagccctgtggtaggtgcaaaatggaggaactgctgtgtctggttctacagtgatggggaagcagggattttctgtgtgcacagctgatggtgtcactgagaagcagacgttttggttgtgccaccttgtcagggatgctgcaaagtctgctgctcagtaggttgttgaagtaattggcaccaaggcctttgccaggcttcaggttctcttgggactgtgtatatttgaggctgacagcgagggtacggacgtctggagggcagaatccctgtgtgttcatcttaaggctgtgtttttcaaactatgggtcataacccacttgtgaaatccatgtacttagccataatagat

SEQ ID NO: 18537 - DNA, 2070 bp, Mus musculus
cgagtgccctaccgcatattcccctacatttactgacctgtgctgcttgcctggcagctcagacctctcccagaaacaagggaaagtccaaatgaactaatgtgatgcactgacaggatctctaggtttgtttttgagtcaggactatagagccaaatagtacatcttttaatgtagttaaatttattcttatggcagttaaggatggtaaaatttgcttattaggaaaattttaatccctaaaaatcttaacttttatttttgttggttttttttttttcaattttttttttctttttgccatttgatttttcttaattgaaaactcttattaaagtacatctacgtttcattgtgcttagaacagaattctctttaagtcagtttattagtctataaatcaagcaaaacccagcccaatattggtgttatagctgaagaataagggcagattacttgcaggacctgtttaaaggaccattcatagcagtgactccacttcagcctttaaaagtgcatttggaaatataaacacatagacgacttttatgtaatatatggtaacttttgatttttctgtacagtttttgaatgtgagataattgtcagaaactaagtagttttttaacagaatattttcagtgttttaaattaagttttgtaaagtaattacaattcatttaaagttaaaacataggaaagttatttttctttatccaaagtttgtgaatttggctttgctacctcaatttgcaggtgtgtgtttgcctttataaaatgttgcaaatagaaaaaaaaatatatattttttgagtaacagcactatttaaacatttttacacacattggtgttggaaaaattgccattttaggctactatttttatatattttttgacttaaaattcaacagtgtttttgctactgtttagctaatacagtttatattaatttgtatcctttatgtttttagaactctctagaaaggagttctacctgatacaactttaagttttctctctgtttaatggatgtgtataagctgtttgtagccttcagtactagtgaggttggatagtttcccagtcactgtccctgagcaggacaagtggcaagttcactagacttttttattcaaagctacattgtcctcagagtaaacataaggatgcaatacatatagtgtgtacatttgggtttctattacacataccacatgtgagctagatgcaaaatattcaggtcttcctgctctgtagcttagagtgtcaagtggctgtgcccgtctgatcatgccgtgctacgctctgcattctgtcattctttactgttttactagtcctaaggtgttcagcaggtggttttctatcatgctttctgctggaatcaacatggtatgtgttaataagcttacaaggaaacaactttgggttctttgcctggttctgaaagggcggacagtgccacagtatctggacattaggtgcaagttgtttttaatttgatgtttggcaagctttgtaataaaattttggttggaaacaaaaagttgaaaataaagagttgctgttagagcctcatttctttgccacagctttgggattaccagcagcaagatggccaactctctgttttgtcataccactccccctcccccttttttccttttttgagtctttctgaactctaggaacccagggacttacttacttagcaaagcaaaaactgtagggcctgactcagtggtggctcgcccctgtaatggcagcaggccaagagggtgggtcaggaggatctccatgtgtttgaggccatcctgggctggagaggagaccttgtcttaaaaacaaatcccaacagtggaatctgagggcttaggggtagatagaattcctaaaactggtcgtgtttactgtttgctgtttaagaacaccaagtgcttaaaaactgctataggttctgtgacactttgaagcaaatgtatatgcatagtcgaagctttcgtgttctatgacagagtgcacagccactgcttgcctgttgaagtctcccacacctcccgccaggtttg

SEQ ID NO: 18538 - DNA, 1184 bp, Mus musculus
tgaagaaaaaaattgaaggcaaaatttaagtttttttcctcatgcttttctatttagttctcattaactctaagtatgtgactaaaatccttcagcagctctgactctctgcctgtttacttttgtcaagtagtaaattccttcaaaacaaaacaaaaaaacaggctgcaagttatttggttctgacctaagatatttttttttaagtttcctatggactgggtgtggaggcccatacctttaatctgagcacttgtcaggcagatgcaggaggatttctgtgagtttgaggccctcctgatccaaataaagttccaggccagccaggactacatagtgagacctcatctcaaaaataaaacaaaaggtcgtatgtttaaaaataaacctgtagtttccctagaggtgaagtgagctctcaagatcagtagcggccctggcttcccagtcctgtccttcgcttccccctctgcagtcgtctcctcagggagcagaggcccaaggtcagcacttggtgaggtaaatgctttctccttcccaggaaatgctgtctacgacttcttcattggccgagagttaaacccgcgacttggtgctttcgatctcaagttcttttgtgagttgcgccctggattgattggatgggtatgtctttttttttttttttttttccaataatttcaatggtatgacttcatcttgtatttagaaggaaatgtaggcaatttttaaagattatagttttccctaattgtgtcttaacacatatatatttatttatttttttactggtttaagagaacttgttacggattgttaaacatcacagatatttttcaatttttattacatatatctaggaagtgatagtgaagatggaaagtaaagccttatttgacccagtttcaggcttggaggacaattacagacatggaaccgagactcccattttctttcgccggattccttactaacagcaggctcagtcacagtcccgtcaagggcagtgctactgaggggatctgtaacccttattggggttcattggtgcttaactgttgctccattctttcatcttggtctcctctcactatgctggttccttaggctcttgtgacggtgtcgcccttttgaagagcactgttcgtaagaccatcattccgttgttctcctgatcagagacc

SEQ ID NO: 18539 - DNA, 3948 bp, Mus musculus
acagactccttcaaaagaaaattacatgtctaatacaggcagtgagtgatgttgccgatagatagggtgttagccggcgctgggtgtcgcaaaggaaataaaaccccagggaaagaagtgtgcatcgagtctggctctgggattcatccctgttgtggtgggaatacacagtgtgtatgaggtccctagtattgaaaaaatcaaaatgcagctttaatcatgaagtaagtaacacaggaacctttttcaagtttgatacctaaggaaaaaaaaatgtttgaaattcaatattctctagtcaattctgtctacccagccttcctataaagttttggtttgtttttgttttgttgtttttaagattttaaacttcttttagtagagacatagaagattgtcattccatggccaagtttcacctaggtgagttttggcatttgatattctaacttctggaatttctctgagtattttgatcctcagttctgaggtctgtctgtttgggggtggggcggttgtctttaaaccacaagccctacatgatgccaaagccaccaggcctctcttgtgtatcaggagtagaactaagttggcttagccctttggggaccaaccttgttgcgtagtgtgtggtaccagctttgcgctttgcctgggaaaactgtatctcagaaaggtaattaggaaggtctcaatatttaggtggtggtggtagggacaggttaaagtctagatacaatttctgttgaccacaagggcagggagcagtttcaggagtttgtctacttactctggacaccttgcttcatttgctgacagtgaacttgggcatctgtggttcctgtgagacatctcagatgtgtatcttgtctctgtgctcctgtttaactgtggatgtgagccctgaggcacccagccgttgacttgggactctgccagattacatgtgtgtaaggtcccttctacttctgggatgtagtttgagtttcttcattcacatgtcctcaagctgtgatcagtctgttatttcacccaagaaaacagaattcttctgtatgcatatgggtgttttacctccatgtatatatctgtgcaccacacatgtgcctgctgcctttggaggtcaaagaagggcatcagatcccctggaactggagttctagacagtagtgagctaccctttggatgctggagcttctgaaaatacacacaaagtgctgttaatggctgagccatttctccagcccccttctctctgaccttaaagagtagcttttgaatgtttagaattactagatcgtgtttggtgaaatctttatatcctatttatgagtgaagtaagagcaaatggccattctgagaccaggcagtggccattgttagtcccagctacgtcagctgtgtgctttgctgaagcactggggcagcttggtggcttcaggacaagcatgtgccatcagaaaggccagtgttctctgaggttcttctcttcttccgtggtaggaagcctccccatgtactcatgcctcgagctgtttctaagctagctgactgctgcactgctgtgagcagtatcttaaccctcctctttgccaggggagaatgcacctcagctgtgttactgtgtaccgtgtcactagcaacttgaaaaggtgacaatacgagtctgtctctagcctttttattatacaaagtccattcattcctagcttcttgtttttaaactccgactttactgcaattaattgacagtcccctctgatactgtttaagtgttgtgatctctcgtttgctttgtttgtttgtttgtttgtttaaggcagggtttctctatgtagccctggctgtcctcgaactcttcttgtagaccagaatagcctggaactgagagatccaccctcctctgactcctgagcactgggactgaaggtgtgagccactgcctccacctgccccactgcttgctttttcagataagtgactagaagataagtctgggcatcttgtcttcctagtgtattttactctgattctttcctggtttatgtattgagattcatttctcatagacagaacttgctttttattgtgtgtagatttggagggaaggatcaagttattcccgtaaatgtaagcaagctatcttgaggcatctgtagttgatacaaaatatttttataatatattaacaggcatggggtacttttgaggcagcctctgtaatctgtagccacccacttaatctccagggtcccccattggaagataaaaggccactgtatctgtagtttatctagaacagagcttcaggattccagctggaaagacttgagggcctaacccctgagagaggtccagcccctctgcctgatgcaggcctcctgctgccttcatgctttctggagggcctctggcagtcagaatgagtaggtcagtgtgtggcttgaaagctgtttctaacattgattttgtttgtttttcttttgttagggttttttttttccctgttttgtttgtttttaagagattttggttggttttggttttggtggggttttggttcgtttgttttttgacaggttaggaagtcagtgatgacccttactgtttcaagaagcagattaaattcttaaatacattttccttctcagacctcaacttgataaaccaaaaaacatacactaggatagcacagtgtgtgggattggaaggggcagtctcagagatgagctggagcactggagccctcggcgcaggacacgctgaactttcagtctcgtgtcctcgtcctttgctgtagatactagcaatgtgctcttccgtcctttaaacacgcccacagctggactccttggtaaagggtggtgaagatttgcagcctgccaactgggacttttataccctagagtcgggagtggactgaagtcagactttaggagttaagtagatgctcctccggaatggagagttgtgttgtaaatcatttgccagctggaactttgtgtaccatatctcggtgaatcttagggattataggccttgctaaagttcaggagaaaggaaactggccacagcttactgtaaggttttgctcaattgactgaaattatttgaaagtctgtctagaacacgatttcatcaagtaacaccttcgtccaagctcggcccacgtttgaggaaggggaagcgagggggcgagagggaaggcgggatgggtggctgaggatcaggtagcgctggagcttggcaccaaagtttctcatgattgcatatggaggaccacttgtgatccaccctcggaagactcgccagaaagtagcagttcctgctacacactacagtgccttccaacgacgttctgtgtgaactgcatgcagtttcgtgtaactccagagtgtaacatgtatgtgcatgatctgtccagaatgtgcagagctgggattcaacagaaagggctgcgccctgctgctgctgggtcagcaggctgctggggtcggacttgtgacttaggcttgcagccttggatcctggggtttgcactgatatggttctgtcatccaatcagatctgtctcccttttagctcctttcctactttgcagctttgctgattttaactgcttcattcttctgcttcttggtatctttcttttgaaataaaaagacacaatacctaattcaaaagagatttgtattcatttttccagttcctcttcatttacctcatgtatggcaacgatgaagcctggtgccctgttcgcatgattgtgagtggctcgcactgcactgcacttggcttgcccactcgcccactcttctgtattcccgtccaaggaggagcaggcaacctccttccatttcccaggatgctcctctgccccctttatctaacagtgttgatggaaactcagtgatacattcaattagtgcaatgatggggcctcagtgg

SEQ ID NO: 18540 - DNA, 3864 bp, Mus musculus
gttgttggaaagctgctgtatttttatcattggagttatttgtaaaaatgaaaataaacagatttctaagtgtcaagtgtagaatttggtgtaataataccaatcaggcagatttttctctccactcgtccatttccattgaactgcccttgtttttgagcccacagaaccagtgttcctgtcttaaatctacaagggagggagtaagtggacatagtcgtgtgtgattagtatctttataaattaaacatctgtgcagtgaagatgtagatcctgtatctttgtatgaaacagttagaacagaaccttgaaagttgttcaggagcgacccgttcctctgtatctcctctggtggattgactctggaaaccgtttcttccctgttgtagcaatcaggcaggagctgagcaagtcgaacactgcataaagaagcaaactacggaggggcaggacttgaatctggagaaaacaaaaattcctacaaacaactcttaacccccaaacttttaagctgtaagaagaaaatggatacacagtcaggagggaagccgtcaacctctgaaagcctcagacagtgactctggcgatcagctgtcccctcagtgtgctgctttattctgtctgacctttaccacaggatggagaatgatattggagttcccttagcagtactaaacccgtcaggcaagatcaccgtgcattgaaatattttcatgtctagatgagtctgcacgttttccataatccattgctaaaataaagacgagaaaggcttcagagatttttttccagagggcgctgatgaagaatttgatttagtaagttctgctgttgcgttgtaaatgtttctctcaggtttgtcttcctatcatatttgatattccgtgaacactaagatcataaaggatggaacaaacggagttgtatgtgctttcagagggtggtgtttaatacgaaaggtcccaaaatgtttagtcccacttgaggaattttagaatgataggaagtctctcgggttagccttcatgcaattttgtagtttaaaacataaagtccgtccagaaattaaagatttagatgccttcctaaattgttacaatgctttaccaaatctatgacttctacataaccaacagtggtcaaatggaaaacattctattatagatttactgtaggttttcaaccttttttagacatatgcatgtggacatttttataatgtaattacaatcaccacaaagttagcttttttaattacagacaataatgcatgtcacactaatatgtagtggccttttcagggcctagtcccagggaaaatattttgtagaatatagggaagtgggaggaagggaaggaataactttttatttaaagttaatttctgcactatcttttttttctcaattatctgcatgaattataatgaaaaatattttgtgactttaatcagtaaacatgttaacaaaaccaagtacttaatcttttacatcatgtcttcagctatttgtattttaaccagcaatttcaacggtctgaaacatgattctgagcgtaacatgtgagtccgtctcactgtggaactcacgagtttgatcactgaatttggcagttattttcacgcggcccccacagtgctgcagtgcttgggttcacgctcctgactctgcggctgctccttgacctttgctgtgctaaaatacaagaaatatcaataatggcagcaaccagggtcacataagtcactaggtaagggagaccaatgaggagttctgcagctttcttttaatagaactaaagtgaggcttaagtggtagggagtgtctgctgttacaccctgagtgtgtgtgtgtgtgtgtgtgtgtgtgtgcgcgcgcgcgcgcgcacacacacacacacgcacacaggtgagagagagagagaaagtgatcgagcttaagagtgtgtgatagatattatgttccacccctttataattggcaagattaaaataagggagaaaattttatatgttgtaatgttagctttttggaaaatctaggaaatcaaaaattctccaggctgtccatcatgatttatgcttgagttattaatgtgccatatttgctttggaatctttggctatcaaaacttttgctaaaaaaatagtagatacaatccactttgatttgctttctagatttcctatgtctcagctgtaaagcaaagcttgatgagagtagttttctaaaccctgcagtttgcagctaaccccactgcagagccgtgtgaatgaggggttttgttaagagtgtttgtttctgtagaaacttcatctttagattaaagtgtgagggatgagcggtcataagtcaattctgtggctttctctacccatcagtcgtcgtctcgcaggaatagtaaaggcattaaggatgcggcaagcatgtacgctgttctaaaagaagtatgcatctcatttactgttgaacgtttgattacgcaactactttgattgtgtacgtgtgtacatcccttacagatctgatcaaaaatcgcttttcattttgttgctaatgttaaatagtctgtagtacgtagagtactgggtctagatggtccaaagtgagacaaaaatgctgaagtcaaatgctaagtcctaaacaaagctggtttatgcactaaacgttttgtgccttggtctaatatttaacacaatgtctgtaaaaatgacaaaaaaagaaaaaaaaagaaccgacattggctcatgctgtatctgtatcctccatgatagtacgtcctcccacatgactaaatgtgctcctacctggatgcttcactgtcacccaggacagtcgtgtcgtcgctagagatttcagtgactacaatcgcaagctaaagcttgagttgttttcccaaaactgttccttggaaccatattgtgacggtgggtccttgcttctgtgtgttgactgtcttcagctgagtccagtttagggatcgtctgtgatgacaggaaggctctgctctcctcaacactgtgatctgacctgcgacaactctacaatacactctgaatggctagcacgtccatagcaaacaatctgaatgtacaaaccttagcgtggtgctgaaatctcttgagaatagtaaccgtgatctcaaagtctgttcaaaacgtgtcaatcagaactgaagatgaaccgctgatgaatgtccggtcctcatgccgcaggcgtgtttcctgtctaggttttcagttctctgctgttaccaccatagctgttccagttaactctcctacacactaacttcatttgtgcgattgaaataaaattgcagtatgtgcatgtttcttgtttgtgacacttagatggtcttctgcaatgatgtgttaattccaaaccaagtgatactgggtgtgaaatcagcaccttaggaagcccagggtttcactgtttacagtttaaacatcatgtcactgttctttaaagatttcatccacgtctggcgtagtggaaaacacgaagggaatatgtaatgatctttctaccttttgttttgcagtaagcgctgtgtgcctcttctgtcttacatgctcccagcacagcttgtagtcaatgtggtgaaaagtgttttactccattcttttgtcctataacacagtcatatatatatttcacttcatttacacggttcattttttttctttatgtaatttgcatattaaaggatattgccaagtaattaactttaaatgtagcagtctgtaccctctacagtgatctctttatgttggctttttatatatacttatatatatgtctcagcacctttatctattacaaagttccattttccaaacttgtaatttcctcattagaa

SEQ ID NO: 18541 - DNA, 2288 bp, Mus musculus
tgtgtgtgtgcatgcgtgtatgtgcgcataattttctaaatttgtataaacatttgtcttcaaatccctggggggggcggagctcattagttttattagaaaaagttgaatattaaatggttgtatgtgcaccttggctttcaattctaatatccttagttaaaaacaagtattatgtattaagtattatgatagatcattttgttcagtgcagtgtctgagtcacttacttgagcatggcattctgtatatctgcccgtgtaacccacagtgatttagctgtgttgttaatgactgtgttaactttccttcctctcaggccttgtcttgggaccacctgcacctccgccaccaccccctctcccatcaggccctgcctacgcctcagcacttcctcctcccccaggaccccctccaccacctccactgccatccactggtcctcctcctccaccccctccaccaccccctcttcctaatcaagctcctccccctcctcccccacctcctgcccctcccctccccgcatctggaattttctctggatccacgtcagaagacaatcgccctttaactggacttgcagctgcaattgcgggagcaaaacttaggaaagtgtcccgggtaaattaccaaattactgaccttctaaatgtgtgtcttaatgtgtctaaatgcctaaaatagtgacattactggcatgaacactgcctttaacttgactgattaaaagccaacataattcaacattttagaaaagtgtatcgtgaggagtttctgagaccatcggctcaggcttagcagtcagcatctgactgacagctgccttttgcttgctttgcctgtacatccttactacacctcagtgtaaatttggagggagtagcgagtgacttttaggccatggtttttctagttcaagatcatttgttaaattagctgtaatgtttgtttgttttttttaaatcaatgacagttgctcagtttctatcacctttaaaaacaatgacagttggtttgttttgttttgttttttaattatctttcagtttggtttatcacatttccccctcaatattggatttaaatgatatgtttgggatgaggacaaaccataacaaggattttatctttcccagtgtatcatgtagatagataatattgtttcatcccattattggtgatcgtaactttgataaaaattttcactgataaatgaagtccatgttattcactctcttggctcttcaaatttaaaaaaatatactgttttggaatcaataacatgttcttctgtgttgaatatattggcaaaagttattatctacaaaggaaattattatgtatatgtgtgctctcattaaggtggaggatggctctttcccaggtggagggaatactgggagtgtgagcttggcctcatccaaagcagacgctgggcgtgggaatggacctcttcctctagggggtagtggcttaatggaagaaatgagtgccctgctggccaggaggtaaggaacttaatgtgatgcacatgtccacagtcagaaagatttagaacaaaagtagatagatgatagccagaggtaggtaggtaggtcatataaaatctttaatgaatttaccttttcaggagaagaattgctgagaagggatcaacaatagaaacagaacaaaaggaagacagaaatgtgagtggatgtaaactaactctctctctctctctctctctctctctctctctctctctctctcagttcattcagagacgcatgtgaagattaagcatctgaatgaacttaatgtttgatcttatgtttgctcattttattcctaactacacaaccagtaaaaaatggcttgagtgttatgtattaaattgtaatctcatttttttttaaggtttatttatttattatatgtaagtacattgtagctgtcttcagggcgtcagatcttgttacagatggttgtgagccaccatgtggttgctgggatttgaactttagaccttcggaagaacagtcgggtgctcttacccactgagccatctcaccagcccgtaatctcattcttagtgaattgagttgaatctggggaggtgtggggaaagttgaagttcaaacctataaagttaacttgttcttatattcaccttgaagggagtgaatgaattcttacactggtgaaattttctaatgtgttgggtttctcaatttctttgtgctatgtgagattaaagaattttattaagtcaacagtttataggttaccttatacttttagct

SEQ ID NO: 18542 - DNA, 1616 bp, Mus musculus
ttcctttcccatcgtagtaaacatttcgccaggtttgaaaccacaactcggtttattctgctgtttataataattttgatgcagtttttagtggactaagtaataaacattaagactgttactatccttgtagaggataaattattaatccacatatttaaaagaacttatttcatcctcttttgggtttcgaaatgtgcttacaagttaagttttctccagtggagacagttatttgcctaatcccctggtgctaactgtcatccacgtttgtgcgttttgtctgatgctggtctcgggcttcactggctccctttttctctctccttttttatcctgtctttgccgctgctttccaccttatgtccagctccatcttcagacagctccctgtctagtgctccacttcctgagtattccagttgccagccgccttcggcacctcctccatcatatgctaaagtcatctcagctccggtgtcagacgccactcctgattacgctgtagtgactgctttgccacctacttccacaccccctacaccaccactgagacacgcagcgacacgttttgcaacatctctaggttcagccttccaccctgttcttccccattacgctacagttcctcgtcctctcaacaaaaactctcgaccttcttctcctgtgaacacaccctcttctcagcctccagctgcgaagtcctgtgcctggcctacttccaatttctcgcccctccctccatctcctccaataatgattagcagcccccctggcaaagctactggcccacggcctgtccttcccgtttgtgtctcctctcctgtgccccaaatgcctccgtcaccaacagcacccaatgggtcgctagactctgtaacatacccagtgtctccaccgcctacctcagggccagcagcgccacctccgccgccaccgccaccgccaccgccgccgccaccaccaccgccgctgccaccgccgccgctgcctcccctcgcctcactctcacactgtggatcacaggcttctcctcctccaggcacccctcttgcctcaactccctcatccaagcccagtgttctcccttctccctctgcagctgcccctgcctctgcggagacccctctaaatcctgagctgggagactcctctgcttccgagccaggcttgcaggcagcctctcagccggccgagtcgccaaccccacagggtaaggcttcacttctgctgctgactactggtcattctgaggagtgcagagcaactttgcctgcctagaagagtggctgggtcctatggatttcatgattgagcgtctctatgccaaagtgctatttggggttgtattattattattatcattatcattatcattatcattattattattattattattattattattatttagaacattaaaatgaaggattttgtttttttaaatcctgggccttagttggaatttagtatgggagatgtccatattaaacttaggttttagatcgtttgcagtaagtactgtattataggtgttttctaatatttagggatcctagtacttctacattcatcttaaacttcactaggagcacttgactgtttcatcttcc

SEQ ID NO: 18543 - DNA, 1149 bp, Mus musculus
tggacagtcccttacttcagcagttggagcatccgtcttcagcctactggccagggtcatctgacagacttagagaaacaggaatattaaggactagcctactgtctcggcagaatcaggatgtcctaacctgtaattgtgtccttcctttctttggacagtattatgtctgtaaatgaaatgaggcaatttttgcctagtggctgtttcaccacaactggagtaactcaaagatactcagtttcgtctttgaatccaagacagggaaaactgttaggagcagactggtctcaacaagtgaataaataacattaaacttgtggacttttgatgtttttgaaaaccaactatctatgtaaagtaatctagactgttgtctgttaactactctcagccatttgtaattaaaataactgaaagcactctaacaataaactcagagccatgaatttcctatttggccctttactctcaaggcttaaacagctcagatctgtttacaataacagcaatagaaggactgggtctaagccctgtgcttcaaaatttttagcatcaaggacaacctgtaataaccaaagcctcgggaactgggacgaagacttcataacttcaagatgaacatgggcggtgaaatatttttgaagagagggggaagggtagggaaaatggggaaattcgttggccacaccaatgattgtattagtctcggatgtttatgtcctgactgaatccggatgaaaaaccaagatatcaggagttcaggcaggtcagttcagcatgtctgatagtgaaattcaccaaggctgtatgttctgtaatctataaatctcaaaacaaaattttagtattatccagataacctttttgtttgattcactggaatctagttctcagggggtctccttctatcaaatctgatccatataagtctggaaggtgtaataccttaatcaccttttccaaaaacacaaagacaaaaccttttccccaaatgagcatatcctttagctggtaaccaggaaaacctgtagcttgccctatgtcccagaggaacaataaaacaactacaacactcaaaatcacacacattttagcctatttaggcctttctaatttgtcatgtcaggatattaacccaaaattcct

SEQ ID NO: 18544 - DNA, 1252 bp, Mus musculus
aactgaaaattacttcctgagttctagagacaggaagtccatgatcaaggtaaaaataggattggcgtcctctgcggcttctccccaggcacttgtgctaaccatcctattcccacctcctagtatgcccttgtgtgtgtggtgcttctcatccctagagtggttagtgtgtaaaaagtactggtaggcagaagctgtcctattcagttcttcagaaattaacaaccaggcagggtggtacacacctttaatctcagagacaggtagatttctgtgagttcaaggctagtatggtctaaatagtgagttccaggataaccagaggttctgtcttggggagggggtgtgtattaaggatcccatttttatgttgcctcttgaatctgttaaaagaggtacagggttggaatcctgatggtcattttttttctgtgtaagtaagccatcaaatgactcttaagtatgactgctgcctcccagttaaattatggctttggccctgaaattcccttgatcagatagctaactagtgatttctatttcagagagctgggggttggggggagttcaaaacccaagttattcctattttgaaaagcaagaggagggtgtgtgtgtgaaagctactctaggggctggagagatggctcagcaattaagagcatggcagcccacaactgtctgcaaatccaagatctgacatgctcacacaagcataggtgcaggcaaaccaccagtgcacataaaataaacatatatgcatgcacacatacatacatacatacatacatacatacatacgccagagtttaggtgctcagctgtcataccatttactacatctgctgacaattttaaaactacagttactgacagtgacttttcagtcattgcaaagccccaaaggtcacttatacactcctacatacaaaccagccatgggtttggaaacctgtaaacttgaggggaaaatgacttgaagaaacaggagcaaagtccagtgagaagaattttgtctactccttccttggttcaccatgaggaaggcaggaggccacagaggggactgaattttttcaggtgaatagtcatagtgtcttttggggaaggggctgtaagaaattaacaaaaacttcatctcatatatgtaattggcttttatacagttcatgagtgggttcctgagcagtagacaacaatgggttttgtaaggtaggagcacataacaggagacatgggctcgttactgtcg

SEQ ID NO: 18545 - DNA, 1241 bp, Mus musculus
aaatcaaaaaaatttacaaaatcaatatgttaactgcagaaaatattgggagtatagatctcaattcttccttttctacacagaattaaagccattcattattctggcttctacagatactactaaagtgatttagtgtttgtattatatacatgtatatacacatgcacacatacatatatttaagtgtatcatttatatgttttatgtatacatttatgaatagggtcataatttttttttctggttttgtctgtttgagatagggtgtcatttagccgaggctaacctcagatttactgtgtagctgaacataatcttaatctcccgaacctcctgcttctaccttccaagggctgggactaagtacatgagccactatagtcctatttctagaggatctgataccctttagcctatgtagataccagcatatacataaacatggcagatacacagggacagcaacaataaaaactcttgtttaaaaacaaaatagacacatcttgtttggaaagtgttgactatgggccttctacagagcgatgctggaggttagaaggctgttttgtgagctcttataagaatccagggaggaaatagtccactaaagtggtggcagtggaaccctatagaggcagcgtggaagagatctgggtgctggtgactaatgggagataactgcacgggaacagagtggggaacttagatttctatctggggaagagatataggtatatttcatctcgaaagggaaatagggagaaaggagcagttaggctaagggcgtaagttgggtaggaaaatgtgtaatgcctcaaaagtacttgtgtataagtacacagcaagtagttatctgtagcttttgagcacaggagaaaaatgtcgactggaaatactgtctgctgcaggtgttagcttgaaaccttgactatggctgtctttaagccttagtggtagatgtctttgggctttaatgtgaagccataatcaacacaatacttaccaaatcttgatcactgtcgtctttactgtttcttccatcagtttaatttttttaattgtatgtgtgcgggttcacatgtaaacatggatccatataccatagagtgcttgtgctggctgaagaacagctttctggggttggatctttccttccttttaatacaggtttaggggtcagactccattctctacactcagaagtcaagtaccttcacactgtccctcaagttgaaagt

SEQ ID NO: 18546 - DNA, 1141 bp, Mus musculus
tccatattggtctccgcctgaccttaatccaatggtttaagtatatgcatttgtctcagttgctggtagaggctctctgaggacagccatgccaggctcctgtctgcatgcacaatatggcttcagtaatagtgtcaggatttggtgtgtgtgcattggatggatcccaagttgggcctttctttctgtctctgctccatttttgtccctacacttccttatttgtagtagacaggaacaattctgggttaaaaactttgaagatgggtgggtaccccctgcctcaactcagggccatgtctatctactgaaggtggtctcttcaggttttctctctctactgttggacatttcggctaatgtcatccccattgagtcctggtagcctttcacatcccaagtctctgggtctttctagaggttctcccctgctgaatattttgattcattctcctggtcctctgggcgtccctcctttttctctccatgcctgatcctgcccctctttttcccctagcctctcccctctccacccagtttcttgccttccatgattattttgtcccccttctaagtgggtttcaggtattcacatttgggccttccttcttgttaagcttcctacggtcagtgagttgtatcatgggtattctgaacttttgggctaatagctacttatcagtgagtacgtaccatgcatgtccttttggttctgggttatctcactcaggatgatattttctatttgcctgtacaattcatgatgtcctcattcttaatagccgagtagtattgcattgtgtaggtgaaccacattttctgtatccattcctcagttggcggacatctgggatgtttccagcttctggctactacaaataaggctgctaatgaacatagtggggcacatatccttttggtatggtggagcatcttttatgtatattcccaggagttgtaccagtttgcaatcccaccagcaatggaggagtgttcctctttctccacatctttgagtttttgatcttagccattctaattggtgtaagttggaatctcagggttgttttgatttgcatttccttgatgactaaggatgttgaatacttctttgagtgcctctcagctatttgtgattgct

SEQ ID NO: 18547 - DNA, 1222 bp, Mus musculus
aaaaaaatcaatcaacagtatttactttcctcttttttgtttttcgagttggggtctcacatagctcatgctggcctggaactctgactcctcctgtctctgaagtgccgggattacagacatgctctgccttgtgcttctgtacccattactgtttctggttgacatctcatgccctccattcatctctgactgctttacactctgcacataagctcacctggacgattgcttctttatttctactcttaactctcatcctccattcatccatcagaatgatcttaaagtgggaactagataccattattctcctcctaatgccttcggcagcactgtagaataaaactcagtaataaaaattattaaagtcatctgtgacttgactttgtagttctgttcccaggacaggcctctgcaagggtgcagtgaacatttgagagtatattaaatgaagtaattactagactaaaaggaattaccgagttttgatatatattatgtaatagtacttttagagttccagtttccttatgttctggccagctcagcataatcagtattcttcatctctgtaagtctgataggaaaaggtcttcattgttttaatgtgtgtgtgtgtgtgtacttgtacataaatacaacattttggttgttcttaaggacactagtcttttatagtgtgtatttcttatacctgttaactactactctctagcccatgatctcaaaagtcttactaagactgctaggttggtttttcatttacttagctagtttcatctctgttgctgggttaaatatgatgaccaaaagcaacaaatgggagggaagaattatttaagtttataggttacagttcatcattgaggaaatcaatcaggaacctgtaggggtctcacttgttcaggttccttcttagctagctttctcatgcagcccaagaccacttgcctagggagtgatgccacctacagtgggctgtgctgcctcccctcaattaacagtcaagacagtcctccaccgtccagttggacttagcctcagtggaggtcttggatgactatgctgtgtcaagttgacagttaaagctaatcaggagagcgtatttcataggctatgtcttgtctatctgctgttctctttgtcccacctgccatttcatctctgaggtaggaataacagccttaattccagtatgcatacttacccaatctctcct

SEQ ID NO: 18548 - DNA, 1897 bp, Mus musculus
tccctaggttctctaattcttagcattaaggatttgattgcgtctttataatgtgtacatttcgtggccttcttgtgttgctgatggtcctgagtgcatctgtcagtctgtctcagtcttgagtcggtgcttacccaggctctgaactgactccgtcatcttaacatctggaatgctgccatctttctgctccagctgttaaatgaaactgattgctcctggtttcccataaatttggtgtcgattatgatgaaactgtttatatgtatgtgatctgtaggccatctttgttcatgaagaactgcagacggtctaaagggccatgagggaaagcacttgcccgtggttgtattttgtccctcagtctgtgtcacccatcatcttgaggtctcaataacacggccgcctgtctgtgttttcactcccaggtgaggaagatcgcaagtgagtactacgatgacctcccgcactacaactcctggatcaaggtgctctatgactttgtgacggatgacacaataagtccctactcgcggatgaagaggcctccgaaagggaacgagattctggagtaaatatcacagccaaaggaattcctgtccacggcttcaaaataggtgatagagtggagtttttatctcgttaggcttatggtcagtgatgctcggaagctgggctggcatgattgccaactcagatctcggtgtcatcagaggctcctcagccttcagacagcccgacgacgacgcttgacgctagcggctgctgtgcttgctcactcccctgcactcacgagatgttattactgttactgagggcgtctttcctcgtgtctgtcatgctgtgagcaaatcataaaaagcttatattatttttcactataaagttactttattaaagcacctaataaactgaactgttaatcatatatattaataatattcattgcattattatatttctattgtattggtatacttaccagagtgctagggagaactttacaatttcatccagaaatttaattttgttaaaggcttgacttgagttcatatagtattgtgtgagttccctctggattcaatcatttgttcttagtggggaatggaaggcttataagtctcgggaaactgatgaaattctccatcacaaagtccaaagggtctttggacaagggtccaaacatgaagtgctttctggaggagcttttgtttagtccaacaggagtccaaggatgcagattagagttttgtgagtttgctgcccttgctgggctaggcatttcattgttgtaactgcctctgagtaactgatgatcctataagtaaccccaataaactctctggtttactaagctagccttagtggaatttctttggtctgtctctggtaccccacgtgatatcaacagaagaacagtttgtctctccctgggaagcagctgacagactgtgttcttgcacggctgtggaaaccctgtggcttggtgatgggtagtttgtctcaagaaactaacatcctgtgctattaataaagcagtcctggttacctcaaaagtgtcactggagaaaatgcagtataaaatggggagatgtttttagcatgtgagctatattgccaagctctgtgggactggcaaccttcatactcccaatgtcacccataagtatttgaccttgggttgggggactgtaactcttggaaatgtttattcttcaagaaagccactaactgggcagtaggaacgctgggctctggagcccttaaaggcctgagagatggtgcagccagcagcttcgctgcagttcttcatctgtctcagctctgttcctcatctagggctcaaggcttctaccgactgcgctatcccactgcaggtcaggaaccacttcccact

SEQ ID NO: 18549 - DNA, 2234 bp, Mus musculus
ggttttggatatattacgccctctagatccatttcatgctaactctttgcatgtgaccacaactgccgacttaaagtgaattttctgttataaacccaagaacctaaagtaagctgaactgttcccagtaggagacaggaatgattagcccttttgaatgctgtctccacagttcccgggccatccgcagccctgacaacaatgcagctcttctccaagcaaaacccgtccagacaagaggttaccaaactgcagcagcaggtcagaaccaacggcgctggcgtgactgtcctcaggcgtgagatttctgagcttcgcaccaaagtgcaagagcagcagaaacagcttcaagaccaagaccagaaactgctcgagcagacccagatcataggcgaacagaacgcacggctggcagagctggaacgcaagctccgggaagtcatggaaagtgcagtagggacctcctcagggtctgggcagagtgaggagtcccctcggaaacgacggaaggcaacggaagccatagactctcttaggaaatccaaacgacttcggaataggaagtagattggaatatggctctagctccagaggacgacgtccgtggctgagagtttaagcagttactcctgtcaggatatcggagcaacatggtgtccttaggcttccaggcgatcagacacaacttatacttggctcttgtggttggcatcctttgcgcttctctggtggagctgatgcacagacccgtcttaccttgcaatagatttgtactaaccatgcccattctatcgtgtttgggggctaaccttgctcctgtgcaggcgatgtgttaaggttatttgtttctgcatatatgcacattacatacggattttaaacaaacccattcttgacagactaaaagttaagtttaatacataaaatgtcctgttcacttgaaagaaaaaaaaaatctactttttaaatggacactatcttgttttttgttttttgttttttttaaaaagttgactttttgtttgttataagtgacctttgtctggaatgtctgagacacggttagtactttggtattgaagtgatgggtgacagaaggactgagagtattggctgtagagggggctctacagtagcaactatttttataaactactggcaaggggtgtctccaggcgttaggtacatgctttcagttttctttggggccgtgtcctccatttgcatggatggatgcatgcattgcctaggcagcgcacttcataccactcctgcactggtgttgatcttgaacctctagacttctccactgttagagctgcgccgacattgatttaagcactcagcagcttacctgtcgggagagagttgtcagtccatttgtcctccagttttacaggcacaagagactgttagagtccattgatgtatctcttctctgtagggttcaggtgtactggctaagacagaacctcaaatccaaggctctttctttctatagacatcagacctctgatctgactcagctctgtgctcctgggtcaaccatgacttagtagggacccaactgagggaaagtttgttgaagaaaattatatcatgaaaaaaacatttcatttctggggcatgacctgagggaagctttttcataccactttcaagctctcacataaataactctgaacagagctttagtcttgtttgcactcctgttttgagcttgtaactggaaaagcctgtcttgcgctgtcagcctcctgaatggtcactttaacaacctccaaattgtataaaatggttctttctcccggttgtatatttttgaaacattcaactatcactgtcgtatttttattttaattatgtactaaattatgtagttttgttcttttaaacatctgttgctttggactttgtttatttatagtaaatgtaggtgtaagatggtaaaaactatccctttcaggtgaaagttgacccctgtgttacctgagggtttggtaaccccacagtgggagaaaagcacaaggttgtcatccgtccagcgtgacacattatgcatcctttaggttacttttaccaagtgacactctcctacgcactcttaagtgttgtcccttcgtgatcctgcccttgggttctgttcaaatctctgactttgaaagtccatctacaatgtagtatgtcttcagtgagaaaccttagcatggtatccaagtgtttcatgatttgtt

SEQ ID NO: 18550 - DNA, 1211 bp, Mus musculus
ccctgactctatggacctgcctacatagggcatttcacataaaagtagtcgtatggtgtgtgactctgtgtttttatttcattaatgtgctttcagggtttacctgttgtcttgtagttttaaactagcggtgttttattcctttttatatgctgcaattatcactgtgactcttgggagatgctgatctaaatacaaatttccgtctaaacttatgaaggtgatatggtttttatcatcctttggcgagttgcttttaaagaaaactgctccattgtcgttccttttatcagatgaaagggactatgacgaccgcctttcttagggtttgcggaatccttgctcgtttccactctaacaaggcagtctccgattttaaagagctacaacgaccacctctcttgaagtgtgcactatcttccctcctttccgatggacgcaccgaaagctcgcctctctttccagctgtcatcccacgagctcctccctctccttaagctcccccccccccaggaggaggaagtgacgcacaggaagtgtcccgatccccttacattggaggaaggaatcaaactcccaagatggcggcggcgtctgaggagcggatggctgaggaaggaggcggcggccacggcgacggcggctcctgttcggctgccggctccgctcagcgacagcccccggcgcccccgtcgcaggccccgccgcccgggtcccaggcacccgccgcgcccgcgctggcaccggaccacctgccccaaaacaacacactggtggcgctgcccatcgtagccatcgagaacatcctcagctttatgtcctacgacgaaattagccagctccgcctggtgagggccgaggcctggggaggaccggcgagggcggcgcgttcctggggagggagccccgccggctcgggacacggagcgcgcgcgtccccggcagccgggaagtggcgctggcgacggccggcggggtgcttgctgctgccgcgctggcatcgcgaccgccgggcgggcgaggctccgctctgcgcctcgccccgccccgagggtctcctcgcccctagcccgggacgcgcccgcctgcgagaagtaacggagcggggcttggtgccctccgcccggctggaccggcgacagggactcccgaaggggcaggcgcctgcctcgactgcccgctcgggctctggagttcactcccaagtgggc

SEQ ID NO: 18551 - DNA, 1163 bp, Mus musculus
tgaaaatggcaaaaattcaaactcagtgaagagactctgtttcagaaaataaggaaaatggaaagtctaccactagagaaagacatcctaatgttagcttcaggcctctaaatgtgtgcagaagggcacatgtgccacatgtgcacacaatctgtatatatctcactccctctcacaaaaggaaataacctgtattaaagactagattaaaacttgagctgagaccatttaattttaatttttttctacatgtgtctagggactcattgaacattaatattagtgagagtgggtctctggttatatagatcacacaaatctttgaaaccctcagaagttaaattgcatgcctgtagataataagaagccactgaattagactcttaagaccctaacaactggcacagacccattatttctactgctttatactgacttgacactgattgtgtagaaaatcagtgatatgtcaatattttgagttctgttgatggaaaaaatatgtgaaatacaaagtacttcctgtatctgtaacatagattatatcaagggtgtatttgcctttcttttgcctgtatataatgtaatttttttttcttttagaacgcccagttgctgataacgaacggatgtttgatgttcttcagcggtttggaagtcaaaggaatgaagttcgcttctttcttcgtcatgaacgcccccctaacagggacattggtatataatattctgtggatcgtaactagtgttggagctttttgttttgtgcaccgtaatagctggggcggaggcatgggaggagaagctggggagtcggtgggatgaagggaagctaggacattagagcaacagcgcggggttcttagtcaggatgtgactgacagtggagaaaaggagacacagtgtgcttgaagaaggtggaggcttgttttagtctccagtgtgttaggaaggagtcaaggaaagaagctgaaatggaaggaagaggaggcttatccagtacagcaaggtccctaaaatgtgtatctcacactgataggttctcctcttagataaaagaaggaagctgggtctcctaacaggaacaggaaagagatacacttaactctggtgtttcttacctgaaaacatgtaatttcctggggtggagagagagatgtggg

SEQ ID NO: 18552 - DNA, 1219 bp, Mus musculus
gtgtggcttacatatgtggttccagtacttaggagtgtgaggcaagaggattgtaaggctaacctgggctaccttgaaagaccctgccttaaaaaaaaaaaacaaacaacgacttttgcccgtcatgatgggtttccagattctggagcacacagcaatttacaagtagtcttcagcgtttggcttccctgggctgcagtgtggttgagcaaactgcaagttgagttcgtgcctggagtctgtgtcacggctctgtggtgctgttccagctgctgggccctcgatgtgatcagtgcagattcacttcctgcttccacagctcagtgccttcccgagttggtttcctgtgtcagcttccttgcccctcttcctgtacttattgaaatattgtaaaacttccatacatatgccacatgtaaatctttttttaaaattctcttgcagctatacccaagaattaaaccaagacaaaggagcttggcctgaaacttgagttaatgaagaattaatgagctagaagaaatactatgattatccaggaaaaaaaaatcagaaggcttactttaatgacagtatagctcagaagcaatgaagaatgtgccgtggaagaaaatgaaggaccgaaggactcggcgtgagcagaggcattgctgctgagcccgcaccaccctggctggcagaatgctcatggcggcgcagcataggaggcagccatctggctttgtcaagaaatgggaccatttgctggactgtgggaaaatcagtttcttgtcctgtgtagggtgattttggcactgttcccattccgctgacctgccagaaaggacctgtgccatctggcaccatctccaactgcccctgagcaccagcaggctttgggatccccggcgggtgctgtacacttgtgtgttatcagtgaagaactgttagctgcttgtcagtgagcagtaactattgtatgagttattgtagcatttaagaattatgcgtatatttgaaatactgaaattaaactacactacctaatctaaagtagatttagaatcttgtttttagattgaatttgaatctatatttattgtctttttgtatcttggaaattagagatttgttatagatttacctgtatttgtcaagatcatagctggttttaaaaatgattgtaataaaattaaactttatgactccaagctatttcctggttttccttttaatgtta

SEQ ID NO: 18553 - DNA, 1233 bp, Mus musculus
acatatcagagtaacatatttgcatattattaaaccaaatgcaaatgaattgcataacccttggtaaggtcagaggaagcgttacacctgtaaatagtatatcctttttacttctacacattgtcctggccatagcaatattaaatcaggaaggaatgcagagagctttaaataactgggcaaatagtaaaccaatctcagaggctacaaggccttgatgggaatatttgaagaaattttaacttttaaatgcagtggtggcacctgccacagcagcccagagactgccgcttgccctgagcgaactgagaaatacaatgacgaagtagtctgatggaggcatctaaagaacccagtctgatggaggcatctaaagaatccaggagccaggagtgtctgacacaaggccaacctgggctgcctagcaagacccgatctcagaaaataaatgccaatttaaaaaaagggcatgcttgcttccatcatttggttctaacagaagatggtttttatatacctttagcattcttaaactcaagtccttgaccatatttggccttagacacttaggtctgacaagtagtaagtaatgagatcactctgaccaactgagccaggtgtgccgtctgcaagaagatcgtgataaaccccagggactgtgcctacagctggggaggacagggctcagaagatcttcttaaaacaaccaagctggcttcttcatcctgggaaaatgctagcaaccatacagacatattgccttatctacttccaaacgtactgttaataaagagttacaacacagtcgcaccatgccttgtttttcttcatagagcatggcccccatgggagggctgaggagcacacaggtaacagctgggttctacttacgtgaggtctgctgctctgaaggttcagacactgagaaggcatcttgcctataattaaactatggaactgtacaacatttttaaaactctagttcagaagttctggtcactctggcagaaaggacaatcctaattccacctgcttggtctggtttaggacggttttggggaaaccccctatatcattgctggctccagagcttaggcctgctcccatggggatggggggccattgtgggagctgagaaacccacatagtaaatcactagtctagggctagacctgtcgctggtgatccttgaagaatcacaaaatgggaagggaagaaagaaggcagcatgat

SEQ ID NO: 18554 - DNA, 1136 bp, Mus musculus
ctgcaaagactgtcagtaaatcgcaggttcgcaccagctgcctcacctgctcttccatggcttctttgcggctgtggcaccaggcgcatttcacgttgcttatgtgaagcctcgtttttgtttttacactgaagtctagcagctatcagcagtgcatactgtatttcctcaggaacaccccattgcagtgactctgaactagagagcatatcacagcccctcccttgggactactgggtcatattgatcttgaacatcatctgtcagcgtatctcagagcaggtgaacaccattttctacccagcctggaaacagacagagcccagttcatgatcgtttacttacttgggtggacacatttattggcgttccgtgttgttacaacaaatgtggaaaatgtaatgtgctgtataacgtttattgatttttttccctgagctaaaagcaaagtttgcaggtgtcaccttggaaacagctatgactttggcatgcaggggtctagaaagcttcctggactcattacctgaacttgagtcggactggggacagctgctacagtgacagttttaactactccaggcctgcagatctcttgcagggcagaagtcgagtgattctgtacatatctacctgaaaccatagcctcttgcagaacaatagagatgatacagtagactgcctgaaggtgaggtcaacacagagaaccatggctcttttcccatcatgccttgctcttcaaggtcagactacagcttaagaaccagctcctttgctccttgcccctaggcttgtctacaaagtctcccttagcctccctaacgtcattgtgagtgtgcctcacccgggcattactctaacacaaaatttgtgattcagtaagttagggtgtgactggagtctgcacttctagactcctagctcatccaaagctgcctgctgatctgtggactccagttccccatagtaagggcttagtgaaagatcaagaccagaccagatactatggcagtgtagttcccatcctagctctgctgaagatgctaagcctgcatccagcagttggtaggtggagggagatcggttttccccaactgtctatcacaactgcacagagcagggcacattaacttggattg

SEQ ID NO: 18555 - DNA, 2111 bp, Mus musculus
gctggatataaaagtcacaaattgttctctagcggatagatggtgtacagggcggggagaagggacgctgttttatttgacctttaatggacacatggaacttaacgttttcctttctccgctgatttctaggatggagctgttttaatgaggcttgtaactccatgtagctttcagtcgaactaagcaaataaccatctcttgctttctttccagagatcccgctcatggaagaggacccatagcctggtgacatcctgctagtcccactgtcccctttggggaaaagagccttgaagagagaccacaggaggacagagcttggggaccaggggtcatttttaatctatctacataaggacagtgattcataccgtacatctccagcaggactgtgggtctggccaacagcaaaggcggtgctttcaaatgagactcaagggtttatcatgaccagcagggaaccaagtgcagaggggactctctctgcctcacccctgtgtcagagctgggtgtctcttgctacagagcgtgagactgtgccacacacatcctgttgctcctgctaacagcactccctgctcctctgaaagcatgtcacattgtataaatttgcttctaaaatctgctttgaactgtctagggactttagatctggacgggtcagcctctgtaaaaaaaaaaaaaagcccacgttgacctgcaaacccaagagcagatcctctctttgcccttcttagtaagggacgggctcccaaggaaagactctcatgtgacactcagaccatctcttacacctggacagccaatcaaagcaggatgtggcggcttgaacgagaaaggaaaggataaacaagccaactccgctttctgaaaatttcttcatgccaagcccctatgctctgtgctgccccctggtgacatgtttgtaggcgtggtctggcagtggacctgcggtgtggaatagacccgtggctttacacatggtgagaacacgttcagatgcatcttgtggtggaccccgtaacctggtcatgtttggttttggcatttggcagactccactcaaatttatctgctcatgccttcctatgtgggtcattgctgtcactctaccccgaccctaaaacctaaccattcttttattttccaaagtggaaagtttctgtaaacacggtctgcatttggagggagaaggaagcgggagccggatcttttgagaccactcccagcccctcagctctcttttttgtcctgctcagtccaaaggctggcctcccagccccaagccaccctgccctcttgctttcggggggcctttggccctgcctgcctgccatcccgtatttccatgagggtctcatggcacccactgggtgttgtgcctaagcaattgtttgattttttttaagagcctcgagtccagaagtgtctcttcaaatacatgttggtccatggtgtcgtttccatccctcctctgggttgtagacaaatatgaacaaaactctcatccaatagaatcactgtgctgctagagcaccgagggacggaggcttgatcgaatcctgttttctctcaacacagactgattaaaaattaaaaaagaaaacgacagtttgaagtgtgactttaatggtggggtggggtggggagggcaggaggtgggtgacgttggttgtgggtggtagaaataaaatgtgggatttagaacactcagctgaaggagacaccgtatcaaaagggtgggctttgccctgacgtatgcactgccaccgttagtggcagagtgctgctaagcctgagcttactgctgtgggcagttgcagattgcttgagtggcagctgcacgccatccctggtgaaactccatgtcctcagctccatttattaaaggagttgacatatggtgactgacatgtcactgccttgacatggacaacatccaggcagccacacctctgcactttgttctcacacctgttcccttccatgcctccttatttgggttgtgtcccagagacctctgggtaagagtcccatctcccaggaggcacacagagctgtctcaggccatccctgcctctctttgggaaatcctctggcagcaggat

SEQ ID NO: 18556 - DNA, 1199 bp, Mus musculus
atcccttctaggctgtttggtctcgacatcaaaggcagagattgtggcgatgaggtagctcagtggttcaccaactacctgaagacgcaagcctacaggttggttcagtttgataccagcatgaaaggaagaacaacgaagaaactttacccttctgaaagttaccttcagaactatgaggtgagcatacagtcttcctccattctgccagttactctgggctctctgggcttccttctctgtccataggagcccctcgggagacttcagctagaaagccttagcagtggcccagggcaccgcctacactttaaggccggagagggaaggagataagggctgtctcaatgctggacttctgctgtgcagaggcctgggtataggagatttgtggagggcggagccaggggtgacttctagggagatgagaacgccggaggaaattggctggaaactgaatgtggtggctgatgcctgtaatccagcacttaggaggctacaacaggaggatcgctatgaacccaaggccagcctggactaaaggccttgttctagagaggaaatgaggctggctgctaagtaagtgagattctgggactgaacatgcctctcctgatgcagactctccaggccaccttcactgcctgagtgcggtacagctagttcatgggcaggaaggcacctccttcgagagaaaactgtaatgagccacgttttaagacacatgcacctcagggattctccttccaagccaaggcaggcttatttattattaataatagtattaacgatatcatttatttgctttgttactccagggggctctgttccccacctagaacagtgtcaggttatctattggcgatcaataggttttgactgattgggtggtgttgatgaaattgttatagaacgttctagattagcagcagacgtctccctgtcatgaggaagttgagcaggctggcggataccagcagatgtagtagtgcacacctttaatcctgtcattctcgaggtagaatcaatcaggtggctctctgtgacttcgagcacagccttgtctacgtaaattctagggcatccaaggctaggtagtgagtccctgtctcaaataaatacataattaaataaaagaacaggaggcagcccaagctgcgacattgctctgtgagtggctagaagcctcgtttcagtgc

SEQ ID NO: 18557 - DNA, 1974 bp, Mus musculus
agtgtctgaatgtactggtgatacctgtgtggtcccgctgtggatcgcccatgtagaaattgtccttaatgcaataaggttatacatagttatgagctgtaaaattcaagtcagtatgagctataataatcgtagcttcaaaagtaggttcacatgtacaggtaagtatattgtgtatttctgttcattttctgttcatagagttgtataataaaatatgattgctttaaaacctgtatagttgtctagatctccacacagaaatgtacgtttaatgctttgagttgaaaaggatttcccctgttatttacattctggtgtgtttttaaaattcttacctccatcatgctgttttgaaaattgtgtcgaggattaaaagcgcacagaaatagtctctaaaattgtagcatgaagtttatagaaattattttaaactcacatttaatttaaaccagaagttgacagtgggttggtgtcccgcagtcctcctgctttcccagtctccgcctgggtcagacaaggtgtggttgggacttagagaatgtctacggcgtggcacccagacctcctatacaaagccgacacaagtcacagctctgccttgagctaactcagaagcgcctcgaggaagagttgagtctttaccaagcttacttggccctctggtttttctgacctgctaattagcagcagagactgaaagaatccgtagctcacccggccggctgtaatgaaacaacccagcacttgggtttgctgccttcggaagacgcagggtagctgcggaaacaggagcgtgtcgggacgtctcatagcacaagctcatccgtacagtgtcgatgattgcgttggctgagatatgatgccgcctcaggaattgacccgagttgggagcatctgccccagtgtcctcccagcctccaccctcccccaccactctcgtatctgtcagtaaccggagaggcctgtgagcagggcgtgctctccatgcccgttcactacggacttatgctgcctggtggttcactctgctccctcaaaactcctttgttttcaatattttgcccaagttctcctgtttcttccacatcattattccagtcatgtggagctttgtaactggtcatttgccttctttcataattagtgacgtatgcgacgtaaagccactagaaaaggcacatctttttaatactcattattttctactgactagccttggaggttgactgtgcaatgttatttaatgttgtaattactgtaatatcagcacacaggccccatctgcacactcctgagaaatagaaaatgtactcagagcttgtcattgaaaggaaagtaacgctgtggtcagtgcttgacattggaaaccgcactggaaagctgccggtggaggggatgtcctggtccacagtggcctccacacaaagatgctcttatcttctgtactgtactgtgatgtagctttcttctgtaacattctgttctaaatggtgtgttttcttgccttagggaagggcggtgttagcgggggggggggaagcaacaaaacagaactgtgtagcccctttttaacctggtgttcatcccaagcattcgatgcagatctgcattcgctcactggtgcacactgaaaccttacttgaacaggcctcataataaagcgtttgtctttggctctttctcgagctgtgaatcacctgtttgctgcttggagagccctccgagtgcgttcttccccgagctctaagtccactcggcaagccagggatgggccgtgtaggttcccaggatgttgttatgacaagaaagtttgaccttcctatgggaacccccgtcattgacatacttttcagaacagaaactttctatcctctgttttatatgttcatgataacattttgaagagtcagagggattttaatatatttgcataaacacctggctatatgatagcaggatttccttggctct

SEQ ID NO: 18558 - DNA, 1682 bp, Mus musculus
ttttcatagtaagatctggaacttcggaaggtttttttttttgtataataaataaatatattactttaaaatgtgcaatcctgtctaaattccccatcttcagcaaagactgaagataaactataaacacattaactatcctgtgactaatgcagatgctttattctttattttttcattcaaataagcagttttattgttaaactttggtattgttactggttataatttgcagattttgttcttagtgtagtagtctagttcctatccaaatgattccgtggggattaagtgtgttcacactgcttccatgagcacactagagatacagcccatgtccctttcaaacacacagagatgtcctcatggttggtcgtgtaccgggatgccacctggcagggagctctgggtgctaaccacttcctgtccagggtgctactgctgtcagaggagaaatggcttgagatcagcaggggaccggggaacttggggaaggacctcaagtctgttgtccttgccagacttaggaatcagaggtgtgaacaaagcagcaagatcagttattatgtaaattaaaatttactctattttgtcaagttccaaaattgtatccacatcaggtaattgtaaaaatgtattatcttgtaagacatgtttaaaaaaaaagaacaaagcaaagaaacaatatttaaaaattcaactttatttttcttccaagtgttcaaaactgtctgtttctgggacttggtcatgttgcctgtccgggaacaggatggggcactttgtgctgtcacagccttagcatacctacctcagctaggtggagaagatgagcctcggctagtgttggaccctgtagtgcctagagcagtccaagtgctgacaagtgtgaggaaatgcactgcgctctgcagatcagcaagccctggctgcagttcaagtgtatctggaatgtagccatatagtgcaattattgctgtctgccatggtcatggttgctcacagtacgtgtaccatactcattctaatcaagggaagaagccaactccattagaaggctgagaatactcttcagggactccacaacaaagtgacagacacccaggcgcacacaaatatcaattctttgtcattagaaagttagatctaaataagattgtgactggctaaaactaactccgctgactgtcaggtttcaaatcttcagagaaaaatgtttccgatgttgctcgggtggctctgaggagcagccagcttgtgcgggaatccctgcaatcacagcttgactgacatacataccatccttgacacagtcctgagtaggtccacttgccccaggaccttctgcagcactctggaaggcacaggatgtgggcagcttgccaggaaagcctcctgctgcaagcactgctaattgctaatgatgttggtctttttcctctaatcccattaagtcttttgggaggggggtagcttgcatttttggggggaataaaactgactaaatgaaccagaacacagattattaagtctttagatatatcatctaaaaagtttataaaatgcatagaattttaaaactaagtcctgagtttaacaaaagcaattaacagtctactacttcactaagggcttttaaaataattctggtaagaaaggaaaattaacatgtatgtatccat

SEQ ID NO: 18559 - DNA, 1938 bp, Mus musculus
cagaacacgttatagctgtgtacacacacagctgcgctgatgctgagtcacagagcacgttatagctgtgtacacacacaggtgcgctgatgctgagtcacagaacacgttatagctgtgtacacacacagctgcgctgatgctgagtcacagaacacgttgctctcagcctccaaacaatggcaagtggctttcattgagtcattggaggggatggttaagctttgccctctttaaactcctgagcttcttttccacactttcctgagcaacctttaccatttggttaagagggatgcaagcaaagacagaggccactgtaagagtgttttagaacacttgtattgcccagtattaaacttcagatatgtgctttaatgatacgtgttgtctttggtggtttcaatatatagaatttaggaatttttattgacagaggaagaaatttccaagtttttaaagtaaagaaaaggtagactgaattgagatgctttaaatatgttgttttactatagattgccgtaaggtaacttgtctctatgttttaactgttcaaaatggtacattgtaggactgtttagtggatgaaggcggaatgttcaccgatgccgcaggccctgaacttcagaacaaggctgtacttaaagaaggaacagatgtgggtaggtgccatctgttgataacgggcccggtaaaccaccatagtaacacaaggtatttctgctagaaaccaccaagaagacccctggtcactttttatccttccagtcagaacaaacgtcacttggttagtcatggttcaaaatgaagctttggatctaccatcttttgtgtcaaatctattcttattgcttatgcagatcaagatagtcatcggaaggtagtcatcgcaagtagtgtcctttggttgggaggggtctcagagataaccagcatatcgctttggttgggacagaaactgagcttgggtagatgttgcctgtgaaccagacattcccactccttcagtcagctttgcaaatagctgagcaggcaggcccttgtgccttggcttgcctttctgtcttcatggggttaggaggggagcagtttggagtctgattcaggtttcgtggagttggtgcctctgccacctccacaccaggcctggggtggggctcctgtcactggcacttctgcccaggtccagttcttcctagaagcctcaagtgctgtgagtttgttaagaatacttttaagttatggttaataggaaattttgtttaagttataaagatgcttcaagctaccaagaatgtgttgaaagaagagaacattgtgcacagctatccctgtgactggagaactaagacacccgtgctgattcgagccagcaagcagtggtttgtaaatatcacggacatcaaggctgcagctaaggtaggaaagaactcctgctctaagggttgggctggtcattaccaccataaaaagtatgtgtctgtgtgtgtgtctgtgtgtgtgtgtggggggggggggaggggggctggcggtaatggggctgaaggagagaagatttataattttttattatgatttattttcctaaaattgtatgcgcttaggcctaaaaagatctcatacttgattcttccatgtatgcacgtgtagaaacaaggctgaaggaggctgagtgggtcctcgggtcacttgtgtgtccagggttgtagacacagcccaggctaagggcatctgcagtaacagctgtatgacctcctaggacctcagctctataacttgtcctccagtccaaggcagtaatgtctgccaaaggagcaagtcggtttccacagcagtgactgccaccacatgatacacatttagtgcagtgttttgtatcccctgttgccttgaaattaagactgctaaaaggaagggagcaaaacagaattctggtcc

SEQ ID NO: 18560 - DNA, 1193 bp, Mus musculus
ccccccccaaaggtgctgggtggagttagtaacccagaacaactttaccagtacaaagttcattagatagatggctgttcacagatagaaaagttggggtaaggccaatgaaatatatatttttttaattgattctacctgcaataccaagtatgtaaagaaaatcagtgtagcttgattacagtataagaaaataccctagatacccattttattttcatcttaattctgaacagctagctgttggtcacaagatggttttcagtcctacacattagtttcagttacattgtttctctccctttttaaaaaagatttatgagccaggaggtggtcgcacatgaatttaatcccagcactcttgaggcaggagcaggcaaatctctgagtttgaggccagcttggtctacagagtgagttccaggacacccagggctacacagaggaaccctgtcttgaaaactcggagaggagaggagaggagaggagaggagaggagaggagaggagaggagaggagggggagggaggacgaggacagaggacagaggagagaggagagatgctggctaagacctcagccagccccactggacccttcagagcatcctttacattttctgttgaagccaggcttggtgacacatacttgtcataccagtgctcaggaggccagcctgggctaaatagtgagactgacacataaccagagagtggagaggcccagcactcaggaagcagaggcagttgggtctctgaattcaaagccacctggtctatacagggagctctcagcctgccagggctacgtagtggcaatcacatgcggttggggtttttcttggctggtttggtttgttttaaacagtttgcacacaggaccttgagtatgcgggaccaaaagtgaggccattccctggctcacccctcttgtgtacttatcagccctagtgttcaaaatagcagctcagcaaggccagatatattttaggtttagctcctaagacttccacgttgcgtgatacacgcctcacacttaaaactttttcacctgctgagttcatttctctgggctttgaaaggctttgttgactatgaaagagtgtgacagggtttaaggattaattctgaaactgtgcctttcccaagtcgttttagtgtgtatttattaaagaacccgtgcagttcattgag

SEQ ID NO: 18561 - DNA, 1174 bp, Mus musculus
gtgctgcgagtgggaggagcaggaaacaaggtacagagaagtgccattggctctgaagtatgctgtcattgaatgaaatgctgagcttataaaaagttgaagtacacggagcctggtggcacaggcctgtcaccgcagctcctcagaaagccaaagcaggaggaccaaaggttcgagcctgcctgggcaacttagtgacactgtctcaaagaagagctacaaaaagagctgtgaacaaagctttgtggcaggtttgagtccctgagtttaagctccagcacacacagaggaagtaaagtaaaagtgggaaagaggctacatattacagagtttgctactggcatctcattcaaaattacagaaatgtaaggtaaagggttgaagttatgtctcagttgtacaacacgaatgtagcatgaacaagacactgggttggaacccaacataaaaaagaaaaagaaagagtttaaggctcagtctcgttcagatgagaacagcacgttgcttgccaaggagctgagtgcccgagagccctcctggattctctgtagaccgtccttctatagactctgagcatgggcctgcctctgccttttctgcttctcccccattcttcagccaggcttccagcctgatcagagtatcatgaaatggaacacagttcaacctactacacccttgatctccttctctcattgtaccctggtgtcatgatgtcatcctggggacatcactcagcccttcaaactcatcacgtccagatggagctgtcacccttcttccactggcaccccacatgctgcttgagtgacacctccatttccataattgtaccggccagataccgagtccccttccttctgtacaccccaccaccctggcccggtacctctcctattgcctacctaagtggacagttgagacttatcatcccagagtactagtatagcctcctccaaaatggtccagctcttcacagataccagtaggcagttagatgcaaacaacagccaagtgtggtgctgcgtgcctacagccctaacgctggggagatggggacaggagaaacaggaactctaggtcatccttggctagaaatcatttgagacccagcatgggctacaggagcctctgtctcaaagaaaccaaataatagcagtcagtagtaatgact

SEQ ID NO: 18562 - DNA, 1529 bp, Mus musculus
ccctggggtttagttctctccatcctgtcccccaaagaatgaccctcgaaacatcctgatccagctgtccactgactgtgatgttcttctgcagggaagttgacagacatccatgggaatgccctgcagtacaacaaggaggtgaaacatatgaactctgccggtgtcctggctgcactgaggaactacgagtactatgcaagccatgttccagagtcggtcaaaaatgcgctcattccatgaaggggtctcacttacccagaggccttggttcaaaggaacacatcttaatactgattactaattgaacaattggagctctgcctgcatttatcattgatcagcgatttattagtagttagggatagaagatggaattaaagaattttcttcacatcatctaatacgcttaagacttaagtatatgatacgattgtcatttctcctgcctaaaaacaaattagccaggtgtggtggcacttacaatagtcatagctactccagtggttgaatcagaggattgcttgagcctagcctccattacatagcaagatatgcctaaacacagagaaggaaaacaaaaaaggaatttaattttactaattagctaacaggaccagttgtttttttttgtttttttgtttttttttttttcctttctcttgttgtttgggctttttgtttgtttgcttgtttgtgggttttgttttgtttgtttatttttttgttttttgtttttgttttcaagacagggtttctctgtgtagccctggctgtcctggaactcactttgtagaccaggctggccttgaactcagaaatccgcctgcctctgcctcccgagtgctgggattaaaggcgtgtgccaccaccggccggcattgtttttgtttttttgagacagggtttctctgtgcagccccagctgtcctggaactcactctgtagacaaagttggccttgcactcagagattcccctgcctctgcctccttagtgcagggattaagggcttgccccaccacacctggctcaaatgttactatttctaagtgaagaaatgaaaaagggttagtttcaaatgactgtccaagtcatttgtgcagtcaacattcctgctgataaaccagatttcttcagggcacagagtcttaagttactccagaatttcagttgttttgttttttcacagtaatttttaaaatttctgattccaaataagaatgcatataatgatattatttatgttgatttatgggggaaagtttctctaaaatacatagtcctatcttttcatattatatatcagatttttttcaaaagtatttgaaaattataaataatgtgaggattaatttattctcttgttattaaaatctataattggaaagctgggtaattgcctttattccttcccctgagagaatgtacaatcagtttgattgtcaccttcagtagactgagaagccctacctacatcaggaaacagggctcccaggaaggatgagctgagctggaaatgtaggcggc

SEQ ID NO: 18563 - DNA, 1109 bp, Mus musculus
gcgggaagacagcgttacagcgtgttttagaatttgagatctgaaccgtttgacttgcattcacgtgctgactgctgaattagccaaggggactgagcctgctgtttaccctctgtaagcctcagcttcctcttgaggttgctagaggattaaaagttgtgtgaccatcatgcatccagcagagtacataacatgttgtattgaaatataaaagccaccattctaatttcttaccctcttctagcggaggaaaggaatttcatgccactaactggaagctggacacggttacgagcaagttagctgtattacaacaggttctgacttgttacttctctaagacccaaattagactttatggtgggcaggagtcgggggcatggagggctgtcacatcttaacaggacttaacattggattgttgattcatccttactgctctgtgactcaggttataaatactatcttttgaagagaaataaatctttcgtgctgtcatttttagaagctctgctggcggtggaacatgtgaaaggtgatgtcagcatttctgtggaagaagggaaagagaatcttcttcgggtttctgagtaagtgcttatttatatacaccttttccgttctgaacagcatttaaaaatacatagcactgaattttctgggtgtattatacttgccaattaggtggagtgtacctagaaagatgtttcatctcgtgtgtgtgtgtgtgtgtgtgtgtgtgtgtgtgtgtatgattgtgcatgtgtagaggctagagatctttctacctcagcatcctgagtattagaattacaggtctgcactaccatgccaggctgataactgtcctgataactgttaaaggggaaaattggggctgggatatagctaaggctggtaagaatattttcatattttgcttgagccatagtggcccaccaccacgaatgaatgaatgaatgaatgaatggctttttttttttttaaatagaccttcacaagttattgagtctgaatgagagactgaaagtctccaggttggtcctgtcaactgtcagctgttcatttggtgaatgtggcattggaatatatagttcttctttgggttg

SEQ ID NO: 18564 - DNA, 1188 bp, Mus musculus
aggaggatcttgagttcaaggctagtccaggatatgtgagaccctatctcaaaaaaccaaaatagcccgtgagttagctcagcggctaaaagtttgtttccaagcctctgtactgagttcaagtctcagtatccacgtgttagaaggagagactcagctttgtcctttgtcaagttgtcctctgactccacatgcaagctgtggtgtgcttgtactcaaaataagtatatataatttaaaaaaaatttgtactcaatataaacatgtaaaatacaagataaatataattaaaaatgctaaagaaacaaaaacctaaaggatgaagtatcatatagaaaatctactccgaagtaaattaaatttaggtggatattttagaacataatggaatttgatagaaacactacgatcaaattaacacccccccttttttttataactatggtagaaaaatggtaaatgttaaggtttctgtttgtgccattgtgactcttaagacttttgcagaagcaactatagtttacataatgcttcaattctaggactgtggcattcactgacgtgaattcaatcctgcgctacctggctagaattgcaactacgtctgggctgtatgggactaacctgatggagcacactgaggtaagcgaggagtatttcttttcctgtgtgtcttgtgctttctctgtttgggaacactgttgtcctactgtgcgttgacatgtgatattagtctttagaaggatgtgaacagagtttaaccataggcccagggaaggaatgtttgtgcttggtttgctttgtaaagcagagacctctcttttctgtatggcccaggttagtctgtcagcttgtgtcctgtgctgctgcttcactgcatgcttcttttcagaaagataaactggaagggtagctaaagtagatgttttatgttggcatgcgtgggatccccagcactgcaaaggaacagacttcagctcttagggttcacggtctccgtccagccgagtcagtcagtgctgtcttcaccttcctggtttgtgagcatctcatagacggattgtgctgtccagctcatgccgctcacctttcccagttacagagaggacagcaggcccacacaatgaagagattggtgcaggcttgcacacaagtttgggagttcattttctttcttaagttaatgat

SEQ ID NO: 18565 - DNA, 1236 bp, Mus musculus
gagctcccattccaaaaacttagttattgttgaatttacttaaatacctcatttttatttgaataccagtttaactggaagcaagatttcttattgccatagtcttaagtttatgaatgaaataaagctgcacaggtattgtaaggtgtggttttctagcctcatagtatctgtacttgagggactgtaatacagtcactgaggggctggtggcgttggtgtcacagtacagcggctctcggtaaacagctccaccttgagatccagtttcccagctgggcgtctggaagcactgagtgcactgagcgctttctcctcctctgtcctgcactgtgcatcatctgcagtcttctcaggctgcttaaggctgatggtgctcattacatgtgcccaaaataagtatcattggttgaatgtgtataagaaaatgacagacacaatgctgcttacagtgaatttggttgttttgttttttttactgcaggtcatcttggaagatgttgcaatgctgcatattaaaccagatcagtttacttacacttcagatcattttgaaactataatgaagtatgcagagaaattaattcaagaagggaaggcttatgtggatgacactcctgcagaacagatgaaggcggaacgtgaacagaggacagaatccaaacacaggaagaactgtacggcacagtttgtatcagagtctaatggatacgcttgctttctttttttaatgagagatatagcttaagacacattgaaggctgtttctttttctaattcttatgcctttctgtttgtctgagacggtcttgctgcgtgtagcctagttgggttcaaacttgctattttcctgcctcagcctcgtaagtgttaggattacaggctgtgtcgttggccccgcttgcattcctccttttcttgcctgggatctaacccaggcctgcacatgttagaccactgagctaccaaacccagatcctggtgcagcttctcagagctgtatctgcactgcacctgtgttcagtgtcctgtctccagcacctcactgcttgtatacagtttcttgcatttatttcatttgaggtattctttctgtaacatttaaagttattttaatttaaatgcttaccaatcctgaagtgtttgaaaatgctgtgagcactagcatatacatgtgtgtgtgatttctataatgtgaaagttcattatcctcccatattggtgcagtgtcacgtg

SEQ ID NO: 18566 - DNA, 1175 bp, Mus musculus
cttagtcaaacatttaaagtagatcggccagtgttaataatgatttttactttctagttattattgtgtgtaacagatttcacagcatttaaatttactatgtttaagattcatataagttctgaaatcttaattatgtagtcaataacgtatacttgtgagtaattgttaacctaagcattgaaggcttataatggtttaatagcccaggtgacattaaattcctgagtgtgtttattttcttcaacagatgtgtatagatctgtcgtccagtgaattattagtattcccaatgtagtttgtggcattcatataattaatgtctatcatatatatgttaaaaattaaaatagatgtttgattggaatttttttccaaagagaattctttattcacttactacagaataatattacatttctagcagtttactttcttttctcgttttaatacttttcaatcttttgtagaaatgcagatggaaaaattacatctctagatgcaaaattgaatttggaaaacaaagactacaagaaaaccaccaagatcacttggcttgctgagagcacacacgctctctcgatcccagccgtctgtgtcacttatgagcacttgatcacaaagccagtgctgggaaaagatgaggacttcaagcagtacatcaacaaagacagtaaggtaactggaagagaccaggtctcctttcttacacagatgttagcattctgaaagctaattttaaatgttttagtttcttaggtaaaatagaaagggcttgtagaatttattaaactataaagatgtacctgggcctggtggctcatgccagtaatcccaacatttgggagggtgaggcaggaagatcgtgagttcatggccagcgtgggctacatagtaaaattgtcctgaaaagcagatagcctagcatgtacaagaccctgggttgaacttctgtactgaaacaaaataaatggaaacaaacaaacacaagatgtaaagagcccagcagtgatggtgcacgcctttaatcccagcactcaggaggcagagacaggcagatttctgagttcgaggccagcctggtctacaaagtgagttccaggacagccaggactacacagagaaaccctgtctcgaaaaaaccaatacacaaaacaaaacaaaacaaaaagatg

SEQ ID NO: 18567 - DNA, 1202 bp, Mus musculus
ttgaaattttactagtaaatttactactttagtttttatagccgggcatggtggtgcacgcctttaatcccagcactcgggaggcagaggcaggcggatttctgagttcaaggccagcctggtctacaaagtgagttccaggacagccagggctacacagagaaaccctgtctcaaaccaaaaaaaaaaaaaaaaaaattatgcgataggttaggttgtagcaaaattacagtcatatgattattttctaaggtctttttactctgattactgtatatcgctcaggcatttttttcctgcattccaaatttatagacacttaaatgtttctcagctgattacttttttgttgaatatcttccttaagtctcacattggcttctttagccttcccacaaggtggttgtttgaagtactttttcacatacaaatgagatagtatagattgacaagcctgcagtgaataagcatgctgtaaatgttgttacaggttttacagatccttgagttatatgctcgagtatatgaagagctcttagccattcctgttgtgagaggaaggaagactgaaaaggagaagtttgcaggaggagactacacaaccacaatagaagccttcatatctgccagcggacgcgccattcaggtatggaagtactgtgactactcggccactgtaagcacagcccatgacagttccagcagtttttgccacttttattagtatttggaaaaccagtatagaaaatggtattaaggttttaaaaataaaatcaccagtgtgtgctctagtaatacctcttccagtgacgacatcacttggtaaaaaacaatccacaatccgcagaatatttagccataaaaggaatgaattctgtcatttgcagaactatagatgaaattggaaatgtgtttgttaagtgaaataaaccagatactattgcatgatcttaattgtatgtgaactctaagaaagtgattatatataactaacttgataatagaattgtgtttatttggatgtcggagagaatatgagttgctcagtaggcattacactttagttccatgggaacaaaacgttaaactgtggctaatgatgctagcagacgcctataattccagctctctggggatcttgggtctgtggccagtgtgagctgcatagtaagacactgtctttgggggttgagggggaatct

SEQ ID NO: 18568 - DNA, 1124 bp, Mus musculus
tgtgaataaaaaaataatttctggggatgcagtacagtgcttctctaatgttcatggagccctaggtttaattaccaatgctccattaaactgggcatcatggtggcacgtgtaactcacctacaggtggaggcaacaggatcaagtatttgaggctgccctcagctccatagtgaggtgctacacccatctgggctatgtaagacccttcctcaaacccaggggaaggagcaggagagagggcaacagtggaggagagcaggtccaggcatgagatctgggaagtctagcacacagttactcctgaaaggggcttcccggagcaggaccgtggtggtttataactcatcctgctctcttgtcatgccaatcctacttgtattttcagcattaatgtcagaaaattagctaaacagtacatgtagtgacattctacagtgtgtgctcttgtagtaattgtcgtcaaaggcaaaatagtataaaattaagcctctgtttccttattttagggagcaacatcacaccatttaggccagaatttctccaaaatgtgtgaaatagtttttgaagatcccaagacaccaggagaaaagcagtttgcataccagtgctcctggggcctgacaacacgaaccatcggtgtgatggtcatggtccatggggacaacatgggcctagtgcttccaccccgagtagcatctgtccaggtgagggaagtgtctctgcttatcatttcttttgtaagattatagaccacgcttacaaaggaagtttgaaagggtagatttctctgctacagaaataatagaaaattcagcctaggccactatattgtaaaaatatgtgtaaatttgtattatttattgtctcaagaattttaaaaattacttcattgaaaacttttaaatttgtcaatacatttatcattttattttctgtatgaatgttttgtctgcctgtatgtttaaggaccacatgcatccttggtgcccaccaaggtcagaagagggcatcgaatcccatggaactggagttagagatagttgtgaactaccatgaggatgttcttaattgctgagccatctctctagccctagaactttctttagaaataatttttggat

SEQ ID NO: 18569 - DNA, 1190 bp, Mus musculus
aaggtctccttaaacctgaagggcttcggtcccctcagagatagatcacaatgcataagacttgaatatgtaaggagtctggcatgtagctccttcttcagttccctgatggaaacctcaaactttatcccaaagccagcaatctgagcagcccttaacctagagtaacaagaatctgaggtgaggcctgcaggggattctgatatattctctagttgcaggcagagtacaggttcactaggaatgagtctggggtgtaccagtgactaacccctcagtgtccgaggtgtgtctggtttcaaggtgtctctgtcattccgtgtaccatgtgccattccatgtgccattccatgtgtcattccgtgtaccatgtgccattggtgaggaaatgggattcagagtagatgaagccatgatatagtctgcatgcaacttgagatacacatgcacttttaactgcctgttttgttttacagggagttccagtcagacttgaggtggggccacgtgatatgaagagctgtcagtttgtagcagtcagacgagatactggagagaaactgacaattgctgagaaggaggctgaggctaagctggaaaaggttttggaagacatccagctgaaccttttcacaaggtagctctataggctccctgtgtctccttcctcagtgctcactactgccggagtcacaaacagtgggcattggtgcaacgaaaagcagctttcccttccagtcccaggcccacttaatgtcttattcttcctgtacattggacttggagtaggctttcctaaatgcctgttccctgagaagctgtgctctgtcttgaaccaacaggtttacttaaaaaccaggcttttgtaacatcaatgtgagggtttaagtcatgggttcttaatcgcccgtgcagactgatagaacccaggaggcttgagtaaatagcagcgctttccctgagatactgcttacagtggcctacagagaagccagcagccatagtgctaaaagctcccctgtggtggtaggaaggctggctcagtgctgaagagatcaatgggtactgttcctgcagaggacctaagtttggttcccagcagccatagcaagcagctcacagcttactgtaacttccagctccaagggagtccccaggtgcgtctggacctcttggggacggatggacac

SEQ ID NO: 18570 - DNA, 1148 bp, Mus musculus
actttggacctgggttcagttcccagatcctgtgtcagaggccacacagctgcctgtgacgccagttccaggaaatctgatttcctcttacagagatagcgcacacatacaagtaggcgctcacaagtgcaccgaagtgtttaaaacatgaaaagctcctcaggggatttgagtagccaagactaacaactcctcttgattggtttgggagaatgagatagttgaggcattgggctggcctatcctataagaggatttctcccctctgcctacctgaagcagtaagaggaaggctactatcactagagatagaagcttggtccaaggttaggggaggtagcccatgttatattcattctgttgccttatagtactctatgcctaatacatagtgggtttagtgggtttatttattgagacagggtctcactatgtagaccaggctaacctcaaattcagagagatccacctgttgtcttcactgtctgagtgctgggattaaaggcatgcaccaccattcctggccacattgcgtctcaataaatctgactgggagagagtagactaattttagccttacctttggtgcttgattgggtgtttctaggcagctagtttatagctttctctggatttattcataaaagtatctttttttgtttggttggtttttgtttttttgagacagggtttctctgtgtagccctggctgtcctggaactcactctatagaccaggctggcctcgaactcagaaatctgcctgcctctgcctcccaagtgctgggattaaaggtgtgtgccaccacgcccggccataaaagtagcttgaatagttattttaggatttgtttggtttctggataacatgatacgtttagtgtctctgcactgcgagcgggtagtgttgtgggtgaggcattgggaagctgcctgccctcgctgctctcagtgcttctctgttctcagtctcctggaacttgaggcactgagagtgctgaacttcatacctagaaatcctgactgtgttgttttaagataaatttctggttggttagggtttctctcctgtgattcatgtcgtgtctcaggatggaaaaccagcatcattagtgacagaagagcaattttctcgttttttgttttgtt

SEQ ID NO: 18571 - DNA, 1152 bp, Mus musculus
tgttcttgagcttttccctccatccacagcacaggttctcctgtgtattctagaccgcaagacacgaatcctcctggtcatttgctagattcagtgttagggtgcatggtgtgccttgcactgtgctacatcccagcctccttcctatcagctgtggttaaagaagccctgcgtgaagtagacagacaagacgcaggcctgtggccagctttcctgttctcccatgaaacagtgtgaagtcggcctacaggcccagtgctgcgcttctcaggaacttagatcaattgattttattggttctgtcgtcacctagaacttagtgacaaggacagacgatcacagccatatcaaggcagtgctggtgggtgagggtgcaggagcatgccctgccctcaagcttagggtaggacatgatttttcctacaaaatgtgacagaaaggggaaaagaaaaaacaggtaggtttgactgacagctagcaatggctaagagttcacaaggtcttagacctgagattcagaaaagaacaactgtctttttttcctcattactacgtgtgtgattttttactgtagatgaaaatattacctaatacctgaggctcttacatggagccaggcatggtgatttacatccagtaatattagctgaagcaagaggaccatgtcccaggccagcctgggctacatagtgagacctgaggggacaggagtgttgggtggtgtaaaaatacctttgatttgtgtctgcttttctttgttgtgatatattcataccttcatggttctatacttctgctacagtgttactttttttccagttttgtagaaaggaaaagtagatgagaagggtttgaaaaataacagacttccacaggtggtgtaagtgagagtcaggactattcaacaggaataacaaaatagcctattgtatatgtggcaagcttcccacacctctaggctcaagcggtactgcaaaaggtagctggcttatctgtggccgccgctagtaagggggtgaatactcacagtgagttcttctcattttcacttactagttatcttgtttatctcgggacttaaactgtcacatttataagaaaagtctcgtattttctgatgtattttggcagggcttctgaagaccttaaaac

SEQ ID NO: 18572 - DNA, 1154 bp, Mus musculus
ttaaataaaaaggtttcatttactataaagatagaattagtcacttttatgtaacagtttattagagacattaatataataccatatatataaaaccaacattcataaggtattagtgggttgtaaattttagtctaatattaggtaaattactgtggggatttcacatttaaagtggagcaggggtattttagtttcatgtttaaagaatacacaggacaataaatagagtctggtatattcagcagtcagtgccttctcctcccttgctccatgagggctatctcaggtgtgctgaataaccatcaaacagcctttgaaaggatcttaggaagttaaagttaggtaaaactttgcttgcttcctctctgcgtggtaaagagttggagaggctagagtgctcactgacttccaagtgtggtcttcctcctcctcacttagtttccttgccgagattatggtgctagaggccgagtctggggcttcaggccggctcagcaaagctaagcaggagcttacactggagctccttgttatctcacagtgaggagacaggcgaggctctaggtccctggtgagctaggatgtctgaactttggatgttcttgcctcagcccttaagtagctagaattatctccctgtgccaccaggctttgttagaataacttaggaatccaaatacaatttttccatgtattacaatcattattttatatgttacacaattttataaatgtacttccatacattttgtttagaaacctttagatttgcagctctcatacagggaaatgactgttactttagtttaggtttcgggtcttttgtctccgttttcatggccttgaactcagaaatcctcctgcctctgcctctcgagtgctaggattaaaggcgtgcgccaccacgcccagcttgcctttgatacgtttcagaaattagactagcacaggcactgaatgagcagagaaacttgatcatgggctggcgagatggctcagcagttaacagcactgactgctcttccagaggtcctgagttcaattcccagcaaccacatggtggctcacaaccatctgtaatgggatcagatgccctcttctggtgtatctgaagacagcaacagtgtagtcacataaaataaataaataaa

SEQ ID NO: 18573 - DNA, 1396 bp, Mus musculus
aaataaaatactaagtcttggttctgcccattattaaccagtccaaggaaaactgaaaggttgattttcctgataaaaaatgatttttgtcttttataagcttttgtactttaaaagtcattcacttcctactgacctgttagactcgagtggggtcacgggccgcttgcctggccattagcagttgctgttaccttgccttggaatcactttattcctagtcaccccctccctcctcctgtcagccatgctgtgggcctgtggggagctgcagcagacctcaccatgtcacggccagttatccagacactttagtgtgtcgcacatgcgacctgttttatgactgtagattttggatggtgtaaaataccatattttgctcttttgtgtacttctgagccaagttcccagcgtgtttgcagaggtgcctttgcccccaaaaccctgggacactgagcccttttgcttggagggtgaaaagagaactcgggtcctctccaggagctgtgatggcagagtgtttttcctttccttaccaggttgcacagattccattttgtggggaaattgactgtgaggactggatcaaaaagatgactgccaggtaagtgtaaccctgactccctgcaccgagaagggcctagtacacagcaggatgaatcactactgtctctttgattccagggatcaagatgtggaacctggtgctccatccatgggagccaaaagcctttgcattcctttcaaccctctgtgtgagctgcagcccggagccatgtgtgtctgtggcaagaatcctgccaagttctacaccttgtttggtcggagttactgatggacaaaacagaagccactctctctctcgctcatctttttttaaaaccactgatacgaagatcttctcagatgcaatttttctttttcattttttaaaacttctaaaaaaggtcatgagataaaacagctattcttatgcctaaattaacagtggaaaatacttttctgtaaacagccagggtaataaaaaccatgaactaattgtattttatctatttggttcatcctgcaatagcggaattatacatacagggatggtcttcagaagcctgctaagtgcagggtgagctctgtggttctcaaacccatcctcacctcagaaaagtgctgtccttttctcgtctccctttgactttcccatctgccccatcatatacttcactgagcccagcgtgcacatgtgatcctgtatcgccataccacactgatgctaaggacctctgtgcctgctgtgttccccaccacaccaacccttttcttagctacgtctttcattgacttctttcttcctggctacctcttcagattgatgtgccaagtatccgtacttggcctcctc

SEQ ID NO: 18574 - DNA, 1200 bp, Mus musculus
aattataaatattccaattataacgtaaacacctccatcatgtgctaaatagcatcaacatgcactcagcaatcttccagagactagattaaagaacagttttagtactgtaacattccttggcactcactcattgaagccatcaaggtgctgagctgttcagttagttaccagcatcctataatgcagtggataagatcccttctgtgtcttgcctttggtttctactttagtttaagaactggtatggcatcaaacccagcatcaccacctttctaatcctgaggattcttgtctgtgttcttccgtgtttctgtgcttggtgctaagtatagatatctctactagaggtaaccatggacaagcaggaagcctgggaagggaacaggggaggagatgctacccaacctgcaatcttaggaaacagcaaggagaagtcatggatcccatcattctgccatcagcttggtctcccttaatccctaccattgtggcaggaaattttctcagtacctaaagggacaaacagataaataaagcaagctctgtatcacagatttcttcctctaagttacttaaagaaataactaatcctactgggctgcgacgagggaagtactaactataaaatggaccccttgttctttctgtgtaacaatggctagggttctgacctacgagatgatgtgtgtaatgggactgtgtctctgagattatagtttcaacctttgacactttgtaaagaatactgtttgagatctgatgcagataaggaaaggcccatcctttccttgtgtcattttgattgatgacattttattgtgttgaacttagctaaaagcaggtccttatattgtatgtgatctgctacctctccttgggagtcgtcgatcttgtattggaatggtatttagactttttatgcccaagttgttaataaaaatgtaagtgttagagtagtaacctttctcagaaactctaatgggttagactgaagtcaaacactctaatgcagaagtattgtttgagaaatgagtggaagatgtggggcaggtagtatggaggcaaaaatagatcttagtggttaagaacatcttcttcctagaaaaataaccttctgtcttatcttaaagcatggaaaggatttggtaaacaagggagaaacctgttccattcccaagaaacagtgcggcatgcatc

SEQ ID NO: 18575 - DNA, 1208 bp, Mus musculus
tgacattaaaataaatgtttttaacacattaatacttgagtacttagaataatcttggttagtctcttcagtgagctaagaactgagttttgggagcacttagcacgggccctcactgctctcgccagcctcacagaagtgacgtggagcagctgttggatttgtctactccctgtcagtgctgtgggctggtgtccgttgctgttagtgacacagagatcctggtgcccctcatcagtgttgcagcccggagcctcgggggctctggcagtgctctgcctggggcactaaagtgtaacttacttttgctcttgtgctctgtaggaagctgtgactcagagatggaccactcagatgatggagctgcagaagcagacagtgaggacaatgttgaatcctgtgaggaagacaatgaagacgccgcagagtcgagtgctgggaccaattcaggctgggcagatgccatggcaaaaatccttaacaaaaagactcctaaaagcaaagccaccatcctcaccaaaaacaaagagctggagaaggagaaggagaagctaaagcaggagaggctggagaaaaggaagcaggtgtgtccgtccgcctgcctgtgctgtctctgcttagcagcagtcggctttgagggcttgtgaggcgtgggtaagcaggctcaactcaggagcgcagtcttatgggtccactgagcaaaccagcgagcactactgcataaacccgtgataccggggggtgcagttcaggagtgggcattttctgttcataactgaattcttgctctggttagttgctcctgatagaagtcagtctactttaaccttgattacagacctaaatttgcatatgagttggctgttacatagaaaagaaactatggtaaggttttgagggcccctgtactacaagtatcactatgtcaaaaatatttccttataaaaataagtattttctaatgaaagaaaactaacctttcatatttgtactgacaatatagaagtagtaacttccaaggagtagtttccaggtacaaatggtttaggttatactgctcttcatgtctggcagtgcctacatcacgtctttgcttgctctgcttgaaagcagggcttgagggccttgccctgaaacacagctgtgctgctcacactcaggattctttttgttaagatttttgtctctaaacagaaagcttttcagct

SEQ ID NO: 18576 - DNA, 1484 bp, Mus musculus
acagtatcgtggtgtatcatataaaactgaagtcaactaacttcattgttttagcgtagttttcctttttctttttgagacatgttctatgtttatataacacaagctggcctaaacattctccagctgcgccaccctaaagcgtgggattaggcttgtgccaatccctggcatagtgctgtgccaacggcagtgcagatataaggaggtcgtctctagtgagtccctgcttgcatttaatagacttgctctgggacgttgtaatttacctcgcctatgaaatactgatacttgttttgcaaattgtaatttttaacaaaatatttttattagttctctaagttaaacagtcttgtgatactcatttcacagctgcttttaacttcgtttatttgaactaaatctgtttctcatatatcatcctcagctaaggtttagacagttttgcatatattttgcttcatggttgcagtttccattttaatattaagagatttcacaatcagaagtcccttaaaagggacagtgattgtttacgaatgaaagctctcgtcacacagactgtcagcactcgcggctccttgggatcttaggcacagttagtgcgcactttcaaatcttccttgtttcttatttttgtaagctatctacattcaatactttaatcatttttatatgtttgtctctttatagctcttaataatcccttaagagaaagataaaaacgttgccagtccctgatcttaagtggatttaatggtcattgtaaatgacctgctaggttccccttacaacagcagtgaatacttgctgttcctgaggtatctgttgccatgaagaactgactctgtggaccctgacgctgactctggtggatttttgtcttctcccaggtgatgatgagcagagtgactggttctatgagaaggagtcaggcggagcgtgcgggattgctggagtcgtgccctggtgggaaaaggatgagccagcagagctggacaccaacctgcccgaccctgtgtttgagagtatcttaagtggctccttccctctcatgtcccatcctggcagaggaggtcagtagttgtccctgagtgcttctcctgttagcttatggctcctcctggctagactgactgggaggacagaccaatgtggaggcaggagagacacaggtgctggagagaagcttgctgggccctagccatctcctgctgtgacagcattgaaagtgcttgccctcttcctgcattcactcatcagggtggggaggagggtcaccaggtcaccaggtggtggatggagggagagttcttagctttgtaatgcgagccttagagccctgctgggaatttcctcagctcttttaagtatgaatttcacatttcctccaataatttccgtggtgttcacaactatcagcaggctagttttacttctctgatgacagacaggatcttctgtgccccagcgatcacatatct

SEQ ID NO: 18577 - DNA, 1357 bp, Mus musculus
gactacttacttgatagaagtgttgtcaggctttaacgaggctcaggtccatctttgacccatagtatgtagtaataagtgataactgctgttgttattgcagataataaacatagctggtagtgcaacttatcatgaatccaagtgtagaatttaaccttcaacttttcaattcatatttcatatataatttgacattaccttaatagagtacattattttatagatctttgggttccttttgtatcttatttatgtttaatctgacttctgtctatggtatagtctgttctgaatgaatttttggttaacaagtctcaaaattgaactggtcagctctaaggcctgtctctccatgcctcctccatctcagaccaatcattaagctattcttttacactgtttacaaggtttgaatccagttttaatccttaaataagtatgcccatgtatatgtgagattatatgtcttgagaagttcctgttgggaagaactacttgtctggccatggtggtatatacagttccaccacttgagaggcagagaccagagactcaggacttaaagatcatccttgataaaataacaaatttgaggttagcctcaattatgagactctgtctcaaaaatcgcaaaaagaagtactgctgttgtctggttagaaactccagtttattggtgccctgctaaccagccttttaccatgtaattttcggagaattgttatttatacggaatgtgctggggttttaccttgcttagggttttattgctgtgaacagacaccatggccaaggcagctcttacaaggaacagcgtttaactggggctgggttacagggtcagaggttcagaccattatcaccaaggtgtgagctgcaggagctaaaacttgtacatcttcatttgaagacaaacaggagaagaccagcttctaggcagctaggacaagcgtaaggccacattggcacgcttccgcaacaaggccacgcctcccaatagtgccaccccctggagcaagcctattccaactaccataggcagtcacccagaagatagagcctgcactcttgacgtgtgtagactattcattaagtaagtttgcagcgataacacagcgatgatgctggaacctagcttgaggagagtgtccttgcagcatggctcagtaacctcactaaagggcagctgtccatttggccagaatgccctactcttcggttttttgtttcatttttgtttgatttttaacagagtctcactgtagccctggctgcatggaactcactatgtagtcctgaacctttgaactatgtaggctttgaacctgcctcttctcagtgctgggattaaagg

SEQ ID NO: 18578 - DNA, 1200 bp, Mus musculus
gtggtattcttgaagtctgtctcccacagtctttagagtggaccttgctaataaattttgaatagtgtgaaaaatgaagttctaaagacaaaattaacacctttaagtgcttgggctatgaacaactatttcaagaacagcgttgtgtagaagccagcagtactatagtcagggcgaatgctcaggggtaaagtgatggctgcgtgtggttaaggaaccgagttccttttcctaacaccagggaagaattcgaacatgctgtctcaggtctaagcccagggtctggacaggaaggcaggtgccctgtgagtcacgtggagaatgctaaggacaccagacgttgactgctgcttcctcacaaatatgcgcgtgtgcacacacacacacacacacacacaaacacaaagagcgagaccatgggcacacactaaaaagccaaataaaaccagtttccagcattttcgtgttttcaggatgatctcttcctcttgtcttcagcaggcatccctgccctgtagctgaggttttctgtgtaggctcgggagaaggtaaaccctgatagcagtggagtgaaacgcatgagagcagagccgggagagcaactcagtcagtagagtggtttaacgcgtgtgcggacatggctttaacatcccgacagaagagcagggcctggcagcacgtgaccgtggtcctggtgctgcacgggctgagacacattcgtgggacgccaggccagcaacaaaagacctcatttcaaaacagaagactaatacttgcctaaggaactttccctgaggtggatttctggcctctacacatggacacacacctatgcacacaagctcacacaagtgataggggcaggcagggggaggaattttactttttatttttttataaaatggtaagctcacaactgtcctgagaataaaacacagaagtattggaatttattgaattcattaacagggataaggcagctgttactgggattggggacgaaaagccaggcaagcgcaagtggaagagccccggtttgcaagtgagcttgaagttggcctgcctggccagctgctcggcccgagaccttcactccgccttgctgtagacaggggctgttacttgttccttctgttctttatacttgagagcctctccccccaccccataggagtgtcccaggggaattggagctcaatg

SEQ ID NO: 18579 - DNA, 1166 bp, Mus musculus
tgctgggacaccacagttctactttcacacaagaaagctccttactcacagggttcatcttctactagtgtttatctgttcagagtggatgaccagctcttacagaagaaccgacaggccccagcccaccgccagctgtccacaggtacccttcagcattcaagtccttataaagagcagcaagatgtgacgtccctggcatacctgaccatagctgagaagtaaacacaattaaaataggaaatgttcatgtaaatcagatgtctgctcgggacatgaatcccactggtttacatttaatagagattaataaatcattatcagttcaaatcagttcatggtgcccacatcattggagttcatgattttaactctatcattcctatcacctttaaatagtcttaagagatttcttctacttcctcatgagtccaccctgttgttctgcaagccagtcagttagggtctcttcccttcccatccactccctacggtagccaaagaatcggagcatagctgtgtcagcagtgtgactccgcattgtgtgtctttaatgtcaaccaggtgtgggctgtagtcctttcctcccttcttccctcccctaaatagaatgtataaggctgaattcccttgaattcatttctttttgtttttaaatgatctagtgacttttaaagtgggcagctatgctaacacccacccagaagttggaagattgaggcaggactgccgtaagtccaagaccaacctagactgtgtagtgagtttcaggacagatggtggcatatggtgatacccgtgtcaaaagtaaatatcaatggaaaccacgttagtaagtgccccttacctggaaattgggcaccgtgtttgagcacagcagtttgggactggctgcaatgattatgcagacagagttgagacagcaggttaaacatgcgtgcttgagtatgtgtgcacgcgggtgcactgcagccgtgttagtttgcggtggacagacaggattgagaggttctgcccttcattcatgtttaaccaaaaaaaaaaaaaaaaaaaaaaaatgtttaacatttccaattggtattccgtgaatttcatttggagcaactgttttgtaagcgagtaatcgttgaagtacttttgaaaccattttaacttgaattttgtct

SEQ ID NO: 18580 - DNA, 1194 bp, Mus musculus
tgagccatttctagtactcagtcttgagttttctgacatagagctgagaaaatggtgccatgcctgctttgagtttgaggtagaaattgcctgaaatttaaattgaggttactaggaggggaaggaaggcctatgtctgtgtaagagagcttcattacacgctggaaccccagataggctttagctgtttgtcctagacactggctacttactgcaggcttgtcctagctcttccttggagctttaagctctttactctgtgggagagatctggggtggcaggaacaggatctgccatggctgcaccatctagccagtaacagcttacttgtggtcccaaccttacaaatgttccctgcacacatacaccttttccagaccagaagagacagtgggctcttaaggttcccccaaatggaagagcactggctatggggctgccggtgggacgtgccagtagcagcattgcatacccttgtagaaggctgccagccctgcaacagtcagtctgtggaagaaacagagagagcgctatctcagcagcatagctttataaacttactgaaggaggctttggagccttcccagttatcggctcctggactacgatggcaagaaattcctgtgaatttacagtggtgcaggaccaggtgcaggacaagctgctgctagcaatagagcagacagggccatcctgcttgggtgggaggctgggggtgaaagctccattggtcttcctgcctgtccagtagctgtagcttgtacctccttcccccatctggttccacctcagctctgctctcgggtaaactcctggtcactgcaaatgccttaaccttggacttcaggatcacacgacacaggagcagagcagtacacagggtgtgcagtctctgaacacgcgtaagtgtctcattgagccatggagagtaactcttaaggcaagagttctgagggatggtggcatcacgcatcagttatcttggaagcaaaggaaacggagtacctgggctgaagtccatgcagggacagacaagaggacatgatggctctgagaaagaggaaccgggaactgcgggggacgggtgtaggtgctgagatcccactcttagtccagtctatgcctggtgactcccacctatccacggactgggagatcctggcagagaaaaggccaccctgacccaagactcc

SEQ ID NO: 18581 - DNA, 1278 bp, Mus musculus
tctacatgaaaaacaaattttcctgggtttcagtacattggcttttacatcaaaaactaacagggcacagtttgacctgtttagtgtattctgggccgagtctctgaagcaggagcagagcacactcccgggattcagggacatggtcctcacagctcggaagtagctctagtcctgcgagcaggcacttggaacagcagtctgtaagcaggagtcattgccatgttgccctccctgctggtgttactgtgttcccttagagcatgtgggccagtgggccacattcataatgcagttgcccaaggcctgtcttgcagtggtaccttaaagttaacctcataatcttggaacttgggctccaacccttatgattgtggagtgtttactagatacataatgaggtgctaagttgtggggaagtctcatgtaactcagaacactatcctggtcccaggctacactgtgcactacgtctttagggttgtttatttcactgcgggtcattttctgattcttgttgttgggagtcaatatagcatgcgtcaccagtgtttggtacccaagtcgttccagtgggaacaatgtctgtttgagtaaactaagactgacaggggaatcggggtgctcacaagcgagtccctccagctgctttaggagccgctgtgttcctgctgtgtcttacaggactggagtgctggattcggagttaaacgcatcaatatgtaaaattgttgttttggctttattttgaactctgggagcaaaagaaaaatttttgtacattttcttcatttaatcagaatggtttacatatttctgcaaatggagaaaatgtaaatataaacccatgaccatttactaagtgaatgatgtatatttcccattatcagaagtataatgaagttggaataaattctttaaagtttactatgttgccagtggtttcacacaaattcccttgtatttatttgttgattaaatcaagtgagaaaggttaaagcagtgtgtcttcagttatttaaggaaccttatgctgtgtaagttccacccacatgagtgtgtaaaaaagaaacactgtacttaccatgtcagaagaccactagagatgagaggagaagttgggactaaaatttaataaaaaggtagagtgaaccttaatctcaacctggtagatggaggccaacctgggctatatcatgagccagtgtctcaaagacacatggaagagtggcttcccaaaagcacggactgcagcattctactggcctagcctcgtct

SEQ ID NO: 18582 - DNA, 1187 bp, Mus musculus
ttggctcttgcagtgcggaggctgctgctgtgtgaggagctggagaggtcatcctgcggcagcgtcctgttccacggctacttgcccccgccaggtactgcagtcttcagaaaattcctcttggcactgagcataagcataaaaataagaaaactgttggttatttgagtttggataaatctggacctcatcagaccgtgcccttgcatgagagtgaagctgcacggtctgtagagcagggctggcggcttctctgtcagggcagggaggagctccgtggcctcactcagctgccatgtataccactggtccttgtgtgtgtgggggtgggtgggtgggggatggcacgggacctgagcctggggctctgcttaggtcaccgtcccctcagttacttactagagttgggcctttgtgcaccattgtgagagagaggtgtggtttttgaaaagatcctgtttgaaagtatgaggaaattcaagcataacagataatatgtgtattctcctttgtaggcattcccagtcgtaaagtaactaacacagctaggtcctctgtggatgctaggaatggactgaactctatggaaggagaagcccggggaaacgggacacagcctgtgcttgcaggaaatggagaagacactattcggctgggtgagtgacaggacacagagaaggagagcacacgcatgctcagctggcagggacacagagttttgaatgttactcttttgcacccccccttctctctttccctccctccctctcacagtcttacggtttgtgtgttgagcctatggcaaaggggctgagtgctgatgtactgagctacgttctagccctttatattcgtgttaaatccagattcattatttatatattggaaaatctcatttaacacattttttttttgatgtgtaataatatgatcctctgtttttgttttctttctgttgtttttgtcctcagaacagttgacaaactttctgttgagagctagctagtgagctcccagcttaggctcctgggccatgtggtgtctattgggactacttaactttacctctgcctggcgaaggcatgatccatagctgataagctgtgagcatcatgctctgtccgaccaccttaacccaaacaggtagaagcatcaaccggcctctgagccagagacttccaactcag

SEQ ID NO: 18583 - DNA, 1235 bp, Mus musculus
caggtaatgcgctgtatggtgttcaatatcttttcatcgagtgtacttagatcagtctgaataactgcgaaagtttcttttttacctaaatcttgtgctggtgaagaggcaaggggcaaatctttcctaggccatcggtggcagaagacccttcgtccagccccgcccatcgccaggagctcctccctctcaccagccccgcccactccttcttcgtaagcgtgaagcgccggcgctacagctttttgtccctcgcggcgacccgtcctccagatggttgtggcggccgccatggaggcgagtgggctctgaggagaggccgggctgggccggcggcctccagccacgagcggcggaggccacgaacacgtagtgggggaggctggagcgagccgggccgctgcgggaggctcggcgttccgagtgtgctccggccgccgagccgccgctcctggctccggctccggctccggccctggctccggctcccgccgcagacatggcgggcgggcattgcggcagcttcgccgcgtcggcggccagcagcggggagatcgtgcagctgaatgtgggggggaccaggtgagcccgcgaccgcgcgggaacagtgggtgggacgcccgctgctgtaggagtggcatgtgccagcctaggtgggataggtgttacagccggggcggcgtctgcacggccaggtggggtaccctcggcagggcagggtggcatctacctggtcaggtcgggtacccactgcagggcagggcggcgtctacctggtcaggtcgggtaccctccgcagggcagggtggcatctacctggtcaggtcgggtacccactgcagggtagggcggcgtctgcacggccaggtgggggacccggagacaggtaggtacaattttgcatgatccaagcagccctatgcactcttcagagtctggttccaggtcgagtgtatagactgttaaaactcagtctttattcccccgggttcctatggtgtaagtaaggccacaggaacacagttggcatggtgggcctgcctgaccaagtgacttggggcctctggagggttgaggcatgctgacaccgagctgtcagcgttgcagctggttgtcgtctcccgtgctagggcttgagttgttgcataggagcaaccggttggactgttgagtctttagtctctattagaccttccactcccattttgttggagtggaagtttgttggcaaaaca

SEQ ID NO: 18584 - DNA, 1174 bp, Mus musculus
gtgaaggttaattttgtaacccctagaatccaggagacactgagaggccatgaaagtcacagcagcagacagagttcctttgctgtggtttctatcatcatgatacatgacatgtggcagggactgtctggtgtgtggtgcattccatgttcctttcttatatatgatgttgctttatgcagcctctgcagacaactatgatctaaaatcaaatggaactttgtagatagtcaccgcataagttgtacacagctcttatcatcgaacattgttaaaaaaaaaatagttgggcgacgtgggacagccgcgccatggcggacgaagaacttgaggcgctgaggaagcagaggctggccgagttgcaggccaagcatggagatcctggtgatgcagcccaacaggaagcaaagcaaagggaagcagaaatgagaaacagtatcttagcccaagttctggatcagtcagcccgggccagattaagtaacttagcacttgtaaagcctgaaaaaactaaagcagtggagaactaccttatacagatggcgcggtatggacagctaagtgggaaggtgtcagaacaaggtttgatagaaatacttgagaaagtcagccaacagacagaaaagaaaacaacagtgaaattcaacagaagaaaagtaatggactccgatgaagacgacgccgattactaagaggacgcgcttagacagacttccggagcagtgtctaggacagtcaccaccttgtaaatgtttactttgttccctgtctatatatgccttttgaaaaataaacttgtacctcaaactcaaaaaaaaaaaaaaaaatagttgggttttgttattagtcagttgttaatctcctactctacctaacataaaatcaaactagaactgttctgtctgaatgtatcaagatctaattgttgtgggaaatatttaaaaatgaaccagcgtgttcctgcacctgtgctgtcaactctcagcctcactgtggttctgacagctctgtctttacccaccaactctccggcaggtcctgagctcctgagttccttttgctgccacaccagccccatgcaatggctgtccaccctgtggtcagccaccacagcatccagcaacctggtagacgcaaaactctagaagcgtataattaacaagtcagatgtata

SEQ ID NO: 18585 - DNA, 1997 bp, Mus musculus
gggagcaaagtgaacctctatcaaatctaaaggaaaaatagggctgagaatgtagctcactggtgggtcgcttgcctaacacatgtagtgcctcggttcagtcccttatagaacaaaacagtgataaccatcaaaaaatatggatgcatttttgagcctctaacagattatttatgttgcaggtcaaggttgttcaggagagctcagcggattcacacactgccttccaagaactcccagcaaaatctctcacagccagtaatattcctgggagaaactctacagagagccccagggagggcctgagggccaagcgggcctaccctgcctccagcccagctgctgggcctgatcccacgaacaacgaaaactgccgggtccagtgaagtgtccactcagggttctggaaggtggcattactcaaaggagcctgcctgtggggacttgtcttgagccaaggacacattatgtatcactagagaatacctgagtctttatgctgtgtgtgtggtgctcaggtctcccatatgtaagactgcaaacgttgaaagcacccattacctagtagtcctaatccttaaccctaagtgtaaatagcagtggatagagcgagagcatttgctgcagttaaatgggaagcgccatgatttgtatgtgcattttacacttgctactgcagtgatttgattaggatcttcctgtgtagattgttaggcatcaaatcgttgtagatcaagagttggagctgagttaagtgaggacagcctgtgtgcacagtgtgtggtatggtcctcctttctgtgtgtttcataacttcctgcttctctgacctgtccatagcgtgtggggagtttgcagtgtgcacttactactagttagtctgattgtttcatacacttttgtggtggtgtagatcatgtttactgtcactgttttcctgtcatcatagttcttttggtatatatttctgtgtctggtgatatattaaagtatgtccttgtaaacttttttgtaaaagttatttcctaaatataaaaacattatgactagcaccactatgtcttcttaactaaaaccacctcccataaaagtaaaaatgtttgaacaaatgatacatgtctttgaatgtgtgatactagtatacttactgaacgtgagacatactgtagaatgttggtcatacagatggtttgagaatatggatatattaaactagtatcttgtgctcattaaatactattagcaaaggtacaagaatgttcccatctgtctgttgataatagggcttgaaaagatgaaggcattttgactcaataacaaatgaaaacacttgactaagcctctgtgccgttgaataaaggtgaaaggttttccggctttaagttagtagtagatgatctgttcttggctttcatttcagattggtatcaaatgttcacaaacacagtcattttagatttgaaaactgtctcctgctggtggtttcactgttggaatataaaccactccatcccctgagagcgatgctctactctctcaggttgctcctgtcccaaggccaccatgtgctccagcgctgaggtcaggccagcagctttaagggatgccacaagagatggaaagatcccatgccagggtgtcaccaagtactttccagcgtccttaggaatggcgtcctcttcttgtaggccatagctcctctgtgacatgggatacttgcattcccagaagcaatggactcatcttttggttgcgtgccaagctgagggtaaagaatggcttgtttgttgctgcaaatgaggaatatgtagacgatggtccttggagagcagtatctgaatagaaagcaaaaggctttcattggtgaaataccaggcatcatgtgtggacacatttctgaacatgttctgtgtggggtgagaaggtaatgacaggttcattgtgtagcctggctgccacaggtctcatctgcctgcatctgtctcccaggtcctggg

SEQ ID NO: 18586 - DNA, 1142 bp, Mus musculus
agtaagcaccatgcagacttgcttaaggaccgagttgagaaccttgaacaagaattgatactatcagagaaaaacatgattttccaagctgaaaagtccaaagcagagatacagactttaaaatcagaaattcaaagaatggcccaaaacctccaagacttgcagttagaacttattagtacaaggtcagaaaatgaaaatctcatgaaagaattaaaaaaagagcaagagcgagtatctgacttagaaacaataaattcttctattgaaaacttactgaaagataaagagcaagaaaaagtacagatgaaagaggaagccaaaataacagtggagatgcttcaaactcaattaaaggagctaaacgagacagtggtttccttgtgcaatgaccaagaggtctctaagaccaaagaacagaatctgggtagtcaagtacaaactcttgaacttgagaaggctcagctgctacaggaccttggtgaggccaagaataaatatattatttttcagtcatctgtaaatgccctcactcaagaagtagaagctggcaaacagaaactagagaagggggagaaagagatcaggacactgaaagagcaacttaaaagtcaggagcagcttgtgtgtaaacttgcccaagtggaaggagagcagcaactctggcagaagcagaaactagagctgagaaatgtgactatggcactggagcagaaggtccaagtgctgcaatctgaaaacaacacgttgcagagcacctatgaagcactgcagaattcccacaagagtttagagagtgaacttggattgataaagttggagaaagtagcgcttgttgaaagagtaagttccattacttattttcatgtggaagtatggtcagggaaggaggcactttgtgtttacatggtcttgactacagggacattgagtcagctcaggcagcagtgattgctttaatgtgcttgtaagggacatttttgttaattagattaggtttttgatctgaccttcacatcttgggtttgatgtagttagttctaggttcttatctacagttgaagttcatcacggtaaaacagctccttatccagcagagaaccactgtggcaagaacgtaacagattagggtcagaagacat

SEQ ID NO: 18587 - DNA, 1860 bp, Mus musculus
ctgaagtttgttagcctctcttatttgataaccacaaaaaactactcttttacgcttcctaaaacattaaaagctatgaaagatgtaatttccacattagatgtagtgaaataaatgtcctggaggattaatctttatgataaatatcttacccagtgctttgcacataggtagagcccactgaatgttcatgttgactatcaagacagcagggtggaatgaagtgttgagagtgatgctatttggagggatatacatagcagtacccatatgggcagtttctataaaataatagttaaaccactgattctattttgattcttctaaaaaaataaaatgctttcttggtttatattatgtttataggttgttcggtgccaaaacgataattatgatataaaagaatcagaagtatatatttcagagactacagagaaaacaccaaagcaggacactgaccaaacttgtgataaagatattcagcaggaccttggtctggaaacttcagtcactgagagtgagactaccaggctcacaggagaggggtgtgaagagcagcctccgaagaccaattgtgaggcaccagcggaggacaaaacccaggactgctcagaatgcatttctgaattgtgttctagttccaatgttttggtgcccatggatgttctggaagatcaggggtctatccagaatctccagttgcagaaagacaccttaaatgagaatttgagattacttcctgaagtagaggactgggacaaaaaagttgaaagtttgctaaatgaaattatggaggcagattcaaaactgagtttacaggaagtacagctcaagatgaagattgcaacatgcatacaattggaaaaaatagtcaaggacctcagaaaggaaaaagctgacttaagtgaaaagttggaatcccttccatgtaaccaggaggtatgtctgagagtagaaaggtcagaagaagatcttggttttaatttagatatgggagcaaatgagttgttaagtaaatctactaaagataatgcaaccaacacagaagacaattataaggagaagtttcttgatatggaaagagaactgaccagaattaagtctgagaaagctaatattgagcatcacatcctatctgtggaaactaacttagaggtggttcaagcagagaagctctgtttggaaagagacactgaaagtaagcaaaaggttattattgaccttaaagaagaactatttacagttataagtgagagaaacagacttcgggaagaattagataatgtgtcaaaagaaagcaaagcactggatcagatgtctaaaaagatgaaagagaaaatagaagagctggagtctcaccaaagggagagcctccgtcacattggggcagtagagtctgaggtcaaggacaaagcagatcttattcagactctgtcctttaatgtgggtgagctaacaaaagacaaagctcatctccaggagcagctgcagaatttgcagaatgactcacaagaattatctttggcgattggtgagctggaaatacaaattggacaactgaataaagagaaagaatcactggtcaaggagtctcagaacttccagatcaagctgactgagtcagagtgtgaaaagcagacgatctctaaggccttggaggtggcactcaaggagaaaggtgagtttgcagtgcagctgagctcagcccaggaggaggtgcatcagctgagacgaggcattgagaaactgagcgtccgcattgaggccgatgagaagaagcacctcagtgctgtggcgaagctgaaagaaagccagcgtgaaagcgactcattgaaggatacagtggagactctggagcgg

SEQ ID NO: 18588 - DNA, 1181 bp, Mus musculus
ctgcccttgggctgctgtttgctcatggattgggaggcctggacttgtgcatttagcatccctggttgccacatctatcctcagtctctgatactctgttttctttggtttgtttaatttctttttgtagtgtgaacatttgggtgtgtctctggctcatttgtgtactgtgcagttaggcctatgatgttctgaaaacttatggactctttcttgttattttccttaataaagtaagtacttatacagcacccatgggtagtatagagatgatgcaggactcacaggaggatgcgcctaggatgtaggcaaagcccacaacattctatatatgaggggataatcacccattttctctcactctgtctgtgcctgtctctgtctttttctctctctctcatctctgcttctttgtttttcttaatctttaagaatggttgattatttgcagaaaacatgcattcagaacttggttattttttctcttttgtaggtcacatcagtgaagcagcagttagaaaggaatttggaagaaattaggcttaagttgagcagagcagaacaagctcttcaggcaagtcaggtcgcagaaaacgagctgaggagaagcagtgaggtatgtgagcaggagggtcaaggaagagatcccacacaggataaaaagacaatgtctttcttgggaaaacagtgtgtgttgtgtgtgtgtgtgtgtgtgtgcacctgtgtgtgtgcacctgtgtgtgtgcgcccgtgcatgtgagtcacagcatgctcattggaggtcagcgtacaacttgtagtctctcttcatccttatgtgggttcccaggatcaaactcaggatagcatcattgtgtgctaagtcatctccctggtccaaaaagggactctgtattttaatttatcagcactttattagtaccatacttttttttctttttcagatgttatgtgttttatatatgtttaatgtccttgttttccatttttttattttgaaatgataactcatgcattttgcatgaggaattaagaatatataatccaaccagaccctccagagctcccagggactaaatcaccaaccaaagagtacacacatggagggactcatggctccagctacatatgtagcagaggatggtcttgtcggcatcagtgagagaggaggcccttggtcc

SEQ ID NO: 18589 - DNA, 2132 bp, Mus musculus
ctcctgtgcagcccagcctgggtcagtgatgatatcgaccgtgttcgatttgaagtccagtttcctgcttatgtccaattttgctcagagtataattttctaaactgtgagtttgtggaactgaatgtgtcaggtcttcctccacagttacatttttccctatttcctgagctgaaaagaccaaacagaaagtgtgtgtctttgtggcttctttctccaccccctagtgagtgcttatgacagcagaatccccatgaactcctctggaaggtgagccaagctgtcttcacactgggcaggggtggtgctggtgctgatgttgatacagcatttgtgggttcagaatctgtagaagaggtgcttccatcctcccttccgccatgcagattgaaccaaggagtctaagtgtgcaagccttgtggatctggtgcactgtgtaaactctgacataggtattttggggaaatgttacagtgttaagggtgggaagtcttgtttcacttcctttgatgatgtttctcctttacattcggtcccacttacggtttcattatgcaatgaagaacgctgctgatcctctcctgttgtctctgagctgtagtcggtcagaatgtatctccctcgggcagcaaggagatatgatgccactttgcacgggtcactcgggggctgtttttaccctgtgttagcagaacaaggtgcagggaagtagcagaacaaggtgcagggaagatgtcggttggctacccaacttcctagtgtgcatggtgagccctaaaggagaacattaagtgtcccgagtacgtatgtgttccattctcagacaccattgcttctggttcttcagtaacattccaaattcctttcccatccctaggaagtccccgtggatctctggttaaattatcatcaggcatataaagtggcatctgcataatgattgcccagagatgctttctatctgggaagtgagccaaggaataaaccttgaagtaaagtgtattaaattagttatctggttaggccttttggaaagatttcctgtgatgcatgggggccagagctggagttgtcagggcccattgccgcagtttggatttgaaggaggggaaaattaaaacaggagccagtaagtcatcccatctcacagcagagcagtggactgcttgctcgatggccctggtttggagttttttccagtggtaccacactcttttacttacactcatcggcctacgtccacctttgtcctggttcaggggtctctgtatcctggctgcttaacgtggtgtcttcatccctgagatcctgagttgtgttaaagatgaagctgcggagtttctggctgggctgtggctggtcttaggtggctctgcagtaacttcaggtggaatcccaggggtcagggggctgcacatccatatattctcctttttcagtaagaagtagaggagaaaacaggattgggcatgtaagtcgctttatggaggtgaagactagtgggttcctctgatcacttggagatgagccgcagatacgatactagggaggctgggggcatctcacgtggaccgtatcgtgtaataagccttgatttaatgcgcttactttgggagacttgtactgttatgagaaagggattactcacgattagaagcaagccgtcatcccgttccccccaacacccactccagtcttgggctctctcagccacctctgcttcaggacatggtcctcatgggacacagccaccagcttctatgcaagccataccctgccctctctcagcttccacttttcagcagctacctcctgaactggttctttgtgaccctgctacctcgctgtgctggccttgcatctggtcaagctgggaggtgcccctggatgctgacaggctgggatgacagatgtgttgccgtgtagtcttctgtcacccccttgaagctcaggccggcctgcttatcgatgagccatttaggctctcccctttttagtggcatgtctgatggagagagcgaatttagttaattgattaatgtttggagatgtgccagttacttgaggtggagaggggaagagtaccaggtcattctagaataaactcaacgaacatgattagccttgacccc

SEQ ID NO: 18590 - DNA, 1149 bp, Mus musculus
ctctgccctctgtttatccagtgtggcctgcccctgccctcctccctcccgggatccttatcagctgtttgttcaaaaaccatcacccacctgcctgtactttatactatcaccgcatccttttatcttgtggatgatgtgccttgatattttgagaaaaatttccagtaacagattcgatttacatggacagaaacttgagcaaacgccagactagcaggggggctattattctgttctataaataagtttagaccagaaaacactcacagaaacctgggaatcaacatgtttgggtctaattgaggggaaaagcaagatagataaattttgaaatgcaaatgatcaccttctgttgtttaagaattgcttctgccaactttgtgatcttggatttaaagccacagacctccagccatgtctacgaaggctcacaagttcctgcaaaaaaaactaagaacttgaaaaaaaaaatcgccttttatgttaaagcaaagagatccagcgatacaaagacaaaacccatggagctctgtctgtctgtgcctgtgaaaaagccggcccttaaatggctacagctgcggctctatcaagaggatcttgagaatacgaatttacagagcagacttagccctcttctcaaagttggacttttcgggttcgtttcgtatctttggattatctagcaaggtttttattaaataaacctcactcatggcaaacggcttcctttcatactgcatacaaacagaatggcggggagaaagaggaaagcagggccgcagtgggccaggtaggcagagggtatgcagcactgagtaggtctgcagcactgtcctctctcgggcacaccctcaggagctcctggatgcactaggacaggtagtgatcagaagccagggtgccgctcacttttctcttgagcacatgctcgtggtaatttgaattttatttccaatgctatagaaaccagagcttcaccaagtttttgacccaaggatttgaaatatttctccacttagtagcatagaataaattttgctacaacatttttagtgttatagaaaaataaaatacaatgtcagggactgtagttaatgttttcatagcagtatcttttaccatcaaaggcagctagaaataaaactt

SEQ ID NO: 18591 - DNA, 1328 bp, Mus musculus
aacgaagaaaagtaggggattgaactgtatggaatctaagatggtgtgtatgggtgtgctcttggtaaaagcatttatatatctctggaaactcattgtgttctttgaagtgtcttaaggaaggccttgtgtcccctgagcctctccacatgggtggacttgaaattttattaagatatgggtctgctttttgtttttaacatcacagatgtatgtctgtggccgtccaggcctctgttggcatccatagttaagcatatccgttgagtttgtgttgccctcttgtcagtgcagatggggtgctgtttaccccacagcttgcccagtttttctgagcactaagtctcagaaaggcgcagagttcactcatccctcgcccactggctgccaggggtctcaggccgagggagtgggtgggctccactgggtcactgggtgcccacatgggctttcgttggtgctggctcactgctgtgctgctcaccttgcttagctcggctccacaggaaacgatgataattaggaataaaaggctttattgtttttagggaaccttaccttggtgagagttgctgggctgaggaaaggcaggttttcaacccaatgcaaattccccaactttcccccaaacaagcacttgtgaaccgatgctgttatgtagttaatgaataacggaaacgttgtagtgagactgtttgctcttgtgttcactggtgccactttctaacgtggttaagaactcacatgttaggttccagctagcatggctatatttgctaattacagtgaatttggaggttttagagtccaccttagacctgggaggagagcctgtgagtaaagtgtgttctgtcctgaagtggggcccagtgtgccacggagattagagctgagtgtcgtgcgtgcatgcttctctccgaagcagtggctgtggggctgtttgccatctgagcactcacaggccggttctcctttagcatatgagccttttgacatgatggaataaaactatcccacacaaaccctcagtttcactcactgagtttatcagtttccaagtgtactgttccaggttaacaattaattccaagtaacagttttccatgttcaccagtttccaagtccaggctccaggaatgccattcctcacatttgaccagcaggtggcagtataccattaatggattcttcgatttctgcagtccccttccaggttgtccttcatagtgtttgggggaaaaaaaatccagccaaactgtagtctaaagagaggctttgttgtgattgtttgtatgaaagaattgcaccttccagctgcttaactgctc

SEQ ID NO: 18592 - DNA, 1243 bp, Mus musculus
ccaccttcccagcccatggagtgtgcctgtgctaggcactcttctctctccagcaggtcgccatgggccactcccactggcacatatggaattagcataaacgctttctgcttctagctcaggtttttgaccccactgctaatacagatgttctcataatttctcctcttcatccccctttttaaataaaaaaagagtagagaagagaaaattacatgagtaattataatattaaattactagagtaagccatttgaattctttaaaaattctcttttcaactttaattttccatcgctgtcttgttactagtgagcctcttacatggacgtgaccgggtttggatacagtttatttatcaggtgacattgctgctccatttcctcagaaacattgtgaggctttgatgtgatgtgacgtttccacgataagcgttgcagatgggcagtgtggcctgcggtggcttcgctccctgggcctaaaccgtcacagaaccaggctgtgttagttgtccctaagtgtcgactctcactgaattctagggcggttcgacaagacggtgattgaggagcgacggcagtgtgctgaggacctgctgcagttctctgccaacatccccgccctgtacaacagcaggcagctccaggacttcttcaaggtttgtagtcttcctgaaagcacgcttgttccatgcagttcccgctgggggtaacgtgcaggtagctctcttgcttctgagctttgctatttcccaggcggcagaagtttctgctcagcatccattgcctgtggcacagctgcatttctggtgtagaaatgacaggttttcaatttacagactttagaaccttgatgagaaggctcggagagttgtgttggaatacattggggagatgaggttccatgggccccaggagttccttctagaggcatccttgaatggcatttctgaacactgcgatccacactctttctttgtacaaggttctagtggaagtggtcattgcagttttgcaaagggtctgtgcagattgtatttctaggtcattggctgtgtgtggtttatgtttcttgacatgtggcactgtggctctgaccctttcatttgtttggatctgaaatgagcctcagatgtcagcggcaggccccccttttgatcctgctgcctttgccccccaggtgctggtgaacaggcatctccatcattgttaacatgaacttccttacttgtttgactgtcact

SEQ ID NO: 18593 - DNA, 1194 bp, Mus musculus
tctggcctcaggtctcatgtttgatgtggtatataattcatgccagctcatatgcctgctcatgacataagtgagtaaacttgaagaaggattggaggataaactgtccaagttgttttgtgcctgtaagtgtgatatttgagacagtgttagtcatgtaattaatttccgggccaatagtaagtggtttcatgaaggagagaatatattttatatagcacagaccagttctgtaccaggttgaataatttttcaaagtgtataaaaagactttcagaaagcggatttaagagcctcaagtcaaatcaacagccttagggagaagtgctgcgttagctcttccgggaaatgttcgcatcagactgttggctctgcaggctgaagtacatacatgtttgctttgcatggtaatttggaatagttaaagaaaacattatttgtagcacagagacagaatggttatcctttgagatgtgcatttagttttgttttcgtttcagataattgtgtggaggagatacagtgacttcaagaaactgcacagagaattatggcaaattcacaggaatgcatttcgacactctgagctatttcccccgtttgctaaagggacagtgtttggtaagtgccgctctgaaactgtagtttaatggccctcttcagccacaccccacccccatgtcatgagaaccgcacacttgccaggcaggttctctgccagtgagctacagctcaactctgcagctgtgatgtgagtgtgattagctagtgatggtctgtgccgagaccttccccctcctgtgataatctgtctgtccaatttagcaagaacttgacactgttccccaagcttccagtatagttcataccaaatacatttcctctcctcagccatggggtagctgcaattctgtccagacagagtaagaacctaagaagagatgtattactcacacatgtaacttggttggttggttcttgccctccaagtgcttttcccgtgtcctcgcccccagtgtaaatacctctgtgattttactggtgtctgtaatgataggtgcttcacccacatcagccctgtttgctgtacgatactctaagtgcacccactgtttttcatgtctttctcccccgccactccctacccccccccacttcccagccccctcaccccaacctccactcccctcctgc

SEQ ID NO: 18594 - DNA, 1996 bp, Mus musculus
actctaaaacctttcatattagttttccggtgggcttcggggttctgtttcagtgttttgttttttaaaaaacttttaatttgtttaatgagtttgactaaatgtgtgcttctttaggagctgaagttgctttggttggtggcttgaaacttctagctagactgtcacttctaacagagcaagacttgtggactgtgaacggccttcccaatgagcacaactcctcagatcacctgcctttgctggccaagttcaggcttgagctctgactgctgctcattcacgggacttcctgtctgtattcttttcgaaggatgtaaaaattttaagtatttgtatgctgttcactttttgtgatgtggggttctgaatttctgttatatgcttgaaacagattggaagaaacaaatttacaacttttttttaaatgaaatattttcctgacaactgatgtttaaagaactttatggtaaatgacttctaagtcctgttaaagttgacagcatttttaaaatgtagttcatcttggccctgaagataggaagtcagtgctttttagttcatccggtggtcctgcccggacctgcaaagctcagcatgctgccttttctggagacccagtttcattgggagaagcctgtgcgtgttcttagaaatcactgggtcactcactcctccacagggtccaagcttctgaagaggcttgacaatgtgtatgctgtagagaacattggcccatgtcactgctgccctgagctgtgggatgtgcctacattttgtagtggaaatagttgagaagtatagatcactctcatacgatacggtggtgcacacctttaatcttattagcatttggctgatggcagcaggtagctgtgtaaagccagctttagcaacacaacaagtgtgagggcagcctgggctacatgaaaccctatcttaagacaaaaaaaaaaaaaaaaaaaaaaaaaaaaggtcaagtcctttatatatgtccactcctgcctggaaaaggttgccataaggaaagtagatgagccaggtgcatccacaaacacccttaatcccagcatctgggagacagaggcaggaggatcactgtgtcccaggctgactagaactacacacaaggccctgtgtctcaaagaccagcaaaaggtggcagactccaggttgtccctctgtctcctgtacttgtctttctgtttaacgatggtgaaaggcccttgggtcaggagtgacatttcgttgagccggttttgtataaatgtattagagaagtggtctttggaaggaagcgagagctccgcagctgtttatcatttgcctctaacatgcaggagtcatcatgggagctgtcacttagacccggtagggagcctcgctgactgttgactgtacagttgagtttggtaccgtggtacagcagggtgccatggcgcttgcactgttctctgcagcctcacagcagcctgaccagccagtagcttgccctgtacaagtgtccagtagtaaaattctaaatgtaagtagaaatttctctgctttttaaaatagtagactcagattacaggcatttttactaagtcattactgtgcagtaataaatgttctctacagtgagttttattaatagaatgttttatattagacaataaatctttgcaatttaaatttttactcatttattccagttgttttatgtgtagtagactactgcctcagaggtgtgcaggctaagaagtgcccagtgagcaccaagcaagccgaccctgctttccatgtagagtatgaatccaatgctgagatggcccatagtttgcagtaagcctctctgggtgctaaggtcctggttggagacataatcaatcattatcgaattacagtggtgattgtcttcttaatatggaggatggcttgaggggatttgtacagacatcattgtaggcaaactaacattcataaaaacctttgtaaagtttttatatcctgatga

SEQ ID NO: 18595 - DNA, 1238 bp, Mus musculus
tgagcaggttcccaggagcccctcattaactctttccagtggggagtgtggagaagggatcgacctgtaagtcaggtagccttggaacagtgtggccatccagagccctgcacttgtggggacgcgaggagagtgctgcagagctcattaccacgctcttctccaaatcaggaatcctggccactttgctctctatctgcatttgagattaggaggggcctcaaagggtatctaggaggcttctgtttaaagtggactgaggtgagcgggtaggggacagtctccccggttcctcatataccctgcttcctatgggacaggattagggaagaaaggactcatgctgccatgcaggagagggaaggatgacagaaaacacaagtaaaagaaaaactggagagcaggaaccacaggagacatggacactccaagctgactcctgctgacgcatatatttgccataacacaagctagaccagcatcagaagctagaccagcactgctggctcccagacataggtcaacaaaaggctcttctgcccatagcctccttcaggcaggctttggtccagccagctagtcttgctttttaaaagagacaactttgatcatgccccggtggcttcagacactgggttcaatgagctggtctgcatcaggaaagtctcttggatgccattgtcatgctgttatctctttacctaaggccagcaagctgtttctaaatctgctgagtgctcagggaggaaaataaccacagttggctcgaggctgtcagctgggtcccatatatggttctaggggcttacgctaccctctgctcacatctggagccacttctagctccacattcctctctgtctttgcacttgcctaaataatccctttaggaacatctgtgtcactgggttgacacaacattcagctgagtggaatggtaagagtgacttcaccagcctcaattaagatcaagtttctaaagggagacagccttcccctctcccaggggcgtgtctctgctccctcggagtgttttgatcttattattatcactacatttatgtgtgtaagaacaccatacatgtgaggggcagaggacaacctgtatgttcttaccttccatgtgggtcatgcttggtgacaagtgcctttaatgactgagctgtagtctccctccccctaatgtcaggagcaccttctacaaagaacagtcaagttttttacctctcaactctacc

SEQ ID NO: 18596 - DNA, 1911 bp, Mus musculus
tttgtttttttatgggtgtctagttcctgtaagacatataagagtgtgcaattcacacataaacacatctggtacattcccagtcagttgtcacctgactgtactgaccatgtcagggtcacggttagagtcacagtgtgaatgcagagtcccatgagaagcactgacccactcggacagggctggggttagattcccatctcttacacacctgtgtattgtgacatgttctgtcccacaaaaacaaacaaacaaacaaacaaaccaacaaaatggttttatgcacagattaagtccattatactctggttagctaggtagctgagacacacacagatcatctgagatcttctttgtgctgccttcatacaggtaaacattaatgtactacaacttgtagtagttttatgccctttgtccattttcactctcttaaaagaaactttcatcatctgtgttacgggctagctcgtgatttcttacatcacatctaattttgcctcgaagatgcccaagataaggaagtctgtgataacttcagagagcccatgtgtctccattctgtggagagtccttgaaatactagctgctgtctttccaggatcattcctctgtctgaccactgtttttaaggactaccagcccttgcacatgtcctgtgaacgctgggagcaggttctgctgcaccacaccgtgtgtgtagtcagtactctgtggacactatctcgtacacactcaggacaaggcgagtgggaccaagtgtattttcacagtgcctaccactgtgtcttgtttacagtgagaattaaatgtctttgatgttttgactcttaagcttacattcatgacatttgatcaatcataatatttacatagtgtgattttgaaaattttacaaaaaatttacataatataaaatgcacacagaaaaagtaatcatgtaatgaatatggttgaagcaaatgcaactttgatttaggcaaaatatgcattgacttatcttgatattatattctgtttcatcagattactataaattatgtggaacttgacattggaaaaatgtactgaaagaacttagtatcactcaggatcaggaattctggttttgtgtcctgggcatgttctgccttggtaactctggacacatcatttaccctctccggcaacattttcctgatccatgaaataatgcattcacactgatctaaatgatctttttaaaatattgtcattcatcacgaagtaggccaaatcatggtaccacaggaatttagaaatctaactgcaatctgggcagtggtggaacacacctacaccctgtcttgaaaaaccaaaaaggaggaaggaaggaggaaggaagtaatctagttcgagtaaacaattgtgattggttatgtagaggcagagaacttcagctctgtttttaactccttagtcagtctgtaatagttcaggtagaatctgtatcatcagcaacttcttttagtttttctgtcacaggttacaaatgaccaaaaatgcactgtctcccccagctgtttctgtttctaaattgacagtgttgtttacaagaccatatacatgttacttcctgaagctttgaacaaattacagataaaagttggaatacttaatgtctgaaaagtatattcttgttttgttttttattgtttagaaaagggataaagtctgacgtaataatgcaaaatgaatcgatgatgttctcagtattttaagtggatgtatgggtaatacatcagataagaatttgataaaattctatgtcatgggtatagaagtagtaattatcatcacctgtgtctgccttcatcagatggtttcagaagctgttgcatctgtaaatgttgtgacatagcttttgtctattgagattgttggagtaatatc

SEQ ID NO: 18597 - DNA, 1828 bp, Mus musculus
attgcctttctgctggtatggaagggtggggcttctacctctccctaggaggcctgagtgttaactgtagctgacctagaggcctcgagtgactacggtgaattagtgccatgtaataccacgcgtgtcacagaagccacgggcattgtaatgctcgctccccacaaagccaccaaccagtgtctttcctgagcttcccattaaaactgctgatctctctacagagagaagaagaaagaactggaacgggaagagttgtggaaaaaactagaggagctgcagctgaagaaggctctagagaaacagaacaatgcttacaacatgcacagtattcgcagcagtaccagtgccaaataaagatcagctccccctgctgggcggtcgttttgtacacttttttttttttttgaatatataaaaacttcagagcagacctcatcagtataatataattaggaggccagtttttcctggcaagcgtaaaagcgaaagaattatggactaaaacatagccctgtgctgtatcacggccacagtatattgtaaactctgtctaatcatggattgtgtcactgtctctgttgagtgaggtgatcgtgggagtggcaagcgtgtgttgcgacttgagcccggttgtgctgcacacacagatgaagccgtcctctgcacacttcctttatcatgtgttttcaccgtgctgcacaccttggtgctgcacaccttgagtacatctgaggaaagagcctcgtaagataagcggaggggttgcccttccctcacctctcctagagaggtgtgggcaggggacaagagcccagcctcattaaagacactgccatactctgggttttacaacatctgacatttccaggcttctgaagcacaaagtattaaagttgggggggggaagtaaaccaaaattctgatgttcccaaatccccccttcagcagcggctccccggagcgtgtgcggagcagcacaggccacgggtggacccgaggctcacctccttcattcctctcctccaaggctggaggcagggccttcccagtcctcaccctgccagtccccaggcctgcctgcctgcagggtggagctctgggtccctcccacagtgtgatgcagactgctagctgtcactgcctggctttatttaaaggaactgcagcaggtgtcctcagagctgactatgtagaagctttgtctgtttttacctggtcaggtatttttcacactgttgttaccagtaccattccagcctcttgccttgcagttgtatggaaaactgttttataatgagagatctttactgaggattgagcagcatttaataaagtctatgtttgtattttgccttatgtcatttgctcttttgtctctggaagatatttatattagagaattataacttacggatgtactctaattagaattaggttgcttgtggtccagggattaggagtctagccatctaaccgatcttttcataaaatcccaagcttcttgtccctccgtgttctaggacagtttaacattaaagctagttttaactaaaacgggaaatctcagaatccatggcagtagcagttctgggaaaggcagggagactgtaacatggtttcaactaaacaccagtttagaagggtcacaggggttttttgttgctgtgacagcagcctccatgacctctggacaaactcccttgtaatacagtggcctgtaatttttgctctcttttcaagcagtgggcatcccagggagggccattgttgcagtccaatgaggctgctccctttaggcctctgcagaatagccctgggcgaccca

SEQ ID NO: 18598 - DNA, 1194 bp, Mus musculus
tggctgtatcccaggctggtctagaacttggaattctcctgcctgggtacctccaagtgctaggattgtagacgtgtaccacacacccagttgttgaattcattctaaactttgctggtttttgtaggtgatcagaggactgctgaaattttggccaaaaacatgcagtcagaaagaggtgggttttaataataataaaaataaatgtatttacattaggactgcaatcttgacctgctctgtgaactgtacccatttcctaatgtaccgatttgccttgtctacattagcatcatttgtaaattttttaaaaggaaaaaaaattttttttaaacctaggtgatgtttttaggagaaattgaagagatcttagatgtcattgaaccaacacaattcaaaaaaattgaagagccgctttttaagcagatatccaagtgcgtctccagctctcatttccaggtaccagcttcctttctctgtgacattctgttgttgtgccatcctttttcctgcggattttgaggtttctggtgtctttttaggttgcagaaagagcactgtacttctggaataatgaatatattcttagtttgattgaagagaatattgataaaatcctgccaatcatgtttgccagcttgtataaaatttccaaagaacactggaatcagtaagtttctgttgttgttgggttccatttaacatacagtctcagtagcacaggctagccttgaactcttggctcagcctcagcgctgagatcacaggcgtgtacttcacgtgtctttactttgctagttgaagcctggacagatctgtaacctatactgaaggtgagtgtcatagttgtagatactgcttatccttataaagctgtctatggatgctcctcagcaaatggtctaaccagcttgcggtccagtgccatcggctgagccagctgtatccggcctccccaagctaggaactgaggaccaaagggagacatggcattcagacattccgacttctgtgacatttttatcttgctacccagggtctaggatgagactacaaaactcacatgaagagaaccagaatattgtatctacataggaagagggtaaacattagaatctctggcctgtgagactagactgtttccactttagttctagcatctggcattaattatgcattcagtgttgctggcct

SEQ ID NO: 18599 - DNA, 1234 bp, Mus musculus
ggccagcctgtgctcttcaggagccccaagggctatggtttcaccaggatggagaggcaggcttggttgtattgaaaggggactttaagcataggcagctgtactctgacataatacagaggcttcattttctaaattattgaggatctcattgagtacggtagtattgattctcttaggaaagtcttaactttttaagtagcttacataataaatcaaaaatgaataattagttatgaatgagtagccagttgtgactgaaaatctagataagggatgatacgcatctaaattgattgaggtgatcacaagaaaggtatgttaggatcagtaatatccgattgattgattgtagacagcaagaacagcctagtgtaaatccttgtacgaaaatattacagctgcctggatttactactcaatcgcttagaggactgtatacatgcaaatagcatctacaaaatcatgttttaaaaaaaaccacaaagtaacattcaagttggtttattcagagtttttctctttctatttatagatgccacttcaaatgaacagcaagagcttttctgccagaagctacaacagtgctgtgtactgtttgatttcatggactctgtctcagacttgaagagcaaagaaattaaaagagcgacgctgaatgaactggttgagtatgtttcaactaatcgtggtgtaattgttgaatcagcgtattctgatatagtaaaaatggtaagcctctagatttctattcctcagattaatgtaagtgcaaagatctgaggcgtatgtacagtaactaacatgcccaaaagaatgttcttaaaaacttccccctggggccaggcatggcgcacaccttgaatcccagcgcttcagagactgaggtagtcaatctctgtgaattgtaggtcagccttgcctacatagtgaattccacatcagtcatggtgactttgtgagattatgtctcaaaaaagcccatttgaaagattatctgtttcattgatatggtcattggttataggagtttgagaaattggtaggtattgtggctcttggatacctttttggatacagtagaccttaaacttagaacgcaatgtaggctcaagcatactgttcttgtataggactactgggattcagttcccaacctgcagctctctgacttttaatagctcagctccaggaggatacctctagcacctacactgaggtgcacatctacata

SEQ ID NO: 18600 - DNA, 1265 bp, Mus musculus
cagccatcatgtgagccaagatttgtgcacacaaatacatccaagagccatggaagaagaagcagtgtgacttgatgtactttcttctctgtccactgcaggcaataccggcaactctgtgctacacagggcctgataaaactcgcagactgagatacaaggttgagcaagctatgtcatgtacagggtttgcacggttcctaagggtgtaacgtaggcaaatctgtccatcgtggtgttgaccagctagcttgcctaaagtctgttgccaaggagagagctggatgccatggtgagacctgaattcttttttcttttccttttttaagatttattttatgtatgtgagtacactgtagctgtcttcagacacaccagaagaggatatcagatcccattacagatggttgtgagccactatgtggttgctgggaattgaactcaggacctctagaagagcagtcagtacccttaaccactgagtcatctctccagctaaaaataattgtttttatcttgtgcttttcaagattttgtccttgcctcactctaagaactctgactgcactgagcctgtagtttatgggtctcctgggttttatccttccttttggttttttggtttccagttgtttgctgcatgtgtgtatgggcagtgtgtggatgcttatgtgctacagagtgcgtgtggcggtcagaggataacttcagaagcccgttctctcttccactgtgtggattctagcttggtaacaagcacatactgggtgagccatcttgctggcctgaattggtccttcttggatttcaccgagctcgttggttacaccaggttagaataatatattcaatatatttgcagagtagttgtcactgcttcaaatgtcttttttctgttccttttctctctccttctggtacttccattatgaatattttagtgtaatgatagtattctatagggcattaaagctctgttcatttttttccatttttaaaaatagaatcatttattttattttatatgtgaatgtttttcctgcgtctatcttacatgctataccctgtgtgtatctggagcccaaaagaccattggattccctgaaaatggggtaatccatggtggtaaatcaccacgtgggtactggacttgaacccaggtcctctacaggagcagcaatgccagcccttcttctatctctttttttttttttttttttttttttttttggtttttttcgagacagggtttctctgtattgccc

SEQ ID NO: 18601 - DNA, 1281 bp, Mus musculus
cacagcatctccaaaagacaggtttttcaagacagggtttctctgtgtagccctggcagtcctgggactcactctgtcaaccaggctggcctcgaactcagaaatctgcctgcctctgcctcccaagtgctgggattaaaggcgtgcgccaccactgcccggcttgccctgcactttgacccagcgtgcgtgcacgtcctcgatccttggccagcccttcaccagtgtcctcccggcccctcccttgtccctctaggacaggctgctcccaccctccaagtgagctccgcctgccagcccaatggcccaggaagagcaggagtccagtggcctctcctgtcctgcctgctcaagagaagctaaaagccccttgtttatgtacctgctcttggatattgtgggcatcttgacaggatagggaggttggtaggatggacagggccagccagaggtgaggaagatgagtggaaggagcctgcttctcctgttttccagactccagagatcgaaaccgcctttcctctctggccagttgaccagctggccctgtatcctcatcccaaactctctctgagctgatacctgaagagccaggcatcagaggctgagcaggtggacattctgggctctgcctcctgcctacaccaccatagccagtgccagcacggcctccagcattcccaggcctgcgcactcctgctcctgcctgtagatttatgctgggagaagacacccttgccccctctccctcctcctctgcacgcagcgctctcctctgtccatccccacttctctgtctcgtctccgtgtctggtcaggaacctgtctgcaagtgaagcaatatcttcgtgttttgtatatacaaaaaaaaaaaaaaagaaataggttctcgggagctggtgagatggctcagtggttaagagtgccgactgctcttccaaaggtcctgagttcaaatcccagcaaccacatggtggctcacaaccatccgtaacaaaatctgatgccctcttctggagtgtctgaagacagctacagtgtacttacatataataaataaataaataaataaataaataaatcttttaaaaaaaggaaaaaagaaagaaagaaataggttctcttagatcatgtaaacctaccatagtcagcaaactacactgactgacatgaccaaataaaacctagtaagtttctttacaggaaagtgaatcaaaataacatttctaaaacttttcattactcactcaaaaagctcacggaaacaaagtccttcagcaa

SEQ ID NO: 18602 - DNA, 1199 bp, Mus musculus
tcgccgagatgtcgtcgccgtcgccgcccgcaccagttgcctgcgccgccatctcggcctcggagaaagtggacggcttcacccggaaatcggtgcgcaaggcgcagaggcagaagcgctctcagggctcgtcgcagttccgcagccagggcagccaggcggagctgcaccccctgccccagctcaaaggtaacccccggccgcccctggcccgcgctcccggggcaagccctactccccttcccacctgcgcgcttgccccgcctgcccttgccttggcgatttcagggtccccagaggtacctgcgctcccttccctcgtccagtctttcgactccctgcctcgctgagcctcaaccctggttttctccaagcttagctagttcttctctttctctgtttgtccctcagttgtcacatccagggtccaaacaaactgctgccgagttagctggcctttagacgtagctatatagaactagcttaaaaccgggaccaggtgacagatcttactgtctcgttagacgtaaatgttatacctcagaagacctcgattgtctttggagaggttatgaaggaagagtaatttctttgccgtggaacgggaacttggttagcgcggctatgcttccaaggactttgtaaggttttgtaagtaattcagattggtatccgtgcctaatgcctcgcaggagtgcttggcactccttttggctctcttttctcacccggtttggaggcttttcatgagttgtttactggcgttcttgcttattctttgagaattactggcttttaatttaataattttacgtctttgcattttatgagctagatgtcattaatggaaaagatgtttatgttcctagatatttaagaaattctttgcaacctgatagaaacctagagaatgagtcacaaggccaagaaataaaagaaaggctcatgccaaaatagataaatgatcagcagatttttcaattcttttgacaaagatccagcatccctttcaaggccaatctggttgtgatttgtctttgagtctatgaatcctgacttagtttggcaaggagtgtaaagaaaaccctagatcaaatcaacagttgaccagcaacagcttggaaccccatttaaactctacatctgcctctcggggtgcttctgaattaaggatataccactggtagaatcacacagac

SEQ ID NO: 18603 - DNA, 1118 bp, Mus musculus
tagatatcgcgcggggactgccaattacaacagctccgattctacagtggttttaacagcagggcctggggtcgaatctacaggggccgggctagagcaacatcatggtattccccttactaaaaaaaagtgtgtattgggaggagagagagggaaaaaatgaaaaaaaaaaagaattaaaaaaaaaagaaaagaaaaacagaagatggctttgatggaaaaaaaattaaaaagaaaagaaaggaaaggaaaagaagagaaaagaaaagaaatgaaaagaaacatactgtgaaaggtggtagaatcccataagtagctgaggagggtcctgctttggtaatagggagaggcccagggcgtggagcagaggctacatattccctgtggggatttgccatggacgcatctcatctgcgaaagctgctccctgcttcccggctcccctccatcctctctgggcctgctcaagggtaggtgggctcgggtggtaggagagctcttttttacccagggctctggaaggacaccaaacttctcagcttatttccttccctcctcttctccctgccttttgcagtccctgcctgcctgctcctatcctaccaggtccttctttcctcccgctccctgcccctccagtttgcctggaaatctgttttgtttgcttttgtgtttctttttctgttttgagtgtctttcttggcaggtttctgtagccagcttcctgcgactcaggggtaaattccccttacacttggggggaatgcactgctttgttttggggagtttgggagtgtttttgtttttcaggtgtttttggtttgttttaatttttttcttcaccttttccccccttttatttggagggaacgggaggaagtgggaacagggtggtggcttttgtttttgtttgtctcttgtttttgttgttgtttttttttaattcatttcgaggggatgggaattttttttaaataatgtgtcatgaataaagttgttttattaaaaaaaaaaagaatttggagcaggatagtcctgggttagatctgaatctaagaggcttctactgttaatttttttttttttcaacttgatataagcttgggtcatctgggaag

SEQ ID NO: 18604 - DNA, 1382 bp, Mus musculus
gataaagtaatttcttacttataaaagttgatattgctttaaaaagaaatctagaacctggaaaataagctttttttttttttaaacaaaaggcaccagctgtctagtatattggtaagcaaaacataaagagcactttatctcgacagttagtgcagaggttgtgtctgttgactctaaattgtatttgaaatgctgtaacttttctttcccttaaatgctacatgttggtcctcatgaaatgagcatcatatctccctttgcagactcttagaaagaaactttatgttggagaaaggcgttcccttatagttagaaaagagtttgtctcattcaaatctctgggggctagctaaactttatttcaattctcgtgatttttaaatattttattaaaaacgtttaagtcctttgagattgtaagttaagcttataaaacaaaccaaactgagaaagttaaataagtgttgggtttctgtagtcattacagtcaaaccacacacacatgcagcagctttcgctgagcgctggggagtcttcagtgatgttagctttttgagtagtgggcagtaggaaggaatttttaatgatgtagaactgccaataatgttaaatatctgctgctttgaaagccagtggtggtggtcagtaaagcagatgatttgtgtctctgtgtctggccacactgccaagtgaagctggggtaagtggctgtcagaaacttcaggctctgcttggaaaacttggtaccacaaatgggtgtcaaaggtcatgtgtaacaaagtagtaattatccctgccgtgtgaccttgagctgaccctgaataatcagccttttaccttgtctgatattgtcctttcctatgatttttttttacagtgacctgaaagcaatctacataaaaggaagtaatcttagagtcccttttgcttgcttgtagagtaaaatgtgttatttccaaaggtataatctagttcaaactgaaagaggttctaataaacgtcttacttcatcaaacctcaaatgtttaagatggcttgggttacttgctgtgctgctttaaataagaatgacccgtagtctcatatttgaatgattgaccactaggaagtggaaatgtttgaaaggataataaaaaaataagtgtggcctttgtggaagagtgtgttactgggggtgagctttcaggattcaaaagcccatgccaggcccagtctccctttctaccccccagccccctaccccttggcctgtggatgtagctctcagctactgttccagctccaggtattgtcaaagcctagctttgacatccaggtaaactgaggtggaacaagaaaatggatggaccaaaagctgttagctcctggtaattcgggcc

SEQ ID NO: 18605 - DNA, 1260 bp, Mus musculus
ggaaaattgctaggggggtatggtagaaatggaatgattttagctatttactgacaaaccaacccttagatgatgatgttagatatgccccttgatgaaaaaaatcaaggactttattacatcattttctttctgattttcatgctcttcttcattttcagtaacggtaccaagtagccagagtactcctgccaaagctcccagagccaagagcagtccatccatctcctctccttcgtcagcagcttgtactccgagctgtgcaggagacctccctcttccttcaagtacccccacattctcagtcaaaaccactcctgccacgacccgttcttcagtcagcagaagaggctccatctcttctgtgtctcccaagccactctcatctttcaagatgtcgcttagaaactgggtgacccgaacaccttcctcatcaccacctgtcactccacctgcttctgagacaaagatctcatctccaagaaaagctcttattcctgtgagccagaagtcatcacaggcagatgcttgctctgaatctagaaatagagtgaagaggcgtcttgactcaagctgtctggagagtgtgaaacaaaagtgtgtgaagagttgcaactgtgtcactgagcttgacggccaagcggagagtcttcgtttggatctgtgctgcctttccggcacccaggaagtccttagccaagactccgagggtcctaccaaatcaagcaagactgaaggtgctggcacaagcatctcagaacctccttctcctgtcagtccttatgcttctgaaggctgtggaccactgcctcttcctttgagaccttgtggagaaggatctgagatggtgggcaaagagaatagctctccagagaataagaactggttgttggccatagcagccaaacgcaaggcagaaaattcatccccaagaagtccatcatctcagacacccagttccaggagacaaagtgggaagacgtcaccaggcccggtaagcttaaatgtgggaggacacatgtcctatttgaaggggactaggtgcagttctcaagattgtctgggaatcaggttaataacttcgccctgttactccattaatccttttgtctgctcacattcttcagtcttactgcttgactcactaaagccttcctctcaccatccagagtgtcgattcaaaaatatctctcctggtagacagtatgggttttttttttttttttttttttttaggtaaactttattcttgggaaactt

SEQ ID NO: 18606 - DNA, 1457 bp, Mus musculus
tggagcaatgactgtcgacatgtgacctccagcttccttttcccgctgccctgggatgagtgtcagtgactcatcactgggtcatgtcacatctgtttccctttgtacgagctataagcttgacactggaaacaatttcatatgaaatagttaaattgattggattccagtgagttgttctccgtgtacctggcagtgtgccggaggacatagattaaaagtcacttcatacgcgtgtaagtaacattgttaggataggtgtagactggagtcaaaccacccctttcccagggtcacaataagaccatctgtgtgttagatgtttacattatgatttgtaacagtagcaagattacagctgtgaagtagccatagaaataattctatggttgggggtcactacaacacgcggaattgtattaaagggccatagcattaagaaggttgagaaccactggtctagatggtttatgaagtatttgtcttgatttttagaataatcaaagtatgggatttgcgcaagaattacactgcttatcgacaagaacccatagcatccaagtctttcctgtacccaggtaccagcactcgaaagctaggtaagcctttgtagaatttgggatgtaatgaatttcccttagaaatcaaaaagacttaaagtgttaatataaggctaatttcagcaaaaacttgagaaagagttaaggacatggatgtcaagataaaaatcttaataaagttttcatttctttatatttttgaaacagaattatggcatgaactgcttttggccccacactttaacctcactgacagtctattattaacttctctcaggatactcgagtttggttttagactctactggctctactttatttgctaactgcacagatgacaacatctatatgttcaatatgactggcttaaagacttctccgggtaagttgttattcaaattctcttttgttaatgatatgactattcaaatctctcttcaaaagacaaaatcagctgggaaatctagctcttgtacttgtctggtgatctaggttcaatccccagtacaaccataaaaatgaaaggaaagaagaatactttatggcctgcaaagatggcttagttggtaaagtgcttgccacacagacatgaggacctgagtttaatttagatcactagcacccacgtgtaatctttgctggggaagtcctgggagactcctggggcttatggccagagctagccttgtagaattggcgagcttcaggttcagtgaaagagacttatctaaggttggcaatggaaaagacacctggtatctttgacctccggcctccacatggtgtatatacggctcacaggacacacatacacgatgtaaactaaccctggtgcattattaagtgtgcactcttatgtatactttcctatacacatggtgtatatacggctcacag

SEQ ID NO: 18607 - DNA, 1828 bp, Mus musculus
actcccagcagattcgcctacagcagcaggcccagcagcctttgcagccacagccacagccgcagccgcagcctcgcagtgcctacacccggttttagctgtgctacaagcatactactgccacactgcacagccatcagactacaagaagagtcttccgcatgtgcattaagtgtcaatgttacagtgtgaaatccagtattcactgatagctgtaatgtaacattctggtgaagttgtttttgttgttgttgttgttgttttcttaaaaatttagtgtaagaaataacctggctctcagccaaaataaaagtgcttttttttttttttttttttcgagacagggtttctctgggtagccctggctgtcctggaactcactctgtagaccaggctagcctcaaactcagaaattcacctgcctctgcctcccaagtgctgggattaaaggcgtgcgcccaaatttcttaaacccagtcttctgtctcacacttagcatttttgttgtattattctttgtggttggtgagcttttcttcttccaagaatagtcacagatcattggtaaatttgactgtgtctctgtctaccagaattattgtgctgactggcccgacctggggttttgaggcaggcagggagtactgttgagtcgtgcagtgcttgtcctgggctggagaatgaggccttcacagaggccgcacctgccttctggtctgtgggagcctgtgggccacaggctcagcggcctgctgcattggcacctcttacccaccttctgtcctgaagcaatgttagtttattgttttggtctttgattgacccaaaaaacagctccagctagaaaggttggaaatgaatgtgttgttttttctggtatgtgactagtgtggacttctgatattttttttctacaaatggaatgtggttcacatatgtcttcctgtttgatgtaaagggaacagatccttccccgctctggtttctactagatgacgtattactctacacctgatgtctagacagctatctccgagacgtaacctcagctgggatgctcagggaacagactctggctagccagaaaagccctttttctacttgagtcatggtcagaaactacatgacaacacactgattctaggtttgatttaacagttgactatggctgctcagtgcttttggaccacggttaatatgatgagctgagcctgccgataccccctgtggtcattggtgttgggtgcagtgggctgctaagggcatgagccctggatttccctgtgtaaataaatctcctaatttctttgcttgtgttttaccttttttttctcttcaaagtcatactgattcataagaggacttgactttttttaaatggagtttggtttttgttttttcctgtcgcatcaccccagggactgagaagtgatcgacaacttgggttcccctgaggtcactttgctttgtgagatgttacctctgcatagcccattctgcttgtcatagtctgtgcaagtctactgtatccactgtaagtgacctccccccccagccacctcagtgcacatggtgcacagtcggcacttggtcagcgtctggggactgatgccagagtgcgagggaagacccgtgcggagcccgtgtcctttgctggatatggaaagagctgagtcaatgttccactttgggctcagcagtgagtcgcgtgtctctgtagagtcagcctcttagcaaatgactgaattaggctaggtctctccactctaactcagctttatcaggcaactggattaaaaaaaaaaaagatagtggtgaagaaaattgg

SEQ ID NO: 18608 - DNA, 3825 bp, Mus musculus
gtgtccactgtccacatgacatcactgtgtcccttgaaaggctagctcagcccagtaccatgtttacatgtgctagtgctttccctcagcagaggagagcacccactttctcttttgtatagaaagcatatcatagaaggataattgtattttacaagatgcacttttatcagatgcaaatatagcaaaggatagtaacctagcctgaagcaaagggaagcctcatccgtgagcaggctcccaggaggctttcctgtctgtgcttgcccatgatgctctagtaccacctccatcggccacctccctgaacccactcccgttctggtagctggatcccctccctctgattttgatatcatagtaccaagtgtatttgggggcggttaaagcaaattaacataaaacatttaaatgaccagtttcagggaactagagtagcttattaggaaataagaggtagaaccagatgttggcttgcaatattgacaaggcttcttgtgggccctggggtctgtatgttctgtcattatgtcaagcagctgcctctctcagggtggcaggacctggagacagcagctcaaaaacacttcccagtctcttccagtcgtcttctaagagggcaaagccaagcaagtttctgttcatcgtagaaaccttttgaaagatttgtccttttgttcatgtgatttacctcacaggagaaccagactttacaaaaatcagtgttgagacagaggatgggtttggtttaggacagtgaaactcctaagcttgaaaaacagtaagtcagcagtagttttctgtggcatgaacgaacactagattcccctattgttactaacaacacaaataacaattctgagaaataggttgtaaaacaaaaataaagactaatgttttctgttttcaaataaaccaaaaagagaaaaaggaaagatgtgaattttccccagttgtacaggaacagttgaccaacaccaaataaaagcccatagtagcttcatctttagcaaaccccaagcacgtacagaagagagagacgttacctgaaatacctcactggtaccacaccactgctggtaaactgaagaaggcatttgatttgttagcagttgttataaaaacctaagcactttactctggttagcagggacagtgaataagggaaagcagtctcaatccagaaacgaggggaagccagagagaagctacgcagtgcctctgttgaggcccaggaaaaactgttcagtttcaggatgaattgaattgagacattagttgattgtctgggggagaagttgctcattgtcaagtatagcatgtagtcctagctagcagacccatttcctcattgcaaagcaagccacaggctacagtggccagttcctataaggatgtatatatccatatatgtgcgtacacagaaatgtgactggcccacttttaccactgctgtgctccagaggaacatgacagttaagtatatgtacatgctgagttcactcttctaagatgtgttactttcaaatgcagttttgtttccacagtctctagagtgacaataactgtagacttgtgaactgacttctgatagtagagatgagctataaatagatgtgcttggtctgtctatcccacacctctccagttcaacatgtcttctgtgtacaaacaatcagacatgtttgttgagagtattggcagtgcttccttgtcatagctggagtccacctgcttatactagggaactggaagagagaataaataggtgttctttatggccatctcaggaagccacacaatgccattgtagagagctggatagaactccccatttgtatttagtgtggaaagtgggatgcaaggaagttattgattgtattaagtcggggggcagggggaggtaagcaaagccatgccagtttacaccggcgtcctttaggactgcagctctttttgccctcagctgcattgcctggcttcctaccacacacaggctgggcgacaggtgggaccaagcgacagctcacctcacttcagaaagggctgtgtgcgatgacagagaagcctgtgagcagaggaggcaggaacagcaagaacgcctgtgagcagaggaagcaggaacagcaagaacggaatgaaacttgaacagataaacaagttagacgggaatttaataggaaggttgaaattaatagctgtgggttcagatctgtcatgtgattagttcttaatttcctacagtaagaaactagggaatactgaagtcatcaattacagggtagttaatccagtattaagtcataggaagccaaaaattcagttttctgaaggaatttctgattttttaattctcattgaacttttccttctgaggatgcttactactttaaacgttggctttagttctttccctgactaatttctgtctgtgcattatgcctgtgttaatgggtagttaagtaacaagaagtcaagactacaagcaagaggagaaacaccaaagccagcgggcttaacctgaggactgcaaaagacaaaagttggtgcagctgtaattgtcccagaggtagagtcctaagtcagccattgtggccctcgggtgcagctgtcacgttgctgaggatgctctctcactcacgccttgtggattccttctcattaatttgtcttagtgatgtattttgacaatcggtaccttaaagacttgctcaactagttgttcctagttataatcacagagaatagtctttgatcataggttgtcttctgtatcttgagtatgttttaaaagaaaatgtttgtttgcattaccgaataggaagggttaactgatcttttctgtggttttttgtccttttctttgaagtcactacacaacaatgaacacaggatatcactcaaaagttgccattacaaaaagtgtattcggctctggttcaaaaggatgaatggtaatggcctttgatgggaattttgccctccaagtgctctgggccttatagctatcagcaggcaagagagaggcagatgagactgtgtagcaggtgtgctagttcccggcatgagggtagagactaatgtgtttgggaccaaaagcacctaagttgggaatttctggatcacataagagcctggggtgctctgaagcagccactggctggtgctggttgatgtcatgttgcaccagctctcagtaatctcaaagtgggctctgagactactctgcaagttcccagctgttgggggagaagggctatggtcaaatgaaagatgcactgtggagttttctgcagaaattccatctgagaatttttacatttaatatttttttttaaacaatctaaagagcaaaaaaaaatgtacgtgtattctagttgcaaagtatgcaaatgcttcagatggctttgtttttattgtgtaaaactgttgaacacaactgtggtgcacaaattctttccatgtaaggagtctatgcattttacaggaacatatcttatgattgggtaatgagacagttatacattcaactgccattatttttattaagtgctttcactttctttacagttattacaaagttatatttattttctacagatgggtttctgttttcatgatgctgtaatgtttacttcagcttgttgagctttctttgtgatctgcatgtcacaatgtgtgctctaaggtgactgtcaatgctgtgacaactgtaacttgctttgtaaagggctggtcacctgtggatctggtttatgaatgcatcgggatgattttaccagatcaccttttcagaaatttagatgttgtaaacaccaaaagaag

SEQ ID NO: 18609 - DNA, 1148 bp, Mus musculus
gctccttcctccagtcttctcatttggtatgagctcttgggaaaatttatgtaaatgtacatccatgtataatatattttgctgataacatatttaatgcaattagcaaataataaaatataagtaattgatccttacaatataattatcattgctgaaccctcggagccaacctgtgacaatatcaaccatgattgctagcattatgccctgataaactaaccatctccagataaactcatttagtctagtgtatgatttatagtaaacgcttacccttgtacagaatctccttttagtctcagcattaattggaagtttagataatttatttttaatcctattaaaccctagaattaaatgatcagctcttagagacaagctggagctaccgtcatcaccacagtcctggtctttgtgttttgatttgttttaattactagtgttgaataaaattctcagaattgatttgctcactggtccaagaaaactcctatcattggcctttgcgggttttaaaatggaaaaggactgagagcacattgagcgagggagcgctctatcctggaaagtctaaggagatcaggggcacagggccggtacgctgcgttctcagagctgagtaaatgtgtacacctatactgagatttttttttttcttaacattaaaaacattgatggtttagtcatttgtttgtagaatgtttgacccattttgaaaacttttaatgtgttaaaatgtcttgcacaatcctaccaaataagttgaatagttacagttgagtctacctcttcttttcttggctggatttaggctgctggttgggtgaggctgcggctttatttcccctctacagtactttatgtgggagacagatctagggcctggaagcagacttgaagcgttttgagatctgttgctgaccagccctcttccccgagagtctggggaaagccattgtttttaatgcccacttaatatgaaaatgtttgttttaaaaaatgtttcttgctggtgaaaaatgtatttttaaaacgaaaaaccaaatcctcttttggtctgagaagtcagctgtatgagcaggtgtgaccgtatcataacatgctgatgtcatagaaatcaataaatttttacctctcaggaattg

SEQ ID NO: 18610 - DNA, 2323 bp, Mus musculus
cacacacacacacacacagccctcctgcctgcaactccagctccgaggagtccctgatcacttgtcccagagagcatctcacaggaatcagtggataggtcagctctttgatctgtgtgatgtagttgatctcaggtaactcagatccttttctttctctttgtaaagaacttgatcttccatcctcagccatgaagaagaaggttcatttccacggggaaagcaaagagaacaccgcaaggagtgagaattctgagagctaccttgccaagtccaagtgcagggacctgaagaagaggcttcatgctgcccagctgcgggctcaagccctggctgatattgaaaaaaactaccagctaaagagcaggcagatcctgggcatgcgctaggccggcaaggcatggagctgggtcagtgttgatactgacaacccactagagattggtattcagctgctgtcgttttgtgtgtctggttctgtgggcgggaacctttgtgtgtggtgagctcgtggcattgcttgtggtctgcaaatggatgtgtgtgtctgcttcctaatgtccctgtgtgaaaagcaagctgtctttgctggttggttgggcttttgatcctgtgtgtgattactacttggaatatgagatggggcactatagatactatagatcttaggagaaaataatgttagggaaagaatatttaacctggagggctcagagaggctcacacgctgagtgataccgccttcactgtggtttccaagtgaggcctcagcgggtccatgacctcactgctaacgggatgcgtatggcagggcccacagggttgcatgtcagaggtgttgtaatgttacagggagagacccagcctctggcctgacctcctgatgagaagccactcaccagcattcccattccaggacgctcactgtgccagttaacatcagattagaagtggaggggagggcgagggctgaagcttttacctaagaataggatttgccttagggaagcgcgtgccatggccctcaacacgctgctgtcctgcatcctaggcaggcactggggacaggaggctctgggagccccgagagccccctcctgctgtgtgcagggcctgtccccgtctgtctgtatctgacctctaggtcagttgatgacattagttaagtgtttctgtacctacaagtataagccaaaaggtcggaaatgcctcagagtcacacatgtggtctccaaacatttaatttctgaagagaactgtcttcagaaagttggtctatttaaggtgactggggaaaaggcaggtctcctttgctctctgtccacagtcccttgagatggcttcagaagagaacagtgttcagtgtgcgttattgagggccctgtatgccttcacctgtgtgagggccagattgctgtttgtctacggtttcttgaagacctcagctcagcagaaaggagttcatttgccctaacaagtactgttggctgagaggggaggtcagaagcatgtaatgccattcgtttcatggctaaacacacagactccttgcattttaaaattctgtgcctttacttcctggagctataataacgtgcttgggtgtgtgacttgccgaggttggctttcccaatgctttatgtaaactctgctgttggcacttgcagctgtagaagctgtcggagggattacttacttacggttatagcatctggggtctcttgcagctgcaatgcctgggatcttttgcaactctgactttttcagtagcagcttggaatgttaaaatatggtgagcctcttctctgtgaaggaagggcctgacaatctgccagcagggagtcctgttaaagactgggaactcagtgcagtggttttcctgcctttcccttctcctttggtctatagtgatactgacagcaatacaaagtaaaatctgtgtatataaaaatcctaagtatgaggtcttaaatgttctggaattttagaaaaaacttaattggatgcaattgtttataattaacaagtcatcttatttataaattttccaatataatataaatctattttgtggaaatttatcactgtgatgtttgtattctctgtgtgtgtgcgcacatgtgtacaaattcacgtgtgtgtgtgcaggtgcaggtagcatagcacctagagggcaacctcagatgtcattgttcaggaaccgtccaccttgagttttgataaggattctccctggcacaggatacaacagttttgccaagcttgctgtctcctaagtcccagggtacttccctctgcctctgcctccctaatgctgaggtta

SEQ ID NO: 18611 - DNA, 1140 bp, Mus musculus
gaacccttgtgtgggctgtttggagggggaggggcgaccagaatacaaaagaagatggtggggaggcacgaggaaccaaacacccttgctgagttggctaaaactctatggagttcgtcctccaagcgagaacagtggatgtgtgcacatctatgtgggtaaagccccccacaccccaatggaggctataatcatcagagaggcctctgttgagtcgccaaacctgcctttcgaaggaccctctgggtaccagctattgcattgagatattcatggcccactgtgttcttttgcatgaaaaaaatttccttttggcttttctgaacagtttctgtgagtaaaccctggctgtgctggaactccctctttagaccaggctgtccttgaactcagagatacagctgcttctgccttctgagtgctgggattaaggtgttcgccaccaccgctcagcggaaaatcctattccaagattgcctctcactttgtacaccttgttctcatcccagcacccagactggaaagctaggcgggtaagagaataaatagaacctggtgacggactgggtattgggcggcaagagagctaaaggggaggattaacaggtatgtttcgaagccggtgagggaaatcctgccttaagtggcatttcttgggaaatgggaaaacagtgaaatccactttgagatgctgaatttgaataagcatgatagcagggcttagattggactctggaactccagtagtcaccccatgcgcacaaagtgggaagcacagcttcaaactttctcccagcctgcctatatagaagtctaaatttggaaggcacttaaagtatccttaagtcactgggcagctggggaccgttttgcctcctacaatggccctttattgagacagattcctttaaaacagtggttctcaaccttcctaatgctaccctttcattgctacttcacaatgattttgctactgttacgaatctgaatgtaaatatctgttttccaatggtcttaggcaacccccatctccccatgaaagggtcctttgacccccgaaggggtcgtgactcacaggttgagaactactgctttaaacactaggtaaataataaggcaggtttcccttgccaactgggt

SEQ ID NO: 18612 - DNA, 1590 bp, Mus musculus
taaacatgtttgccagtgttgctttctttcaaagactggtattagcaacattgagttaaatggttctaaatgcatgagtattttttgagaatgcaggcttgtcttggctccttaactgcaaactattaatcttaaattatgtcttaaagaaacttccatagtgacccatcagatggaatgaatacatttcttcatgggcagccaacacagtgtgtgcttagccaagagccagtgacttaaaaatgaaatcacatggctcatgcaatttggatattactttagaaagcaaaaccagtaagaggaaggcttggatctttagccaccgtgccttggcatgctggcttgcaaagtgctttctctgcaggactctgcactttgcacccaggaagtcattcacggctgctccattgccacagatttcaaatccaacgcagacatttgaagatttttaagttattttttccagaaaggttaatgctttgtgaaggaaatgtagatttttgtcttcaaaagagtgattattaatatcagttatgtatagctctatttttctaggaacaaagtattctgactacttcaataacttttatagctgactacttttgggaaagttaacttttgggatttgaaataattcattgcttaataatctgaaaatggaagtgttagagtatgacagttactttaaggaatggtcgctcccctagtgtaataagcctgttgctggcaatgggcctacataagaacagctgggttttctgataagaaatgtaatttttggaacatagtttgtaagctcacatttactacactgggccaaccttcaacctacataatacttgactaatatgtgatctgaccccttggcaggtggttactttgactttaacaaaacatttgttttttaaaaaaaacatgaaattgagagctctgtgagtggtgtgagcgggagctccagttgtctcggatggtactgtgcagaagggttcagtgtttccacaggggtacaggaggccatccaggaggtggccttcagaacctctgggcaggtttatgtcatggggaggagggctgtgtcagtctgattttcagaagtgctttaaggtggtggtggcctgggttaagtgggttctatgtataaaagtggtaccgtaggctttttttttttttttcaaaggtgtttgttacagcaaagtccatgggcgccaactcaccttgaggttttagagaattatttatttctttacaatgcactttctaacccattttttagctatattagcattatctttaagaagaaaagatgtttttatatttaaatgttgtgggatttgagtgtcttttccaaaaatagcatatttcttgaaagaaaatgaggagctaccttggcctcttggggactatcccattgtttaaatgtgcttcctctcccaagtcagggctgcaggggggttggggtgggggttggggtagggggaggcttccctggttccttctcacttgagccaggtcagtgtggagctgagtgaggaagcatacactcaaacaggatccttccaagccatgtgcagccttggaacaatggacttg

SEQ ID NO: 18613 - DNA, 1488 bp, Mus musculus
gggtggattatctacattgtagatggacaagccagaacatgaaaaacaattctggaacattttactgtattttcacacccaaaacaaaatgctgggtacctttatcctaagaggcataatttgagcagggagggtttccatcaagtttaccttggagggtctcgggaggctgtttgtatgtgtgtgtcttgtcagcatctgttattttgagttcctgaaaattttgagggaaaagaaaacctaatgtgaagtatttggtaggtaaactgtttttgagtgtttttactgttttacaagcagataccatttgaacaaaaaaatgtcattaacctgctgtcttaaggtagtcctacacaaatctggagagcggattggcaataggaaatgtttattttagtactgcatttcagttaagtggttaacagtgttaagaggtcttgggaaagtggagaaggcttttgttgtcttcgaaatcgaaactgccctagtgcttcacgacctggaaaatgggactgtaatcacactattttgatacagtgctgcatatatacatatgtgtatgtatatgctgatcttgttttgttttactaacaagctctggaatatttagcagtcattttcactggcacaagagccttttgtatattaatcaatttaaacttttaaaccaaaaatgttaaggttcagtgtcaggcaaaaaaagatgctgaggagaatgtaacatagaattgatatgtggttatataaaaagacacaaatggccatgatatgggtctgccttgaaacagcacaatggggtgtcagtgtgtctgattctctgagacgctctcgagttggtcctgtctactgccgcctgtgctctgggccacaggcatagttgatggggctcatcttgaactcgagtgcggcaaccttttccctaacttgtgtgtgttttatgactgtgtgttatttccaaagctgttcctacctcaccatgaggctttatggattgttatgtactataaatgttctatatgagacaagactactgtgtttcttctcatttattaaaagttaagtagaaaaataaactaattctaatttctattttgtttgtgcatgtggccctcccctcttatactgcagtgggtaaaagaaatggacttttctagccttcagaggacaagggtgtggaagatgaatgttcaaagtctatcataggaacagaaaggttcactcactgtggggccagtagactgaaaatgctttgttttgagcataaatttatgggatgtcattaattttaacctgctcctattggtgatttatattctgtattcctcccccccccccaagtgcctggattaaaggcgtgtgccaccacacccggctttattctgtagttttaagcaaagttatgaataataattatatctatatgacatctaaaactaatgcagaaggtggcacctcagtgcgagtctatttcagggtagcatagataat

SEQ ID NO: 18614 - DNA, 1142 bp, Mus musculus
agagtctaagatgggataacttggcctctccccctgaggagtcaagggtcttgcttcctagagctgggttcttgtctgtatgacagggtcctcctcctaggggcacagagggagctgtccagggtgctgacccattctgcttcctgctggtcacttccaaactggcagggtttttcagcctgagattcttgttggctaaagccttctggccaatttcagaataaaactacaagcattcttacttagaactgggcacttgtgccaggcagctaatgagatttatcagttcttccttgtctctgaccccacttgtctctgctcggtgataacaagcctggtcatgtcagcgaaacagcacggggccagcccagcagaggacgcctgtggtacagctggggcctgccaagttggcaatatctctttggacattgcacagctatctatctatggactcctggaggcaagagagaaagtcatgggatctggagcagatactagatattacttggggcaggtgccttatacagcagctggacgtagaagtagcatgggaggcaacagaggttgtggggcgggcaggggtgtcaacactgcctcttaccctgggtggagtacctctgcggtgagggctgatgtggtgctgtcctgtcctagatcagtagctctggcagaaatgagagaattgcccgtgtgctgcaataggggtgtgtgtgtgtgtgtgtgtgtgtgtgtgtctgtgtctgtgtctgtgtctgtgtgtctctgtgtctgtgtgtgtgtctgtgtgtatgcgagcagtgagcataaggcttgtggtctgactaccaaaataacgaaactactaataggttgatccatactttgggacaatccagtttgtaggtgaacaatgggcagtatggcaaacagataggggctgagagatgagcttcaggaaccaaaaggaaattccagctggctttaggatttttggtagcatcagtatgttgaaggtattttaagtagcgagactgggtgtagtgataggatgaaaaaatatggatatgaataaggtcaaaatatagattctaaaagcaagaatagatgtttattgtctcggccaattacacaatattaatattaaatgccaaaataccagacag

SEQ ID NO: 18615 - DNA, 1217 bp, Mus musculus
accctccactccaggacagtccctgagggaccaccctccactccaggacagtccctgagggaccaccctccactccaggacagtccctgagggactaccttccactcatcttctaatgaagacgcttcattccaggactggcagcttcatcaatcacagtaaatacacaactcaaacttctagctctggagcctcagagatttgtcgcgtcccccccagaagcttcctgacgcacaaggtacagtccagagcagtctcaggttttcctgactatacctgtgatatttgttcccatgaacctgcttgtttttttttttttttcttctctaccaaagcttaggtgtggcagatgtgtgttttgatatggaagtcctggttagggataggcttgccatccttgggatgtctttctgagaaattctgagatactttgatgtctcctttctatgtgctgccctgggggctctggactaaccttcgcatgaatggtccttagacaggggatcagcagaaccatttcacatttcaagtggcccagctagagtgggtgatgtgcagctggggctttacaaagagttctgtaacttgaactttattggagagtccacacagggctgctgctttctgagacttgtagccatggaggaacatggtggttcctctcacagctgttctgcacagaagtggagtttaaaagccagagaataagatgtccacatgcaggtggtgttgcgcaaggcctctggggagagtgacatcccaaggtcccatgacttttactcagtgggttttattgccttattctcatttaaaaaaaaaaaaaacagaacctgtttttgctacatagataattctgatttttttgtggtcttattttggatattttttaaataaaaattttgagatctaaacacatgtgtcttgatacttcatccttctagacagctgctgacaagtgtcactgtggttctgtttggctctgggttcgtgtgggaggaggggaggggggaagctctaagttctgaagctctgtgtgtggaatttggagggaatgcttaacactccagctataggaactatgaccctgtgaccgtcaagggaaagatcagctgggctttgtgctgtctcattttctaagtgatagtgtcccgaatcgtgcctaggaatgccagttcaatggaacaggtgcccttgcaaggcacaccctgccatcaggg

SEQ ID NO: 18616 - DNA, 1214 bp, Mus musculus
gccagcatttttttttttttttttttttttttgtcttaaggccacagaccaaaccttgacatgacattctgacagatatgattgtttgtcagttgtgtttgctggaggtggacattgggctaatggctgttgagtagttagttgtgtatacagtctgctaagtctcttgtggaccacataaagtcttttttcctggtttcctggagtgttatgtttggagcggagggttggacctagggtctccaacatgcaaggcacatgctcaaccaccggccacactgcagctatgctgcctgcagtggttgccactgggtaaatcctttgttctcaactcttattctttgtagcttctctcctgggggaagccgtctagtccaggttccccagccagctcctctgtcaggggctggtgccatcttaaccactaactcacaggctgttccctctctcgtcgctcttgcagagaaggtggtacaagacagagaacgagtattacctgctccagtttacgctcactgttcgctgcctgtactacaccagcttcagcctggagctgtgccggcagcctccgtctgcacaacctactccatctgcgcaaggtgcctcccattcctacccgtggctgctgacctacgtcttctattatcccgtcttccacaacgggcccatccttaacttcccggagttcttcagacaggtagagtcctttggggaccgggctggtgaaggtccctacctcttagactgtgagatgtgacccccaaatggggtggcatactgaatatggggttcacaaaagtttgggaacagtaaaaggtttttcaatgtacgatcaaaagtaactcagagtctaatgggtgatgactggtgttttctggcagtggttgcccatcttgtattattgtgaacatagaatagtaaaatggctgcagtgtggctagggccatgttataatatgacatctttcaatgccagagcacctcgctcagatttcaggctctcctgaattatgagttgcaggtttgaagaaactgaatggtttgattatgggaaacaaagactttaatatcttcctgcattatttcccagcatgtgagtcctgagttagtctttggattaacttgtgttagaatgtttgactttaaatttcttatttatgtatttgtatgtgtgtgtgcatgtgcttgtgtgtgtgtatgtgtgtgtgtacttgt

SEQ ID NO: 18617 - DNA, 3168 bp, Mus musculus
aatcacattgctagttgttcttcacaggttctttttcttactttctttataatccaagattcttctcttcatctgtcaattgcatgtggccatcggtatcattgttgccagccaatgatactaaaacaagatgaggcatgtggtaaagcaccttaaagccacaggctgtgccctctacactgacagtactgatgatggttacagccataacttagtaaagagctaacacaagaatgtactgtcttatttgactcacaaaatatgaagaggcaagtaacatcatcagtgttttattcatgaggaagttgctgcatggagaagctgagctgaccccctaaggctgccccctcttaagaaaacccagtagaactgggattgctccaaacccactcatgcgcattgtatcttaacccagtttattacgggtgagaggaacagcatcatattgggcaattcttgcccagcttatctgaatggcagagagaggcccaagagaacagagctgggaaagagagacgacagtgcagggggcttgccttctcaggacacaaaccatacttcggtatcatagtttgtatttttatttaaggacttgggatctgtttgttgtgtctacactgtacttcgattctgaagatatattaactcacggtatttccattgcctgtatacacctttctatgctgtgaaatgacaggatgtctgataacctgtacttgtgtcaggggtcagaggagagaatgttgccttcctgagcacacttacccaagtttgtttctatttctttgttaaagtttgttaatattagacaagattcccacctaccctctttcccttcactgttagtgattactatgtcctagagtctttatgagccctttggctgatgagtaaagtctctatggtagaatcaacactaccattgtgaaagtcttctgtgaaccttgtctactgagtaggtttctttttctcctaatgtatgaggaccccagctgtgtgccatgtgctgcggaagaggctacaggttggatgggcagtcttccctcatcttgtattttgatgtactgagacagcatcgggtggtgtctttcattgtaatatatgaggtgtagagagaggcatgcgcagggcattggggttgagtaggaaagttacatggtgagttctattagaagacaagaaaagaaatactgttttgactcccatcaaactcccctttattaaacacagacagtggctcccaagtagtaatgtacataagaattctgtccaggttctagccagagattctgtctcatttggtatagaggaaagtctgagggtctagatctgaatgagttccctaggaaatcctagctgggcagtactgggaaataatacttttgtttcttatctgctgttgctggcagccgattctgtgcccatagattaagtcttgatgtggtggtaggaaggtttgtagtctctggtatctatgaggaagcaagcctctatcacattttctccttctgatctctctcaggttgcttaacacaatttccaaaactataaaaccgagattttataaagtcagaggaaggcctttttaaaggtgaggatgacattttggcagctttgttgaataaatactgaggatattaatatgtcccataatgcaccaacatttgtttgccgggggaaatgaggacaattttgacaagtgtactgacactgtactcaagtgttgtgagtgattatttcaagcacagctagacatgtgtggtgatacttccaaataatttgagtttaccaagagaaaaactgtagtagtaacgtattttataatttaattttttgtgtttatacatagctatactacaataactttagcgaaaacaatatagcaattctgaggaactttcgagctgatatgaaggggacagcctttgcctgagctggcagtgctggagatgtcccagcaacttggctagacttatacctgaattctgaaataagcaagtatattggttctgtttctcagtgctggagctacgatctgttagagtctgataagtgttgtgacctagtctttttctaaaacccaagaggttcatcactactccggggcattgcttctcaaaaataatgtactttttataggaaaactcaatcagtggatctttttattcggtatccctcctcttcctccccagtccctcctctcttcctttctttgagtttttgaggcaagaagcttcctgaatagtctagtttctacggagctttcgtacttatttttctaataataggtgtagctgagtgatgatgtttaactgctctgtgagcagaattctcaaccaacctgaagaaacatgctgcctatgggtgtttcctttggtctcaactgtgtctgacctgtttgctagtgactttcacccatgaatggactttgctcgtgtgcatagtatgtccatgtacatagtatgtccatgtggtcatcagcagtgctgtgttgttatcacatatttatatgcacttggtcaaaacagaagctgatgagtgtgtgagccatcattttgtagagtgaacggctgaaccccctttgtgtcattggagtcacgttgcgcgtctgttgcctttaaactctcataccttcttttgtactctacaccgactgtcgcggtgcctttttccttttgtataattgtattacattaaaaaattgctgacctgtgtgtaaaatgttaaaactacaccagtccaaggagattttaatggcagtccagttttccagagaataaatttttgtgtgcattaaatgttacgtttcttcacatttatgtgaaaacaaaaattgtttccattttagtactcagtggagtgggtaaacatccagcatgttagatgatgattcataaaactcagccctaattcaaactgtcaaaaaagtattactatgactgttatacacaatgggccaatgtcacttacatacagaaataatcaagtgggtctgtttgttcccaggatcatgtctgaaaagagtcacatgtgctgtcaaactatctggatcatgttttcttcaccacgagtcagatctaacctcaaaaggaaaaatagactccaggcaaacatttttaatgactccttgaaaagttcatataaatcaagagtggaaaaagttgcttt

SEQ ID NO: 18618 - DNA, 1326 bp, Mus musculus
tttcatgaaagtctctttgttatgtcaggaagccataactgtgtctgatcagagctaacaccagaagagaagtttccattgcagaggagaatggatggattcccagtagatagacaaagttgagcaatgccagctgtcagattaagtccaatgctcttccacctagtgtgctgctgttttctgtgtagggaaaaatttccatattcctcaactaagactgtgagcttagtccattttccactgtagctttggtcgcctattttaaattttgacttaaagaaaaatggatttactgcctagttcaggcatcaccctccaatctgctctcaaacaacttgaggacaatgtggatagtcaaccacaagccaagactgctgacaatctaaacacagctatgaagatgtgctgcagctatgtgtcaggataaagtggctccaagcacaggcaagggtgcaggataactgaagtgtgagctatagaaaaggcatggaggtccccccccccgccccccgccgggcatcgggacggggtccggtgcggagagccattcatcttgggaaactgggtgcggccggaaagggggccgccctctcgcccgtcacgttgagtgcgcgtacgttgtgtgggacctggcgctaaaccattcttagatgacctgcttctggggtcggagtttcgaacgtagcagagcagctccctcgctgcgatctattgaaagtcagccctcgacacaagggtaaaaaaaaaagaaaagaaaagaaaagaaaataccatactgagcagtgtgactttactatgcagacaattagtatgtacccttctgcctgagggaaagaacttcagatagttcctcaaacatcttatcattggtagaaaatcctggatgtggttgatcatcattttgtatgaaggggaaagtaaacaaagtacattttgctttttcaccagaaagtattttataaatcatgatcatgtcttttaaagacatatgaagtcttacatctcacattggtttgggatgttctatggctgttcttattcatgaaccaaatggcacacgtcacctgaatgtacaattctctcagagatgttgtcactctgagaccaaacaaaatccttaccctgattataagacttttcaccacatatggtgagttaatgatacagagagagagagagagacagagacagagacagacagacagacagagacagacagagacagagaaagggagggagagggaggtgtatgttatgtgtagtgagtggtgtgtatgtggtgtgtgtgtgtgtgtgtgtttgtatgtgtgtagtgtgtggtgtgca

SEQ ID NO: 18619 - DNA, 1174 bp, Mus musculus
aagtggcacccatgcataagccatgcctgacaataatacactggatcttgagcctgtcgctgcaggggcattttctttgctctttgacctccacattctttctcttcacccttggctcccatcacttcagctacctcctggctgtttacccttttccagacttctctctcacaccccattcatcatcctgggtcagatttttctagtcctcactggggagttctttttatccctcacaaccccaggttctccagtggccctagactttgatgtgtctgtctagagatgataaagcctcagaggtctgcaaagtatgtttctctgctcccctcactgtaggtagtgaagggactagatacctgtgtatttgggcccagatgaggttctaaagcagacagaaatctgccaggaatttcacctgcccttacatttttgactagttacttttacttagctttgtgatacctcctctgctgggatgtgcatgtgaacttgtctgctacctaagacaggcttcttggcagtatctgttctccaagagtctgtcttaaggaaaaagataataagaactgatggtgggaaggaaggcgctgcttaatcagcttccttgaggaaaacagttgactcctattctaagactgagtcttggtttagaaaaaaaaaaaaaaaaacactggggaagagaagctaggaaaacaggatgaaacaggaatttctttactcatgtaatgagcaaacactatatggaagaggttggggaatgtgagattctgcctgctgggctgccatctcagtacctcctctgcctctctcttgtgatattgacatctaccatcttgtttcatttagagactgtgagggtgtgaaagggagacccaaacatggtgcaacctgaagacttccaggaaaggtattagagatctgaggtcattaggacagagagaagaagactcagagcattgattcagttcaagagggctaggtccctaaagcaaagtgctaggaggtaacctcttacccagtctggaacacagcatcttgatctttgagaagtcacccatcgacctttgaacagccacttatgccagtgggatggtgaacagtgtttcttaaaaacactgtgactggtgtttactcagagctgtatagtttacaaaacaattcaaatctttgt

SEQ ID NO: 18620 - DNA, 1148 bp, Mus musculus
taggaacagaagacaggataactctggctcgcctttttttccatctcagcaccgttaaagactttctgagcagctgctactgctcaggctgatgtcgagagtgctgttcatcaagaagtaaaaaaaaaagaaaatgttttacatccctttcaacagtatcttacccacacccttttcagtgtgcctacctggtatatcccagcagccacttatggtacccgttcactgcctctggcatgcttcactgaagatgtttggagagtatggagagaatgatgggaagagagcaaatcaaagaatgtagatgaagggagaagggccaacctgaaagatagtctagacactttgctaaggattccatgagttggacaacttgggctgaaaaagaagagtggccaaggggcacaattatagaaaaactaaggaggaaaattcagctagagagaggccatgccatgccaggagggtgagttattgtagagtcttgctctcattttagctttctacctatcattccaccagttctttgctttagtttactagtcactgatagtctactccctggtggagaggagagaaagttgattggtcactgttcttgctgttatccaacttgaagatattttggccttttgtttaaaaagaaaaaaaaagttaaagctaccacccttcccctcaaaaagccatttatctttggggaggcatgaattctctcttaaacctacctagctttactttatttcattgatctacacaaaaggcaattctctaggaaaggaataggactgcagagggtttggcaagacagagttctagaggactgtattaagatttatccctcaactgaacaacacctcttgccttctgtgtggatcaggcacttctgtgtctgatgttctacctctttctgtggtttgaatctcaaaattacttctgatccctctttctttatagagtgcagtcattgaactcatgggcacactgtgatcataccgaaagagggaactgtgtccttcactcattcatttggagaacaatcctaagtactaatcgtctgccaagttcttaaaggtcctacagaccagggtgaataagacctcaaaggtccttctttcagcaaatgcagattctccaagctgctagaccta

SEQ ID NO: 18621 - DNA, 1198 bp, Mus musculus
catttctcctctctcgcctcttcacgggaactctccggaagactagcttttctaagctaccacttcttcccaggaaactttgctatttttactgcttcttcccctactttatggaaaccaaggtattcactgacatgtgctcccttgcaagggtacagccagaaaagtgctattttaaaatacatccttaaaaaatgcatcccttataacttcaagacactgtggatttagtcaccaacttctatcttgttcacctgttcctgaatgtctgtctacagaggccaggacaactttctgtctggagtctgctcaatgttttagagcaacagctcaatctgatcccttgggcccacacagaaatctcattggttcaacctagacaggacagtggaattagactttgaactgagcctctgttttttgttttattttattgctggggtttgaacccagagcttcacacagcttctttaggcttccaagtagcttgagctaccaggcccagctgagctaaacctcctgacctgagctcttcaaaggaatactcttgctctgaggcccttggccttctctaaattacgtgacttcccccttcctctgactcctgggggagctgtggcctcagtcccctggcagattcctttcagtctgtgcctttcctagtccaaaccccttcactattttataaccctttgtgatcagaggttcagaatatctacaaagactataagcttcctctcctggggttaaggggagaacaggggtcctgattttaatgatggctaggaacaaaactttccagagatgagaggattgggtgtattctcttctgaataaacgtgatgagtgaaaatgatgtaattaaattgatgatgaaatatttgatgtggccctataatgctgactgtgctaactgaccgactggtttccatatcaggcttgggaagattgtatggcagtatgggggaagtcaaccaaggagaagactgccataggagagggacacaggtaccagccagggcacccagaacttgtaactttatgaaaagttcctttccatgttgagaggcagagaggttgaaagctttccatagtagggagaagggcaggctgaaatgttctttcaaaggggtgaggcatgttaggtattcagaaacatctttctgagaagataggcatataagcagctgcatgcaaa

SEQ ID NO: 18622 - DNA, 1256 bp, Mus musculus
ctcacctccccaaaagatacccagagccacaggtgtgggtcttatcagtacccacgggaggaatcgggtcaatgtccacccaagccaaggttaaaagcccactcatctacggatgagaaaatcatttgatcacctcagttaagcattgccttattttaacttaataggggggagagagattggagacgtactattgaaagggcaagcccttcactgcctcccacccaaataaaaaagccaattggccttgtactacaagagccggtcgaactccttctccctgtttcccacctatcatccaaaaatgcggaggaatatcaacttagtgttattttcacatttgttcagtcaaacttagccagagttccaacgccctacttaaaattcaactagaaagttacctaccaagtactaattagcattataaagtcagagtctgcagctccaggcctttcagttagttgtttactaagaaaggacagtcttaagccagatacagtttaccataagaaaagttaaagaatcccagtgaagcaagttttttctttagccctagattccaggcagaactattgagcatagataattttccccccttaggccagctttttcttttttttaaattttgttaataaaagggaggagatgtagtctcccctcccccagcctgaagcctgcttgctcggggtggagcttcctgctcattcgttctgccacgcccactgctggaacctgaggagccacacacgtgcacctttctactggacccgagattattcggcgggaatcgggtcccctcccccttccttcataactagtgtcccaacaataaaatttgagctttgatcagaatgaatttgtcttagctccgtttcttctttcgccccgtctagattcctctcttacagctcgagtagccttctcagtcgaaccgttcatgttgcgagctgctggcggccgcaacactacctatctaaaaagctagacctggttgccagcggttggccctcctgcctaaaagccattgctgcagtagccctgcttgttaaagacgctgacaagcttactctgggtcagcatgtgactgtaattgctccccatgctctggagagtattgtacagcagtcccctgaccagtggatgactaatgcccagatgacccactaccagagcctgttgttaaatgatcgagtgactttttccccacctgccatcctcaatcctgccaccctcctccccgagatggatgactccac

SEQ ID NO: 18623 - DNA, 1131 bp, Mus musculus
gtctgggtggactctggtggacctgcccaaacttcaaacccttcagtactggtcattttcctctgctggtctttataactggaaaactagccactccccctttctcagaggatccccaacacctcacagggttggtggagttccttgtgttctctcatcagcctacttgggatgattgtcaacagctgttgcagatgctcttcacaaccaaagagcaagagagaattttgttagaggctagaaaaaatatcttgggagccgacgggcagcctacacagctacaaaatgagatcgacatgggattccctttgactcgccccagttgggactacaacatggccgaatgttggaagagcttgaaaatctatcgccaggctctggtctccaaggtccctcaagacagcccactaatttgggtaaggtaagggataatgcaggggccaatcgaacctccctcagtgttccttgaaaggcttatggaagccttcaggcggttcactccctttgatcttacctcggaagcccagaaggcctcagtggccctggccttgataaggcagtcagctcccgatatcagaaagaaacttcagagattggaaggtgtattacaagagggtgacagttaagtgatctagtgaaagaggcagaagaaagagaaaacaggagggatcgtagacaagagaaaaatttgactagaatcttggccacagtggtaggagagaaagaaaaaggcaggacctagaatcctgggcaacagaagctaaaaaggctcaactgagtcagactgagattacttatttggaatacacccttcgagatgggaagcagtggctaaaggaagccagaaaaaagactaactcagatccccaccccaactacaccaaggcaagtaagagaatttttggacaccgctggcttctgcaggctctgggtttgcgaccttagctgtcccgttgtaccccctatccaaggaaggagaggtgtttgtgtggaccccagatcaccagaaagcctttgaagaaattaaaaaggccctactgatggccagccttgggcttgactgacctaaccaagcctttcactctttatgtggaagagagagcaggggtcgacagaggagtccttactcag

SEQ ID NO: 18624 - DNA, 1167 bp, Mus musculus
gttacaatgaagtgttttaattgcaaccctgatctttccgagcttgaagtggtgaagcctgaggacagtgggatagaagcttcctacagtcccgtgtgtttggaaccttcctgtaatgactgtgttagaaaccatgagaggttgtctttcatcgactcaccaattgtgggacatgataacaaggaaaatcaacgcgtacaaaacacactagatagttcaaacgaaacagaagagctagaggccagtagactgtatgaggacagtggctactcatctttcacacaaagtgaccgtgacgatggcatccttatcctggagaatttcagaaacagtccccaggcccgtctgctgccatcacagagcccggaccagcatcccaacaaaaccttgctgcctgtcctgcattttgaaagagtggtttgctcaacactaaaaaagaatggcaagcgaaaccctaaagtggatcgagaaatgctgaaggaagttattgccagcgggaactttagactgcaaaatataattggcaagaaaatgggcctggagcacctagacatcctggctgagctctcccgcaggggattcgtgcacctgttggctaacattttgactaagctcagcggcatggacttagtaaagtgagtttgagggtgttgcgcactgcatgtatagataacataggacctggttgagcagaccaatgtaaagtggtcttagtgctgacttccttttaatgtttggttgacatttgaaatggaagaaaatctatggaaatctgcatccagtcttgtcactttgaatttcatagtctgccattagaagaatgtattctatactgaattatctggctagctgcaatgaaatgggtagataaggtggtttctattagtgggtggtttctgtattcagcattgtgaggtgtgctatttcagttgatgtaatagatttttcaaaattggttacaagttagcctaatatcctgtcacactaaggtggaggtgtatacattgtactggtgtgaaattgcttatcctaatagatactcaagacaaaaatggatatacaacaagcttggtgggagtttttttaaaaacttaaaaagttttggctggctctttggtagtctggctaagcactcataactgggctctgtcattcccagatcttaat

SEQ ID NO: 18625 - DNA, 1147 bp, Mus musculus
ggtaatgggtatttaatgtctgtattggaggcatggttctccttcctggtttaataacaaattcaagatactaaaatacacatggatttctttttcttccaggtggcaaagacattgaagaacaacgaaagcctcaaagcctgtgttcgctgtaatttccctgcaaaatatgaccactatttagagcgagcagtctgcaaacgggaaagctgtcaatttgaatattgtacaaagtgtctgtgtgcttaccataacaacaaagactgtttgaatggcaagatcctaaaagccagctgtaaagtgggtcctttgcctggaactaaaaagagtaaaaagaacttacaaagattgtgatagatcaactgtagatcttggctactttaaaaagaaaaaaaaaacttcaactttaatttaagaaagtaaaaataattatgatgccttttgtgaatagagaaattaattgtccataaaaatgccaagattgacttatgaaaaacaaactggatatctatcttagatactaagataaaattgagtggacttttggcaagggagggttgtggtctttttatggagtcttgagaacatttgcttcagtattcgagattcgctttaccaagtttgtatcatacttctatcaacttgagtctgtccatttaaatgtttgtcaatgtgagttttttttatatctgtgaatacctgttttcaaatgccaaataaaataatacacataattttgtttagttaaaataaatttagaggtgtaatgatgtgtgcaggttttttttgttttttttttttgtttttttttttttgtttttttttttttttgttttttttttttttgtttttttttttttttttggttttttgagaccaggtttctctgtatagctttggctgtcctggaactcactttgtagaccagcctggccttgaactcagaaatctgcctgcctctgcctcccaagtgctgggattaaaggcatgtgccaccacacccagctatatgtgcagtttttatgaatgtgttagacctggaaataaagtgtgttacgctgtgaagggaattgggtggatcatgtcccagagggcttgtcttagcctccctgccttctcccaccaacttatagtcatacaggtaaac

SEQ ID NO: 18626 - DNA, 1630 bp, Mus musculus
ctgagcatgactttaattggatagttgagcacatgaagagcagcaatctggagtccatgtccacctgtggggcctgctgggaggcctatgctaggatggggaggtgggcttaccacgaccatgcattttggactctgcctcatccatattgtgtgatgccccaggtcgcccctgacttatacgctgaactgcaaaaggcacatcttattttattcaagggagatttgaattataggaagctgatgggtgacagaaaatggaagttcacctttccgttccatcaggctctgagtggcttccaccctgcacctctctgtagcataaggacattaaagtgcgagcttcaggttggtctgcagcctgggcaggcggagcagctcacggcctctgatccccactggctgaccactggcaggtatggaatattgcagtttgatgggccactttgacgccactcaggagttcctggttgcagagaacattctgagtctcccttcagcctcagtgcatggatttaggcctggcttctcctcagcgtgagcagcccctttcctcagctcctgtgtatcttacgtacagtagacgaggcttccttggaatggtttgccccgctgcattggtttgggtttaagctagttatacttctgtcactattctaagttaaatgcaaaactttcaagtagttttaatgaactaatttttaatttcaaagactataaaaaatgtaagtgaattttgctttaaaagttaatttaaatgttagttaatcctgtttgtgtaaagcgaatgattgtttactagctaggaaccttaagtgttattgcacttggtttggctcttgagttagtggcccagtgaacacatgccttgtacgagctctcccgggaggcgtgtgcatgatgcttgaacacacagaattacctcagacctgaactacagcctgctctcttgcatgcttaagttttcaaagcccattttcttgcatagatttgtattttgattggcctgtggaatgggtcaaagcacaaactggacatcgtaaagagtgactgacgaagtacgagtacagtggtgtttcattgtccctatggctgccatgctgaagtccccgccacagtgatgtccagatgagcccagcgtcagtctgcagcagcagactgttgagtggaggtgactgttaagtgttgttttagacactgccaggctgagctcagtctccatctcacactgtgtgtccctcacctcagatgttgtgacagtccataaattcagggtactttgtttcaaaacaaattggaaataaaattggaaatgctttcttatactggaataataaaatggattttacagagagctctcactggtttttatttgcttttgggataagtgaagatgagcagcttaaccctgagatctgcacaacacactaccttagctgttacctgcagtcactgtgcggcgctgtgacagtgatgctgcaccctgctcttctcaggttgggttcttcagggtacgtgaagccctccgcgatgtgctgcttcctcgttcacatgtctgttttaagcatcaactcagcaagctgtaacttcatgcagacctggcattcagaacataaatgtgtggattggct

SEQ ID NO: 18627 - DNA, 2914 bp, Mus musculus
tcaaacaaccgaagctgtgaaaaaggtcgaagaaactgtggcaacttcagagatggatgaaagtttggagtgtgcaggtgcgcaatcattaccagctgagaagctctccgaaaccggtggctacgggactcttcagcatggagaggacaccgtgccccaggggcctgagtctcaggcagagtccatcccaataatagtaactcctgctcctgaaagcatcctacattctgaccttcaaagagaagtgagcgcatcccagaaacagagatcagatgaagataacaagccagatgctggtcctgatgctgccggcaaggagagtgcagcaagagagaaaatcctcagggctgaacctgagatcttggaacttgagagtaagagcaataagattgtccagagtgtcatccagacagccgtcgaccagtttgcacgtacagaaacagcccccgaaacccacgcttctgatttacagaatcaggttcctgtgatgcaggctgacagccagggagcacaacagatgctggacaaagatgaaagcgaccttcaagtctccccccaagatggaacactcagtgccgtagcccaggaaggacttgcggtttctgatagttctgaaggcatgagcaaggcttcagaaatgatcaccacgcttgcagttgaaagtgccagtgtcaaagaaagtgttgagaagctgcctcttcagtgcaaagatgaaaaggaacatgctgctgacggcccccagcaccaaagcttagccaaggcagaggcggatgcctctggaaatctaaccaaagagtccccagacaccaacggaccaaagctaaccgaggaaggagatgccctgaaagaagaaatgaacaaggcccagacagaagaggacgacctacaggagccaaagggagacctgacagaatcctaagacgtgaggtaggtaaacttccttctggatggctagtcctcctccacccgtttccctgccccatctatgcaattacacagacagataactgattttatacagaaccaaccttcagttggaaataattatcaactacagttggatctagggtggatatttgaattttttgtttggtttggtttttttgtttgtttttttttttttttacctcatcagaatcccaagtcttgctgatataatgaaaataatggcttaattttgctgctgctgttgttgttttgagcccaggtctcactatgtagtcctggctgtcctggaactcaccatgcagaccaggctagcctcgcctctctccttcccccactgagattaaaggtgtgcaccatcacacccagctcagccaaaacttttaacactttaatttagggcctggagctccccatacccagagctccccattcctgtggctcttgggcagttatcctgttgtccatacaatgaggaaagaaaggggaattttatctcttctctctcttctttctccagttgctcattgtaaaactagaatgtgaagtgaagtcacggaacaagatgctgctgttgggaccttgagaccaaaatttcagagcccttgaggtgcagagagcagagccgtccaatgatttcaaccctgcagagcaccccgacaatcctgaggctgcatcgggagctagagccagctaacatttcctcttttcaagactgcccttgatttgccccttggtgccatgtatttcagagttaaggtcctgctttctccacctggaaccaatgtcggcaatacctagtcccacttctcaaactggagcctcctcctttatgtatttatatgtatgttttatgtagtcctcctcctgtacctattgtatattttttttctaaggtttaagcacatgccttttgtattatgcagtatataatgggtgtgcagccatagcgaagctttgagaagccccaagcctcaactgtaacctgcagcaaacagagaaataacattcctggcaggaagatacaagtctttttaaagtttactgatgcttaactctgtgggctcgtagtcctctgaaagtggttgttttcctatgcacagtgagctcagaaataaaaactccattttgagacattcagaatgtcccaacattacgacaacattttttttttttttttctaatccagtccaggttggaaagaagtctccttagtgtcagattaagccccatctcttaacaatatggacagatgagtgtgccatggccatgagctatttcctaacgcagaaggaatttgttgttactttttggattgtactcttctaggctggaccgaattcatatgcagattgaagtgagacctgctctttacagatggtattttgatagatactggagtttgtctgtattatatctgtgccccttcttttaagaacaatgttacattatgttcctttggataaattgtgatttgacaactgatttcaataaaaatatttgcttcacttatattcactgtttttttattaaatactgaggggcctggatcacatacttactataagatactggcaaggagaagacaatgagagaaactttcttactagtcaccccatgaagacattactttgtactggtttgttacagaattagaagaagtcatgacggggtgggttttgttgaaggaaaccagtataaccaggaggtggggtacaaacctgtaatcccagcccttggaaggcagaggcaagagaattgctggaagtttcagactagctaaaaatgactgaggctttattttaaaagcataaagacaaaacaaaaaacaacctgctgaacatggtgaagaagagacaggtggatctctgagtctgaggccagcttggtctacaaagagtttcaggacagctagaggcgttacatagagaaaacctttcttgaaaaaccttaaaacaaaaacaaatat

SEQ ID NO: 18628 - DNA, 1757 bp, Mus musculus
ggcatccttcaaaaagatggtgacacccaagaaacgggtccgaagaccttctgagagcgacaaggaagaagagctggataaggtcaagagtgccaccttgtcctccacggagagcacggcgtctggaatgcaggatgaggtcagagcggttggcgaggagcaaaggtcagaggagccaaagcgcagggtggatacttcagtgtcttgggaggcgttgatttgtgtcggatcgtccaagaagagagcgaggaaggcatcctcttcagatgatgaaggagggccaagaacactgggaggggatggccacagagcggaggaggctagcaaagacaaagaagcagatgctcttcctgccagcacccaggaacaagaccaagcgcacggaagttcctcacccgagccagctggaagcccttctgaaggggagggcgtctccacctgggagtcatttaagagattagtcactccacgaaaaaaatccaagtcaaaactggaagagagagccgaagactccggtgcagagcagttggcctccgagatcgaaccaagtagagaggaatcttgggtttccattaagaaatttattcctggacggcggaagaaaagggcagatgggaagcaagaacaggccgccgttgaagactcggggccaggagagatcaatgaggacgaccccgacgtcccagctgttgtgcctctgtctgagtacgatgcggtagagagagagaagctggaagcgcagcgagctcaggagaacgtggagctgccccagctgaagggggctgtgtatgtgtctgaggagcttagtaagactctggttcacaccgtgagtgtcgcggtcattgatgggaccagggcagtcaccagtgccgaagagcggtccccttcgtggatatctgcttccatgacagaacctcttgagcacgcagagggagtggccacaccgcctgttggagaggtcactgaaaaagacatcactgcagaagcaactcctgcactcgcccagactttaccagggggcaaagatgcccatgacgacatagtcaccagtgaagtggattttacctcagaagcagtgacagccgcagaaaccacagaggcgctccgcgctgaagaacttaccgaagcatcaggggcagaagagaccacagacatggtgtctgcagtttcccagctgtccgactccccggacaccacagaggaagccaccccagttcaggaggtagagggtggcatgctagatacggaagaacaggagcgccagacgcaggccgtcctccaagccgttgcagacaaagtgaaagaggactcccaggtgcctgcaacccagactctgcagagagcagggccgaaagcactggagaaggtggaggaggtagaggaggactccgaggtgctggctaccgagaaagagaaggatgttgtgccggaaggacccgtgcaggaagctgaaactgagcatcttgcacagggctccgagactgtacaggctaccccagagagccttgaagttcctgaagtcacagaggatgtagaccgtgccaccacatgccaggttatcaagcaccagcagctgatggaacaggctgtggcccctgagtcatctgaaaccttgacagacagtgagacaaatggaagtactcccctcgcagattcagacactccaaacgggacacagcaagacgagaccgttgacagccaggacagtaatgccattgccgccgtcaagcagtcacaggtcactgaagaggaggcag

SEQ ID NO: 18629 - DNA, 1531 bp, Mus musculus
tggagcactacatctgagtctcgctgtgtgtctgtttgggggtccacttatatgtgtgcttatacacacatgtggacggggagtagaagactaacgttgggtctcattcttcaggtgatataccagggttttgttttttggttttttgttttttgttttttttttaagatttatttatttatttattttatgtaagtatactgttgctgtcttcagatattctagaagagggcatcagatcccattacagatggttgtgagccaccatgtggttgctgggatttgaactcaggaccttctgaagagcagtaggtgttccttaccactgagccatctctccagccctgatataccagtttttgatattggactgaagcacactaaatagacaaggctgactggccaggaagctctgcctaattctctgccctaattctcatttcttacacagaaaacagctcacacaagaatcccagcctttaaaaccacaacacaagtaagagtttaacaccagaggaaaagacgacttggctctgagaccccaccccctctttttcagagtcttcaaacaaaaaacgtctccttgcctttttgctgcagttggagaagaaaatgaattttgaaatcttgtgatgcaatgctggagcaatcctgagacaggccaaagaccgcttcctcatacaagattaactctgtttccagccaagtggtgttcaacagaaggacctgcgccacatctggaaggagtgaagttactcttggttccgatagtgtttacaccatttctgctgcttatactttagaaagtttattttatggggactagggctttgcaagagtgtgaactaaaagctaatgcttccgtctttggagttttctctttcatcttttttattcttcctttcctcacctgtgttgaggatgggatgtcaggcctctgcttgcaccgtccagcgctgtgctgccaaactgtatttgtttttgtctttgaactgaaaataaacatgtgttctagaaaaccgtgttcagctagtaaagccactcactgatgtcactgtccttgtgaagccttgggttgtcacctggcacatttgtggcagagattgcaagtgcattcggagctttataaatgacaagaagacaatcatattgagagaaatgtctaggcagcccagactgtggaagcctggctggtctcctggagcaaagtgcactacctatccacaatgacttccgggtctctgtgaagtctctttccctaaccctaacctcttccaccatgaatgaatatcaatggccattcaactttctggtcccacgggggtagaagagtgcctcttaaaggtcaggtgtttggcaaatgtttttcctttggcccaaatgaacacaaactagagaacgttctatgacccgttccctactttttgacccttccttgtccctccattccctgccttgcaaaaatataaaattatgtagaacttaaaacaaaaccaaggattcagaaacaaacaataagtgattgtcctcg

SEQ ID NO: 18630 - DNA, 1180 bp, Mus musculus
cagaaatgtgctggcaaaggaaaggccttaaatttgtaattttacatgtatttatttattgagtgtgtgtgtgcatggtatgggagtggaggggcacctggttgctgaggcatatagtgagattgaggctggcttgggatacctgagatttcatctcaaaggaaaaaaaaacaataaaaaaaaataagtggtacaatgcctgctgggtaattcaaggccctgaattcaatctttagcactgtaggatggatggatggatggatggatggacggacggacagaggacagacagatgggtgggtgggtggatggatagatagactagtagatggatagatggcatagaagcttgcattgcagatagtgacatataaatgtgtattttcatttatttattgattcatggtctgcaagccatccagtggcagggcattgctgtgtggttaattctttaccccacactggaaccggatggcaacctgccatctaggattcaccattcactccttcctgcttgccagagctgtggagataccagccaatgtactccgtcgtaccccatgttttgctgtctttttgtgtgcctgaggactgcgggggcattataaacgtgggaagacttgagagtcacatgtgcctagtaagcttgttctagagcatgacaccatgaaagggacgcgcaacattaaccagacaactcagccctgactggggccgttggccacagaggaaacttctgcataacctaaatgacagctacagtacagatccgatggcagcccccgtgtttggttaagaaagcttattgtggtccttctatgcacagtaacgggcacgcttgcaggaccacactggagtagaaagctccattgtggtttgaggaggaggatgccttttgtctggtgacccagctaagggaacctgagccaagatcatatcggtgatggaggtagaaacacctcaggatcttccagtgttgtttttcacttttttttttgttcttggaactggttcctaatgctagcagatctttggaatcctgaggcatttcctcagggctctgagttgcagctttgggtcagcgccctcttgaactgccggtttcattacaacaaccatatgcttccctactcactccctgacctcccccccttcctcctctctcccacaccctaaccct

SEQ ID NO: 18631 - DNA, 1196 bp, Mus musculus
gttctctagtgttactgtggaaattaaacacacagagtcaatgagcacctgtctggttttgggggagggggtattttggtttttcctgttctacccagtgattctgtctgatagactgaatgaatgatcaaaaggaggtgttatgtaacttcttgattaaaaacccataataaggttgggtgtggtggtgcacatacctttaatcccaaacgctccagaggcagaggcagacagctctctgtaaatttgaggccagcctggtactacagagcaaatccagaagagccaaggtttacacagagaaaccctgtctcaaaaacaaatcaaagaaaacaacacttgagtcatgttaaaggggattctttctacatgctttttcatcgtgtctgatttatttaaacacgtgaccacttttgatgttctcaatatattcagtgttagggagtgaagttctatataaaccgttagtctttctctcaaaacatcactaagtgaatacagatgcagaatccacaaacgttctcatcaccaggacggacacccgtgcagagattgacttggtgtgtgagctcgctaaacgggccggtgcctttgatgcggtcccctgctatcactggtcggctggagggaaaggatctgtggacttggcccgggctgtgagagaagctgcgaataaaagaagccgcttccagttcctgtatgatgttcaggtaagtcgcatctaccagtggagtggcagctctcgtatcttgtagaaggccagcgcttaaagcactgtttatatgacccatcttatgtggtcttcttggagattcaacagtgaaggaagctcatgactaaaggcgttagccatctgatgtgcccttctgctttcaaacattgggcccaagggaggggatggctctgggtgggaagctatgctcacagggattgaccttccaacaacaaggcttttgaacagtatcaaagctactcaattacaaggcatgcttcttgtatctcctatggttcttttgtgtggtgtgtgtgtgtgtgtgtgtgtgtgtgtgtgtgtgtgtgtgtgtgatatgtgtggccacacacaagtcacagcatgcatgcaaaaatcagaggtcagtttgtgcaagtcagttctggcctcccaccacgtaggttccagggatggaaccacgagcaggcgagactcagcagcaggc

SEQ ID NO: 18632 - DNA, 1201 bp, Mus musculus
tgctgaggttacaggtgcacacagccatactaagatttttttcatcaatgtggagatttgcactcagttcctcatgcttgagcaacaagggttcgctctcacccactgaacccccacagtaccatttctgtcaactggaaagaagtctaaaaaaatgaatatgattctggaatccagctgccacctttctcacatgccctgatcagtatccttaagccatgcctccaacttgaaatctgctcaccaacagaatggatcaggggcccaaaaataagaaaggataacgtatgcttgaccctttgataaagtttggagcacatcttccattatgagggaggtgccaggtcacctctatgtaggcatgggatacagcaccttgtagtggccttgtgtggcaggggtaggggccgttgtgagagcttgtacttttattaaacattggttgctgtgttctgatgataagagctcattccctacctgtttctgtacagtgactgaagctggctttggggctgatattgggatggagaaattcttcaatatcaaatgccgagcttctggcctggtgcccaacgttgtcgtgctggtagccaccgttcgagctctgaagatgcatggaggcgggccgagtgtaagttcttgttttcttcctagcttaaaaaaaaagccgaggagtggagagatgactctgtggtaaaaagcacctgccagtcttagaggtcctgggttcagttccaggggaccttacaccctgttctggattccacaggcacctgcaaaatcacagtgctcataaacatacgggtttcgtgcacacataacacataagtagttaaaacatttaaagccatatatgagctgtagaattggctccatggttaagagcactcactgactgctcttccagaggccctgggttctataataaccaaatagtgtctcacagctctctgcagcttcagttccaaggggtctgacaacctccatacaaacaaacatgcaggcaaaacaccagtgcaagcgagcgagtgagtgagtgagtgagtgagtgagtgagtgagtgagtgagtgagtggatgaaaagttatatgcatgtatgtataatttgaaatgttctcttcctcttctgccatgcccacatttaaatttaaacagctttgatcctctaaaaggtttaaagtctgtttggtctgattggatc

SEQ ID NO: 18633 - DNA, 1324 bp, Mus musculus
tgtggtccccacctttgtggccagacattctagtgataaaaatgctcagaagacagaaaatgacagtaacactcttggggatgggagggaaccaaacctggggcttcatatatatcagagctgtgcccctgttcttcattagtacttaattgttagactgaagcagactacagtggtgtgttacattgtgccaccagtttcacaggccttaccctggcaactccttgacagaggacagtagacaatgtgggcaatctagagaggccatatgctgtgtctctaggaaagccactgttcgtgtgagctggcccacaggggatagcccccaactatgactgctggaagtgtccatccagtaacgtgcctcagctgaccacaggatctgttttgctgtctgcaggcacagtttgacattgcagtggccagcgagatcatggccgtgctggccttgactgatagcctcacagacatgaaagagcggctaggaagaatggtggtggccagtgacaaagacgggcagcctgtgacagctgaggacttggtgagtgctgctgagaggctctgtctcaaaataaaaaggaatgtattttataagcatagcattctcacctggtttgccttgaccagcctggggtgggacagacatgggcaaagataacaattccaggggcgtggtcagtttggtgatgctaatctaggaaacagtaaaggggacaaatcagccatggtcccagttctcctgatttacgtgtctttttctcacctgtagggggtgaccggcgctctgacagttttgatgaaagacgccatcaagccaaatctgatgcagacccttgaagtaagtagttttccttttatttttttatttattatttttattgatttttttatgtgtatctagggtggggtgccacatgtatgtatatgcacatatgtggaagtcagaggtcaatctctgatattatccctcagcttggtgtttgagtcaggtgctgttcactggcctagagctcactaataaggttagatgactagccagctagcactcacttgggtccacctgtctctgcctctccagcactgggtccctctcctcccctcccctcccccccccctctctctctctctctcctctctctctctctctctctaacttctggaattcaaactcagatccttcaggtcagggaccttactgactgaggtatctgcccagccctgttttttggtttttggttttttttttatgattgtttatagcatagcatttgcctttgtcggacttactgtagattacaaggcagtatgaatactcctggccaat

SEQ ID NO: 18634 - DNA, 1144 bp, Mus musculus
tctattttgttcaagtctacctcttattctgctctaactcctctcagacgctccacccttcaatcttccttctaattgcatgttctttaagaaaagaagacctactgagtacaattagtgttcactcaaatgcatgtgtgctgtccactgtagcatggccagcctaccaggggccccactcctgaagaatacggacttgctctatcctggtagctatcaaccgcctgtggcttcttaactagaagtggggccttgcaagaccccgtccgtgctggactgttgagtggattggtcctgtgctagcaaccacagctcctgggtgaagccgtctgtcacctccagaaggcactgttttacagcaatcttccctgacctctaatttttatcatattcccactctctcttctgaggtgttctccaagaaaagccacttagaagatgttctttcagctaaagggacctgggaggaagttttcggtggtgtgagttttaatatcagcttttctttggtcggtagggatcactttggatggaaagaaggtcttggtcgtaggggcgcacgggcccctggaagctgccctgcagtggcttttccagagaaaaggatctatgacaatgagctgcccctgggcaacacctcagcttccagacaaggtaggtctctcgtgggcctctacgaccttggcattctacactagagaagagggaaggctggggtgtgtaaagtgagcactagacaggaagctagaggtagaggtagatcttgaaggaggaagacagtaaaaagcaaagtctgttatcgtggctcgtttctgcagtcgaggcaggggcataacaaaattgcagagagagtcaatgctcggacccttgcttgccagctttctcttcttacactcttctggactcccttccactctgcctagggaatggagccacctatgatgggctgggtcttcatacactaagactacattaaaaagcagcaaaagggtggttacaaattaggggtggttacggcaaacatttagttagtggttgctgtctggtaaaaggcttagaaatcaataagacagtgacaatctatagaaaaacagcagatggccatttataggcatatggtaatagctgcctagctccttatgct

SEQ ID NO: 18635 - DNA, 1177 bp, Mus musculus
tgtagaacctacagagatagggatagtattgtcatttctgaacattttcctaaccctgtacacaagacataaagcatagcacgtacctctaagcctttactgaatgcattataataaagttattggatggcatcttaaagtttcaagcttctttttcctgcttcctcctgtgtcaagagcccagctgtggatgcaaaggtgacagatgatgatgggtggacacatccatctctccacacaccctcctgctcatacaccccttcttatctagcaaaacctttcgatcttcccccaatctactacccttcttccaaatcgatcaataagcccttctagtgttagggttagacatccatccctacccaacgttcctaagattgtttcaggggaaagtaagaagtatcatggctggctctggactttcagacccttacagtccacgcaatcgcctcttcctcacctttgcccagggcctgatctccatggggtagacactgtattcgccactacccaaagtcttgcatccccaacactccttgctaagcctctatttgccggagatgttagatgctcctccaggtaagaagactcctgagttgttctttcctgccagtgtaggctgctggtctactgaggttaaggtgtgctggccctgggatcccaccttctcatgaacaggcacttgctgtgctcattgaatctgaaacacaggataagcattggctcctgctttctgtcaatagagtgtaattaagatggacctcaactcttcatagatgggccagaactcccttggccaactattcatgggtcactccttcctggtgattcctcagagatgtccctaagtcaccacaatcttaacaggtccaatgtttgtgtgttatctttatcctcaggctaatgctgccttctggtccatccccttagggacagaatgctaaggtgaccaagtagggattcagtcagaggcctgggattctaagccagtcttagcaggcatagccattccccggcatgctatacagaggacagtgactacaaaacagaagccctactcagagcttggcccctgatagggacagactacaagccggagctatgcaaaaccctactatctgcatgtgacaggtcaaaataggcattgttcctctcaccacaaatcttcagagatgtt

SEQ ID NO: 18636 - DNA, 1186 bp, Mus musculus
ccttacagcctgatttcatcaagcattcagcctccagcaagcatgggtggcagaaattcatcaatatgaagaagcatattcagtatatattgtggctttggtctgatttgggaataatgtgtgctatgaggactggacagtcaatgatgggcaaccagatttcggagccatatcaagctaagacagaggtatatgccaagaggctgcggtttgttaataatacaccacagagccatgtttgtgcaaaataaacacaaacaagctgcatatattctccttgatggataagaatggctcgggaaaatctgagatttcctaaaacgggcagccacctgccaccataactcccaggcagaattatagagcataaataaattttatgtctcagtccagctatttttattatataatcagagaggaaattgtagcctcccctagcctgaagcgggctgatgcaactgagaatgagaccacctggggtgccactgagaatgagaccacctggggtggagatggtctcctattgttctgtcacctagatggcgtagcttacaggctggctccagacaccaagaatggactggcgaggggggggggggcttccctctttataagcacagtctcttagtaaactcatgggccttgatcagaacgttgtcttggcttcattatcttttttccgccatctaagtctctttcagccccagcctgcctcccaggtgtacccggttcatgtaggccgcgggccaacatacaacatgtgtgtggtgtggtggtggtggggtgtgtgtggtgtgtgtgtgtgtgtgtgtgtgtgtgtgtgtgtgtgtgtatgtatgtatgttcgtgtgattgttctctatcttactttttgagacagggtctctcagtgaacctgcagctcacctagctacactggctgcctagtgagctgtgggatcctcctctatctacctcaaagtgctggtatcacagacatatgccaccacatctctctctctctgtctgtctgtatgtctctctctgtcatctgtctctctctgtcatctctgtctctctctttctgttttgtttgtcctcatagccctgggaaaacactgtgcagcccaggctagcattgactttgtggcaatcatcatgtttcagcatcctgagtgttgcagttacatagccacctcacccagct

SEQ ID NO: 18637 - DNA, 1238 bp, Mus musculus
tacaatcttctgatgctttccttctcgtggagctccatacaagacagcaattccctcagtgtttccccaccgttccaatcaatgtccctgatttgaactccaatctgttacatgccggcctacatgaaccaggtacacctgggaggcaggctggggctgaaagaggattagactgcgagaaaagataatgaagccaagacaaggttctgatcaaggcccatgagtttactaagagactgtgcttataaagggggaaggcccatccccccccccccccccccccccccgggccagtccattcttggtgtctggagccagcctgtaggtgatgtgcaggataggatgtatcctggagaagagcagcgacaggtgacagaacaatagagccatctaggtcagaaggctccaccccaggtggtctcattctctgtggcagcaatgttttcatcagcccgcttcaggctgggggaggctccacacacatacacacacacacaccaccaccaccacacacaccacatcacacacccatacaccccataccatatacacacacaccgcacacacaccacaccacaccacaccacacacaccatacctcgcgcacacacacacatacaccacacacacacacacacacacacacatacaccacacacacatacaccacaccacacacacacacaccataccacacaccacaccataccatacaccacaccacaccacacaaatgggtgtgggcattcacacatacaactgcacagacacacaactccatttaaaaggaaaagaatatgtttcagtattctgataagatatagatgaggggagggatggagagagaggaagtggggaggaagaaggagagggaaagagacttaaataggcattagcaacctcatacctgatttggaaaatagaaattttcatgaatttcatatctgttttgtcatgcgtggtgggcctgagccacaggattagaactgagatttaggagtccacccaaaatttgccccccccccacctttagcctaaacactggttttcatctttgatcaacccagactctgaggctaacagaccgtccatggacaggcagaactggggctgttagattccaagctgaagaggttaggggtgtctgagctcctatcaggagaacaaagtttctttctttgtcttggtcctgacacttgtaggccacttaatcctttgaaaatgcctctcatgaggat

SEQ ID NO: 18638 - DNA, 2233 bp, Mus musculus
ccagtagcaatcactgttgccaatcacttactgtcacttttttttttttccaaaccttgcacaggtgcggtgctacctctggcattaggtctggccatcactgttttgttgcttctcatggtgacatgccgactccgactggtgaagcagaaactcaagaaagcccggcccattacatctgaggaatcggactacctcatcaatgggatgtatctgtaacaacgctatttaagcagctcggggcaaggatggctatcactcacaatctgttctttgggttctatcattaagatgttttgttttaaactgtgctagaagacagtgcaaacacaagccttgacttatcatgaaataatttccctgggatgtacaatgtcttcaaaggtagagaggaattcataagactgaagcttgtttgctgagacagaaagtcagcatgtgacaaggtgacagatggaagtcctgccttttatttgtgaggtgccaactgctggcccctatcagctttcttatcttctggctctcttctctccactgagttctcatgagctacactttcttttcctctgctaaatacctctgaaaaaggatcttaagtgaatttaccctcagtgagatgttaccaatggcaggtctgtctggatgttataagcatgctgattagatcagtgatgtcccacaggggaggaatataggttctccacccagccccaccctatgcttctgaccaggccaaggtggtagctgccacacctggctgaccttagaagaatcccttttggctaggggcaactgtaggtggttatgaaatgagaacaagctggcagcagaggagagggacctggcaggcaaaagcaaatagaaccccagccgtgggattcgtaaggacaatctactcaatgctgcttcatggaatggagcggtgtggctgctttacatgtgcactggttttcaacatgagcctttctgatgaaaaaacgtgcgaattatcaatccaaaaggtgatgtctgggtgtttgtaaacatgttgccatgtccaggtatcacaggcttttcaatggaatgggtcctgatgcttcccttcgtgtgtcttgcagggctggaggtgggacccaggagcctggttgggctagataagtgctctaccactgatctacaccccagccctcactgttctttatgttattaaaatgttataatgtacaatcagctaatgtcaggatgtatttccagagcagaaagcacttttgcacaagttcccctttgcaggaaactggcatccagcttaacacctttaagtttgtagacagtaaaggcagaccttcccatcaccacttagtgccaggttgtatactctagaggctactctgaggggactgcagtgtggtgcctgtttataatcatgatgttcctagttctttaccctgagtggcaaacgttacaaaacactaaaaaccactgtagtctcattagtttagactcaatataaagtaggtggttcctttaacaaggggtttgattttggtgagggaatataacctattgaaatgtattaatcaaagggtagttctagaaaaacaaatgtttgcttttgtctcttgagactctaactccagcctcttactgactatttagagctaatcaatggtgtaaatgttacagtagcagtctgagagatgaatgttgagtgaacttacctacactctgtgatgctgtgcggctcattttcatagaggtcacctatagccatacccagtaaatagaaactgataaggcatgtttctttctgcacatcttttatatacaaagaagttatctacaatctagtattgctattgttttgaagtacttgagaaaagatgccttgtatgtaccagtcctttaataaactattttattcttatgcctttaaaaaaaattctttcttataaattatagattactaaatgtgcccaaactctagtatttggatttagtcatgccaactctgttttcacaaatggaccctgagggttgtaggaaagtgagtcaccccaagccacatgaagtctgctggagatcaggccctacttggtgctccttatctccagctggacaaggcctctaagagtcgtcttgtcagtgacttagggcacattggggctggagaggtggctcagcgggtaagagcactgactgctcttccagaggttctgagttcaaatcccagcaaccgcatggtggctcacaacca

SEQ ID NO: 18639 - DNA, 1146 bp, Mus musculus
ggaaggggcgggcctgaggagcgcgcagtgtgctttctgctgaaccttcttgctggtttcagcatggaggaaatttatgctaagttcgtgtctcagaaaattagcaaaacccgctggcggccagtgccttccgggagcctgcagaccacagagacctttgccacgggctcttgggacaatgaggtaccgggtttgggcgggccccggctgctctgctccacgccccccgcgctggcgcgcgaaagcgggcttgctggtctggtttagctgcccgctacttgagagccctggtggtgtgtctgagcctgggatctggttttaaaccctcaccaagtctgtagtcataccgtccaaacttggccatatctctgatcttttcaactcttaaccatatcgtttgtctgagatgctattgaagcaaggtcgcccgaaaggcaatctgaatctgactttcctagagttgatgttttcgtcacctcaagctaaaactgtctgctttgcaggaaaattgcgtttcactgtggtctattggagattttggaaacttggattctgacggagggtttgaaggagaccatcagttactgtgcgatattagacatcatggggatgtcatggatttacaggtaaatctgattgtctgccaaagctaatttaggaaatttgagactatttagaggtaacaaggcaccttatagtttgtctacccttacccctgatttacagcactaatctctatgaatttaaatttgccatgccatcatattaggcacttagtctcagaagtggggctgggaaatggaattcaggtaaatcagtttgaaaatgaattgcccaaaccgggcatggtggtacaagcctctaattccagttcttgggatgcagaggcaggagggatctcaaagctagtcagggctacatatacatagcaagaccttatcttaaataacaatatttgtccatctatgtgccaaacgatgtttggtaagttttatacaggtatgttaatttagactacatgtctgtgagtcaggtttatcatttcatgttgggatgaagataatctcagcacttatgagagctaggcaagaactctctgctttgagtgtctgtatccccaccctcaagtaagactcactgcttcgc

SEQ ID NO: 18640 - DNA, 1438 bp, Mus musculus
ctaaagaaaaatccaagtacagatgagcagaggaggtggacaattgtagcaggtctgctccggcctgagctggggcacgcagacgcactcagtgcctgccagcacagctgactgcggtttcgatgttagcgttgttgcctttcaggttacactgatggtgtggggctctggaagagagggaggcattttgtgtatactttttatacaaattttattgttgtgcatacatggtaacgttcatatttgacatctttcatagtttcagtcttttaagaatgaatcatttcatatcacagaagtccataaacttgtatgtaaagcataaaacagaaaatgtacctggctgcagcgcaagaggtaagagtgtcactcactatgaaagctccatatatcccttctccttgcaggaattattctgagttgtgtttaccctgctgttaattttgtatgtttttgaattttatacaaatggcacaatgtatattttccttctgtgactttctttttttaagagtccatttatttttattgttacatagttgtgaatgtactacgcttgatctgttgatggacttttaggttgtttgttagtttttgctatctgaggaatgccactgtgaacatttcaactgagcatggcactttctggccatgtggtttgagttttcaatgcatttatagttatggttgctgtaatttacctggtatgtgaattgtatggggtcaggggtagccacaagagtagttagtctaccatacagctcagagcacatttgctccattattgtacatagttttgactaccaatagaaaaggcttaactatatcaggagctagcatcttttctagggagatggctcagtgggtacagtgtttcctcatcagcacaggactgagttcagatcctcaccacatacccagtgcatgcgactaataatccagtactggggagacaggagcgggggaagctccaggcagttcgagtgaccgaggaagacactcggcactgacctcttgcctccacatactgtacaaactcgtgcgtgcaggcacacacacacccgaatacacagctgttctgcatacagaacggtaggtgttgctcacacagatgaacctaaaacatggtctagaagaatgagcagggacaggctggaagcaacgagaagtcatccactgactgcggagactcgatttaagagctctggagtattgaaataggaaaatgtatgcaccaagcgtttcaaggaaaacatatccttgattccaaatgataagaaaccgttttatttttcctatgtatttgacagtaactatatgcttatgggagtgtaatatgtttgctatatgttaatattctggaacaagtaaatccatttgcagacatatcagcttacttttttctttcttttggccaaagtttgctctcagggatttt

SEQ ID NO: 18641 - DNA, 5293 bp, Mus musculus
agtctatggacagtgataggacttgatacttttcaagcagttagttaccagcattaatttcttattgtagtaaaaagtacttagatttcactcagttccatagaaaacataaatgaaactttatcactgaaacctaattctgaagtgtggggcggggagggaggatagaaatatacaaaatgtaaagagaaaaaagaaacttaacgaaaagtcttgagtcccatttctgtgtttaatccagcatccattaaaatgaacaatgatggacctttcttaaattgatgttaaaatgccgtcattttaccttgttacgtaaaacagggatctgctgctaattctttctgacaagtgttgacgtcacttcttccctgcgatcactggcctgtgtttatgagtactatcttatatctatgttctaagatatgtttttgaagtcttatatgtaatttgaaattaagcgggtatcatctcaagcatttcttttgcttatttttagaatttgttgctttaaaaagtaaaattaagtatttctgagctataaatattgatgatatagttccttttgtatatttcaggaccacattttaaccccagcgctattcataacttttatgacaatattggatttgtaggccctgtgccaccaaaacccaaaggttagtgcatccattaaatgtgagactgtttggaaagcgaaatcctagaaaatgtttattttttatgttctcaaccttccacttgggaagtgtttccagcttgggcattctggcatgggctgactcctcagggaggtgtgtgtttgtttatttacactctggggtggagagcatgcaaaggtgtgacgtatgtaactttttaagagtatgtttgagaccttagtacccactgtggactcccaaaatagaaagtttgggtttaaaactaagtgcaacgattgtgtctttaaatttgtaaactgtgataaggcaggcactttagagaaattcagttttttgagaacattgttttgtatatatcctgaattccaggtaaatttcaaaaatgtattatcatctagaaacattttccaccattgaaagtgacagaatatgtgtgtaccaagctaagacatgaaataagcctgtgtatttgagccaagcattaggatatgtatacgaatgaaattatgtgcaaaaatctgactggctgaagttaaatatataggcatgtctatttaggtcactattgtcactactaattatgatgcataatttgcttttagccctaagagaagtaaaattttagatagctttcattaatatagtgttaataatctattttactatgagttactgttctttcaatatacctaatttataaattaagctttataggtatttgtgttttaagaaaaatgtagtatttatcagattcagtattagtcatagtttcaagcatttactgttaaaaactacttagtgaattcattaacgttgcagtatacaaaatcatcccacaaaaatcagttatttttttacagttatgcaaaagaaattcatagataccagaaaaatgtttcattcacagtaacaatcaaaacgttaaaataggagtaaactccaccaaagaggcagaagaattttataccagaattataaacactgaagaaggaaattatcagaaacattcatgttcatggattacaaaaattatactgttattacctacaatatctaagatctacagtttgttttgttttagtgtgtgttgttttgtctacctgtatctgtgtgagggtgttaggtcacctgtaacatgtgagctgtcatgtgggggctgggaattgaacctcagtcctatagaaaagctgccagtgtgcttaactgcgaagccatctcttcagcccaatctgcacattctaccaaattccaatgtcagtataaaaatgagaaaaatattataaacttcagacaggactctaaataggcagagccaccttgagtgaggatggagctggagatagcacactcctacttcagagcggatgacagagttacagtgatcagaagagtgcaggactggcctaagcatgctctctgacacacagcagtgggacagaagagggacaagcaaggtgcgtcagtgctcacctcctctcacgggaccagttagtaaagtggagtcgccacatgcagaaaaatggggctggcccctctgtatccaaacagtgactcaaatggagccacacgaaggttgagtgctaagggctcttggtgctgatgacctaaattcactccccaggctggctgcacatggaagaaagaaagaaacaacttccccaaggtggccactggcctctacatacttgctatgatacatgcattgctgatacatgcatactcatgcatttacatatacaaaatgcataaatgtaaaacaaattaactagattataaatttaaatagaagctgacactgggtagatggaaacatttggcattgctgagggtggtgacttgcatatggcatctaaggagctgtaggactgaccactgcagggagctgtataccaaaggactgaacactgcagcgagctgtataccaaaggactgaacactgcagcgagctgtataccaaaggactgaacactgcaacgagctgtataccaaaggactgaacactgcagaaggctccctgctattctaaaccagattcagggctctcttatgccatgtctgaggtttaaaaatacaacaagaaaatgggatgattttttgactctgtcttactttttcagcatgttactgccataagtgtaaactataaatgttagaaagtagttgtttcaagtgtcatagcacacaggagatgaaggcaggagggttggtgacagtcagcaggatccttcagtctgacatgacagtcagtggggatgggaaggagtgttcacccttccttcccttgtacttggaactatgaggctgtgttctcccttaggccgtggaagtgtttgtgtcgagtcacggtgctcttcccgctaggggaagcatggtcagttcagcagttgttttatctggtcaccatttggtagattttctgattttttttttttaacttaaaattgttttttcttttcttccttacagatcaaaggtccaccatcaaagcaccaaagacccaagacgcagaggatgaggaaggtgctcagtggaattgcactgcctgtacgtttctgaatcacccggccttaatccgctgtgaacagtgtgagatgcctcggcatttctgagccaaaggccccgccttcctctgaaaccacatctaaagttcaagaaggtcgcctgtcatcgggaaagtgtttcaccgccacaggagttagtccagttgaaggtgtgacgagacagtggtgtgctgtgttgagtgtcagcccacagagctaatgatacctcaatctaatgtcatgggcagtgagattcatcacctgaaaggcctgagagaccgggctgcctgctgcctgaccatgtccagtgtcacgtgtcagtgcctaggtgttcccaggactcctcccctcttgtcaccactgatcctgacgggaggaagggagagacaggatgattgctttttgtgttgttagagcttttggtgaaacactacatacacaaagagaaggaacaaggtttgactgagaactctgctgccacatagtgccagtagatgtgggaaacgccacaaatctggggtacttttggccctgtcctctgtcttctgaggacatctctgtgaagccagcatttaggtgtgagataaaaggaaagctgtgtctgtctgtacatccacagtgcgctccccaagcctctcctactgtacagatgtctcacgtctgctttgatttctccattatcttcttatatttctatatgtatagtgtaatagacttgtgttaactagtgtccttttcccttttagtaagcacgatcatgctccttttaagccttacctgagaaaagcaatgccataaggtagaaagcattaatgaaatgaaactgtgcacaacataactccctctccccttcctcctcctgtcctttgtcccttggtgccaatgctctgagaagacatgcaggtgctgcatgtgagtcactgcaagaaacactgcagccatcggacggtcgaggtcacgctgtacactgacttgagcagtgggtgaccaaacatgtcgttttgtcttctccagcagcttaaagcagaaagtatttaaacccactgccatcttgccccatctgtgtggtatcccatagaactccatgggaggctcttgttgggaaaatgcagttttaagaagcagcctcagcagccgttcccgcagcctcttcttcccgggaagaagtgtggctgtcggactgttggcacagtcatgtgtatttataaagcatagtcatctttaggacaactgaagaaaagctggaaaaaagaaagaaaacaagcagacttgaacactgaagcaacctcagacatctctttattttgatgatatatttttgtaaggaaaataaatattcatatgatcaggaatgtatataactaaatgaaatcaagaaaaaataaccatatgcattttaaaagaattatgaaattatcagtgcttggaatggggctaagggaagtgctgaaatataagaaaaaaataggaaataatgtagattgtcccactgtaaatgttcacaagtggctatgttttaaataaacaggattattatgaatgagcgttaagaaggtcagagcctggccttccgggctttgcactgtgagtatggaaagagatacggcaaccataggtcactaggcaacagaccccaaaactcgtacatttgatgcattgtgttttaaaagtaggccttgtttttcagcttcctctgcagttctatgtgaagattgataaatcagtttttacttgttttattaataaaacgtaatttggatatcttgagttgatggttttgtgatttagctgggtaaactatctttgtaacagataagttatttataaaaattaaaaaaacttatattctaatgtggattttgtggcttgtctttgaagtttgtgggacagtttgtactcagcatagtgctctatagctggctgaagtcaggaggcaccaccacccccaccaccacccccgacccttctcacgagctcccagcatgccctctgtgagttctgtccattgctgtagaccggtttcttttgggcgtcttgattgattggctacctggtttggtcttgtaagcagagtctctctcactagataagacc

SEQ ID NO: 18642 - DNA, 1137 bp, Mus musculus
aataatttgccgtcttaaattttagatcagtttttaaaaatagattgtttgactaagagaaaaaacaaaccaatacacacatttagtgatttattttattcaagaaaaactccactgggtatttaaatcatgtaggtatgaggctcttggaagaaaggttagggcatgaaaaaaaatcattaaaagacagtagagatagcttttaaaaatagtgttgatggcacccctcactgcttaaagtactgcccgtgtgcataacagcgagacactccactcatctttctcacctcataactttctgacacatgcaatctggatcacaatgataaaattaggatccaacatactcatttgtaacccatcttcagggctctttgaaagagataacatcctcagatggcgccaggaatctagaataaaatgggcaagtgaaatcctaccactttgggctttaactgtgttgattcaatggttggaatcaactgttaccccttggctacaccctctaggaactggctcgtgaacatgtctgttgcgagttgttttcaatgaaaggctgggctctgacatttgaagtggatggttgtgaatggccgttcattgcatggaaaatgttgtggttaagggctggcttgttttcacgcagactaatgtgattcagtgcttgttttgtggtatttatgttgtaaataatatatccagagtccatgtagctgcttaatgcctgccaactagccatacctacttcaagttgtcttaggtccagggcatcctgtttaaatactgaaggcagtacctttgatttggtgaatgttttctcatcttcagtggatatgtggtcagaggacaacctcaccttctaccttgtttcaggggtggggaaagggggtgtctctcttctggtgtctatcattgcctatgccaggctagctggcccacagcttccacagatgctcctatcaccccttcaaccaaaggagctctgggactgaagatgtgcaccactgtacttagctttccatggactctggggatttgaactcagacccctagcacttgcatgtcaagcacttatccattgagctgtccaacatgggcgctgggaactgaactcaggtcctctggaagagcaccaag

SEQ ID NO: 18643 - DNA, 1438 bp, Mus musculus
acggtggccatggtgttgtgagaggctgtcacggtggccatggtgttgtgagaggctgtcacagtggccatggtgttgtgagtggctgtcacggtggccatggtgttgcagtatttatgtgaaatcctaacctcatccatccccaaatccattcatcaactatcagatcacctttgcagaaagccattgtaagttgcatatttcagaaagatttttttttctaaaaagggaagtagtttactcatttaaagttctttttgtttgtttgtttttaattttttttccattttggccggttttattatctctcatttgttatgtagataattattttaattcaagcaaaggttcattatggagccagataaaccacatccgctgggtgttaaatattgcatattttcaactggtttttccaactttgatttccatgtgatctgccctctttttgtctggcgtctggttttctagcagttggcacacttagacaggtgtgcctgatccattgcttacaaagtgttttttcttcatattcttgcaagcacgatgtgaagtctccagttatcgtggaagcattttgaatacaaggcccggatcagtcctccgctagttcatttgggttattacaatttgattcccctcagaagagaagggcaagcggttttatgaataacaacgccatcctggccttatggtttatatagctggtccacgtctctgaggaacatctcaggtgattccccccaccccacacacattttagtgtgcgctaaaaaataataatattgcttggtttcctcacttcccttcgcctactataaaatgccacgtggagaagttgaggcagtttagaatgagaagagtaaaggcactgggttcctattggactcttaataaagagctcacggttagcttccagggtcaggcataggccacccaatgggtgggggtgcagggttctctgccagtccaggacccagtcacatgctgttgtgggggttggcattggaaaacaggcttcttctcttgcttttgaagtaaccctggcctgaccgtgcaacagactgccctttgattttagctgagcgaagagagagagacctcgcaaaagtaacatcggaggtaaccagggaggaggagaaatcttttgggaatttccaagtttcagttcattcttggtgtagggttttctgttttaagtcaatcaaggaggtcttgagaatgtcaaacagtagcttttttctctctggaaattgtcgcctttgcatggagaattaaattcagggaccacgagtttagtgtgaatgtctgatctgaaggggctgaggcttcttatccctccctccctccctccctccctccctccctccctccctccctccctcccttcctttcctttccttgtatcatatttgtttggttttcttttgctttgaac

SEQ ID NO: 18644 - DNA, 1224 bp, Mus musculus
ggtgcttgtgcaatcttcatgacatggcttttcttctttatacagatcccgagtggtgggctgacggaaatctgcagaaagcccctctctcccggctgtgttgcgtccatgtcggattggctcatctctatcggcctgcccatgtacacgagcaccctttctgacgcagggttcagcacgctgagccaagtgccttccctgtcccactcttgccttcaggaggccggcatcaccgaggagagacacataaggaaactcataacggcagccagactcttcaaactgccaccaagccctgaggctatgtagccaggccggcgtggccctccctagacaagagccagcctctcactgtgcttaggaagccgatacaatccctccacgtctgctggggttgaagaaaagtattctctcggggctcacgaactgcaggattgggactcagaaccgaggcccctctcttccggtaaagccctcctcccctgcccctcgaggaaatcgaggtgattctctttgatgcccaaaggcaagacacgcacttagttccgttttcaggcactgaagagccaagacactacaaacagtgtgtgtccagtctgtctttgtgctgtcagagggctaggaggacgaggcagccggctcgtgtctgatcgtgcccttgcgcatctgttggtcacccgatgcccgagcccgatgggcttagctaggccaaagcaacagactctggagttactgtatactattgaccatgctcatttgttcaaaagctacaacagctgactctatcaagaacagaacggtcctcctctcctgtagataaacgaccagagacattttaattgctttctagcaattagcttttatttgccttaatataaacttttaaccagttatctatctagtgtccacagcccttacttaaccctagttccagattttcagcttagactgccatctaacgtgtttgggatgtttccagcaaaaatagcctttttttttaaaaaaacagtctcattctaacatggcttattttataagggtgactaccaggcacacgtttcatgttgacttttagtttttgaactaactataatttagtaaaagtcgatcgggactcacagaggggcacgtgtgtgtgtagtgactgcccttcagtcttctgcctttagtgagaggctgtcacagtggccatggtgttgtgagtggctgtcacggtggccatgg

SEQ ID NO: 18645 - DNA, 1115 bp, Mus musculus
tacagtttgtatccagcgaatgaggattttgatctcatctctacttgccacccgccccatgttaatattctttgcttctccgactatcgtgctctaagttggtattgtctgagttcttcccagagaagcgcctcactcactggctgttactattccacattacctggggttacctgggtcggctgtctcacgctgacagcctggttcaaggtagaatgccaaacagacacaggttgattaacttggatgcattaaaaaaaaatctgccatggctccaaagcatgaagctctcactggcagatctctgtcttgattttgagtcttacaagatctggcaaaaccaactgtcacccttgccagttggaagtcaccaactacaggagctctctactggctgcccctccacctgggcgttgagtctgactttgaccgcatctcccaccttccctgtgtacacagatctgttttccagctgccaagcagccactgtgctgtggtgttgatatggttgctctgatgtacatactcttcttcacttaccctacagacgttcctgcggcaaagaacattcccagtgctgagctcacagacagacgacctgtagtgacaccgatagtctaatttttaaatagaagtcctgtctagactgggtcttttattaatcagtattgaaaaatggtatccattttctattacgtcagcagagagatgggaaagagcacgggtaaagattcccccgcctccgttacgcactgttgggccaaggtccaacaggttaggaaggtttctgtgaaaatcccttaaaaccaaggccctctagtaatatatatgcattgtgttttctttcctaggtaccctctccataaatcaaactcagaagacggctgtgtaggtaggtaccactgcccttgatttaaatatttaactgaattatttcattttcatagcttatagaggatatctagacatgtagagttatagacctcgctgaagtcatcatcattatcatcatctgtcaattcagaaatagatactgtaaaagattatgtatgtgcgtttgtttatatgtgtgcgtatgtgcatgtatgtgtatggttgaggtgcacactagatgt

SEQ ID NO: 18646 - DNA, 1162 bp, Mus musculus
gtgagctttgtagaatacgctggaggcttcagtttgcctatggctctgatggatatttacataggtgtcatttacaaggatattcccaaggggcaggcaccacagaaggtgtttccatttatgcactcagatcatctaccaacagcctagtaaggtaggagccattttactatagctactttacccagcgtcatcaaggtgtgaatatgcctctccccaaatctgcttgacttcacagcatgtgactcttatcctgggatgggcttgttgccttggatttcacactacacgaggcgccttgatcatttatggaggtgactttttactttgttaagcagaaagccagaaactacaggccaaagctgagaatggtggcttgtacctacagtcccagaaatctgggacctgaaggttgctgtggatttgacaccagcatggtccacagtgtgagatgctctctcagacaaaacaaaaagccagcaagctgaactaaagacaagaagaagaaagttctagctgagaaaggactctgaaatgaaaaacaaacaaaacatgtctgaataagagagtgttttgactgggttgataaaatatgactggtgttgctgtttgcagtagatgtttatggagttctaagactccgggggagaattactctccctcacagttggagaattgactgcactgagatgtgtgtgaaatgcagactttccactaggaaggcccacggttggcctcaagcaagagacttacgcaggactgagcactagggggcgccagcctctgtctcttcccaaccttgaaagtgagcgtttccttactgcccaggctttctgtctctgacctcacttcagtcttgtccctgcagctgggtgacctcttgagtttttatggcaggtagtagatggtattagctgaatattgttccgtgtttatttctattaaatagagaagaatgttcacgagataaaaaatggatttgctatcttatgggtaatattcattaggccaggggcgatggctcagtttgtatattgtttgcctaccgtgattatggggtgggtggcgccttcctatagtctcagtgcttgggagatggaggcagaaaaaaggagaaattcaaagccagtcttcagccacatatcaagttagaagccagcca

SEQ ID NO: 18647 - DNA, 1202 bp, Mus musculus
aaatttgtagaaaagtcgaaattggctaagtttttaattttgcttgaaattttataaaatgtttaaccaaatgtacccttgcattatttaattaaaattgctaaaacagcagtgttttatcatttcagtaaagtgctcagctcccttttaaaactgccctccattcgctcacagttccagtacactcaggtgatgagccagtttaatctcagtgcacacactgctgccgcatggagagctgcagggctctcttgtccagttatccaagagtctagtctgatgagctacaaaatatctcccgtagaaaacatcacgctcctgtacatatccctttgacatactaaaagcaaaaaggaaatgttgacagcagtcagtcatgaagttttttctgtaaccaagagtggtgtgcattggagggcagcagacactgagtgattggttcttgcagtagcatgacagcctagagaggatgcagcctgtactgcagtcaggggctgtgattgctaaagccacaaaggaagccgggaagggaaggggagtgggggtgtgaacttcacacactgtctcctgtggacgtctgtactgggtcactgtccttacgtgcaggcagggcacagattcctgcgactcgggctttttcctgctctgtgtgagaagttaagtccctgtaggtcatcctcacttctcagcctgccgcttgcccctgtctctttcattaataattcttttgtttacattttataatgtgcactactggatatcaaagtttacatcaaagtttactttaaatagcatagtaaggattaaatatatgtgataaagagaactgatcaagataaaaatgtttttaaactataatcattttttaaaatttctgaatctgtagaaagtgaaaaaacattcgtttcatgtctgttctctgaacattcggcaatttacaaattgcttaatttgcattatatattgtccattaaacccatgttccatggtacctcactggaagaattgggtcctttcttaaaggtatagttttatgaatatcgatagtcgagagttttaaaaagttgaaaagtactaagtacctaacacactgcttgactctgtgtggagcctcagctgtttaatttgttgggttgtttgcatatcaggttcttttctaccgtcattttaaccgctgtaaatagatgagtcaaagttgtgat

SEQ ID NO: 18648 - DNA, 1219 bp, Mus musculus
gcagcagcatgctgaggacatgaccgcagtgggcagtgtggacgtggacacttagcttgtttagttacattcagcacaaataaatttgtttatcttttcatcctatgccaaaacttaaaatggaagatacgtgaaacatttaagagtagcacatagttttaaataaatgtaaagggatagttaaatataaatttgtgcataaatttgtactccaaatcctactccagagatcctcaaagtagatccaaaactcacacgtagctcaacattttaaaatacatttttcttattggttcagatgaaaacttagtttatttttaacctggacatggctctgcctgtttccattgattctaagtcttctatccagtttggaatatagagttaaagttgtaacctcgaggaaatgcatgataagaccagcgtttctactcttaaatataaaccttgtaatgattcgggtggcttctacgtttgctcagatggaaggattctccaaggactcaactctgttctcacacaccaaggacacatcccaaacttcctagggagacctggctctaaaccacacccatgacagtgtgcatagcagacaatgcgtcagccaggctcccacctgcagcttggctgtgtctctgtgatggttgttagtggtggtctttgttgttgcagcctgactatcttactcttagcatttatagatgctttgcccatatccatatttacttcctaattgagaaataaaggaaaatttattataatttagttttctttctggtaaattaaagtctaatgatgaaaaatagattgaacttttcgctgcccgcggagacaggaatgacacggacaccaaggcgggttcatacagcaacttctttacttcgggctttttcccctacagctctcttccccagcagcttcttcttcccctgtccttcttgcagcttttctcttacagcaaccccacttaggcaagggctacaacaactctcctatactcatgctgactgacctcatctcgctccacaccacctcatccaatcagaattcacacaccctccaggaacgagctcaggtcggtcaccgataggctgacaggtctggatctcaagggacagtcgagcctggcaggcagctcacgcatgctttttcactgcgcataaggcaaggcagtgaacaagtggggttcacagacctggcaatgggccagggcgccatc

SEQ ID NO: 18649 - DNA, 1225 bp, Mus musculus
gagagagtagttccagaaagtgttgcccagagctgtatgcatataccatggtatacacgtatccacatgtatacacactcacacacacacattcacacacatcataccacatgtgtgcacacatgcacacacataagcaaataccaaaattttaaaaattgcaaaaagggaaaaagatccagaactctttgcccacctcagatctttcatgctttgctcattgcttattttgtaagcatgataggaagataagaaaacatattcccattgttcataaaacttacaggaatagcaaatttgggggaaggagaaacaaacaaatagtaacaaactctaacaagtttgtgtaagtgcacagattgtgtgtgtgtatgtgtggaggaggaggaaagtgaatatgaaagaaaaaatttgaatttgattttgattcaagatagcatttcagccttgtgatacatggcacagtatgtgttcctgagaattttttctggcttttttaaacttaattttataagtgtaagaatatattttcctgtccaaagtgttgagttcagttcagggcagcttccttgttctgttaattaaactttgggacattgaaattggctgagaaaaatgactgaatagagagtattactctattcatatacttctagcctacacaaacaagcaaacaaatgaataaataatgcacactaaggggcctgcctgccgccatgcctcgtagtatgggcaggggaagacagggagagtcctgcctgcagctacactacaccatgctgcacaagtgagcagaagacacctaaaggccaacccacctccacatggcccaggcttgctggagacacccgagcccgcctgccgccataccacatggtgcctgccccgctgccatgttcttaatagcgttctcacgcccggccaggaagaacacaacagaccagaatcttctgcggcaaaactttattgcttacatcttcaggagctaggagcgcaaacccccagccccaaaagcgaaagccaccccaatatagaaaccgaaacccctttcctatttaggagagttatatttcgcctaggacgcatcactccctgattggctgcagcccatggccgagctgacgttcacgggaaaggcagagtacaagtagtcgtaaaatacccttggcacatgcgcagattatttgtttaccacttagaacacaggatgtcagcgccatcttgt

SEQ ID NO: 18650 - DNA, 1200 bp, Mus musculus
agtgtttcatacagtctgaggcaggaaggatacctcatgaatgatagctgggattgctctgctccccacaccactggcttctcacacccctgctgagtcgctccatctaccgacctgctcacattctttcccttttttccagttgaaagaaagtatttgtttcaaaactttttttgttttttgtttttttcgagacactttaccaaatcattagctcctctgagttaactgtcagttgcatgattggtcgtcccaccagtgctgtcacaattgctctgtgatatttctattcgtgttgtttatgtcacttggctcccacactaaagcataacctttctccagacagttgtgcaatctgtctatagtatgtatggccaaaagcaaatttagaaaggcctcaattcagtaggaatgtaaataaatgagtatttctttggcgtgtgccagggttttctgtaataactcttggtgctgcttatttcccaggtatatcaaggagtgaagaaacacggcttcttacagcctcattttttggcagaacaagatatagttatcattacctatgatgttcttcgttcagaactaaactatgtcaatatcccacatagcaatagtgaagatgggcgtcgcctgaggaaccagaagcgctatatggccattcccagccccttggtagcggtggaatggtggaggatctgccttgatgaagctcagatggtcgagtgtcctacagtaaaagtaagagtctgtacatcttacgagtgcagaggaaggacgtgaatggatcagtagttgggattcagttaagccacagtactgatggtgttggcacatttgttgctaaatactcttgtgttattctaattgtctggatgatagttttgtatggactacttggatatctgtgtgtatgacacagttcaaagcaaactatgcttagggaactttaaatcttctcacctaattggaaggttaatcaagtgttctccagtagcctgtagcaaatggctaaaggaaatggcccttacatattgatttttattatagctatctctgtgtatatgtatacctcaggcattcctctgttactcttcaccctgttgtttaagatggtctctcattagatctggaacttactgagttagccagctagactagctggcttgccagacgcagtgatcaccctgccatcatttccca

SEQ ID NO: 18651 - DNA, 1129 bp, Mus musculus
ttgttgtatcctagccttgtgttggaatataaatgttcttgtttccttccctttagctgttgaaatcaagggaccctcaaggttcattagctcctacctaactgtccataaaactgtactagaagtagttcctgggtctcctttatcccgtgagctctggtgcttaagctaaggtgcattttcttatccaggtttataggtgacaggtcagctgaagaagacacgttttttgggtgcttattctttagttgaagggagatatacattgattcttttatatgaaattaaacataatatttttacagctcttttacattcactaagagcttttctgtgtattcatgtggttaatattcacaacagtcctgtgaaatggatatgattaatgatattcctattttgaaggtaaagatctaatgctcaggaggaaactcgcctatgatatgtagcaaacagacagagcagtccaggccccctggcttcatgtctactgttcttccaccgagttgtgtgccatgctggggttcagaagccttgtgggtatgacttagaatgggattgtgtaagtacttatttttgtttcctaatatttcatgtgctatgttctaggaaaaacaatttgatatgcttcaattagaaaataacatagatatctatactgatcagtattagaggaaaactattcttatttatttcagtaagatacctcaattaaataaatattttagtggaaaatgaaattatggattgttttatttctaaggtttagatcatatgaactttggtttttattgactcaacagatagtatcaaattgccaattctacactattccatattttatttacatttgtcatgtcttctaaacaattatgataatactactacttcagaactaatgagtccacatatataataaatacccacatcttggctgcaaacaaaagaaattttagattcctttctcaataattttatattctctgaaatatcacagtatggcactgtgctagcaaaccactgaggatgagtgaaatgcccagtccttacagtttaaatgtatttctatttagggaattgtttttcaagtaactccagatgaatttactaggactgaagatttatctat

SEQ ID NO: 18652 - DNA, 1182 bp, Mus musculus
ttttgtcccgagacagggtttctctatgtagctgtggctgtcctggaactcactctgtacacaaggctggcctcaaactcagaaatcctcctgtctctgcctcccaagtgctgggataagacattattttaagacctttaaaaatgtgaaaattcaaagtgtttgtaaaataacgttaagcagaaatctgtcttggttgataatatttgtgaaacatttccagttttgcttcacatatttctcagaaagtaagaattgtctcttttttgtaaacatcaagtgtggtaatgaaatagtcaaaaaacctataggcttccatgttcacataatgtgcttattaaagaaatgaacatacattgtcagcatttagaagtaagttgtgaagacagggacattaagtgatttgtccagttaaattctggcattggtaagcggaaatggttattaatgtgaaacctcaagtgtatattttctttctccgttgttttgagagtactctgtgggtagattcatatgtcccatatattagtcagagtgggaagctgattcatatgtcccatatatagtagttagggtgggaagagggtcttccctgggcattactgatgaattctcaattgcttgtgatttgttttgacaaaatgtagcagtaaagattaatcacttgttttgcctcacctgtcatttaacttacaaggattcgtcatttcagtgcttaaatttctttttcaactgtgagactgaattgcatttaaataacaccaccaccacctccatctttatttctgccaaaaggtagaaataagaatcaaatatgacagaatataacttttctgaagattgtttctatagttaggcaacacaagcaattaaccttttgttttatgtttgtactttttaaagttcatggtttgtaagtttaaatctatttccagacagttaacattttttttacctttcttgaatgagatggatattttaataatagcatatgtacaatgaaaactatttctactttttattctgttcaaataaatatttttttcaattaattttgggtcaaaaaaacaatagttaggtactagacatgtatctccaggcgaggcaagcatagtctagctgctttctttagcctgttattcatgcagtcagttttagataaccagaagtgtggatgcttac

SEQ ID NO: 18653 - DNA, 2260 bp, Mus musculus
gcaatgtgagcatctatccagccagccaacatttcccgaccttcagtattgccctcttctgcaaatgccaatcccaagacccattcaaccccaaagctccgtggctccacgacacaagctgttgagtgcttactgggtgttctactgagggaaccaaacactgactatccaaagagaaaaggatattttggttttctaataacgtatattattgttttcttctcccctttctatgcaactgtaaattaatgaacagagaagtatttggaggtggtaaagcatttgtcactgatttgtataatatatacagccatgggaaagtgggtgggggctttctaatatgaaactgtctttttaataaccaagagaaaaaattgcataagaattagaccactttacattattacattccttctgctgttcacattaaccttgtacaataacttcacttattatttgactgttttaccattatgttttggttatttataaatttatcagccatacaaacaaatagattctatgtatttgtttctataatctggccaaattcctaagttcatatatttgaatcaaatattttacatatgtggagtaggcaggcattctgaagatactatttaactttagttgacgtcacacacaccatcctttagtaaccactggatgactacactaaaaatcctgtggactttaacggcaagctgctggggtatttttcctcctgtttttattccttttttgtaagtagatcttgacgtctttatttatttcatcttgcaatctctataataaagaagactgtattgtaatagtctcaaaaaattattttaccaagggttaccatttaagcatattttcattttgattcagaaaccaaagttggtacaacctctcctagtacttgcaaccttggttttcatgagaaaacacacggcaggctttgcccattgtgaggagagcacacatcatgctcttcagtttcctttgaatagacttttattgttgtttttgtatttttcgagtcctgtgtaagttttgaaagctctggttgtttcctttgtgaaagcaggcagatacttattggctgtctcatttgaagctttggagcagatagtcagatgtctcatgacccctcacttggccagcagcacatccgagaaggatgtcactcacaagcctacaccacggcttctctagaatgaaatcagtgctcggatgattgtatccctgcctctacttctgagtgtgttcaactaggtattggcttctttttctttttcttttcttttttttttaatttaacacttaattgccgattttagagaaaccaaaaataaaggtgaaggtaatatgttttgattcaaacatatatgcttttaaaacatcaggacatgctaactttgggttctctttcactgggatctggccagaaggaggctgaaagttagaaattgctattcttttaggatcggttgggtgggttggggggcaagggtgtctatttgcagcatagatattttgagacgaagaaaattgttttatataaggggagagccatgatcacctttctacctcagaaccaccttcctccattgtgttggacatagctttatatgccgcagtgtgcaaaacctagggctgtagtcaggcctttccatacccaggaagcacctgtgtaaagaagatcaacagaaactcccggaactcagaaccccaagttgtagatttggtgtcgtccttgttcttgctttgaggagtcatgtattcttttatttcctgcctgtatttgtatgcaaaatgatctctatctgctattacagaaaaagctacacaaaacactacattgtaaccttctgagtaataaataagaggaaatatattacagtaaccatgatgagaaataagtgtattgttcttttgaaatatgtggttaatcgcagactgtcatctaatctgttacataccgtatttttcatcctgaataaaagtaattttaacacaaaatgactttgatgtttggctgtgttcactgatgaaatcagatctctgaatgtatgtgatgaaagctaactataagatgatctatattctgataaatctaaatattttctgaaactctctcttatacattaatctagtctccattcactcattatctctctctcctttcttgcatataaatatgattatatatttttcaatttcctgtacaaatcagagtcttattactagggaaaatggatgttataagtacatt

SEQ ID NO: 18654 - DNA, 1204 bp, Mus musculus
ccttggattttttattttttctttcatagaaagcaacaattttcaacctgtgcacctctatactcttgagagtcaaatgacactttcacagggttcacatatcagatatcctgtgtgtcagatatttatattgtaattcataacagaagcaaaattacagttattaagtagcaatgagaataattttacagctggggtcaccacagcatgtggaagggtcacggcatttggaaggttgagaaccactgatagcccgcctataatgtctgtgtgaacagtggtctcttggaccattgctgctcttcagaggggctctaccctgctctgccatcagctttgtcttctagactatactcattttaatctctgaattgtttttagtgaagatcacaagaacaaggggtcatgaacatgatctcagtgaaaaatggacctgacaaagcagagatctagaaaagtcttggtagtgccagttctccgtaagcccacgacatcagcttctttgtcatgggctccgatgcaaggataatgttgaagggttattagcaccctaggctaacttctgtgctctttactgaacccatgtaaggcatcactgttgatccccgttctgaagactgctgatgaatgactagccttttcactgatgcaaatgtaccttcttcctacagctttcagcaagggtgtgccaaggtgtgcagaaaatactaattccctctaaggacccttttggtcagaatcaaactgtatattcaacacaacatataggctctcctctgtacttattatacaaaagtcaaaaaatacatggcatagttataaaatgaagttttcagattttttttctcatttataaaactaagaccttcctgaatgttttattttttttttccattttttattaggtatttagctcatttacatttccaatgctataccaaaagtcccccttacccacccacccccactcccctacccacccactccccccctttggccctggcgttcccctgtaccgggtcacacaaagtctgcgtgtccaatgggcctctctttccagtgatggccgactaggccatcttttgatacatatgcagctagagtcaagagctcaggggtactggttagttcataatgttgttccacctatagggttgaagatccctttagctccttggatactttctctagctcctccattggg

SEQ ID NO: 18655 - DNA, 1192 bp, Mus musculus
cctgaagtccgtggagagggaagagcgtggggaactggagcggatcattgctgacttggaggaagagcaaaggtgagctagacccgggagaagaaaatacactactcgctccccttcccttccttctgtcttttcagagatgttatctaagacatcacaatgaggtccaagtttgagaggacattagcaggctgggatgtgggtagggcctcgtgcatctgtgatttaatgatggatcctggaaaaactcttgcttgaagcccattttctccctcctagctcttcgtgctaataaatgtttttctatgagatgaagagtatcaaactaaatttggagttcccaggcagtttgggggagataattatctgataataattctggttaattttatatttttccctttccatattagaaatctgcaggtggagtatgagcagctgaaggagcagcacctaagaaggggtctccctgtgggctcccctccagactccatcgtatctcctcaccacacatctgaggactcagaacttatagcagaagctaaactcctgcggcagcacaaagggcggctggaggcgaggatgcaaattttggaagatcacaataaacagctggagtctcagctgcaccgcctcagacagctcctggagcaggtaggggtgtggattcctgtgcagcacctccacaggacccacccacccacccacccacctcactgaagcctggacccgtcaattcatgagcaacacagttaattctgtgtatgagtggaatctccactgatacaaaattgtctgttttcctatctgactcatagaaattctttcttcttttgtactaaaatatcaccttagaacagtttgactttaaaaaaaaaccagaatcctgtggtagccacgagcctgactttcatcaggaaagattccacagagaatagggacagcaggtgacctacaatcttcaatctaacactttcttccagagaactaggactaagaaggtacctcagaaatcactgtctgtaaaacaacgacgacaacagcaaaaggaagcagaggaacaggtggctgctagtttgccactgtcatttcttacacgggggatgctctgctatagcagtgacttggaaactttcttgacaacaagcagtacaattttcattttgaggaaaacgtatgtttctgatgagta

SEQ ID NO: 18656 - DNA, 1192 bp, Mus musculus
ttcctcctcaatattcgcaactttggtgtttctatgagaatcacttaagactaactttagagaatttaaaaagcagttagaaagtgagctaacatgaggtgaccagtgttgttacttgggatattttaatgtttggaataaatttgtagactactcatttctgtactgaaaaacacagagcgactataacaaggatgtcaaaaagaaagaaaaattcaaagaccaaaaatttgtaaaagatccaaaagctacagcgtctagatgaacaggcacaaaggtagagagaatatatttgatctgagagaatgaaaatgttatctcactaacagctgaagttaactgggaaggatcagttcatgagttggccagtcaagctaaaagctggagaataggagtgctgggcttcaatgttgttgggtaaggcgatgcctctctctaatcctttctcctcattcaattagtggatctcttagagctgaatacgacgaatgaagttttcaagcagcacaaactgaaccaaaatgatcagctcctgagtgtcccagacgtcatcaactgtctgaccaccacttacgatgggcttgagcagctgcacaaggacttggtcaatgttccactctgcgtcgatatgtgtctcaactggctgctcaacgtatacgacacgtaagtgtgtcatttatcctttaaatgatcactagtgagcgaagcacattgataataaactgggcactatcatcatcgccttgttgttgttgttgttgttgttgttgttgttgttgttgttgttgttgttgttgttcttcttcttcttcttcttcttcttcttcttcttcttcttcttcttcttcttcttcttcttcttcttcttcttcttcttcttcttcttcttcttcttcttcttcttctcctcctcctctccttctcctcctcctcctcctcctcctcctcctcctcctcctcctccttccccttccccttcccctttcccttccccttcttccccttccccttcttccccttcttccccttcttccccttcttccccttcttccccttcttccccttcttccccttcttccccttcttccccttcttccccttcttccccttcttccccttcttccccttcttccccttcttccccttcttccccttcttccccttccccttcttccccttccctttccccttc

SEQ ID NO: 18657 - DNA, 1232 bp, Mus musculus
ttcatcctttggttttcaaatgagaaggttttgtttttaaagaatgcatcctttaagaactttattcttttccctgtaaatcttttctgcctcttcgagtttactttctttcctttttcttcttctctttcttctttgtcccctcaaattgccctaacttgaacttttatgtattgcttcattttatatgcctcacaaacgtggacaactttgggtttgttttgtttgttatcctctcgttggctttgaacagcttctaaggcttgctgcagcgggacacagtggtgttctgactacagagtgcttagtgggcacaggtcctctgtggtaaacagatggggagtttagtgtcgagctttgctcctctattggcgagctgcttgagaggggattatatgataaaccaacgaaaggactgtacaaagagaagaacttccactgggcgaaaatgtggcagccaatatgggatgtttcatcccaggatgagaaagctctgtgtgcccctctgtggactgatatttagtggttggtttagaaacagtttgtatttcatccaagggaaaccactgtgagtaagctgtcttgcctcgaacatgaacaggcagtctgtctgtctgtctgtctgtctgtctgtctgtctctctgcctctgtctctctgtctgtctctcactgtctctctcttcctccctccctcctcccctccctcccacagacattgaaacacaaatgcttaaaatacattcttcgcaaagcccagtaacttattaaccagcacaggtgtagccctcataaaagctactccacttctcctgaggctgctaggaatgaaattttcatctcacacataacattttacatttgtgtaaaatataaaatataggtgttatatttagcattttacagatgtctcgaaggcataagtatttagaggagcttgccttttaatgacactgtttccccctctctggagtctggctgccttatgtgttggttaaacttattggcccttctctctagacttcctggcttaggatcctaaattggctttcacttattattagtgtgtgtgtgtgttagtgtgtgtgtgcatgtgtgagtacgtgtgcatgtggtgtgggtaggtgtgtgcatgtatggttttagagatgtgtgtgtgtgtgcacgctcgtactggtgaggctcagtctggtatagtcagagtacccactattttggtgctttcccgtctcac

SEQ ID NO: 18658 - DNA, 1211 bp, Mus musculus
tcagcttgctttcttatagaacccatggggtattagaggccctgggaatacatgtgagagcattgtggatcccttgtcctgctgacatcgaatgttctcagtatttttaccccattcagtactgtcttcctgtccccagtgacctgctcattgctgtccagtgtgacactgttgtcagcaggaggacattcagggagtcactgctgcagagagtcagtccggagggtcaggagttggctctctgggtgccacgcaagctgccctgctgcgttcagcttcttcctgcccctcctgctcctgccctgtgtatggctgtcattaggagtttctcccttagctcagcacactggcactgcttacatctgagagcatggtgggaatccttgtctgttttgtaggcagaataaaatctcagtgaccaccagtgattttctttctttctttcttttatttaatttaatttttttttacttattcacttgacatcctgttcacttccccctcctggttactccctctcctacagtgtttcccctatcccccttccccaacaaaacagtgattttctaatcagaattgccctcactgagacccctcagccctcagggtggtcctcctgcctctctcctcctccttcctcacctcatgctctgcagaaagttgccttttgagattctggaagatgtttcctaccttttttttcttgaactttatatatatatatatatatatatatatatatatatattttctctcattcccccctcccatgcgcgcgctctctctctctctctttctctctctctctctctctctctctctctctctctctctctctctctctctctctctctctcattcaccatactacctttagcctatcctcattgaaagctgtagttttctcatctgctgggcaatcagctgagtagcccctactaacttgtcaaccttataatttgctagatgagcataattagaagtcttaaccagctgagtgcacttgatattcttgtgatcttgtccataatgaactgttaccatctgccacctcccagactagaagtggacagggtccccttagccactgacagaccattttaaagagattaatttgatcttaattatttaatcagaatacttgggagtggaaataagatattccccattattttaatcagaaataccttttgattatgaagagaggggag

SEQ ID NO: 18659 - DNA, 1161 bp, Mus musculus
agaggcccattggtcttgcaaactttatatgcctcagcacaggggaacgccagggccaaaaagtgggagtgagtgggtaggggagtgggaggggagggtatgggggacttttgggatagcattggaaatgtaaatgaagaaaatattaaataaataagtaaataaacaaacaaacaaacaaataagaaaaaaaaagagttgccatgttcacagtgtctcttttcaacaataaaatccctaaggcaaaacaaaaccacacatggtaggcactcactgataagtggatattagcccaaacatttgaaatttccaagatacaattcacagaccatatgaggcctaagaagaaggaaaatcaaagagtggatgcttcagtgattcttagaagggggaacaaaatactcacaggaggaagtatggagacaacgtgtagagcatagactgaagaaaaggcctccagagactgccccacctggggatccatcccatatacagtcgccaaacgtggatactattgtggataccccgaagtgcttgctgacaggagcctgatatggctgtctcctggggggctctgtcagagcctgacaaatacagaggtggatgctagcagccaaccatgggactgagcatggggtccccagtggaggagttggaaagagctgaggggatttgcagccccatgtggggagcaacagtattaaccggccatattctcagagctcccaggaactggaccactaactgaagagtacacatggagggacccatggctctggccacgtatgtggcagaggatgatcttgttaaacatcagtgggaggagtggcctttgggcctgagtgtgtttgatgcttcagtgcaggggaatgccagggtgggaaggcagaaatgggtgggtggggagcatccacatagaggcaaggggggatgggatagggggtttctgaagagaagatctagataggggataacatttgaaatgtaaataaagaaaatatccaattaaaaaaaacccaaaacctattttcaatgatattttaaatgattaatgagctctctgttaagtgttcttttaggtataattttcaatcataaagataatatttacagatgaaataatgaacagctgggtcttgattattcaagcttatctcttca

SEQ ID NO: 18660 - DNA, 1202 bp, Mus musculus
gttcatcttggcattttgaaaactggtgtctgaatatttgtaccctcttcatctttcacatctttcttttgtctgttgtatgggtatcagtcatttataagtaagtgaaaaacgactggaaaattgtgcacagtattcttattttgagttttatttatttgtatgtatttccccctgcctatttctcatagggaaagggacagggatgggcagaacttggggaaactgtggctctgagtaacccccctccaactgtacatggtgttgtattttttgcttttaaaggtgtttctttctggttatacaatccctaaaatttgggcaggaaacagaaacacattggctgctgacttgagaagcagcagcattgaaattgccctgatgacctcgagccaccccacgctagatgctaatttctcctgatttggcttagatcacttagcttctttaaaatattaatgactctagaggataatttttcctctattagagcacagtggacacaaagctggatgtaagtgacttttaagattgctactgactttaacttgtttgcattttgtgattatcttggcctgttttcagtctttgaattgaaacctgattgaggttatgttgagttagagaggaattttataatcccacccccacccccaccccctcagggacatttttaatggcatatttaataattgacgtggtaaaaagtagattcttacaaggtagattagtgggtgagtcatagaacattgaaaaataattagtattataaattgagtccttcatgacttcagcatttttattgatttagctaattattttgatttagttttatgatttttttgtgctgccagcatatgtatgtaaaacagtttcgctgaaataattttgtgcccaaacattttgtcatgtgtcctatgagttaaaatattttaagcatcctggtgtatattattaattcaaggttgtgcacaggtgccatgaagaaggaaacagctgttcaagaatcatagagtgttgatttgttcgtgtggtcaatattgtcttcttactgcccagactgattcgccccttcattctgtgcatttttctcccaccattggcttattagtaggggacaatgacggcttggaaagccagggatgacaagtgatgtttaaacaaaatcagtttctcctccctgacgtctgtatatatgtttg

SEQ ID NO: 18661 - DNA, 1099 bp, Mus musculus
agcatcttacctactgaactacctactacctctcagctctgtgtgtggtttctgttggtgatccctgcaaagactgtagtgtgttttatgacctcacatcccagtggaaggggatacagattcctgttagaagttagcgggaataccactttcttcttcctgtctgaattcatgggcttcctgccaggtcataacccaggataaagatgataatatcaagtgcatgctggtttgctcagagcctggcaatagcggccgagtgtttcagaaaacctttatagcagaggtgactgtttgacatggagttgactgttctgtgactgtcccctactgcacaatctgtagcaggcagagcaacagacttccaccaccatggtgtctggactcttgaatgtgcccagtagtcggaaaaaaaaaacaaacaaaaaaaaaaacaaaaaaaaaaacccctaatatcataatatacagatagttgcttagctgcccagttgatacatattctgcagtgttctgaggggaatcacgaggcggctgagataggctgtggaagttaaggaagagctccttaaaagaatcatcagctccaggacttcatgcttgccaggtttgtgcagagccaggacaaagccagcaattgtgggcaaagtgtgctcaaggctgtgtgctgaggttggccaggctgcacttggcattttattcaagaatatttgtcatcctgatgggacaggagtcctttacctttcagtcagagagcaggtattatttagtactttcgcggatagatccctaaaagctttagggattcatatggattaccaggggctaaacatttaattgcaaaaccgagagagaccagattgcaaaatttgtaagaaactctcttgcaagagttagaaactgggagaaaagtatttgctggtctgaagttccttaatgtctttgctcagtcagttttgtctttggcttgaatgaacagggaagcctaaggtggcaggagaggcgaggtacgggtgtgtgtgtgtgtgtgtgtgtgtgtgtgtgtgtgtgtgtgtgtgcttgcctttctgtttgctgaaccattagccctgtggtgtttgta

SEQ ID NO: 18662 - DNA, 1203 bp, Mus musculus
gtatttatgtggaggagatatattttgagactgatataccccgtcaagggcacccgtgaattgcattatttaaagtaaattctgtaatcacatagatcgatgtgtgttctcttattgggaacactgggctttgagcttcaggctgtgtcagagtcgccctcctggattctgactcaggaatttccatgagccctgagagtttttccttcctagtgccttggcttagatagtgaaagtcaggcctgtgggtctcagccttagagagcagcctgagttcccccgaagggaggaaagggagagtcaagtgttgtttatttttactcagaaacatttcctggtaaatagatttaaaaggtaatggctttcatactattggcctttgatggtttggtgtctcatagtttggagcttgggtttggctgagaggaggtgaaactcaggaaagtgggtcaggggagggctgacagatgctgcttcagttctggggcatctgaactggaatgtccctcccaaatactgactagggctgtctctgtccgctctgtactatagtcacacctcagcgtggttagccctttcctgaggctaaccttggttaactttcctgcccacagctcctgagcaaggactgctctgattgcttctttgtgaaagctttcttcttttcttttcttttggtttgtctgtttgtttgttcttctgtttttagagagggtttcactgtttatttctgaccatcctggaatttgctctgtagactgggctggcctcagactcactgagatcatcctgtcttggccttccgagggctgggatttgtgttgtgtacttggatggctgcttggctggttctctccaccccgactccacctccatcgccctttttgagacagggtctcatgtagcctcagatgcccaaagttctgagacgacagatgtatgccaacatgcctggtttatggagaactggggatttctaccaactgaggcccctccccagccccttaatatgactatatagtttctaagacattacttcctaaaagggtgtatttgtcactggtaatgggaaaagaaaaaaaaaaaatctgtgctactttcctgattttctttatgctcacagaaaagttgtaagtatatttgcctctctgctttttaaagtctaagtacgtgatgtttggtgtttctgctccctttgagatg

SEQ ID NO: 18663 - DNA, 1228 bp, Mus musculus
ggaccatcatgcaacactcttcgaagtaggcgggctccgtgaggagacggcccagtgtttcctaggcaactccaatcccgcgacagacggcacttccgcttccgcctaggaaaagactgtctactcctgcgtctcggtggcgtctttctcccgcgcctgcacgaactgaggttttgcgtggcggcggcggcaccggcagcggcagcgtctctcacttgaacgccgcgagcggcagcttctcgtctgtgtcctgacctcggagcctacgagcagagcggcgcgatgacggaccggtacaccatccacagccagctggagcatctgcagtccaagtacatcggcacgggccacgccgacaccaccaagtgggaatggctggtgaaccagcaccgcgactcctactgctcctacatgggccacttcgacctcctcaactacttcgccattgccgagaacgagagcaaagcccgcgtgcggttcaacctgatggagaaaatgctgcagcccagcgggccgcccgcggacaagcccgaggagaactgaggtgagcgctgcccagtcttccccgtgtgccggctgcgagcctccttgctcctgcatctcgaccattccgtgttggctgtgtcgcctgacctgcgtacctgtggaggattcggaacaagtcatggagagactgtccgggtccgctccttgtgaactgtgcagaaggagtgatcccagcatcggcaagcgagggagaagactgcacgagagtgatgcgcatttcgagtctgcttttcgatagttgatgtcttcttgcctttttaaaaaaccatatatatataaagtttagggtttgctctattctttggtatggattgctgtgttctttgggaggttattaggagagggttctgtggatcaaggttttgtgagagtataaataggaaatgggggcagaagcacagggcaagtccttaagtcgtcacacacacttttatgatattatcccacctcaatagtcttcacgcgtacagtgtgtctggtcccaaagaaaccttgaagcgcggagattgcccatatccctttcctacccttccctttatgcgctaccccttacccctttttcttgatgattaccctttgtgtcttcagaaatgataaactggcaaacaagtggtatcacgtccccatcctgctcagcgccccattccccccacccctcttcccttttcaccagagcattttc

SEQ ID NO: 18664 - DNA, 1255 bp, Mus musculus
atttcctatgatttagtataaggaaagcaccccttcccttgttcccttgttcccttgtgcctgagtacacaaaacttggagacagatgcattgcacaccatctaaattcttacacactgttctgtcatggttgttaccaggatctgctgatgatggaacaggtgaaagactttgctgctaacgtgtacgaagcgtttagtaccccccaacaactggagaaatgattgttttctttccagaaaactacagcggactcatctacatcaaaaagtactctgaataaatcacctatacaatttgcaaccaaatgcctaataaaatctgttcttgagcaaagtcttcatttcataatgaagtagattcatttagcaccttactgtatttttaattcatcagcagtctacttcatcaggtgtatctaactggtgcacaaattacatcaggatcaatcatgatttcttaaagtctggatagctgatccaaaccaactaggtacttccatacgtatatggaatggaatgtggtgtcctttcacacatagaatgagggaagatatgtcttcaaaagtagatctaggagtggtggactctgaaattaggatgtttaactaactatgaagtttcctggactctgaagtaagcaagagcaagccagattctctccggccaccctgataaggcacatgtgatttgcttgaacacacgtgccagagggcttatcaccaaggaatcagtgcatttgaacccctatggtcaacttttctttactgttgtttcttcaatatttatttgcagcattttctaaagctttgttagcaaccctcagaaggttgtatatagattttcaggctaatgttatgtcgcttactcacaattattaataattacagaagtttattcatttgtgtataaatttaataactttgtattgattttgagtatgataacttgttgcaataaactattttaataaaatatagctttgtttagttaatgctttttagccattaatttatttgtcctttagtaatatttttgctgttttttttttttttgtgagaggttgctagtttaaagttttaactggtatatagttggtgctttcttataacttgtttctttttttcagaaaaactaattaaaaataaattatctcttgtctctagcttacctgtggttcttcattgagaagggcattagagcagaagtgactgaaccacgtgtcagcaatagattatctacatctgctaataaat

SEQ ID NO: 18665 - DNA, 1160 bp, Mus musculus
gctcagggactggtcggattctgcttcttgtccccggtcttggggtcaagtcagggtcagggtgttttagctttggcccttttaccctacactggcttgtcattcttagctgtggacgcgatttgttccactaagaatagtttaccagtccaaggcatatagcatcccatggttggagaaatatagcaggtaaaactatgagcacctgttcagcatctcatttaatcactacgtcaaacctcaagtccagttacacagcacggagggtttaagtagtgctctctagcgtagtatttacactacagtttaagtgattagtattagtggttgagatgtttggttcaggctgggtgcccattctcttggaaatgtatgtccttagtcgtgcttttatttgtcccaagtaatgaacactgtatggagtccccgtatgtcgttgtaactgtgtatgtccccgtatgacgttgtaactccccactgtggagacacataacccacatccagtcatggctgacgctcacttcacgttcctcccttcatcagtgcatccctgggtaccgagctgaggaggctgtggagctcctaaagaccttctacaaacaggagaacccaaatggtgagttttctcctggtggagtgtctcaccgaaacacgactcgctgtgacggaagcttcctatcccttgcttttcacttagctgactttttttttttcctttcagcgccaaaatcaaaagttcggaaaaaggattgtcagaaatcctgattctgtaatgatcaacgtctagtacagtttggagacctggacagaattcctgaccgagagccgctgacgtcgctggtcacgtttatatgttattactgtgtgtaaaaatggtgtcgctcgtcatttgctctgttaaaggaacaaattagcccttttaaaaatgtctggcaatgtaaacaaccgtgagctcttccaccaagctgaaagactatttccaggaaggggcgggattaaggttgaggtcccagagatccgcaagcagcgccgcccttcacccacagcctcagttagctctggcttaatgaagctttttgtggctgtgaagagggccaagtggtgaaatgcttgccatgcaaccatgaggattgggtccccatcagtgccaggtgggtggt

SEQ ID NO: 18666 - DNA, 1134 bp, Mus musculus
aggacaatgtctttgaggacactgtgttccagaagctacgtgctttacttcgggtttcttgaattcactgggggcaagaaaactcatgaacccatgagcatcgatattgttatcgatggataagagtagaagcagtggctttaatgtccacacatgttcaatggcaaggacagatttatagaaagtatgctctctggcctgaaggaaattgattttcaaactattgtttgaagcatccttaatatgtcagcacatagtggttaacattcaaagttttaagtcctatgtctaggtgcacagtcttttaaattatttattataatagaaaaccatctggaaaagatctgattcttgactgctcccatgaaaggatcattagaagttccatgatactttggttgctcagcaattggctattcagccttgcctgctttcatggctgacctcatgtttctttccacatatttattattttagccatcagttttccactcatcttgtcaatcagccaaaagatggggccaaccattttcaaagagtgtggtgctctagtcttgaactgtcgtcgttatgttggtagggtggtaccactgtagtagagtgggtctatttaagtataatattctttatttgtatttgtaggtggcgtataaatgtgtgtgtgctcgcccatgcataatgggtctatttaagtataatattcaatattatgtgcaatgtctctagtcatggaaatagacatatgggttgtcatgagaagaacctgggctacaacaggtgaaagatgttattctgggctgttttggagacattaagatccaagaggaagagttaccatggaacaaaacccaacagatcactattgacaggggctggtctgaggctgggaaggtggctcactcagttaagcaatggctgcacaatcatgagattatgagtcctaatctctagtgttgatacaaaagctgggtacagaggcatgcacctgtaaccccagtagggtggagacaggtggatccccgggtttcctggccatccagttctagctaaaataacgaggccaaggtctgttgaaagagcctttctcaaaaaagttggagtggagtgtgggcgtaaggcacttgatatggattt

SEQ ID NO: 18667 - DNA, 1109 bp, Mus musculus
ttaattaatgtattttaatcttggcactgtgagttattctttagaacagatgcaattagctaacatttctgcagaatgcattttcaattgtttttactaatgacaaaagtatttgtaaggtcttttcttaagatgtctaagtgaattaagtctggaagtgtgctgtataatttctataatggtcattagagttagatacagttagaattacatatttaacaatataaaataatatatgggtcattctcagtaacacaggatttctgtgttttattttctaacatttaaagccttaataaacatgtttttggggtcgggattaatatgttggcagaggtatgagctcactggtggagagagggagcagccattaacttcaaagtacattgaactgccaggaagccctgggtgctgcttcttgatggctaagaaatatctttccccatcccttgaaatataagagacaattctattcaaagtacccactgtgttcactaagttgttaaaatgcttagcccaagatttggtcctcagagtttaagtgacggataatgaccagaaatatgaaaggatgcttttggaagcctggtacatccttgttgactcttgttactagtatctaaccctttagactcccattttaataagtctgagaggtgcacccatgtgaggaatgaagactgtagaggatgttggcatccaagaacctttcgggaaggaagtagaacagagatgaaggagggctcagtgaagtcctcctttttgcctctaagtaagaattttagcagtctccagctgcagactccctgcatcctgactcttggggcaagttcccactcccggatcagctgtggtttagcatctggctagaaagcagtggtagatgcccagaggggcagggcatatgtgcccagggtggtgtggcatatgtgttgcccccttaattcctcagtctggagctgagtgatcatggtatatagggaaaaaattaaaaatccctgatggagcttattttctcactgttggaagaggagagtggattgtaagccaagtttagtttgagtcttaagaactcataactggggagaaactcttggctgccaggattt

SEQ ID NO: 18668 - DNA, 1194 bp, Mus musculus
atatccaaggaaaagtatctagccgacatctgcaagcaagaatgagtatgtatgctgctagcatctgaacactgaggaagccttgactcagaattggtcatctagggagaatgagtacagaggggcgtgctcattgggatgttggctgcagacacatttggctgcaatggcatcgaatgtctgcaactaaagtgtatctacctctcacatccacactactgtcatctgttcttcctatatctgtgcccacatcccctccctcatccccaccccctctcctttctttacccatcagcttcattctctaacaaagtgaatgtcctgtgtctctatctcgctttcctcagaaagaaaatccaactgaggaagtctgtgatttggttcccagcaggtcagggtccacccctggaggcaagctgtacaaataccatcattagtgttgcagaggaaacagacactttcaagagaagctttgtgcctggagaatgtcatcaactgtggtacaaggggtggagctctgtcctggagggaaggaaacaagccatagacttagctggatcagctagtatctttctttccagaatttgaagctagaggtacaggtcattcattcaagagtctgatgagatatgtcttggtggacttaactgtagatattccccacattagtgagaagagctgttgtttagtccgtggtaagaccttatgtctactttcactgtgcagtgctaggtgttttctttttctgttggtttctttttcaattacacttttgaaattataatataaccacgacatttcccccttcccattcctccctcaaaccttcccatatgcctgtttgcactttccttcaaatttatacttctttttagcttttttattattacatgcatacatgcatatacatatatgtaaaatatatacatacaaatatatttttccactgtctcttctgcaatatcctctgagctttacatgtattttatagatttcttttgtttccagaggaagtatggcttgtgctattatttaaaggaacacatcttcgaattgcttgaaaatcttaacctgaaagttttgtttaggccagagatgatgctacctctgatggcctgaggaccacaatatggtaaggcagtaaaatgaagcatagtagggaagtctgaggaagtaggacaagatggtagaagt

SEQ ID NO: 18669 - DNA, 1188 bp, Mus musculus
tgattgttttcatgtttagttgtatgttttaatgataaaaatgtggaggtggacttaagtgtctttccatggatgaagcgaaatgaggaatattttaatgcttaataaaggaaccatgttctgcatggattatgtttacccccccccccaacacacacatacacttttattggaggagatatttatattctagctcaaatgagggctgaagggtttagtctgtttgtggtgttccatgaagagagcctcagcagtctagggaaataccaagctgctctttgtgtttcacacaaccagatgttttggttttatttcccttcacagttaatttactaaaatacagactcctggtttattacttattgatagaaaattatatgcatatgagttatttttattagtagcaaaacaaagattggtctttttacgtaagtataaacacatcgttttgaaataggtaggtaagtaatagcacaccgtgatgtaattaatctgtgctgtgtcggaatgtgcttctcttaggggatatccgcctgaccccggaggacttcgctagagctcagaagtactgcaagtatgctggcagtgccctgcagtatgaagatgtgggcaccgctgtgcagaacctccagaaggccctcaggctgctgaccacaggcagggagtgaagcctctgttcacggaagccagtgttttccgcatagagaactaacagtccgttacactttcctcagccttcaggagcaggggactacagaaggcctcagttccccgaggaagacaatgactcctgtgtggttcagaagcatttaccagctgcctcagccagttgtcattgagtgtgtagagctgatgctagcatcgaacccgctgtgaaatgtccctgtagaaaatcatgttgggtataatatgctttcttaatttatacacactaaaggaagtttttgaaagatctgtaatatttggacaaacaaaccatattatgttgctttaatattctaaattaaacttttaataaagattaccagaatagtccgggttggagatcctgactttttcttcccttaggatttgcaaggcaaatgtgaacatccaaaagtggtaaatgataagagagattaaatgcactttatattcctgttttaatataactgtaaaaatcaaagatcacagaaggaaacaccatgt

SEQ ID NO: 18670 - DNA, 1161 bp, Mus musculus
taaaaatgtattatcattgttggagagtttaaaaacctcagtcactgattaaaaaaagcaaacactttctttaacaatcagtaaaattaaccagacaaataaggactggccatggaatgtttagaatgaagaaaaaccagacctttcagacttagcttagtggaaatgttagatgttacagctgcttagtggaaagaattggcagattttataaaattaaacagactcccacctttttacccagcaattccttttctgatacttacccaagagaaataaaaacatatgtctagaaaaagaacttgctcattgaaaacttacttataatagccaaaatcttggcacaacatagatatctacatctgaataaatattaaacaaaattgtgatgttactcaatataatacagaatcagcaacttgtagcctagaatatggataaatcctgtagatttgctgatcaaaagaagagtcaagtggtgtactgtgcatggttgcctgtatataatgtatagctacagacaagttcatagtaataaaaaaaatgaaaaatacttttaaggtatttttagggagtcaagagaaatggatcacgaatgggctgtaaaaagttttgcttagttgtaaattatatatattgagaagcttatggtttacactggcatctctttattggctctataatttatatacttaacatttgtacatctcaaattatatatcttattgcaaaagtttcatcattgaactatgtctaggcttatttggagtggttatacagcagcttactctgtttttgagcaaatgggtaaatatagaggaaagcaggtctgtcactggaagaaattaagcccaagaagagagaggcaggtggattgtgttgcaaaattaaaagatcttaattcatgcttctgaatatattggtttctattataacgtttgtgcatatgtatacatagtatgatttatgtctatagttagcaagttttcctgagtatatatttacactgggtatgtaatatgtgcaaaaatgtatacaacctagttcctatttctcaatttcaagacagtctaataacaatgaagacccagaagcagagaacaccctgagtacctgatttgtttttgaataccagtcttttctaacatgaaccagtgctct

SEQ ID NO: 18671 - DNA, 1190 bp, Mus musculus
caatggaaaagagctgaacaagagcattaaccccgatgaagctgttgcctatggtgcagctgtccaggcagccattctatctggagacaagtctgagaacgttcaggatttgctgctcttggatgtcattcctctttcccttggtattgaaactgctggcggagtcatgactgtcctcatcaaacgcaataccaccatccccaccaagcagacacagactttcaccacctactctgacaaccagcctggtgtactcattcaggtgtatgaaggtgaaagggccatgaccaaggacaacaacctgcttggaaagttcgagctcacaggcatccctccagcaccccgtggggtccctcagattgaggttacttttgacatcgatgccaatggcatcctcaatgtttctgctgtagataagagcacaggaaaggagaacaagatcaccatcaccaatgacaagggccgcttgagtaaggaagatattgagcgcatggtccaagaagctgagaagtacaaggctgaggatgagaagcagagagataaagtttcctccaagaactcgctggagtcctatgccttcaacatgaaagcaactgtggaagatgagaaacttcaaggcaagatcaatgatgaggacaaacagaagattcttgacaagtgcaatgaaatcatcagctggctggataagaaccagactgcagagaaggaagaatttgagcatcagcagaaagaactggagaaagtctgcaaccctatcattaccaagctgtaccagagtgcaggtggcatgcctgggggaatgcctggtggcttcccaggtggaggagctcccccatctggtggtgcttcttcaggccccaccattgaagaggtggattaagtcagtccaagaagaaggtgtagctttgttccacagggacccaaaacaagtaacatggaataacaaaactatttaaattggcacaaaaaaaaaacaatgtggaggtaactgaagccagcagacccacggggaatcacatacaaacttctagtactagagatatctgtcatctaggtggtctatagaaaccctctaataaatagataatagtacactgaaggttaactactgacaaataattttgacttgagaaacacatttcttgtgtgtaactgcttctgaacttcaagatattatcatacagtggata

SEQ ID NO: 18672 - DNA, 1109 bp, Mus musculus
ccttccttccttccttccttccttccttccttccttcctttctctctctctctctctctctctctctctctctctctctctctttctttctttctttctttctttctttctttcttcctttcttccttccttccttccttccttccttccttccttccttccttccttccttccttccttcccctccccctctctttcttttctgttttctgttttctttttgcattttccagtgctaagaaattagtatctaggttaacataaagacaactaaaggcatatatttcattctggttggaagagttatgtttttaatataataaaggaaaggcaaatagacatgtttgaggcctgatgatatttatttatcatataaaagttcatgattttgttagtgattaataagtgtaagaaattactttaaaactgaaagcactgactctgactctatgaaacattgtgagtaattattttttttttgagataggacatttgccactatacattctatatatttaacaccttctaggtgttggattatattatttgataaatcctggctgtggattccatgctactctccccagggttctggagtgttcctgaatgagacataaacacacagcctttatattttgatattccttaaacagcacagtagctgttctattgtctcacctccacatggttaatccatttccctcccataatcccaagttatcacttactaaattctatattctaccttggctggcctagacccctttgtgcatccctctggcccacactctcctgactctcacttggcaactattcctctctgtccttcacttttctcaattgtggtgcctcctctcctccacactctccaggtaccacagatctccttctcttccagtctctgcgtcccaaacctaagaatcctaaagttcccactctgcctgcctttcccagccatttgttgctggcatctttatttaccagccagaatcaactgggagcatgggccctccatgtggactatgagcaaacaattttggggacctaaattaacaaaaatacaagcagcataggccaaatccactacatccaggtttgagtaatctttg

SEQ ID NO: 18673 - DNA, 1213 bp, Mus musculus
catgatttctaccatttatgttgaattaatgtcagttactagaaatttatagtaaaactcccaaagacatagtttttctttagtattgaaaatattaaagaaagggaaaaagcaaagaagaagaagagcttcgtttattctaaactggtagatgacagctggacattgctgaaaaaaatcatctgacccaacaaatcccctgcagcctcttcatggaacctgaaatatcactgttaagatgagcactttcctctctccaggtgtcttcatcagagtgacatcgtctttaaaccccgcgtggcaatacctgacgcaccaccttgatgcccagggaagacagggcaacctggtagtccaactacttccttaagatcatcctacttttagatgattacccaaaatgcttcattgtgggagcaaacaatgtgggctccaagcagatgccccacatcagcaagtccctcagagggaaggctgtggtgcagatgggcaagaatactatgatgcacatggcacctggagaacaacccggctctgaagaaactgctgcctcacatccgggaacgtgggcatcgtgtacaccaaggaggaccgcactgagattcgggacatgctgctggccaataaggtgccagctgctgctcgagctggtgtcattgccccatgtgaggtcactgtgcctgctcagaacactggtctgggacctgagaagacctctttcttcaaagctttaggcatcaccactaaaatctccagagtcaccactgaaattctgagtgatgtacaggtgataaaaactggggacaaagtaagaaccaatgaagccacactgctgaacaggttgaacgttgaacatctcccgcttctttgggctgatcatccagcaggtgtttgacaatggcagcatttacaaccctgaagtgctgggcatcacagaacagaccctgcactcttgcttcccatatggagtcgcaatatggccagcgtctgtctgcagattgcgtacccaaatcttgcctgagtgcgacattccattatcaaagggtacaagcgggtcctggctttgtgtgtcgagactgaatacatcttcccgcgtgctaaaaaggtgaagaccttcctggctgatctatctccatttgtggctgctgcccctgtgggataggtgtgtttgtgtggtgggggtggtggtggagaggtaaccaggaaataggaa

SEQ ID NO: 18674 - DNA, 1252 bp, Mus musculus
gtccccgcggcaatgctgccgcccaatgtcatagacactgatttcatcgacgaggaagtgcttatgtccttagtgatagaaatgggtttggaccgcatcaaggagctgcccgaactctggctgggccaaaatgagtttgattttatgacggacttcgtgtgcaagcagcagcccagcagagtcagctgttgactcggttaacctcgcaggcggaaagaaatcaccctccccaccccacccccacccccaacttcttcggtgtgaattaaaaaaaaaacaaaaaaacaaacattcccttagacgcagtatctcgcttttcagatcctgaaagggttgagaacctggaaacaaagtaaactataaacttgtacaaattggtttaaaaaaaaaaaagattgctgccactttttcctattcttgtttcgttttttgtagccttgacattcacctcccttatgtagttgaaatatctagctaacttggtcttttttgttgtttgtttttactcctttatttcctcactttctcccgtgctcaactgttagatattaagcttggcaaactgcttaatcttgtggattttgtagatggtttcaaatgactgcgctgcgttcagattcatgagtgaaaggaaacattgcatttgttggctgcatgatctttgaagggcagatattactgcacaaactgccatctcgcttcattttttttaactatgcattcgagtacagacttaagttttcaaatatgctaaactggaagattaaacatgtgggccaaaccgttctggatcaggaaaagtcataccgttcactttcaagttggctgtctcccctcccccatatgtacagacaataatagggtgtggaatgtcgtcagtggcaaacatttcacagatttttattttgtttctgtcttcaacatttttgacactgtgctaatagttatattcagtacatgaaaagatactactgtgttgaaagctttttaggaaattttgacagtatttttgtacaaaacatttttttgagaaaatacttgttaatttattctattttaatttgccaatgtcaataaaaagttaagaaataaacttgttttctaaaagtcagtcatttggggggggttgtctttacattccacttgttattgcgagtaagctttcaaaggataataagtttcaggacactaaaacaggtcaccgtgagcttaagggaaagcaggatttaggataattgacataatgctgctg

SEQ ID NO: 18675 - DNA, 1945 bp, Mus musculus
ataatacttacaaatttgtctccgaagcacaaagctgtaattaggaattagctgtttccctatgagtctgttgtacactcaagtttaaaattttggtaagtttctattcaaattcatatttgtcttcgtgtttctgattcttttaaaataaataaaatacttgtaatgcagttctttaacctggtgacgttttctagtaaaatttcactgtgttattgttccgaagtcaatctattcactgtaccacgtgagttctttaggttaaaagacactgtggagctgtaagccacattccgttcttgttccttagattgatttctgcccctaaaaggaagaggtcttatttcagttggataacatttgcatttgatgctatgttgatgataaagtgaggactatgtatatggtcttacaaaagaagcatgagccctgcattccaatacttaccttttgccttttagtgcattaatttcacttttgtctggaagggaaaatttggctggttggagaaaaaaaaaaatacaactaagcatacaatacttgctataaaggtaaattttactttggaaatcttctgaccttaatgttttcaccagtctttgcctgaacacgttgattagaattggtctatgtcaagaaggattatcatttctattgtagttgggacagtaaagggtatcagtcacctaggagatctaacttctgtttctgatgagtaactcatagattcagtaactcatagattgactaataatttaaagtgatttttatctactttaatatctttagtcatttatttttaaagtgttccatactttgagcaagtaaaattgcttcagttttgagacaagctaatttctgatcgtattttcttcaggccatctcagctctctgctgtttctgattacctgatcacatgggaagcccttacagaggggcttctccaacatcctttaatttccagtttttgaaaaagggattcatttttctaagtaaaagaaattttcatacctttttgggaaaaattagctcatgaagaaagagttttatatgtttaaatgataaaacttaacagattgagtcataacatgctagactaccaagactacctttctgagttcctcgtgtcgtcctacaataccagtgctttttctgtgcagtctgctttgtgcctgttttctaaccttgttgatttttttgttcaagtccttgaagcagttgttgaataattttagttgggagattggggaagaggtgaggaaaaagcacttttctttagggtgtggttcccatgacaggatgctgcctaacctagttcatcttcataccttgttgactttattattttttcagataattgaaagagaatataatgaatggacaccatgaaaaccagctcaaaaatatgttgttgtctacaaagatttcttgtcaagatgtcttggattgcacttttgttgagggaagccagtgtaaatacttaaagaatgttgataaaaattgaagcatttgggttatggaatcatgtgtgatgttagagggtttctgtatgtgaaaggtgtgtattaagaataataaaattttagaaacaaatattaaactttgcattttagattttgttggaagtttttgagaaacggggatgtttggtaagaaaagatagtagagaagtagggatattctcagagtttaaaaaaatcccagaaagccattccaaaagtactactgcaactaatccaaagtgaaaattccagagtagcaagatggctcagtaaataaaggtacttgttgagtttgatccccagaccttacatggtggaaggagagaagcagctcgagaaagccatcctctgacagaacatgtatgctctggtgcatgcacatgcatgatagataaatataaaaaaaagaaaaaacagggacaggacccacaattagaaattct

SEQ ID NO: 18676 - DNA, 1443 bp, Mus musculus
atgatgtctgtttccccaggcccgtctgaattgcaagcattgtggcaagcctgtgatcgacgtacggatcgggatgcagtacttctctgagtacagcaatgtccagcagtgtccacactgtgggaacctggactaccatttcgtgaagccattctcttccttcaaagttctcgaagcttattgatgaaagctttgctttagtaatagctattttattgatattattactttactacatatcttttataggggaacattctgtgacattaatttcttttctaatttgaagcagagtttactttgtatatttgtgccactaaaatggggacttcctcttgccctttcctgattcccaaatgtcaatgtgtgggtaagactggaggccagatggggaattgtgcaggtttggtagggttttagtctcatgcagagtgtctgatggagttctaaggtagtaggaagaatgggtgccatttaggggtgggaatctggctaaactagaggtgtggtaggagttgggagggagcttttactaaatgttagctttcttgagactcactgttagttctctgggccttggggaaataaatgacaagtgaatgtacacctgagcctggacagccagtactgtattaggctgtctggactctgtttttcagcacaggttgaggtgcaattttctcccactgatagatgatttgagagtagaactgagtgctctttctttgactatttgtctaatttaacagttttcatactggaaataatatccaaattatatgacacgtgaaagctgttgctgtgtaggtgagctgaatctagcaggtcttgtgaagcaaatttggaaatgatgcacactgaatcaggcaggcagaaagacacactttggttatttgaactgtatctctagaggtggtcagagagtctacagaaaatctgtatactcggtggttttgatgggcagcatttacaggttgcattgctgaagtgctgcctggtatccagagctccttgcaggtaaacctctggcctgcctgctgtgctgcagaaccacctgtgccacacttccttttcagtatatctagtgccacatagtcagagccaatctgaagaaggaaggcgacagttagaatgatgaatagtttttattcttttaaaagtaagttcagttttgggagcagtaatgcaaaagagcatatctgaaaatagatcatcctaaagattcccatgatccctcactgttggttaaagcaaaagtagcatacagaccaagtattccaaaccaacctctgtgcaggagaatgtggaaacttcaatatgctgaagacatggcctgtacagttagaattagagacttacttcttatgaagcaatttggtattttcaagtatgatatagaagtacatattaaaagaatactaaatcttacccatttatgactag

SEQ ID NO: 18677 - DNA, 1171 bp, Mus musculus
gtttggctctcagcactcacatggtggctcacagccctctggatttggttctcgtacacacatggtgatttatagcagtctgtaagtccagctccagaggatctgacaccctcctgtggtctctgtggacacttgtagacatagaagtgagcaagacactcatacacagaaactaaaaatacataaatctaaagaaaattttaagaaagaaaaaagttaagatatgccaaattcttttcacatttctagtcaaaaatatataatccaaccactgagagataacaagtaattaatattttaatattttaagggctggagagatggctcagcctttaaaggctaggctcacaaccaaaatattttgacataccttctttcagccttaaatttcttttttttccaaccagaaagtacttgagatataaaaaaaagcattgtaattagaagaattaagaagatttaatatagaaattaagtacatgaaaaatacaaaaacaaaagactcaggtttataaattcatcttaaaagtagcctgtgttcagtggtaatcctcaccgcaagatttgatcatagtttgagactttttaaatttacattttattttatgatatgttttgtttccatgtatgctgtgtaccacttacatgcctggtgtctgcagaagtcaaaagaagtcattggctccccagaaactggaattatggatagttgtgagctgccacgtgggtgctgggaatcaaatactggtcctgtgaaagagcagctgatgttaactgctgacccatgttgccagcaccacaattctttttcttttaatttatttgtgaagaaaaatatgtttgtgattagatgaaatgtttattcataaaaaaaatctattacagaattaagaactattaacggataattgataaaggtcattaactatatatacaacactattggtcagctagtcttattctgtttccttctttagttttcccaagggaaatattaaatcatacctttagcagagtagtcaagtagaagtcagtggtagaagttgtatagttggccttgagtgaggaagcactggtcctttgtcttaccatttattgtattgagattatactgtaattccatcatttcctttccttgctccaatcttcctgtacacccttctgtgctctc

SEQ ID NO: 18678 - DNA, 1117 bp, Mus musculus
cccatacattactttttaaataataaaatatttaagaacatcaagaaacagggtgaaagaggacaatatatgggggagtgatttttatactctcagaccatttgtcaatgtctaacgatattctgggttgttataaaatgggagagggaatggttttgctggcatgtagtgggtaaaggccagagatacgatttaatagcccagagtgcatgtataacaactatctgcctcaaaatgtcagtattattgagatttgagacctggcacggactctgacaggagacaggaaatggctagagtttcaggagttattctgaaggcaaacttggttaagtgtggtctacttggcataatttggatgggagagatggtggcaaggatgggggcctggtgtagagaggaccgctgaatgtgactgcaggccttgcggatgctgctcaccttcatcaaggaaacagacgtcttattatggtgaaagtgggttctgttcacgtgttggcagtctcttcctcacgtatatcgagggcagggagccgactggttcacatacacgttgggaccttgattggtccagtatttttcaacattagttaataaaagtcacgagagagggctgagtcatctggagaaatgaggtagagaacaaagaacagagggcctggagctgaagcaggaaggggctggcgctgagcgcccaggcgagctgtcctcttgcaggagctctgatccctgcccagccctgggaagtgggcatcgggcgttcttatcaacaggagcttgggaggcaggaagttacggaatagtgaatgtccttcccttcccattatcccttgccaccttgaagctggttcttcactggagctaagtcactccgacttgggttggcttgcttttgagttatatgtggtctttttcttttgaatagagaagagtttaatttataatgaggcctcaaacagtcacttcagagagaggtagattcttgtgattgttttctgggtgcagactgacacagttttataccattatatattatatgtattatatatatgtgtgtatataatgtgtatacaagtgttctattagtatttagagagactattgtgaaccattatac

SEQ ID NO: 18679 - DNA, 1115 bp, Mus musculus
tttcactgtgcctctgtttagtgtctgttttgatgacccatccactggtgagagtagggtgttgaagtcctccactattattatgtgatgtttgataagtgatctaaacgttacagatgtgggtgctctcgtgtttgaggcatagctgttcagaattgagacatcatcttggtgaatttattcctttgatgagtatgaaatattcctcccattttttttgactacttttgcttgaaagtatattttattagacattagaatggctattccagcttgattcttgggtccatttgctggaaaacctttttcctgccctttactatgaggtagtgtctatctttgttgctgaggtgtgattcgtgtatgcagcagaatgatggatcctatttatgtatccagtctcttagcctgtgtctctttattaggaaattaagtccattgatgttgagagatattaatgtccagtgattgttagttcctattattttgatggtggtggttcgttctctctctctctctctctctctctgtatttctcttgttttcttttttgtgagattaatttcttgtgttttgttgggtgtagttaccctccttgttggagttttccctctagcatctctgtaggatgggattagtggaaagatattgcttaaatttggttttgttgtggaatatcttggtttctccatctatggtgattgagagtttttctgggtatagtaatctgggctgacatctgtggtctcttagggtctgtgtgacatctgtctaggcccatgtggccttgagagtctgtactgagaatgcaggtgtagttctgacagttccccctttatatggtacttgcttttttttcccttgcagcttttttttttaaagatttatttatttattacatgtaagtacactgtagctgtcttcagaagagggcatcatatctcgttacagatggttgcgagccaccatgtggttgctgggatttgaactctggaccttcggaagagcagtcgggtgctcttacccactgagccatctcaccagccccccttgcagcttttaatattctttctttgttctgtatatttagtgatttgattattatgtggcaggag

SEQ ID NO: 18680 - DNA, 1580 bp, Mus musculus
tgcttctgtccaggtgtgacattttattggaattgcatttttgtttgcttcattctaagtatcactgcaatcattgtttttatattttgctgttgcagattttacaaatgcaagttcactcttactaaaaaataaatcagaactctgctctgtggggtttctaaacgtctgttacccgcggaatgttctactatgttttagctgtttttatttctgtttctaattccctagtgacattttaaaagatttctacatctgggaatatgtttgcttggctttcttagcacatttttcataactttctgttgcttacataattgctatcattatacatatgtttgtttatatactcaccatgcaaaaacatattcaataacctgaccataacagtatgtagtttgctgacaacttattaccttgaagaaagtgaagtttactttgaaggagaagtaccttagcacccttggtccgtgtgagcgatagctagaccctgcactgaggagagctgtttcattgcaggaccagacgacagtacggactgtagcctcagctgcaactgccaatgagatccgtaggcaatccagtagttatgaggatccctggaagataacagatgagcagagacagtattatgtaaatcagtttaagaccattcagcctgacctaaacggatttatcccaggtgagtcgttgaaaacagaagctcttctagatgggctaggacagaggctccattgcagtattgacaagcagacatgttctgttgatcctagattttagttattgctcacattatttgtctaaaaggactttatagtcagtgggaaatagaacgtaactttttttttaacattatatataatgttacatctcccagcctaagacaatattacctcctattcttggatctgtgtgttcagaacaacattaaacaaaactgtcttcatatttcaggatctgcagctaaagagttttttacaaaatcaaaacttcctattcttgaactttctcatatctggtaagtatggtacatcactagttggttcatgtgggttgtttcaaaaggatttctggcaccttaaaactagaactggacttgacctctgtagcgctggtggagaacccagtatggctgaggacagtgagcctctctttctaggaaagaaataactgagactagttagagaaagtcttgggagctaaaactaaagctgtgtttgttggcttcctcctgttgctatgtactgcatgaaaaaggtggtcactttgcctgtgtcagtttctcctagttctcagcaagtttatatctagctagaaaagtaaaacagtgcttagctctcgtgttatatgtagagtaagactctccagatggctgccacataattggaattcatccttagaacacaaattataaccctaagttacttttcaggaggcagagatgggaggattgtgagtttaagaccagcctggttataacatattctgtgctgcaattcttggagttgtttaaatgtgtcagagctaataaaaagcagttagtttttttttgatcttattaaaaaaaaaagggggggggg

SEQ ID NO: 18681 - DNA, 1191 bp, Mus musculus
gagagataaaagtgcacagatttgttgttgggctaagttggatagacactgaatttggattattaagtattcgaaggctgaggcagggcgatttctgaaagtgcccagcctgggctctagcattagacctcgtctcgagttaagatgagaagggggaacaggaacgctttcctctttcccatggggcctgcagcagacttggagagactttttctcaatgttatttactatttcactgtttctaaatgcatggtctattgtctaaagtaggttatggtgtcagtcataaatgttttctattcagtatgtcttagtatgatgagggttcattattacatttttataatttttttttgatgactaaacaaatctggacattttgaatttgattttagataatactatttgtgtgattatatggtctatagttactggtagctttctgtaaaaggaaagagacaatagctgttgagtatacagatggttttcttaaactcgaagtgactaaaaggtaatgggctgttacactcccagtgagcctaattgtaaagttgtcatcgtcctcttgtccgtactcttgcctaagctttccttcagatgtggtaatgaaaggttatactttaaggggaaattatggcagaatttagctcttaagtagccatttatctgtaagattgcatttggtctcctaagaatgcacacagtctgtctttctcatcacgacctagacagcgggaagttaccctgaagcagttacacggtcatttcctccagagtaccgtttcactgggcgaattctaacccagtcattgctaattccattagaattttaggatgtgggttttttctttttatatgaagagtgctgtgagtattctgatcggggttacattgaatctgtaaattgcctttggtaggatggtcgtcttcgagatatcagttctaccagcccatgaatgcagtcccttttctagtgtctttctcagtctctttcttcagaaaggaagacagagggccttccgctcattggttagctttactccaagatgttgtgttgtctgggatgctgttgtaagtgggtgagggggcctggtctctgtctcggagttgcttgctgatgtgtagaaagacgactaatcttagcgcattaactttgtctcctgctcctttgctaaagctgttgctttttct

SEQ ID NO: 18682 - DNA, 1148 bp, Mus musculus
tgtgtatatattgtatatgtgtaagtagatgtttccctcagagggcaacttatcatttttaagaagcagatttagtaatagttataatacaactttgatgaaaaaaatctgtactgttactaagatctcaaatggaatttcctacaattaatgttgacttatcattccacctgttttaagaggtatgatatttctttgtgtacctctcttagaaagtagctcttcccgtgcatctcctgtgtataacacatactcaggcagctgctcgatgtgctctcgtggctgcattctcacttcctagcatggggaggggcctgattggcagctctgtcttgtgatctggcatggccctgtttgtagtgctgatcgcagaggttgacttgctacaaattgataaataagctaaaacgttattaattccagaatgtcttgcatcttatctgttatattttattaaatatgcatatgtataagatatgtgcacgttcataatggactcatctttcaggggtcgcactggcaagtcgcactgaatgctccatgctgattagaacctgagctcctcggcttctgtggatcagtgttgtaactggggtttgagcaggacctgagttaagcactgttctggtccggacgaccctgtgcgtttctacctggttgccatttccgtcacctatgctctgtctcctttacggtgtcttgagtgttaattctgtacaagttttaatctcatccatagagattacattaaatttttactgtacatttgcttatgaaggtgtttgccttctgtttataagatggcccagcacagataagtatgaagtgattatgggaattacaaactacagaattttgtcgatcctgcgaaatgcatcttgcagtgcagcctctgaatgacttgctaagtcttctccagtgcatctactgcatctcccgtgctgacgtgtctctcctctgtctgtccagcagtgggagacatttagtgaacgctcttcaagctcacaaactctgacccaatttgattctaacattgcaccagctgatcctgtaagtcaatcacttagcttgcttgtttgaaattaattttattaacccaatatccatcattatggtttttactgatatgcatgattcagtgtagtgct

SEQ ID NO: 18683 - DNA, 1102 bp, Mus musculus
tgcattcctttctatataattttaatgaggtatttccatgtatggctccattacagcctggctcctggctttcagaggtttttgagtcattgcttgcttgccagttactttatgtcatggattggtcattaacattataagcatttcgaaaatgctatgacacttcttatggtaacctcatcatttatttaactgtgtgttgtaaattaggactttagtttcatgtttatctgtcaagtgtctactaaatggctttgtggaaaatatcaaaatgaaacaattccttttgagcagtaggtatgcctatcttgactttttagtaaactttgtgtttataaagatatctgcacaatgaaaattagttattattccacatgacgggctatatgcgaaagtcaacgtatgtgctttgagaatttagtgaagttaaccctaatacagatggggccttagtttgtattttaactccttgcccaattagccttagaaattcatttttgattgaaaaataagggccgtataataggaagaggaggagctgataatctgtgtttttattaaattcaacacccaagtaaaacaagtttcattaacgtaagtccatctactaagaagactgaagcaggaggaccataagtatgagctttgcctggacggtagagtgagattatgtctcaaaaataaataagtaaatacacatgaatgataaacagtgaatcatacaagggatggtttgaggaaaataattaagcattctaaatatcacccatttataaatcgtatcaattctatataattcttatatacctgacaaagtttatctaaatacttttgtttaataaatattttgaaatagtttaaatcagattattgcttgaatagaaagtaatcattctaggttcttgtattagggaaagcattatccacaaagtgttaaggattcaagtctttatctttgtggttgaaaataattgaggatatttcctttttgttttccgtgacaatttaaaattatgcacgtagtttgtttaattcagatttcagttacactttaaaactccatctctacaaataatttttccaaactgtttcaatagctgtt

SEQ ID NO: 18684 - DNA, 1886 bp, Mus musculus
tctcttctctttagccatattccagatcatctccctggtaatctaccccgtgaagtacacacagaccttcaggcttcacgataaccctgctgttaattacatctataactgggcctatggcttcggatgggcggccaccatcatcttgattggttgttccttcttcttctgctgcctccccaactacgaggatgaccttttgggggccgccaagcccaggtacttctatcccccagcctaatgtgggaggaagagcctgagaaaagcctgctgcaagatggatctgaggaggaaactgttctccaaggcacaaggaacctacgtttgggcaatgttcatatgatcagaaatgttagaataaatgctaaagaaaattcttcataattagtgttaagtttcatgtatgtcgtgtggagttaaaaagacttgaattctgtttgctaagtatatgctaatttttccttatgtcaattctataccatttaagcttcatttgttaaagaatatgcctgtgaaacttgataaggtagaaatgcagcagcctctcatttaataatctgatggggcttctgtttttccacatagaatgggttgtttctgctaagggctacagaggaggaaagtcactggcaaaacttccatgaccaaatatcctgaaattagtttgtttttttttaaaagaccttattttgagttttcagttacataaagaagcagaagcagattggtttcctaagtgagcatcatttgtgagaatttttagtcagtgttttgaacaattattgtttttctaagcttcatgttgactttctctgatgcgtagaaaagtgttctaacgtggctgaggttaagccgctgtcattactgaaatgctaagaattttcctcttttcccgtagtgtagaggggtagggtgtgggcagaagccgtgttagcacatctgtagtattgtgtgtgtatgcttagaaccagcgtagaccggatgggaggatggactaggcctaatccctcccaactggtggatgtgaagaggtcaggtaggaaggcacaggagggtcaccactgtcacagcagtgccatgcagacatcctaggagaagacatggcagtgtttcttctcagtgcttcttcccttaactgagctctgctcacagacagctagaatagattttaactgaaacagaaacctaaatgtaattaaaaacctggtcttccttggtaagcagacttaaaatatctgtatagtacatgcaagtggaaaatttgggaatgcgtgtctctgaatacataccggaagggctactattacctttttcttaccatttatacttacctaatggaaacgagcttgttttaactatcagaacactattttgtaaggtgctgcaaagacagttgaagttttcattaccaatttccccaataaaccaggtgttcaaatcctgtgtctgctttgtagtttttgtttgtttgtttgttttttgttttttggttttttttttgctgttgttgctaaatttccatcctgagtggggaattaaaagtgttttcaatgctagcatggctgcctttcaagaggtccaaggagcagctgactacagatgcagatacttttacccaaccactggactgaagctggggacccctgtggttaaattaggggaaggtcagaagaaacctaggaggaggagggccacctcataggaagaacagcggtctcaactaacctggacccccgagatctctcagacactgagccacccaccaggcagcgtacactagctgatatgaggcccctgacacatatacaggagaggcctgcctggtctgccctcagtgagagaagccacacctaaccctacagagacttgaggccccagggagtgga

SEQ ID NO: 18685 - DNA, 1194 bp, Mus musculus
agagcccctgtccacagtgacagctccagacagccccgaagcagcagaacaggaagaactttcaaaagaaacaaaggctctggaggctggaggaagcacgtctgccatgaccccagacagccctccaactccgacacaaagacgcagcttttccctgttaagtagtaaccagtcaggcccttgtagcctcaccgcctatcactcccgaaacggctctgacagtggcctcgtgggatcgggcagctccatatcggacttggaatctctcccaaacaacaactcagaaacaaagatggcagagcacgaccctccacccgtgagaaaggcccccatggcctccggttatgacaaaccgcacatgttggtggacgtgcttgtggatgttggggggaaggagtctctcatggggtatagactcacaggagaggcccaggagctgtcctaaggtctcccgaggcctgctggtggtaaagaaactgaccttttaggcagtttttctgcattgatttcatgaaagaagctatacattagctaatactaaccacatagaatatcagacttagatacgtgaataaggatcctgtgggcactgctgggtccactctgcaaatgccaagactatcaaaggaacgtattgtcgcttctggctccttcccaggtgggctagcatctgtgagtttgcctcggctagccttgcttcctacagccgccactgctcctccaccctgatcatctcacaggacagggtggaccgggttttttttttttttcacacacctttgtatatgtaagttcatgtatataatatgtttacatgtttcactttgaactgaaagctactcaaagccagccgtaagtctatggtagaatgtgatggaacatgttggtggaagcttgtacaatagaacacattggtgggagcttgtacatacttttttatggagcattacttacgattttttaagtaaaatgttttgaaaccaaaactcacttggatattcatttattgaagcacacgggcaacctttcatagttatttggcatattttcatctattatttgatgatatatattaatgctttaggattatttttagcatatatatgtgtgtatatatatatttaaattttaggactaagagtaattctaaaaataatctcttttaaaatgggtcggggtggagagacatctcag

SEQ ID NO: 18686 - DNA, 1146 bp, Mus musculus
ggcgacacgtgaacagtcaacagtgttccttagtggcgctgttagagatgggcttacctggtgtctttagaagttgaggctgaatccttctgtaattgatactccaggattggctcttctcatcacttatcttcagggtgcatggctcaggctggtttgggatcctcctgcttcatccattgaagcgttggaatcccaggcatgccccactgcactatctcagagaggtcccagaaggcaggagattgtttgtagttagaagctaccattgtgctgtaaccctgcttgggaatgttgaggcaagcttgtactgagttagttgtacgttggcattcctccattttcccagaggacagctattctgaccacatttgttttttcctttttctttttagtttttttaaaaatttttttaatttaattttttttggggaggggggcggttcaagacagggtttctctgtgtatccctggctgtcctggaactcactctgtagaccaggctggcctcaaactcagaaatctgcctgcctctgcctcccaagtgctggcattaaaggcgtgcgccaccaccgcctgacctctgaccatgtttttgttttctcctaaaaataccactgggcaccctggagttagctggcgaggcagacacatgaagcaatccccccttttctgtttgtaaacgccgtgctcttcggattgttcttggtttatttgtcagatagttaggcgtgtgttgtccaaagagaggtctgtgtcagaggataagccacattgcgtttgagaagattttccaagaacgtaaaagaagatttggcttaagctctaacttaagactctcaggcttcctgtgcgtccagtcttcagttacctgacgcaaacctggggaaatgaactggagacttgggctagggagaagctcttgatgacttcatctttactttatgagacttttcttttcagcacttgtaacttcccagttacccacagaagagcctcttggccagcttttgaactacaatatatatctgatatatggtcacaggggaaattcctcctgaatccagcagatcacaaagctatttatgaatgtgaccttaacatccacttccatctaagttaaggataaccacagaactctgtatc

SEQ ID NO: 18687 - DNA, 1220 bp, Mus musculus
atgaagcagagctgctttggttgttctgtattcatctccagcagactccggcttttctcccttcgaacgcggagagacttaaataggatcagaaaaggccatagcttgaaacatggaagaaatacattttatgagggcttacagctgtctcttcctggctgactattaggaagctgtgtttacagctacctggtcagcttttcggctcttctgtgttattacaaatagtcaaaaaagagactataattgtacagtactctgctaactatttcttttggttgtaggaaaaatacaaggcataattagtgcatgcaaaattaattttaagaaattatatgaaagtataaagtgcatttcattactgtgttactaatagggtagcttgtctgagttttatttatattgtcatttatacagccaatctggtttttttattcgtccctgaaagtctttaataatttaaaatgagcaagaaattctcacagatcctgagggttccacattacttctgtggagctaaagattctccccacttttggttctagatatccctgggtttcctgtgtgccacctgaactctcctggcacgaccacggaagattctgaacttcctggctggctgagagaaaatggagctgatgaagacactataagtcgggtaaaggggaccgatctgtgggactgtggtgtttcagttctgtacctactgcagaggtgcccggcacattacctcaggcacagaaaacacgctgctgaacatgtcagagccagtcccgccctacacaaattcatacattaggaaagacaaatggattcccctgatttaaaaaaaaaaaaaaaaaaagtcttaccttagcaaattctgacacagttttcagggatctgtgtgtgtgtctgtctatgtgtgtgagtatgtgtgcctatgtctgtgtgtggagtacttatttgtgcacatgtgcctctgtgtgtatgtgtgtgtatggtgtgcttgtctatgtgtgctgtgtatgtgaatgtgtgtggtgtgtatggtgtatgtgcatgcgtgtgtgtgtgtctgtgtggtgtgtatatgagtatgtgtggttgcgtgtgtctgtgtgcatgtctgtctctgtgtgtggtatgcttgactgtgtgtgatatgctatatacatgtgtgttgtgcatggggtgtgatatgtgttgtatatgtacatgtgtttgtatgcacatgtatc

SEQ ID NO: 18688 - DNA, 1167 bp, Mus musculus
tgaaattgtccctccaagtctcaggccctagtgtgataagaacttgactctgtactttgtgtcgcatatcagagcatcgtgaaacatgaaggttttactgagctgtaaactgacaggtctatcagccctttagattctcaacattcatgaataactagcacatgactactcagtatgagtgagttgtgctttttttttaatcaaaagacagtttgcttagtgaaatctaaaatgtttcatcatgtattagagcagtgcgtgtgtataaataaattccataatacaaataattaggtttgttgatttatatcttacttcaaaagatccacagggattcataaaatcaggattcttaatgagaaattgcttttcttcagtcctattcagttttaaagggtgattccacaaaccatttctgcactgtaacctgttaggttatgcaagaaggtttttaatgtcttcaaaaacataataaaataaaatgaccagcttcttccttggtgctgcctacgaggtggctgccatctgttttgcggcatcatggctgccctccggcctctggtgaagcccaagatcgtcaaaaagaggaccaagaagttcatcagacaccagtcagaccgatatgtgaaaattaagcgaaactggcggaaacccagaggcatcgaccacagggtgcggagaaggggccagatcctgatgcccaacatcggttacgggagcaacaagaaaaccaagcacacgctgcccagcagcttccgcaagttcctggtccacaatgtcaaggagctagaggtgctgctgatgtgcaacagatcttactgtgctgagattgctcacaaggtgacctctaagaaccgaaaagccattgtagaaagagcagcacagctggccatcagagtcaccaatcccaacgccaggctacgcagcgaagaaaatgaatagacggcttatgtgcatgttttatgtttgagtaaaatcacaaaacctgaaaaaaaaaataaaataaaatgaccaaagagcaagtaatatgacaaatagccaaaaaggtgaaagttaatatttaatctttctgcttacttgattttatctaacattaacaatgaagggtttcatgattttctgtaacagcccatataaggttaaagattaacatttttatgtagcatc

SEQ ID NO: 18689 - DNA, 1237 bp, Mus musculus
ggctcttaagacagttatagaccttacttgcctgcttgcatgtttcctggttctagctttagttccatagtagaggtaattaggaaaaatctgtccataagccagtcttcctttaaaaatggcatcacagatatagggttttatcagaaccattggtctgtagtcatacaaggctgagactgtccacaatcggactgttcctatgtctttagtcaaaactgaaacaaacaagtagtattaccttccaggtctgtcagccgggcacctcacaggtttgcagggagaaggcgagttgaggatcttggggctgggcactttaggtaataacgtcttctccccacttttctttctgtcttctgcacctgcctctggctctcttcacctgctcctctggcactcttgtgtgtaaaaccaatcacctgcactctagttatccccatttgtcctcgttcagcatcttgcagccccatcatcatgcccttcaaagctgcacactctagaaacccagtggaccgaccaaaactctttgtaacaccgcctgagggctctgcacgaaggaggaccattcatggactagcggtaagtggtgtctggagaagccggtgtgtgggaatcggtgctgtgtctctgcagagtgggctctgccctaaggtgggctctgggtacaagatcaggtgacagctacacatcaccccacccattataaacccagctggctgtgtacctctacccctcactgcctctcacttggggattttgctctccctacacatttgcaactgttcttcactcaagcactaatgagtggcagacctattctgctgggacctttatacaaataagtggttgggaaacattttcaaggtcagaaattatgttgcctttgaagaaaaatagacctggcttgcagcctggtctcaaccataaagctggcccaacactgaaggtagcttactcaaacgggtatgcatgtctatgtatgcctgccacagcccatatcttaaaacaccatgaaggatttggaaacagtttttgttcagtaggtacctcttgtaaggcatatatatatatatatatatatatatatatatatatatacacctcaagtgtttaaagtgaaggatagataatatctgtaccctaaccatgctgtaaatggagcgaggtcatctgtctctttgaatccttcatctttgtttaaactgtgagcttatgcgctgtagttgggagatgtgaa

SEQ ID NO: 18690 - DNA, 1777 bp, Mus musculus
gttttctaaagagttcctgaccatcgtttttaaaagacgtattaaagccagctaaagacagcagactcagtagctttcctgatcgttttcgccaacagaaagagatggctccttaatctgataccctgagatggcattttccagtgtgtttcttcttagtaaatcaattttttttctttgttctttaaaaacacaaaagagcattttattataaaaagaaatggactggcaaggcgtgattatcacacagatcttttttcatttttaaacttcagtatataagattagcaaaaataaaataccttttactatgtaacacttgacagtgggtatctctttgccctccaggcagagtgagcggaaggtatttaaacaaattggattgtttaaatattactacctggctctcgtaaacacagctcgtcgcgggcatcctgcagaccctgctgccacagccttctgagactcctcttacagaactacactggcaagtttgaaaatgtgtaaacatttttttacagcaagaaaataatttgctgtcctttttgttttctgtttttgtttttgttttcctactttttggagaatgggtttctctgtgtagccctggctgttctagaactggctctgcagaccagactgacctcggactcagtctctgcttcctgagtgccgagatcgaaggcgtgcgccaaccccgcctggctcagccgtcctcttaagtgatatgtttataaaagctttttttcagctagataaattaaaacaaggcagggtgcagacatgctctagcagacgtctccgcatgccgccgtgggagcgtgaatgtccctgtgaggcgctctgaagttgtatgctgctgccacccacagtgagggtaggacttctctccctttgccttacgtgatcacaaatgatgtgggggaaataaatatttaatattcctttagatcaaagaatttggttctgctcgtttcagagcaatgaaaaataagtgatgtcacgttgacgttgggggacaaggactgacatagatgtccttggtgtagagggactgtcagcctctcctgtcttatcattcttcactcctgctgctcagccctgctgtataaacttgcactttcatttgctaatataaattcaattttattttcccacttacgagacgaccaatgagagatggagacaggagcgccaagggcaatggtgtatccctcccactatgatgtattggttttatactaagagcaattggttaatctacaagatttaatgtgagactatttattcatctattggggttcttttaaatccaagcatacaatctttatcaacagtttgtaaaacattgttaaaacatcagtttgtggggtttccctatttggttgtccttatacatctagatattgtattaaaaaaaatctgttcagcaaacttgttctatttatttaaatctaccaaacataaaatacaaataaaatgtttgacatagttttaccgtagggttcctgtggtttcacttccttcaggtaaatacacacaggcacacacacatcctgtctgcacagagagcctctttccgtcatgagactaatcttcccacttctaagctacacctctgccccatgattgatttctgaggcttcagattactccccacctgacttcagtgccatttccaaggatgtgggaatgcttgtatatggagtgggtttatttaaaattcaaaatcatcattgtactttggctaagttgtctttttatgtttatatgttgg

SEQ ID NO: 18691 - DNA, 1753 bp, Mus musculus
agtctggttctttaaagggtaatttccttcctcccttttttatttaacaaatgatatttttttttcaaataatatccgcagcacagagaataggagcctattaagagttaatactagtgtgtaatttttctctatgtagtcagctttgctgagtatcagtggctttttgctctgtgtaattccatgtaaccccttttccctattagcagtacatggtgtcatttaaatttctcttagtatgacatttagtgacagcctagacgttttatacaatcttgtgttggatatattggtaccctttccctcatttcctgtgcctactttcccagggcctctcattcattgcttatcttggacaaaagctttaaacataccagaaacagtaaactttttcaaacaaatattttaagtatataattttaccttgtatatgttttattcagccagatgtatttaaagtggtaaaatgaagtattttgttttttaaaaaaaattgatacttatttcatttttagttctaggtctcgttccagaacatattcgaggtctcgtagtagagatcgtatttattctagagattatcgtcgagattacaggaataatagaggaatgagacgaccttatgggtacagaggaaggggtagagggtattatcaaggaggaggagggagataccatcgaggtggctatagacctgtctggaatagaaggcactctaggagtcctagacgaggtcggtcacggtccaggagtccaaaaagaagatccgtgtcttctcaaagatcccgaagcagatctcgccggtcatatagatcctctaggtctccaagatcatcatcatctcgctcttcatccccatatagcaaatctcctgtctctaaaagacgagggtctcaggaaaaacaaaccaaaaaagctgagggggaaccccaagaagagagtcctttgaaaagcaaatcacaggaggaaccaaaggatacttttgaacatgatccatctgaatctattgatgagtttaataaatctgctacttctggtgatatttggcctggcctttcagcttatgataatagtccaaggtcacctcatagtccttcacctattgctacaccacccagtcagagttcatcatgctcagatgcccccatgcttagtacagtgcactctgccaaaaataccccttctcagcattcacattccattcagcacagtcctgagaggtctggatctggctctgttggaaatgggtcgagtcgatatagtccttctcagaatagtccgattcatcacatcccatcacgaagaagccctgccaagacaatcacaccacagaatgctccaagagaggaatctagggggcggtcctccttttatcctgaaggagatcaggaaacagcaaagacaggaaagtttttaaaaaggtaagaatccaaagtagtgcgtttatattatagtactaaattaaaaataacattgtgctttgtatttaactgtttttacttgttcctgcttgataattatagtttttaattatttaagtggtttgatgtttctattctttgttttattagccattttcgatcagttcacaactagcagttataaacaaggaaaaaaggccttgtttataaaggcctaagatagccaatattataaacagttttgtgttagagactttcctttttgctttagaatgtgacctttcagaaacaacatagtcatgtttacctgttatgtggtaatatagtccagc

SEQ ID NO: 18692 - DNA, 1135 bp, Mus musculus
gtagtcagttaatgtgataggacctttagccttttctactgggttttggaatgggaatactttacatacttttcagctatgaagattgttttacttaatagaatagtctataagttggggagtaactgtttacatatatttattaaaaaatgcagtttgggatgtactagcctcactgtaaaagaaaacagccgagataagttgcctcaagcctgtgctgttatgatttaccatggaaacgcctcgcctgtggattgatatagattcatagctagatgtaaatctcagtgcaggcttttacatctcttaggcttgacataatttgcatgacagctgtatgttagagaattggtatctttacaagaaagctgttttattgatgtttctttttaaacctttttatagcacgatgacagagatgatggtgtggattactgggccaaaagaggaagaggtcgtggtacttttcaacgtggcagagggcgctttaatttcaaaaaatcaggtagcagtccaaaatggactcatgacaaataccaaggagatgggattgttgaagatgacgaagagaccatggaaaataatgaagagaagaaggacagacgcaaagaagaaaaggtaagacattttctgagttttcagtttatttagtatgaactttgagggcaattaagttgataacttttagaaatattaatattcactacccacagatttactgacctttaatttccttttccttttttaggaatagtctcaagattgcaacagggagcagaacttgacacttacatttttttaaacctgatttttgttttcaaataagaatgtaagcattttacttaaactgtactgtttgcaagtagtttatagaaattttgttttaagtcttcaaataccttgaaaaaaaatagactgtatgttgaaaattgtattgaaataaagtagaaaatgttcggtatcatatttgtaactatcaacttttaaaaacatttgactgtttttgttacatgcattgtatttctgctttgtctataagaagtggtcaagtccaactctgtgacaactcttaacttgcctccctgttaataagtctttgattctgaagtgaacgttagcttttctcaaacccaca

SEQ ID NO: 18693 - DNA, 2002 bp, Mus musculus
agtaaaatcctgattccataaacctggttgtatttaaaacaaaaaacaaaactacaatgaaacttgggagtccttttcatgtagaggaaggttatcctgtagcataatgtatgcacacggtcatctagtacctgattggatagcttacatatttattggatgctttgaacagctgtatattagtccataacataactacaagattagatagaggcaacatactgttaagtcatatttaagtaattagttttctcttaatgttgccaatagaaggcttgagcaggaagcttgtagcactgatctaattgtgtgtacaaccatcaacttaaatttataaaatggcctttttcttggcgtctattctttaggtaaatatgtttctttttctttttctttttttttttttttgctatttgtttaatagcttttaaaggaataaagcaaaccagtgctaagaattttttttttaaagctagctacattgcagcagagttgttgtgtatgtgtgcatttaaagaagataatgcttattctgttaatgcacacttttaagttttgatgattttttacagtgttttagaccttgaatagctagtggcttttgctaaaaacttttggcaacaaaattaaactaaaaccaaagtcaacatgtgaagtgtttatcataagatcctcaggagtcagtattgcatgatgctccccttaattgtcacactgaaattatgtagtaaatcagaaaatacctgaaaagcaactttattgcttcaatctggatataagtagttatttataaatagttaagattaatttaaatgtaaaaacgtgcttaattccctaataattttcataccattcctattttatatgaatatccaccttcatttcaacagttccttggttacacactcaatctttacgtttgtactgcttacctttactttctccacaacagagacaagcagattggttgaaccttatttaatgaggagtaacaggctgtttttaagtgtttgcctgtggctacttccgttctatagctcaagaatatgccattacatcatagtcaaggggttgctatgagaactgtagtagagaataccactgtgagtcttctccttttcagagccaaacacaaagcagcctgcgtgcattctttgaggtgagcatttaatcacacacttgatgacattacaaagctaaaccatgcctcttggtaaagctgcttgattacaagtgccaggaaaacgactgttatccactgcgtactacatgttacatgctgcatactgtatgttacacactgcatactatgtgttatacactgcatacacatacttcctttacccagagaaaagaaataaaattgaaccaaaggattttcccagaaaaaaacaagaaagcagttttagaaggccatgactcaattcttaggtttgtatgcttaaacatcttaggaattttaatataaaaagaaaaggctttcccatttgcactctatttcaaagaattgttattgttccctttcgttaaaatcagtgttgggaattaaattataatttgaggggaaaatatccaatgggaatgaatgtagatggctaaaggactcttcctcagtgtggtgtatatttcaacagggacccttgtaaattgtcatatgccaataaaatgtcctaagtggtaatagctggtctctgtttgcctgacgttgaggctatcgctgcttgaactctacccagctgacttccatgcctgtttctagaatttggaataccaacttgtatacatttgatatgtggtttgataaatgtttttgattctttaaaactgtcttaattgctttcttgtcttctccttgggaagatgagaatgcatacagtttttagtgagccattctataaagcacagcaattccagatccttgaaaagaataggcaccaaactttaatcctagcacatggggatgccaggttgtggtcagttggcgctgcatctctcatttgta

SEQ ID NO: 18694 - DNA, 1147 bp, Mus musculus
cagatagaaacatgatattgtgacttggacctcagatacttcatttgatatccaactttctgaagtttttttctatgaaatattttttgtccttttttttcttaaatgaaagtgcaactacttaggattgtcatagtatgaagattgttctcaggatatagagcacagctgagacatgcttgtactttcagctattatttgtatcattcctgttttattattttacttaggtgactactgaaactttcctattagaaaaacttaaaattcttgacttttgcaagcactatgaaatatggttaaggtgatttttttgatgatgaaaatcttttaagggaccatgtatatattggaattggattaatacatacattatttttatacattatatattttttaggctttaaggtatcctctttaaaataaacatatagaatgtatttggaagtatgtttgcatgttatttaaatagttttaccagatctctgacagttgctgtagagtgaataatgagacatggatcctttcttcttgttcctggtggctgtgtgcccagcactccccaagctccccagcggccgagccgtgagagtgctgtgctcagtagaataaggacacttctacactgtgggtcctcagctagagttaggagtcaccagagaatattttctaaacgtagttaactgttgctgcttttcagactggctgactaggtttctgagggaggcccttgggaatgtatttctagatgatacttaatgtatcaagtgacacatatgtctgcttctcctggagaattgtgcagtaaacaattttgatgtcagatatatcagaccaagttaatttctaataatcagaaatatcaaggacaagttactaatcagggatagttgtcttttgcctagaatgataaacaatagtgttaatattccatgcataatgttatttcttcgtaaatattgagtagctgcccactaaacatttttttttcctggcagctacttcactacttgtgtgtgtgtgtgcgtgcatatgtgtgtgtgtgtctctgtgtatgtgtttatattcagattgatttttccagtagtttcagttgtacatgatactgccacattcagtattttactgagccacaatacaagtccca

SEQ ID NO: 18695 - DNA, 1099 bp, Mus musculus
ctgttagttctgtttggggccagattaaaagtgaagccttgtgtactcaggcccagacgtctcacattcttatagttgtgtctcagagtggcttagatgtttttgagaagaatcaccattaaatccaacaagagtctgtatgtaacacatgacaccacaatgctctctttgcatcctttacaaaagtacacagtgagagagtctttggttaagtccagcattgaagctaacaaggaagcaggcagttctgggggaagcatcagtcgaagggcgactacgagggacaggaggggccgttttctaagaatgctttattgcagatggaactgtagcatgaagaaggtgaactgggtaggcatgcaggtgattggcttaggctgtagaccctgttatcacagtgaaatcatttaacttgtatgtcctatgtatctataaaatggaaaagccaggtttgatgaagtgaataacttagttttaatgaaggatggaccacgtatgcagttcttcccattgtactggggactcagggcgaatcattaactatgcatctttagaatgcacacctcggatggccctggattggaggctggatgaccatggctcttgatactcttagaatgaatggcatgtttgaatttggcctcatagtggtctgtcgaaagcagtgtatacatagatccactgagctgggaaccatttatttcacctcatgtgtgagtggaaacttgacacacttcatttaccagattgctaaggagaagggccagctggaagctatgtcacaggaagggttaattccccactggtgcaaacctgtgactgccaagaagactttgagaggagagttataaaggggcaaggtatcagctggttaacagaagggcgggactggggcaccgaggcctgttctctactcctttgctgctgcactgtgagatgtactgcaaatacatctattgcacacagtgaatggatttccacttacttgggaaggatatgatattctctccctctccccctgtgtgtgtgtgtgtgtgtgtgtttgcttatttgaatgcttatatgtatctgtgactgagttgttggtgtatttctgacc

SEQ ID NO: 18696 - DNA, 1105 bp, Mus musculus
tcatactctagctcatagcttatcttcatgcttttaatttttctatattgtcctcatctcctgtatttatgggtatcatagacctcacagtatctaatgctctatgcaggtaaaacacaggaaatgttccagagaatttcagcagattttcatcttgttcatcagttgatgaatcaaaaatagtttagccatctgctaactgaccagacagttttagtattgtgaaagggtgtggtcacagaggtaggtagaggatctaggtagaatgtcggaataaggctcagagcagaaaccaccttgtttcttaatactgaaacttaacagtcagctcaaaatttgaaagcgatctggtgggttgaacatgggtgtccagagggcgggggtttcccagcatgggcctcactctatctcactgcgtgaagtctgtgtcaatcaatcacagtctctaatttataatatgccatatgtttctggaaattaattgtccttttatattttattccttaattaggaaaatcagttatatctcggtcatcccagagtgaatctgaaattgtgccaaaagttgctaaaatgactgtatccgggaagaagcagaccatgggatttgaagtgcctgggtaagacttgcaagcccctacccctttttaaaatctccatggcctcctatgggttgattagagcagcctgttcaattctacataataaagcactggaattcagctatctcatggactttgtgtagagtaaaggacagacagggctgagaagttggttttgattttagccttgtctttgaatgactcaatagctacaatactgctttgtggatggagagatgactcagtggttagtcacactcactggctgcttttgcagagtactaaggttcaaatcccagcacctacatggaggctcacaaccttatggaactctagttctaggagatctggcgccaccttctggtctttgcaggcattacacacacttggagctcataaatgtgcaaatacattaaaggaaaaaaattaaaaagagaataaaaatactgtcttgaagttttttgcaactatgtgtttgtatgtttgcatatttgtgtgtgtag

SEQ ID NO: 18697 - DNA, 1170 bp, Mus musculus
gtatctataaggaaagcacagagtaaatagttctgcaactgtgctaagctctctgttcaccttcgcacagtccatagcttaccatcaatgacttgtttctttttggtgcttgagacagcatgtgccaccatgtccgagcatgggctaccatgtcctagctgtctttcttagactattctagtagactcgaattttcagatttcatgtctcagcactatgtctagacacaggagccccagcctttgggagtgtttgaacatttgctatatgtatacaagttaatcataatatatagtgtgtcagatatattacaatgtattctagttctttttttttttttttaatttcaggcttttagtcacagtgtttccgattaacaggatcctctcagatcaaatgatttgaaatatcatttaacatacagataatttattagaggtttctggtagtctgacagcacacaatatataatactgaagttgggcattctacacagttgcgatcctaatactctagaggttgtggcaggggagcctaagttttagaccagctttggctacataatgaaactgccttaaaaacataagcagacagacatggacacacgaataacactggacaaatatttcttgaataatggaacatgaaaaactaaaatgtataggttgtttaacctgagttcaacttttttctgactttttgttttgtttttggtttttgtttgtttgtttgtttgtttgttttctgagacagggtttctctgtgtagccctggctgttctggaactcactttgtagaccaggctggtcttgaacttagaaatccgcctgcctctgcctctgcctctgcctcccaagtgctgggattaaaggcatgaaccaccacaccctgccctttttctgacttttaaatgagcaaattacttttcggattaagtcaagtatgaagggcagacctagcaggcacacccccgccacaccagtgctctagaggctgaggcaggcaggtcaccatgcgttctaggctgactatgtcctgagtgtcaggtcagccagtgactcactacattctgtctcagaaagagtccagacatatataacagaaaagcatataacagccatgctttctcagaatgatagaccctaaacaatgaccatgcggatggcccag

SEQ ID NO: 18698 - DNA, 1149 bp, Mus musculus
ggcaagctgaggcagcagatagacgtgaaagcggaattggaaaagcggcagggcgggaagcagctcctcaacttagtggtcattggtatgcccttgttctgcccgccgggttagcaggaccgcggcaggaggcgcccagcctcttggagcagtgtaggcttaaataaagcaaagaggcattgcatcataatgcattctggtcacccagggtgcaatggggccgcgttaccaaggagggcatcatcggacttagcttgtggcagttttatgtagtgaacattttgaaaatgggatgcatctccccccccaaaaaagggaaactttgccctctctaaaactgtgtgtgcagtcctcaccccctcccccatttaggtgttttaaccttgatagaaattggtgtttgttatactaaatactgacgcacgctgttgaattagtgttgcaatgcctcaatgtgagcatctgaaatgtacctagtattaaccctgaatcaattttccttaggtcatgttgatgctgggaaaagtactctgatgggccatatgctttatcttctgggtaatgtaaacaaaagaactatgcataagtatgagcaagaatctaaaaaggctggcaaggcttcatttgcatatgcgtgggtcttggatgaaactggagaagaaagggaaaggtagccgctatgtttcaacgcttttagtctttaaaataagtgggcactggaagttgaatgtgtaacacataaatgcatcagcgagacgttcagaattccttttgtttgtcatactttattctgtgagaagaaggttaagagaatatttatcccaaacccaacaaggaggagcaccggcagacagcagtgctggacggtgaggctccctgagtgggtcttgctgtgagccagtggagttggcagttgttgctccctcggcatatccggttgttaaagtcggatctgactcagtcttgcaccaggttttaaaggaactgcccagcaggtccagactacaggctcacaattccattctcatgagacacacactcacagtccagaaagaaacaattgaatctatcttgtcagttattctttcagtgtctctcggggcttagtgctagtttaggtggattctagcagaaggatgaagatactcg

SEQ ID NO: 18699 - DNA, 1099 bp, Mus musculus
ttggtatgtatgctgtggccactcggtgttatgtgctgtagacgcgatatgtgttatttagagttcttcatgcgaggcagagtgtatatgaaaacgcataggatttgtagtcagagaaactaggttctcaggtttgaaatcatgtggacatttaaagtaatactcaatgttttgaagacagattagtgagtttagaacttgccctacctgtcttattgactacttgaaattaaatgaagcaatgtgggaaatatggtttataaatgaatgatatgaatggtagtcatttattattagtatgtacaaaataaattctttttctagaaagaagagagagtaatgggcatggtggagataggaaaaaaagtccctttcaggtttgagggtgctaggaatggataccaggccctggccgagctctgctcgtgaccttctgctgagcagtgctcacagcctataacttaaaccacaccttgctttttgccgtgtttttctaccagattccttcaagccccctcagcgctcgattgacaaaccttttagattatgtgtgtctgatgtcttcaaaggtgagtgctgttctgccggggtggggtgggtggggctgtctactctgtatcttgttttctcggactgttatattgttacattatatctggttgattctctttgcctgaatgtaaggatggacagcaggcacttttacatcacacgcccagtcctaggctcctgaacacccttcagtttacaaccacttcccactatatattcacctgtcaggggcaaagagctcgaagcttcatctttctgaccttgaacacattggataattcgccattcttaacatccagagtaatgggccggcaagatggctcactgggtaaaggcatttgccaccaagccttaacagcctgagtttggtctctggtcccacatggcagaggagagaatcaatccctgaaggttttctcctggtgttcacacctttgcactctggtgattgactgcacacagagaagctaaataaatgtactcttaaaagtaatgaagtatgtatgtatatgtacatacatgcacacaccgtttaagatcctgattg

SEQ ID NO: 18700 - DNA, 1173 bp, Mus musculus
ctcctttctctccctccgcctgcttttcacgaactactgtctgtgagttcccctaactgaggctgttagcatccctccttagttctctgtctcccctgtccctcgcccagagcctgcaccccagcgtgctgctgtggattcttgggtgcacagtgtgtgtgttaagccacagttgaggccctggagtgcacttgcctttgtctttctctttactggcccatgctgcttacagtgaacagctctgtttccttcccttacctgaggttaaagagctcctggcctttactactcagggaatatctgcaacggaatgagccttcagtttctgtaatctgaatacttttatttgcaaggaaaactggggtatgtgggtgctctatttagcagaggtgttaaagctgacctgacgattgcttgctgttcatttgacttctggccttttataactatgtgggaaacacatgtattaactacctggtaacgttactgtgtgcttcacgtgctgttggtatgttttacagatcaaggatctggcttttgtgtgactggtaaaattgaagctggttatatccagactggtgaccgactgttagccatgccacccaatgaaacctgtactgctaaaggtactgacgcgtctgcagcatgcttctgctaagaggccttgagacagcagatttctgcttcagtagtctagttacaactccagagtaaatatcctcttactgaaattgtaactaactgtcaaaatgatactaactgttgaacgctaaagtgtaaaaacattaaactattgttttcctgttgtggcatatgtctatgcgtacacataacattctaagcctggcaacactctcttttgggcactgagtcatgaaatctggtgtaaaactgaaccagccacatacataccagacaagttcttgtaaaattacaatttgtagaagaaattaaagaatccaacccaataatagctagtcagtagcaggcagcttgtcaccatagaatctgtagttcacaatcagttaacagctttggtgatgtttatacctatacgtaatacctttgattgcgcgcgcgcgcgtgtgtgtgtgtgtgtgtgtgtgtgtgtgtgtgtgtgtgtaaggtagatagaggaagacctaagtaagagaccaacacgaaaggcttact

SEQ ID NO: 18701 - DNA, 1405 bp, Mus musculus
tttaaataagaggagaaaggtgtcatgtacttacagtcacatgaatgggagtcctgactttatgtagtagaagaagccatatttctttaacttactggctttcagtgactttaaataattcatccaaaaacttgaatgaatgtagttgcaaacattttctgaaacatatcttctgtatgtgacaaaatacaatggcatttgaaggggatacctagaactgaagcaggaaatctcagtagttcagatttcttctacattctcataagtaatatgaatattttatcttaagattaaaaagctaggtatcaggacaggggtgggagaaccacccatgcactgtcactgcagttgtaaagtgtctcatcttcttctttattttacagataaaagagtgacggtccggtcctcatctcaccatgcttccagaggagcgagtcagcccctggggcactcagtggtgcagctaaggaaacagcatgcagtcatgattgttagatgagagacactaaagtacagttagctgccaacaagtattaaggattactctgcaaaacttcccagttgccagctgccagaggccagcactgaactgccatttcttccctttcggggtggcagtaaatatgtttgttgtgctgagacttgtgggaggtatcacaagacacttaactcagtggactcgacttccagccaaaccaaatccaaacgctgttctgtttccattctcctgctgtgtgtgttctaaggaagccttgaaccttagtggggcttggagagtccgtctttgacctggtgctttttttagttaacactaagaaaagatttactgaaggtaacagtgaagctgttttgtgctgaaaataaaaccgtccatcaagcctgccttctggagtgtaatgcgaagtgacagaaatctgttcttaagtaacaaagatgctacttaagttgagaagccagctaataaaatgccttagtttgaatgtattgcaaaaatgtgttttatttcttagacatctctgagggagtctctcccccctcagcagctgagactcaggcgccgggtggggtctcttcaccacgagttactgactgatgcgctgcttttgctttctatgctaatggtgaaccaagcttagtcagcctcttctaaccagatcttggggttctattcctttggaattggttattgaccatgtctcggtcatgtctatatcgaaaggctgtgctcctttatgaataagactctgattttcttcaaagtatcagcaacaaacttgaagggttattgatttaatggtgatttgttgggccatttctcaagtcaaagaaattgaggttatctgatgtccttagccgagcctgggactgaaggactttattgtagacatttagaaattagaaaagg

SEQ ID NO: 18702 - DNA, 1100 bp, Mus musculus
ccccactaagcctcagtttctttgtctctcgcagctgttctaccatctccagagggagcgctgcttcctggaaccacgggctcgattctacgcagctgaaatagccagtgccctgggctatctgcactccctaaacatcgtttataggtgagccaaaggttcaaagctaccttgaatgctggagagggaggccaggctgagcctttggagtcctaaaataatgagatattatgtgcactttggtcacctctaacaattccctagcatgtgagttgtctcaactgcccataccaagagggtggtgcataatcctaacagcccaactaaggctcctttctgtgattggctgtggaacaggagtggattagcaatcttcttaatacccaagcaatctttacagagggtttgtcatgaagtcaagctaacctacctgtgtaactactttttcctacagagacttaaaacctgagaatattctcctagactcccaggggcacatcgtcctcactgactttgggctctgcaaagagaatattgagcataacgggacaacatctaccttctgtggcacgcctgaggtaggcagtctgacgcagtgcccggtgtatacacacaggggaccagtggacatcacaaagcacagaggttttaactaagaagcaatccaaatacacacacacacacacacacacacacacacgcacgcaagacgaggtggggaggggagccagttgaccctggctcttttcaaagcacatgtttgctgtgcggactgccaggttctgagagctaacccctctctctggtgtcatttcagtatctggctcctgaggtcctccataagcagccgtatgaccggacggtggactggtggtgtcttggggctgtcctgtatgagatgctctacggcctggtgagtaacacacagcatcgtgcccagaacacttctaagacatatgtggacttgctcgtgcaggcttagctaccgtggcttctctgtgtcagaagccttatcaaaagctttagtaaaggagacaactggctattttacattttataattttataaataagtcttttggatcttttttcaatagtctt

SEQ ID NO: 18703 - DNA, 1197 bp, Mus musculus
atgcttaaattaaaagagttttgcttctggtgaactgataatcactagaaaattctgcctctaggtatggctaatgtaactatacattatataaaaaaaatttttattgtttctacttctatacaagaagccaagagttttaatctttcagtgtatattgtttcctaagtggaaagtattttattaactaatgcttcttaaagaaagtttaccttaaatccttgctctcacccaaaagattcagagacaatatccttttgttacttacggttttagtttactacaaaaggttttacaaaaaataaagaaagcttttataattgttattaattggtaattaaaaattagttgtgcccaagacaattctttggcttagttgtgcccaagacaattctttggccaaaaaaaacattattgtaaagtcatttttctcatcctcccagctgatcgttggccgacgtgtacccaactggcagctgtgtggcagagtcttaagacaggcagtttcccctgttccagcacaaataatctagttgtgtgctgtagatggtgttttaaaatgctgaacaatcaaaccttaatttgtatattaatagtcagtgccatatctctgagctcacaattgcttaaattgttcatccctcagatactattaattctcaaatttacaattgcttatgcatatttctagttaataaataaataaattatgcacatgtgactcttaataacttttcaagctttctagttacaaccactccttaagaaaaatgattgaaagtgcaattagtcactgcccctttacagccaagtatttaaaatgttttgtcaacaagttattaattcaaaaggttaggtattgtgaaattttaaaactttaacttcttaaaagacaaaaaagagagaaattgtatccccttacatactatttagtacattcccatgcacagtatttaaatcatatctttattttcaaaatttaaaatttaaatgtcaaaataaatgctttgtagtatcttaaaaggatctacttattggcttatagattaatcctaaaacagctaccttattaggaaaagaaaaaacaggttctctccacagaatgctacagaagcatattacttcgtgtgacgagctggcaggtaagttgactcagtgtcctgattaaaatgaaaaaaaaactaaattcatgtttta

SEQ ID NO: 18704 - DNA, 1151 bp, Mus musculus
gtttgtatatatttgtgtgtatgctacatgtatatagtatcttttcatgctctgttaccaaatatcaattagaatgttctcctcgcagattggaagtaaaaaccatgtatataagctctaggtaactagggtagaactccacaggtaaatgataatgtttgtgttactaatttaatatgatagaaaatgttaaatgcgtttgaaaagctaagaggttgtagttttgaagagaggccttttcctgtctaggtggatctgcagtagccccgtaacccttgttattctggaaagctggctgtagatgaacgagccagcagaggttcttaactacccttaggtcggtgctcaaggctatgctggtcttgtcagaaattgactgacattgtgttttaacaagaagtggctcgacttgacccaaagcctctggcaagctggtctctgtcctcgccgtgtctgagtagtgcatgtgaagggtgactggaggattaagagaggccactcttaaacttcagttccatgagacagggcctcagccgtgcatgggctctgggtggaaaggcatggtcggacaggtgcttagtgtagccaggagtggctttacctaccaataaactaggtggagtcaaaacttagattctctgtacagacgaaactatttcccaccaagctctgacttactgttgtatttttgaaatgtttgcaaaggcttgtgacatgtgcaccatattacagaccttccaaggctaacttaagcactggctgggcagtgcataggagtctgtgttcagttctgttttcttaaagcctcctcatcccctgcccctcagctccttcagaacgtgggagcaaaggtgagctttgcacttgcttttcccataattcattgtgactttttaaagccttcaattttttaaaaattgtttttatatttgggttttggtttttttttttttttttttgcttgttttaagattatttttaaaaaaccagaggtagaagtagacggctttaaaaccgtgaggatttaccacttgttttaacagtgaactcctggtttgcagtgttcagaaacatgtatgtgaggcagaaacttgggtagggaaggtgcagatccattcgctgtaacatgttcagtgttcagtgacctgaaa

SEQ ID NO: 18705 - DNA, 1184 bp, Mus musculus
gttatggtttggttaatatatagaactgaatactatatggttgtatacaggttttagaaatttttatttcttaatattctaaaatagggccacaccttattagcccaaggctagccctaaacctggggcagtccttctgcctcagcctcctaagtgcagggattcacagcacagaattgaatccttttgttaaatgctagggttttgtattgtgcctacaaggactcagagccacaaagtccagtccttgagtgtgatatgcgtggcttctcactgtaactagagcacacatgaaacatgggggtgattcttgcatgtaaaagttactggtttttaaggattgaaagttatttaaagataatttttttgcacctactgtgacatttaagattatttgtggaaaatggcagaacataaaatttcagtgactattttgttttctctcccaggatgtgatcttcgtggtgggaaccaagtttctaaactaccccaatggatgcagacagtgatgttgcattggacattttaattacaaatgtagtctgtgtttttagaacaagatgccatttgaacttaaggaagattgctttggagggagcaaatgtaatttataagcgtgatgttggggtaagtgtctgagtttcagtgtgtgcactctctagcctgatctgaccatgctttgagtggtactgttgtattgtgcagatgaattgtgagcaccttgttatgctaggtgtaactgggcagcatggagccctgtagaaatggcccttctcctggagattacaggtacagataagagataggactgactttgcatcttggtggctgtataccctagttcaaaccctactttaattctgttgtatgtaaatttcctgttcctttttagttagctaagttatatttttaaaaataagttgctaaataaaataagttgtgattcgtgccgggtgtggtggcgcacgcctttaatcccagcactcgggaggcagaggcaggcagatttctgagttcgaggccagcctggtctacaaagtgagttccaggacagccaggactatacagagaaaccctgtctcgaaaaaaaacaaacaaaaaaaaaaagaatgtgattcgtgttttaacctacgtgtaagattttgttttattaaacctctttaatctatttaaaagcattagtg

SEQ ID NO: 18706 - DNA, 1995 bp, Mus musculus
tccaagaacaactagttgcgtgtttttgaagcaactgaggttcttgttttcttggcattttctcgaaagcactccgagttcccctgacatggctccattcctgcaccatgtcccgacagtgtgtattggcgtttgtctgtgtaccacatgcttgagctacaggaaggtgtgagctgccattcgggtacagggaattgagcctgggtcctctggaagagtgtagtcagtgctctcaaccactgagccatctctccagccactgatttcttctttctcaagttcaaccatactcccaggagaactaccagcaattaaaacattgccccttgaattatagcattacttcaagaaaaatattttttgaaaaaacaccaccgtgtgtgttgtaaaggttttttagaagaagaatctcagccccaaatatgaggtctccaaattgttccccaagttcactgggtggtgttcagctgctgtggcatcccctcactgacgtactcaccgtgtcgtcttcttgcttccgcagcgcaaatccaggaaaactctctgcattatcatttttatcctcgtggtcggaatcgtgatcatctgtctcatcgtatggggactgaaaggctgagccccgagggcgtggacgactgcatgatgctgtctgagcgatgcaggcagattcttgcgatcactttctcttatcgttatcttgaggctgttgtgtaaaatgatggttccatactttgccatttttactagggtggggggattctttttggattcagtctgatattttctaatacccaaggcttttctaaacacccttactggcacagcttccctgctttttagttcaacaactgttaggttttgctcacgttgtatatgcctttcatttgtaatttatttattgtaactttttgactgagttttgggaattatttgattggcgtgtatactctgcctgcacctctgtaactgtgtaacatgtgtaacatgattgcattatcttatttaaaaagaaagcccaagtttaaatttcatttgtccagtaaatgttctcaataggaaacccttaacataactgtttgtgggatgttttatccgctgtggtccacagcagtgcagatcgttattgctctttcattattggattgttgttttcgtctctgaataaaatcagtgaatcttttcctgatgtgtatgtatatatgcatttgctgtggattacctagtaaagacagtaaggataggttgtttttaacattatggactgtttaatccaatgcatactaaagaaagcttagttactgtattgttcagtgaaagttggaggaagtggctgaaaggtccatacctgcatctattctgttcagatgctaaagattccagtctcttactgcactgaaccactttcaccatatggtctggctttgtggccattataccttccctcgtgcgccatggaacacttcttaggcctgtatctttgggtcctgtcttcacaaagtaatgttcccatagttacagatttgggatttcattttatatttagtttttgacacttaagttttagagtttatttagatgccatttttttattattcttcattcaaataggaatcagacgtctgccaatgaacacacttgtcttttttgaatcaatgttttaatgcactaatatgaatgctgtaagaggggttatcttagtttatcatttgtgttttataatgttcttacacagcagtttgctaatgatggcactgtttaatgtggctctgaaacctttaaatgggaacaagtgaaatattaacaaaataattgtatctttgcaagcagaataaagatgattctggagatgtctgctaattctgagtcccaagaactctttccctggagcccaggcttcccagacatttgctgctgactatgcaccatggtgggacattccacatatttctgctgggaggttttgttttttgttttttttgtttttttttaaatatt

SEQ ID NO: 18707 - DNA, 1168 bp, Mus musculus
caatgacatctttgagtccctgtactacaggaagatgtacggagacatggcgtaaagccaggaagtaagggacacgaactcattagactataacttgaactgagttgcatctcattttcttctgtaaaaacaattacagtagcacattaatttaaatctgtgtttttaactaccgtgggaggaactatcccaccaaagtgagaacgttatgtcatggccatacaagtagtctgtcaacctcagacactggtttcgagacagtttacacttgacagttgttcattagcgcacagtgccagaatgcacactgaggtgagtctcctggaacagtggagatgccaggagaaagaaagacaggtactagctgaggttattttaaaagcagcagtgtgcctactttttggagtgtaaccggggagggaaattatagcatgcttgcagacagacctgctctagcgagagctgagcatgtgtcctccactagatgaggctgagtccagctgttctttaagaacagcagtttcagctctgaccattctgattccagtgacacttgtcaggagtcagagccttgtctgttagactggacagcttgtggcaagtaagtttgcctgtaacaagccagatttttattgatattgtaaatattgtggatatatatatatatatatatatatatatttgtacagttatctaagttaatttaaagtcatttgtttttgttttaagtgcttttgggattttaaactgatagcctcaaactccaaacaccataggtaggacacgaagcttatctgtgattcaaaacaaaggagatactgcagtgggaattgtgacctgagtgactctctgtcagaacaaatgctgtgcaggtgataaagctatgtattggaagtcagatttctagtaggaaatgtggtcaaatccctgttggtgaacaaatggcctttattaagaaatggctggctcagggtaaggtccgattcctaccaggaagtgcttgctgcttctttgattatgactggtttggggtggggggcagtttatttgttgagagtgtgaccaaaagttacatgtttgcacctttctagttgaaaataaagtatatatatattttttatatgaaaggcttggctgttcattcttgtaaacttttcttggttttccc

SEQ ID NO: 18708 - DNA, 1183 bp, Mus musculus
catgtgtctgtttggtgcccagacaagagtgtcaaattccctgaacgtggagttacacagagttgtgagctgccatttgggtgctgggaactgaacccaggggcagctagtggtgttacttctgagccattcctctagccccaacatttcccacccacccacttcttatttgcatgcataacatatccctacagaaaagttcaattccccccccccccccaaagactttgtttttccgcagtagtttctattattccctggctctcggttcaggttgtagtctgcaaatgttctttcccaaggtatatttgatgtgtcctcccaaccccctcctctccaccgccgcccccacacccccagcaaacatagctgaatacatccactcccgctgctgctgtcgacctgattcactaagaaaataggaagagggtaaatgaaaaacagtcgaggaagtcataaaccaaataaggcaatgggtgagccgcaactgtgggtgtaagttttccccttttctctctttcaacagggagacacatcatctcttcctcccacagttccagactgtctgcgggctgatgtcagggttgctccttctgagagccaaaaatgttccttctatttagcagacaagaatatcacccatggcttcctctatcctggttagtgaaactcttcgggagcggctaggaagccctcagtccgcggatgtggcgtgtgcgttaaacatatatttcccacccaaatgacctgcttcggtctcctaagaggctgcccagaggtggcacaacggcttccttaaaggctaataaatttttctgcgggaaccacagattagctgtaatcaggcccagctgtggagagagttcagcaggtttaagtttaattttacaactgaagggtatttggaaagagacacaagcatctaagaaaacattatctctggcacaccgccgaagctgaggtcctcacagagaaggcagctgcttcgtgcaaaggacaaaagctggcctgtccacttggttgtgtgtccaacagctttgaactgtaaattaaccagccaaaataaatgaatttcatgctgttttttttttttttttttaaagtgaggatgtctcctggggtcatataaaaatcagcgtgattttttctaaaactaaagtctccccaccccgctctgttcatc

SEQ ID NO: 18709 - DNA, 1181 bp, Mus musculus
cttcttttccttcctctcttccttctctcaaagattagcataaaatgattgaagagactttgaatttaaacttgcttagaatttctgtttaggacttagaaaaaaggaacttagagttgctaggccagcctgtaacgttcaggctttctttctttctttttttttaatatttatttatttatttattatatgtaagcacactgtagctatcttcagacactccagaagagggcatcagatttttgttacagatggttgtgagccaccatgtggttgctgggatttgaactcaggacctttggaagagcagtcggcgctcttaaccactcagccatctcgccagcccacattcaggctttcattactgcctgactcaaggacacttagttttataagacacataaacacagaaggaggtatttgttctgccagaaccaaatgcacaccaagttcctcgcctccgattgtccagtgttccttttttctgtatccagtgacatgaacttcgaatcttccttttaggctttcttcaagcaaaataacgtgccccaggaaagccgttttaatctgaagaagaatgtggaagaagagtacaggaagtggaagtcaatgactgatgaaaacgagatcatcacccagttctctgtgcagggcttccctccactcttcctctgtctcctctggaagatgctcctggagacggatcatattagtcagatcggctacaagtaagccagaagccccgggtttcagtctgcttggcagtcagcgttgtccatgccagagctcagttctcactctttgccttgtagggtcctggagaggattggggccagggccctggtggcccatgtgagaacatttgcagatttcctggtgtatgagttctctacgtcagcaggaggtcagcaactcaataagtgcattgaaattctcaacgacatggtgtggaagtacaacattgtcacgctggacagactcattctctgcctggtaagaatacgtttctaagcctttttaccatgcagtgatgggattgtgtgagtgggaggccgcgtgctgacttcctctgtttggcctcagagaatttcaccgacttatgctgtgcttaagcttccttaaagaagaaggactttctggattccctttttcagtgcattttcagtgattagtattatatt

SEQ ID NO: 18710 - DNA, 1189 bp, Mus musculus
tactacaacatggatgattctgtgctaagtgaattgtgtgggacatttaagatacttaatttcctagaaactgaaattaggacaggttactatgaatcccacagttaaattaaagttggccttggctctctctgtcggtggcttcactaatacaaatgccacagagctacatcatacagtgaggaccaattcatcccatctttggcatgattgtttagactggattctcgtgaggatctccagtctgtagtttgcttctctggatttcatttctgttcctagaaatagtagcttgctcagttgatagacagtgaaaacgtccaatcccttcatctgaatctccatccaaaatccggagccagccatctctgcccagcgtccctcaacagaaaagttactaccaaatacaatgagtttaacaacaacacatattgatcatgaatgtaccatcgtttataggatgggaatatcaataatttctcttcacctagactgtgagactataaaccccatccaatttgaattgtatttttactgcatttactgacagccctttctcttattgtctcctacaaaatgtaaaaaaaaaaaaaaaaaagaaaaaaaaaagaaaaaaaaagaaaaaggttacatatctgtcaaatactgtaccataaatttatatatcaaacattctgtgctgtatctattgcttctctttccctccctccctccctccttccctccttccctccctccttcctttattcctgccatctgatgctgctatggactgagttatgtgtgccccctctccttgtgtgtcaagtattcctataatgacagcatttggatataagatctcaaaaaagggttaattaagtcattttagtggatctgtttcaatggtgtttttataaaaatggaaaatcaaacacaaagtggggaccatgggcacctactgagagaagatggttatgtgcaacccacagagaggccacagaagaaatcaacctgcctggatctttatcctgggtctctagtccccagaactgagaaacaacaaattcctgttgttaaactctgtccctcagggaccccttgctatgcaagccctggcaaagaaagattggctgacaatttcatctctccaggaacaagcagtcaccccattacagagccaacacacatatttctagaggagccaaaa

SEQ ID NO: 18711 - DNA, 1197 bp, Mus musculus
ttgatgtatttgtcatccatgtctgagttgaacatactcaggagaaggcttaaagcctcagaagctcactatttaatgtaaagaatgcacctttaaaaacaagactgtccaaaaccaaagcaagccaaccaaaccaaccaaataaacaggaagccaggcatggaacccatgtccacccagcactcgggagacagaggcaggtggacctctgaggtcgaggccatcctagtctacaaagacagtccaggatagacagttttattacacagagaaaccctgtcttgaaataacaagaccaacaaccaactaaccaaccaaacaacaacagcaacaacaacaaaaaccaagccacatcaaaacaaacaaacaaaaaacccccaaggctccgttaaaggagtagtaataacctctctatggagattcctgtgtattgagttcacttagccaggttgtttcggttttcacattggagtttaacaaataacaatttaataatacttgtttatgtttctggtctgttgcaggaaaactagattccggtacgtgtgaacatatatcaggagaagaggaagtggcacgagaactggaacccagccctgtaggttccctgacagacatgccgtttgctgctgtagatattcaagatgactgtggaagtaagttctgtattcaaacacaagtgtttagaagcagtggacactacatttagttatacattccctctttaagttaattcattttatagatgtatcatgcttttgagtgctgacagttatctggtactttgttatccaaactgtcaaggataatgttaaggcatggctcacaaaattttggaccagactattctgtggttgtttctgaaggtcacggatttggcagatcatttcatggtttacaataacccactttagttctttagaaccgcctctgatttcagaacctatcacttcatgtaataaatggttagtggcatttgggtgtatgtaggcacttggctttgcgttgatcagatctatctctccgctagtgaaccagagaggcattatcagttcagttctgtcagtcccttagagctttgtctacaaagtttatgaatcaatacttgattgaaatgccaaactagaaagtttctgtcattgtgaaaacagaaccatccataatgactgggactctctcctctaccaaagtgacaga

SEQ ID NO: 18712 - DNA, 1157 bp, Mus musculus
caatgataaaagccatgtggtttgaaattgcgtattttattactagtcaattttaaaggtaatccctgtcttttattacattaatttaattttttaaaatgaatccactaataatacaaagctgtgaataagtgcaggattatatgctgtctctgccttgtttgtgcttacactatagctaatgaactgaggcattccttagtctgtcagttttgttattttgttactaaagtcatttcaagtggttaccagtcacttgactaaagaacttttgagctcctcacaaatcatttccatgcttgcacaaagcattattttatatgtaacattggaagtagatcacacacacaaacacacacacactccccccccctctctctcacacacacacacatacacacagagtctctctctctctctctctctctctctctctctctctctctctctctctctctcccacacacacacttcctctccctctccctctccccctcacacacacacacacacacacacacagcctggatcatccttttgatacactgtgcctttttagctctggctttgaaaactgtagtgacatgcagaatgaacgtgtaaaggaactattaactgctgaagcatctgctgatactgtaggaattcttgcaagcactgacagcctctgtggccaccacagacacatgccacaggacagtgtatcaaacagcaggggatacgaatcatttgcatccttttgttaaacaatttgtgattgtcgtgttgaaaagtatctggctaaataccatttattaaaaagcaacacagcttgtgttctacatgatatccttcaagtgctaagtggtcagaatcttttcagtcatgcttacagagtatctgaacaaacagctactgaagagaaagttcaggatttctgttcagtttgtcttcagtttatatatgtaattatgaaaaaaatctagacaaatattgtattaagttctaaatgaaatctttcttatctttagcaaatgactagttctatgagcatttttctagcatttttagatacatgtgtcagcagctaggtttgagtaatgttagctaaaacctcatagtcattaatatgtgtaaattttatgtgataaaaggagtccagtttctctccttaaaag

SEQ ID NO: 18713 - DNA, 1161 bp, Mus musculus
tttcttcttcgcccttttcacactcgcctgaggtgcattttacttcatttccccaccctgctactgaaagctcatgagacgggttttcattctgggggcatttaggtatcttttcctccacttattagtaaagtcactgggagaaacatcaagaaacaatgaatacgattatagagcacctctcatagactggggggaaaggccagcatgttgagaactgttgaaagcactgaggcccagagctgtagttattcacagaagaaagcctcacctaagcagagccagctaagagctttgcagagctcaagtttcaaaacccaaactccaggtatcttctggtagtttattatttaaaacagcactcacatgcccgaccacagttgctgcggtaagtgtgttggaatgatcctctggaatcctgagcaagccaaacctgtctagccattggaggctcagtaacagttctgccactggcctatagtgagctggagatgcgtcccttagagatgctctgagtaccaggcaccttcatctctgcaggagtctgtagttaaatgaacttgcttataagagcaggcatgaggttttcagtttactctccgcaactcttgagtcttcagtaaaattggaaaggtgattctttgatctattgatcacacttttacctggcatgacatgcattttgagcaactcagacatacagttgccatgactttgagagtaaccagtgacagaggctgtagcctatgtttgtaggaactacagacgattgtatcgcttagctttggatgtccttggttgctgggacccatgatgtgactgatgcctattaggaaaacctctgagtacagttagtgtcttgatggcacaacagttagcgttccagtatggtcagaggaccagtgcacatctgcattcagtgtgggtgatattttgagtaaacagtaccgctgcctggaactaaattattttttgttaggtcactaataggagtgccacaaggatataaacttatctcactgttttatttctgtaagtgtaaggtagcatgaagcattgagcctcctaaaagaaccctgcaccccagttaatactggactagagaaatttatgttactatatctctacttcaaattgaggtattagtaactttctggaatg

SEQ ID NO: 18714 - DNA, 1736 bp, Mus musculus
cttgattgaaaactttgattatttaactctgtttttaagccactggctttggaatatttaagatttatgtctttttttttttctttcctagaaagtcttttttaaacaacatttaacttcatgaatctgaagaactttgaccattccaagtcttaacgccgtaccactactccagcaaaactgtgctccgactggtaacagtgaccagaagcctgaagaattaaaatgccaacagcaaaccataccttaacagctctggtctctactattcccatacacttctaatatattgtttgttatataaccacttctagacaccctgctcccctgttctttctttccctacctttttttaattctttgttttttattagggtttgtgtttgtttcctttccctacctgcttttttgactcatttgctcaaatgacagtgaacaaagccagccgggctggtaaggcgctgttcacctgaacaggtgctgttatgtggaaaggaaactcgtgactaatttagatagcaattttcattcttcaagattgtctccattcaactcttacagtcaatatttacagctttcagactgcagtagggatactgcatgagaacatattaataccaattaaaagcattttttacatcttgaaatttttctaatattagggaatttcactacggatgatttttatatagatctttgaccttccagtcctttgactttgtacttcagtagagtcagacagagactctctggactggagaattaagaagctcactgaccaggtactgtgttgagagaccctcggcccacagtgcagtacttctcagacatgcgctttgccacagcattccagaacaggaggagaaccacaccgtgtgcccttcccttttactaagagaaaaccaggcagcttccagccttagagatttctttcttaaccttcccagttccagttcttcccactgtctgaacacttgctttgtatgaaacttgtctgtctccatgtacacggaccctttgctactgagcaggtaatctctgacatagtttgatgacttgcagctttgaagacactgggaagaagaggttggggacagtcggtcgggggtttggttggttgtaagaagccataccatgtaaaactaacatcagagaagctgataggagtttaactgtattgaacattcttctcatttgcttttgactctatgtatagttatgacggcagattagatttatgtcagcttcaagttgtattaaatattttgctttatgtaatactgttataaaataaaagtttgtttattctataaatgtgtcacttctcttttcataaacattgaaataaactggggtgctatttttccatcagaaaatctagcatttttacaaaatatttaaaatagtaacattttaagagtggctaagctgtgttttgtttttcaatttgttactcctgctagcctcagtaaactggtggaaattgtgaaaagtttgcaaatccaacatttcatataccagatgccttgtgatgggttagatgctctgggcagttacagggtctgaggtgtgagtccaccagggagggctgccttcctctccttggtgtgcttgcaggcaatgtttcagcagtaccgctgtgccttgccaccacgctttgtgtcctgccttttgtccgcagtgtgttcacagagctcggagcagactgctgagggactgcgtctgcctgggattga

SEQ ID NO: 18715 - DNA, 1099 bp, Mus musculus
gccaacattaaactaaatggagagaaactcgaatcaatcccactaaaaccaggaactagacaaggctgcccactttttccctacctattcaatataattcttgaagtcctagccagagcaatttgacaacaaaaggagatcaaggggatacaaattggaaaggaagaagtcaaaatatcgctatttgaagatgacatgatagtatatataagtgaccctaaaaattctaccagagaactcctaaacctgataaacagcttcagtgcagtagctggatatgaagttaactcaaacgaatcaatggcctttctctacacaaaggataaatgggctgagaaagaaattagggggcagcgctcgcagcaggtagacagacgccgcgccgtcgtcatgggcaagggtgaccccaacaagccgcggggcaaaatgtcctcgtacgccttcttcgtgcagacctgccgcgaggagcacaagaagaagcatcccgactcgtcggtgaacttcgccgagttctccaagaaatgctccgagagatggaagaccatgtctgcaaaggaaaagtccaagtttgaagatttggccaagagcgacaaagctcgttatgacagggagatgaagaactatgttcctcccaaaggggataagaaaggaaagaaaaaagaccccaatgctccgaagagaccaccgtctgccttcttcctgttttgctctgaaaatcgcccaaagatcaaaattgaacacccaggcctgtctattggagatactgcgaagaaactgggtgagatgtggtctgagcaatctgccaaagataaacaaccgtatgagcagaaagcagctaaactaaaggagaagtatgaaaaggatattgctgcataccgtgccaagggcaaaagtgaagcaggaaagaagggtcctggtaggccaacaggctcaaagaagaagaatgaaccagaagatgaggaggaggaagaagaggaggaagaggaggaagatgaagaggaagaagaggaggatgaagaataagtggctgtcctaaagtgtggagtatatttgctcaggcaattattttgctaagaatgtgaaattcaagtgcagctca

SEQ ID NO: 18716 - DNA, 1176 bp, Mus musculus
agaagggcatgcagtgaatggaacttaagtcttgaactttggcactggggacctgtgttctcaggtaggagagaaacgtgccctcagtcattggtgcttagggtttaattgtgtacccacctccaaccccaccccaccccacccccaccccgtaccatctgttgctgtcttgtgtggcatgtggaatgaaggattgattcaacctcactggagggttcatgaagaaaggcagaagacatgggattagagttacacctgaggggatgttgagtcactgtcaggcatgctctgtggaaactggcaccttgtagcttacttaactcttgcggcctagttgccccttctgtaggggtcagataatacctgcttcatcgcatgccacaggattcaaataaaagtttcagggggcagaaatcagttcgcaagtacttgaagcatggaaggggcaagtgcggacatcatcttctaaggttgtattcctgcacttagagtatgttgagtgtggtttctgggctagaagaaggtctcaaagcactgtgaaggaagggagtgtagctatctgacacgagatgactggtcacattaatcacgtcttctctctcagcacagagaaaaagaagaaatatccttgcttggctctcatgcatacacatggaagttgatgtagtttttgggaaaaggaggctggaggatcaaaaaagtgaaagtcactctctacacagcaaattcaaggctagtctgagctaaacaaatacccacctccaacaaagcacatctcccttttaaccctaggggctggggtactcacttagcctgttggaatttgtataacatgatcttgctcactttatagttaaatcataaatattgaggggtttttgtgtttgtgaatttgttttctgagcttttcagaaccacccacgattgatccacagggatcatagcagtctgctattagtagttcacccgtgatttgcataaagtcctaaatgatggagatagggagaagaagtgaaaagtgattggtgccggtcacttgtcacatgtctgccttcgaacactggatgggactatgatgacttgttcggtggcaaaggaaatgagtttggagccttccaacttttgagtggggcgctgtgtgctactgacagagtataaggaaaatgggtcagagtg

SEQ ID NO: 18717 - DNA, 1183 bp, Mus musculus
gcaaacaaacaacaaatattttatgttatgaagctgaaggtggttgggcctctaataatcattgtaagttaaaagtactatgaactaacaacccagactttatcctccaactcaggaagtctgcttctagaaaatgatcctactagatactcgtgtgtgtgtgtgtgtgtgtgtgtgtgtgtgtgtgtgtgtgggttcttcgtaggtagagagttacaacagttcaatgccatggcataaaatgccacagggaaaggcaaagaggaaactccattctaatgtagaaataattcaagatagaattaatatgactaattttaagcaaagtacaaaaatgctgcgctaccatttgtataaaaccaaaggagatatggagtatgtcccctgtatgtacataagttatgtttagaaggatcggtcagcaactggaaattccagctgtgtccaaaaggaggggagacagtgttcaacaacagccacattgagctttctccatgttaaaattaaaactaatgttaaaacaatacattcaaaagttatgatatctaagcagggtctggccaggttaatacttggatgggggagcacctgggaataccaggtgctgtaggctttaaaaaaaaggttatgatataaatataatatataaatgttaaatcctacttcacgcttatttaaaagtatattataagaggcatgtcttcccacaaaaatatttgctactaatgtcaacaagagaaaaaaatggtgtagaagtcgctatgggaaaattagccctgtgaagctcttgggttactgagagagaggagttaactctaagtgcatgcttatcagtataacatatggcaaagaccatatacacccccagacccagtgtttacagccccaccatcctgatcaacccctgaagttgtggtgagacttcctaatcattgcttcctcagagacatgattcttcataagctgaggggcaggcgcgcattgccaggcctggcctacgtccaggtagggctcttagtcagagagcttattcttaactgctatgaacactgcaaataaaatgatttttaaaataaaacttttttttaagagaaatcatacaagcaaaattaactactagtggagtctagtgttgacgacagaataaagggaacgtggacatgtttatgaaagccatagttcc

SEQ ID NO: 18718 - DNA, 1170 bp, Mus musculus
aagattttattgaaaggacgcagatgtagctgtctcttgtgagactatgccggggcccagcaaacacagaagtggatgctcacagtcagctaatggatggatcatagggctcccaatggaggagctagagaaagtagccaaggagctaaagggatctgcaaccctataggtggaacaacattatgagctaaccagtaccccggagctcttgactctagctgcatatatatcaaaagatggcctagtcggccatcactggaaagagaggcccattggacttgcaaactttatatgccccagtacaggggaataccagggccaaaaagggggagtgggtgggcaggggagtgggggtgggtggatatgggggacttttggtatagcattggaaatgtaaatgagttaaatacctaataaaaaatggaaaaaaaaaaaaaaaaaaaaaaaaaaaagaagctgtaatattgaaattgccttggagactcaaagatgttaaagatgccagagccatgggatacatggtgaggaaagctcctaacagaaagtggaatcagcccaggagaaagcagtttgatgcagtcaacaaagatgaaaaaggagtggagatctgaagaccgctttgacagccatggagatgcagagattggagtttgcccagctgatttcttgtctttctttgaggattacagttaagtgattgggtgaatcacagaagagactttggacttttaacattgttgagactgctatagactatgaggatactgaaagctgtactaaatgccttttgcatttgtatggcagcatccaggcagtcatggtgcaggaggagctgagagttctatgtcttcatccaaaggctgctagtggaagactgacttccaggcaactagggtgaggatcttataccaacacagtggcacacctactccaaccaggtcacacctattccaacaagaccacacctccaaatggtgccattccctggtccaagaatatacaaaccatcacactccctttcttttcttctccctcctcttccttctgttctcttctacctttccttttgcttcctcctttcttttctcagtatattttattatttttctggaaagataaaaccatgtgcagtaataactacttagcaagtacatcctatctacaccagtt

SEQ ID NO: 18719 - DNA, 1179 bp, Mus musculus
agcagagtcttgcccaacacccgcaagggtccacacgggactccccacgggaccctaagacctctggtgagtggatcacagtgcctgccccaatccaatcgcgcggaactcgagactgcggtacatagggaagcaggctacccgggcctgatctggggcacaagtcccttccgctcgactcgagactcgagccccgggctaccttgacagcagagtcttgcccaacacccgcaagggcccacacgggactccccacgggaccctaagacctctggtgagtggaacacagcgcctaccccaatccaatcgcgtggaacttgagactgcggtacatagggaagcaggctacccgggcttgatctggggcacaaaacccttccactccactcgagccccggctaccttgccagctgagtcgcctgacacccgcaagggcccacacaggattccacacgtgatcctaagacctctagtgagtggaacacaacttctgccaggagtctggttcgaacaccagatatctgggtacctgccttgcaagaagagagcttgcctgcagagaatactctgcccactgaaactaaggagagtgctaccctcccggtctgctcatagaggctaacagagtcacctgaagaacaagctcttaacagtgacaactaaaacagctagcttcagagattaccagatggcgaaaggcaaacgtaagaatcctactaacagaaatcaagaccactcaccatcatcagaacgcagcactcccaccccacctagtcctgggcaccccaacacaaccgaaaatctagacccagatttaaaaacatttctcatgatgatgatagaggacatcaagaaggactttcataagtcacttaaagatttacaggagagcactgctaaagagttacaggctcttaaagaaaagcaggaaaacacagccaaacaggtgatggaaatgaacaaaaccatactagaactaaaaggggaagtagacacaataaagaaaacccaaagcgaggcaacgctggagatagaaaccctaggaaagagatctggaaccatagatgcgagcatcagcaacagaatacaagaaatggaagagagaatctcaggtgcagaagattccatagagaacatcgacacaacagtcaaagaaaatacaaaatgcaaaaggatcct

SEQ ID NO: 18720 - DNA, 1164 bp, Mus musculus
tttcttttgttccgtttaatgaactctcaggcttgaaaacagcttttttttcattagaaaacaaatacagagctaaatagtcttacttgttgacgttatttaaaagaatatttataggtacacactgcctaagggaccagaaatggtatgtgtaaactatttttgcttgatttaatgttggtacaggaaatagtattccctctgactttggcaccagtaacctctagctttactattctctctttcttccatgatctgtgtaataaggattgcatttgcaggccagtcagatttcatgaatgggagttagtaggtagactatattaaatttcacaggggttctttttactgtcttttctgctcatatttaagaaccgagattcttgtcagttttctcaagagaaaaattatgatgtaatagacagtgtacactattcatgtcaaaacacaattttcttgcattttatagcttggtttagcattcttctagaaaatgaatttccccagaagacctaattgcctttttattaatgagtctgtgtggtgttcttttttttttttttttttcctctccatttactattctaaatgtgtctacttttgctagctgtttcaacagtgatgtctctgattaaatcacaactgctatatttgtttttgctgttcactagtgatttggaaaaatactggcataatgacatggttatagcactgagtgatgaaaggcaagaagtgtgaagtaatgttaacccctgatcatctgaaatactgtgatctttgaagctagagtttggggacagtggatatcggtgcttttgatactgtaaatcaaaatctatttagcctacagtgtcttaaatgtgagaaacagagctcttgagattgatacattccatatctatttaatactttgcagttcaaggggagattaaattagagacaaatcgcagacatggaaaaccttaaagttttcacacacagtccagaactttggagtttgaatgttcttatcaatagttttttctaattttattctaaatttactaagtctacttttatttttgccagccattgttaggctcatttattttcttacccattggaaaagaaagactttcccaaagcaattacaacatgagggtctgccatttgctgatgttctat

SEQ ID NO: 18721 - DNA, 1199 bp, Mus musculus
ctctctccttctctctctctctctctctctctctctctctctctctctctctctctgtctctctctctctccgtctttcttccctccttccctctcttcctgtctttctcccttccttccttccttccttccttccttccttccttccttccttccttccttccttccttcctttcttattttccttaaagatttattagtttttattttctgtgtatggctgtatgtatgtatgtgtgtgtgtatatatgcatgtatgtatccatgtataccatgtgtatgctttgtgcccacggtagtcagaagaagacttcaaatagcctacatctggggttacagaaagctgtgaagcaacacttgggtatggggaattgaacccaggtccaggcctgtgctttgacctgcctcagcgtgtcttctctgcttcttcctgtgttatcatgagtgagttttatttatttacttttctattataaggtaacattcttattagtacattccttttatctccatcccacccattttgttattttgaggaagtatctcatatatatagtccaggctgaccccaagctctctacatagccaaaatctgatactgacctctgatcctcctgcctccaccgtcaaatgctgagagtagagattgtactgctacagtttaatacaactcttttcatctgtgaagtgagttctaatggtatgtagtcatccattagtttcattgtgaggttagaagtcacagacctctagggtgaccaatatttcagtagtatgcatgtccacatgtacatgcaaggtatcatgccataaaatcccttctcttgttctactggccttaaacctttagggtagtgggtattttattgctctcttaacaccctcagtgttggacttgtgacaaattggttggttttagattctatctctaatctaaattcctgattttgaccactgctacccgtcttgatttatttgaaaaattagcttttagccagattagattctaatagtagtcttgagactatttcagatgagactgatctaagctgtgggcccatgggccacatccagccttacgcctgctttaggaaacctgttcttcaagtgcggtcttgtaatctgttaagatttttcatgtttggctgctttcttgctacagttacaagaattgtgtagttggaacagaaggtaaagga

SEQ ID NO: 18722 - DNA, 1176 bp, Mus musculus
tattattgcttgtcccttcttaatctcacacgttgcagcataataagcctggggcatctctacaaacaactctctctctccttctctctctctctcatctctctccttctctctctctcacctctctctctctctctctctcatctctctctccttctctctctcatctctctctcatctctctctctctctctctctctctctctctctctctctctctctccctccctccctccctctctctctcttcttttataaaagatttcatagttcttcctaagtgtatctgctaattaatctttacattacccctgtgaggtagacagctgaataggatattctgcacacaaagcactagaccatgctgcttctctgttatgatagaggattattgttatgttaaaatgtttatacaccaagtacataaatttgtagagatggatgtaagccgattccttgggcaaaatatatgaacgtggttatagcataaaactgcaattgtaaagcaagttttatcagcttctggtatttaaaggattgtcccagatctgcatactaaacctctgtatgatagcctctttccattctccagcctttgggtagtgacaggacacagtaagctggcgaagcaggactgcagcaagcagctatctgagatcctagatagcattacttttagactactggaagcttctttggtctttaggaatacatatacataaatcactagagtaatagcactagtagtttttgatgataacctgatgatagtgaatggaaattggttaggtgttgtacgctttgtatagagtttggtgtgggtcttctagaacatagctttttaaccctctattgcagccccatactgggcatatgactaaatgtgagagtctggaaacgttggggtctgtataggtggagatggggacttttcatgtgtaggaacagtggcctggaggatgggctgagtcttgctagtgaggtacatcctcacataagttgcttatgcatggatcatgacagtagtggcataaggaaaccactgatagtggacatgggaaaatgaggttatttttctcttgccttaaaatggcttggaatttgaatcttcaactctcttaaccctttgcctgttaacacatgtgagtggggaaacaaggaaattgctttctctat

SEQ ID NO: 18723 - DNA, 1199 bp, Mus musculus
atcatcatcatcatcaatttaacaggcacctctggtaatatgtttttcacttttaaaaagtgtgtcatgaagcaaaatgtgtttctgtggggaacaggaatgattataagataatcacggacccggagggtatagagatgggaaaggtgcaagccaatgtatctcttcctttgacataatgattatttcataataactgagtgcctcattccagtcttctctgccagcaccatccaatttctccattccattctaccagactgagacaggaataatagaatttttgtgctaaaatataatgcaggtgattctatgatggttcagtatatattttagctgaaccgtgcatttccttataagaagtaagaatggcccattaacagatggagttgaaataatagagaaaataagttcttccaccctttgctgggctatccctgagttgatttgccaggattcttgtttaagagaactgcagtttgtgacatgacagtggtgtgtgtgtgtgtgtgtgtgtgtgtgtgtgtgagagagagagagagagagagagagagagtcttggggacaatttctccctatgagatcctggcttgtgttgaactcatgatcttatcgccttggactcctgagtgctcaatgcccaacttttcaagagtagttttcactgttccttttagaaggtgtagtttactttattaacctttccaagcaagatgctttctacattattaatacaaagaaaagcaactgttaggtacagagttatgtggttttcaaagagcgtaagtttgaggaccaagtctagatataatgaaatctcagctgcgtcttgctctgtgtatacttacttatttcgtccagtctcacatttgtttagaaatgctagaggctccgtcttgcagatacatgcatactgaactttcatgaatctttcttcccttggacgtcctattctgactttggttggagtatttggggtgggtaaaggaggggtagattaaggtagctgctaatggctttatggaagagacccaggccttgctgttctgttctgggataatgtgattgactccagctttctgacctatgtcagggaggactgtttcttgtcagccagctggaggcctctggtgagtgcagtgcatatgagcccctcactgaagccatgaccctgtcagtaggaaattacagatttattg

SEQ ID NO: 18724 - DNA, 1145 bp, Mus musculus
aataaattgattctaacagtcctttgaaaaaggttttagaatagctaacatagtactagagaaagaaactaagctggctggcttctaccctctaatttgaaaaatatctaaaaagctcaagaagtcaaatagtgaggtgtgagataaagtagtgatgcattaaagaatgcaaaataggatcatacaaagtgagtcaagtgattagcattgtcttacaatgttgtagttatagcccgtcgtccagcaatttcattattttccagcaaattaggattaaagcaacatttataccagctgtatatgtaatcaccccaaaccctaagcaatcatggtatctttcaattacagaatgaataaattccgacccactagtccccactttatacacagggcacctgagccccaatctctaacaaatacttgcattacacatagaacaaaaacctgttctgtgcaatgtttcttcattaatttatagattaatcataattagcttaacaacaatgacaattgaacagttgtagctatatactataataaaattgctgacattgctactcttagatttggaagacattattaatgtattacttgaccatggccgcatggatacctacatggtatagttgattgcattgtagacactgtggaaattctggacagagagatgacttatgtcccaggaagagctgtatagcttgcaaatttttcatgttattcaaaatgtagtgaaatttaaagctgtgcatagtttatttcatttagtacgttcatgtcttagatgaccgggggtaactgaaacctgaaaacacaaaactgcatctaaggcacttatggtttgtgtgtgttgagggtgatggtactttgtatgtatatagtgtggcagtcagtgactgaaggaataaaaatcagatcgacagaagaattttctgcatctgaattgtctgagatagagtaacaccaagaaagatgttgtattactccagcctcaccagttggcgccataacatcaacttcaaacacccttccatggtgacatataaaattaacagttccagttggaagaggtcagtggttgatttgggtctgaggactagatagtataagagacacagtggagaggtgttttttttaagacaataaaa

SEQ ID NO: 18725 - DNA, 1321 bp, Mus musculus
catgctggccttgaactcagagacacaccttgtctggttgctgggattaaagtgtggtccaccacagcctggttctttacctttttgtaagctgggaaacattcttaactattttaatcctataaaaatccttggcactatattaaatgataggaaatttagggcaaagataaaacatctttttactgtttcttttttttcttaaaagggatcattagacttgagaataaaatatatatggccagatgttcctgttatatgcaaaataagtaatttacgacttttaaataatctaaattgggtgtcaagaactcacacagatgctattactcaccattagccttttgctaactcctttcatcccttctgttctgacatgatgcaggagcagtatcgtttttgctatgatgtggcgttagagtacctggagtcctcatagttcgctgagactatttgcagagcatccaagcagaaatccattcgtctgttgagccagcagctgttgtacctgttactgcaccgagagattttaatgtacggggtgggaggcttttacattggagaggcaaatgtatttttcttataaagttgtgtatcttaataaaaaggacttgatcagtttctgtgactgtatgagagcatccacatttcatgccacctaattttatctttaatcagaggcagatttggatgagaagtggtctgtgtctgtccagtgaccacacagccttttctctcctgctttctgtagagcagctaccacacattgcatgcactttgtaagtggcatttccctctctttttaaaataaaaactgtgggaccttaagaatggggaaggaaacaagctgtgcaaagtcatggtaaatttcattttatatgttccaagtgtaccagattctatataaatgtgtgtgtgtgtatatatatatatatatatatatatatatatatatatatatatacatacatacatatatacatatgtgtgtatatatacatacatacatacatatatatggcttattttcttttaatgtgcaatgatggctggatcatttaaagttccttttagaaaataacataagccaaagactgaagtgtacatatgtctatatggaagaagcacattatatttattggttacttacattacttttttgatggataaaatactaccgccacacaatcatttttgttgttgttgttgttttaggagagttagctaaaaatcaatggtaaacaattttttgtagattattttttgtatgtttagtgtaagtaaaggataaactttttattcataaaccaggaagcaatgt

SEQ ID NO: 18726 - DNA, 1389 bp, Mus musculus
ccagcaggaaggatcccaaattcagggagtggcaccacttcctggtggtcaacatgaagggtaacgacattagcagtggcactgtcctctcagattatgtgggctccgggcctcccagtggcacaggtctccaccgctacgtctggctggtgtacgagcaggaacagccgctgagctgcgacgagcccattctcagcaacaagtctggagacaatcgcggcaagttcaaggtggagaccttccgaaagaagtataacctgggagccccggcggcgggcacgtgctaccaagccaagtgggatgactatgtgcccaagctgtacgagcagctgtcagggaagtaggggtgctgcacaggggcccccacagccttgttaagttgtgtaaagcatgctgttccccccgcccccttgctaccctctcattgggagttcttagctgtgctaggatagaggtttagggtgtcttccctcttgctgccagccgttacgattctggatagtcccatcccaggttctgtttgattgagtttaggttccgtctggggaggggtctaatgttctgatggagtcattctgttgttgatataaaaagagcaactctgaaaaaggaaacattccgccaggatcaggtctagaggagagctggagctggtggtgtctgtgagtggttgaacaaggaaactgtccagaaccgggcacagtggggtctttaagggccctgtcccccaactgagacaactcaagactcccatcttagctgagccctgaccgtccagatcaggtggctgcgtaggtatcaagtgtctaaagaacagtgctgctgtggagagagaccctcttaagccccttgcttctcagtggggtaggcaaaagtcatctgagctgccgagtgtgttgatcctccttgtcaagtacaaataaaaaggcattgcattcaaaaaaaaaaaaaaaaaaaaaaagaatcttatatgaaggagcaaaactcatggtagaacattgagagaccactgataccacaggcactatgggatttataggcagactctgaactcttgactgttcatgatttcaggtcagcaaggtacccactgcttaaaatgtcccactcacgtaatggactgcccctcctcgccctgagtccccctcatattggaaccagctctgcttctgcaaacctctaccagctgaattgttgccttccttaggagctacagcgactgatttgttccctttgcctctctatgtgtatgtatctgaaagataacagatgatctggacatacagaggaacacagaaggcaggtcagttacaatagcatggtaacttagacttaaataagtaaacattttattatataacaaccctaaatatctcctaagacaaagtc

SEQ ID NO: 18727 - DNA, 1165 bp, Mus musculus
ttatttcgacttaagaaagaccaaaacagccagaaacagcagtattaacaagtgtttgggaggcggtagcaggagtgtcaggaattcacgtctacccttggcgctacatagcaagtttaagaccctctcttaaaagttagtatgttacaaagcataagcctgggctaagaattactacaggaatgtagaaattggtatatgttaaatgataagaaagacaacagagcactgaattacaatatggagaaggccccccgagccaactacgcagattagcagtcccctttgaatgacttccgcagctcatttctaatcatctcacctccatgcatgttcccctgcagcttcacctgtactacactcattttaaaggctatttagtatgctttcctttcttagcaatagcctctaaatttgcaggtccaccccacagtgtttccaaaacgtctcgttcattctgtaacgcctcctctatatacagttctcgggcagagcagacagatttttttaaacccctaatgacttgtggaggcccactgacaaatttctccagccactcttgtgcctgttctagagccgtagtttcatctgagggctgtaagacctcatcagtcaagcctatatttaaagcttccttggaatccagtttgagagtcccacttaacactttgagagcttgtctgctgccaatgatttcaaccagacggctggtaccaccccagcttggaactatacccatctccttgtggacaaatctgatcacactttcctcagtcatcaacctgtaaaaacaaaaataagaactgtaactatccacatgtacgagaaccatggtctcacaggaaatcgctgatctttttaggcagacataaagttgttggaaaatgtccccagctagaatttaacttaccatgtactgttcaataaactcttgcttttaaacgtaacatttttgtttcaacttttccaatctttgataagaactcagcctcacattttaagaactttatgttaaccaattctcaaagtatctgtgatataaatactctcatttctatggttgaaaaaacatgcaatggaagccaaatagctcatcctaagtcatacagctttagtaacgccaggacttgacctccagatagttggcttcagtgtctggatgctt

SEQ ID NO: 18728 - DNA, 1099 bp, Mus musculus
aactcagtggagacagcatagctgaacggagtcacagaggtgaaggagaagaagatcatgaatcgccatcttctggcagagtaccagatacctccgttgaagaaacagaatcagatgccagtagtgatagtgaggatgcccctgtggtagttgcacagcactctttgacccaacagagacctttggttccaaatggaaaccagacagtagccgaccagtcagaccgatcaggaactgaccgatcagttgcagggggtgggaccatgagtgtcaatgtcagatccagaaggcctgatgggcagtgcacagtgacagaggtttaagcaaatgtcttccgcaccacactcaagggtaaaatggatacctgtaaatttctgcccacgtaacattatactcatccttagtagtgcgttgtgggagttgggggggaagggatatgggaaagacagacctgaaattaaaatgtctaacatgtctctgctgaaatttatttaatgtgaggaactggggtgttgatagttgagagctgttcagtataacacagttttcttgacatctgtttatagtgtatttttttaagtttttagttcttttggctagtgtgtccctgtgcattaatggtcctcatctgactcttgcactacttattttttctgcatggattggtataaaatcttcaataaaatttggcacctgtgagatatttgatatcattatgagcaggaagcttgatgtgaatttgggattttaaaatagatgattaacaactatagttggtcttcttgagatagaaatgtaaagctgcagctaataagtttcagaatctgtaacgcacttcatggtgttcccttccataagatttgctgtcttgtccttgtacttggaggtttctcttagtctgcatttttctttttgattaaaaaaactttataatttaataaatactagagtttatcagaaataatttgtttgagtctggaaaagggatggggacactttggtatttgtggctaaagagcttttttaaaggtgaggtttgaattgattgcattctattcaaactgttccttactcaagaagtaagtctgatttcttcaga

SEQ ID NO: 18729 - DNA, 1420 bp, Mus musculus
tgtttattcaaatatataaattgcatatatatctgcatatgtatatatccatatgcagacatatatacatgtatatacacaatatttaatgaatacatattcatatccatatatccatatgtatacatataaaacatcaaatagaagagaccctatttgaatgtatgtgggtgactaatactatgtagaatgagagacaaaacagaataatggagagtgagtttgtttcagatatataatatatttgatgatattgttcctatgaaacccattgcctagtaaacaggtatcatactaaatatttttttctataaatgaagtgtacttctagggggaaaagattctaccaggaaatgcctccagctgataaacaatttcagcaaagtagatggacacaaaattggctcaaaaaaaaaaatcgcttttcggctttcggctcggaggaggcaacggtgcaactttcttcggtcgtcccgaatccgggttcatccgacaccagccgcctccaccatgccgcccaagttcgaccccaacgaggtcaaagtcgtgtacctgaggtgcaccggaggcgaggtcggcgccacatccgccttggccccgaagatcggtcctctgggtctgtctccgaagaaagttggcgatgacattgccaaggctaccggtgactggaagggtctcagaattacagtgaaactgaccatccagaacagacaggcccagatcgaggtggtgccttctgcctcagccctgatcatcaaagccctcaaggagccaccgagagacaggaagaagcagaagaacattaaacacagtgggaacattacttttgatgagattgtcaacattgcccggcagatgagacaccggtctttggctagagaactttctggaactatcaaggagatcctgggtactgcacagtctgtgggctgcaatgtggatggccgccaccctcatgacatcatagatgacatcaacagtggtgcagtggagtgcccagctagttaagaagcaacaagaaaatattccaataaaagactatctgataaccagtggaaaaaaaaaatcaatagacttcctatatacaaaatgacaaaagactaagaaagaaatttgggaaagaacagttttcacaatagccttaaagaatataaaatatcttggggcaaaagacttgtgtgataacaatttcaagtaattcaagaaagaaactaaagaatatattagaaggtagaaagatctcttgtcttcatgcatcagtaagattaacatagtaaaagtggacattctacaaaaaggaatctactaattcaatgcagtccccatcaaaatccaacacaattctacaaagatcttgacaggacaaatctcagcttcatatggaaacacacactgaaaaaaaaaaaaaaacctcaacaat

SEQ ID NO: 18730 - DNA, 1220 bp, Mus musculus
agtttcatgagttttattgcaaattgtgtcttgggtaatctaagtttctggggtaatatccacttatcagtgagtgtatatcatgtgtgttcttttgtgattggattacctcactcaataatatcctccagatccatccatttgcctaagaatttcataaatttattgtttttaatagctgagtagtactccattgtgtaaatggaccacattttctgtatccattactctgttgaggggtgtctgggttgtgtccagcttctggttattataaataaggctgctatatagtggagcatgtgttcttattacaagttggaacatcatctgggtatatacccaggattggtattgctggatcctccgggtagtactatgtccaattttctgaggtgccgccaaactgatttccagagtggttgtatcagcttgcagtcccaccagcaatggaggagcatcttagccatctgactggtgtgaggtggaatctcagggttgttttgatttgtatttccttgatgattaaggatgttgaacattttttcaggtgcttctcaaccattctgtattcttcagttgagaattctttgatttgctctgtaccccactttttaatagggttatttggttctctggaatcctatttcttgaattctttatatatattggatattagtcccctattggattgagggttggtaaagatcttttcccaatctgttggtggccctgttggtggcccttttgtcttcttaatattttcctttgccttacagaagttttgcaattttatgaggtcccatttgtcgattatcaatcttaaagcacaagccattgctgttctgttcaggaagtttcccctgtgcccgtatcttcaaggcttttccccactatcccctctataagtttcagtgtctctgttttttttttgttttttgctttttttttttttttttttttgtggagttccttgatccacttagacttgagctttgtacaaggagataggaatggatgaattcgcattcttctacatgataacctccagttgagccagcaccatttggttgctgtctttttttccactgggtggttttagctcccttgtcaaagatcaagtgaccataggtgtgtgggtccatttctgggtcatcaattctattccattgatctacctgtctgtcgctgtaccagtaccatgcagtttttatcacaattgc

SEQ ID NO: 18731 - DNA, 1208 bp, Mus musculus
cctatgagctcacatggaaaacacagatgtttccttggtctataggacaccttagtcagtagcagctttaaacctatgaaaacctagaacaactggaaaaatatgaaatgaccaaaagccacgttgaattataaagaaaagaatatgtgtagttagtacccctttggctggcttggtttgtctgagtcttcagatacagtcttttctctgggatgcaccacaagtcctctagtgacattatagctgtgcatgtttgtataacaaatttctgtgacattcagattagcacagatttacctaagaacacttttttttttttttttttggtgtgaatattttatcagtgacactggaaaccaacaatcaggctctgagtgagcaaggtatctcctgggtggcatcctggccaaaggaaacactctctagatttcctttttctttctcagctaggcaaaacaggtccaaatgtgagtgttcagtcctttagtttgaaccacaggcagttagttaacgcacttcttagtgactgattagtggttaaaatggccttttgtattttctctggattggcagctggcccgacgacttccagccagggtacaaggctatccatggagactggcctacagcacattagagcatggaacgagcttgaagactctctacaggaaatcagcatctctagatagtcctgttcttttggtcatcaaagacatggataaccaggtgaggcctgttcctctcacagagaacatgtatcttgtttttggagagatatgatttcaatctagttcaggctatataatctaaggtattttgaattcctgatctttctacatccactttctgagtgctagaattattagtgtgtatcatcataaatggttatatagacgctagggatgaagtccagggtcacatgcatgcagacaaactctgccaactgaactgtatctccacctgaaaaggtgttttggtggcagatttttagaatacccacagtagagagactgctatatcgactcccattctcagactaaatggatttggacattcttgttttatgtctttttcttcttgtttttgtttgtgggtgtattttgaaatcctaatataaagaaaatggaacaattgtatgctgagaaattttctccctgtgctgaccataagatagaaaatagtaacctaaagcagtttaaaagtagaag

SEQ ID NO: 18732 - DNA, 1176 bp, Mus musculus
aagtacccttttacactgagccatagctccagccctctggatttctaaaaagtagaatcctagacccttacctcaggatactttggtttagtaagtctataggaaggatgttagaatttatatttttcaaagctctaagatgaatctgaaaaacagctaggttttaaaactactctcctataagacaagatccattcaagcaagacactgaagttctttactctttcagatcttacccacgtctctcatctcttcttctagggctctttgttcttcagccatcaggaacctagagcatccatctctgtaccccttgctgcaaccctatacctggcatatctccccacccagctcacagatagatccacccactcccttgtgaataagccttctctgggcacaccaggtgtccaacccttctttgagccttgaacacattcagctcctttattgcatgtcatggcatttgtttggctataatttcatcttctgtcactcatccatagaaaactatgggctgtgtccctgttcctggcaactcacctggcatgccccagaatacaggaagtgcttaataaatgttggcactctccagtatccaggaaacacttaattaatgtgttctatcatgaaataccaggcactgaaaatggtgcttctcccaggaacagaattcaagtgatttagccctgggttgttaggtatgtgcatgcctggctggtgtgttgtgtccattcatctgccagagtataacttagaacctaccccaggaccctgaaccttcagcagcccctgggactgagagtcccctgcggtgtggaagagtagcagaaaaacaggtgaaaattgatctcttgtagatctgtatttctttccaagcctgtgtcacctgatctgacgatcaaaaagaaccccgtggaggactttatcagtcactaagatgcatcccataatgtgaaacgataaactgtaccttgccacttgttttgtcaaactgcacataagatggcattgttcactgcctcctataagttagaaatgctcccactctttcaagttacttatgccaacaaattctaaaagtcacatagaaactgctgttgccggagtgagcctggctaccacccctgtcaaaggctccttttcgtaagattcaaactgatgctgggaaccaac

SEQ ID NO: 18733 - DNA, 1214 bp, Mus musculus
aacgtacttgcacacgcatagagcccccagacaactctgaattgtggaaattaaagaatctgcaatcttccaggggaacaaccagtgagtctccctcagtgacccagctcagcatgcgtgctgccttggaacctacagccaaagaaaactgtcttttaaaaggagatgaggactttgttgacttggaagaactttcttctcaacctgagagtggaatcaacaaaggagatgccacgaaagaatgtctttcctatgaccaaaagaaggatgggccgcatacagtcatgtctgcaaagaaggggcacgtgcagtcagcccaggaagttatgggaccagagagtgatactgaactgaagggagccctagatctagaaactgctgagaagcaagatgaagccccagaagtagacaaacactctggatccccagaaaacttgggggaaagcacgctgaatatacacgaagatctagataaaattaaactcattgaattttacctaaataaaaacaaggaagggtcacagctgttagaaaatgtgcagaagtcagagttaagtgaccgcaaaagtattgaaccaggaggaatagacatcacacttagtagctctcttccccaagcaggtgattccccacctgaggacaacaaagagccaggtacactctgggtaaaagggggagaaactctgcccctgaaactagatcctagtgcagaggaaactgtaattaacaataaagaggttctggattctttgggatcatctctagacaagatgtgtcacagtgcacagatggataacaaatctgagattcagttatggctgttaaagagaattcaggtaccaattgaaggtaagacgttgtttggtcgggttttggttggatgttttgtttggtgtgtgtgtatatgtgtgtgtgtgtgtgtgtatgtgtgtgtatgtgtgtgtgtatgtgtagtatgtatgtttctgcgtgtgcatgttctcatatgtatggctacatatatacacatggaagccgtgtgtctttggttatggcccactttaattactgaggcagactgagcattaatgactgaggtaaaaatttacaaaacaatttgtagaccttgaactaaatatagatttctgtttcagaagtatttaactctttcaaacaaatttttttattaccttgcatgcctaaatctaaagaagttgaaactgtatatgtgtgta

SEQ ID NO: 18734 - DNA, 1162 bp, Mus musculus
ggtgtttctgatgaacactttcaaattggctacattaagtgagttttgcacaagtattacaattttgatatattggagcttgtgtatgtataggtactttatggttttgtgtgtcaacttgacacaagccagagttatcggagaggaaggagcgtcagttgaggaaatgcctccgtgagatccagctgtaaggcatttttctcaattagtgattaatgagggagggcccagcccattgtgggtggtactgtcctggggctggcggtcctaggctctgtaagaaagcaggctcagcaagccagtaagcagcacctctccatggcctttgcatcaactcttgcctttaggttccagtcctgtttgagtccctgtcttaacttccttcaataatgagcagcagtatggaagtgcaagccaaataaaccctttcttcctcaacttgctttttgatgatggtgtttcattgcaatagaaacactaaggttggtaccagggtactggcatattgctgtgacagacctgaccttatttgggggaggattgtggaaagacttttgaactttggcctagaaaaaccattgagtgttgagacctcactgggctgttctataggagcttggaagctaagaatgttgaaaacagtgcaaatgatggagacctgctttgtgaaatttcagaggggatattaaatggcattagagccatttgctattttggtttaagattctgtggttcagattagctggagttgaagcatcagctgtgataaacaagataacagaactactaaaatgaaacttttacattactgggacaattgatgctatttagattgagctaagaaattagctgtgataagaagagaccagcatctcagagatgaaatcttctgggaaatgtttcgtgagagcagagagaaactgttttccagaggcagccaaggttgtatctcctggcagctggacttgttaaagagttaccctggtggtatgggttttggagatgtgaaggggtcatgcagagaagttgaggcttggcaccaggaagagagcctatgagaggctgttggggaaagtgaagcccagtttcagcaggagacaccagtgttttgtagataccagtacaatgggatgaccaacaagaacagtaggcaacagtggag

SEQ ID NO: 18735 - DNA, 1228 bp, Mus musculus
aataagacacggtcatgtgatacatatacatatgtacatatgtatatacctataataatatatgtacatgtattagtttgcaggtgtgatatgcccttcagtgcctacatttacacactaatggctttgaggggtcctttctgccacttttgttggtatttactattcatgtgacaggaaaaaaaagatttgtatctttgtacaaagatacaaatagagacaggttagatttgaatcaagtgtctaagaccatcaagaaaacaagcaatggcaagatctggacaaaagcttacagtagtaggggcatagaaatagtttcatggaccgcaacactaggagaaaatcaggactttctccagcactgcaggcagaaggggatcaggtttcgagggtcccttctgtggtccgctgtgaggtccgcaggaaaagggccccagttttcggtgctcattcttatagcaattgagtacatgcatacagttcaaggcaaatctgccctctagtgtttgcaagtgcagccaacactttaaatgaatcaaataaaattacagaagagagtcaggaagcctccctggtggtctagtggttaggattcggcgctctcaccgccgcggcccgggttcgattcccggtcagggaagcaatgtttttctaaatttcaagaatttttactgtaatttgttttttattgcttctttattgtccatgacaaaagttgtattagttttacgaatgttttcaataactatgtttcaaatagacatatactatgtctttttagttattattgacgattaaacaagttttatgggttcttaatgataaagtacttgaaatatatttgtttatacatttgtcattccgtttctaagattgcaattttcagcctttgataataattgggatatgtatacaagcagggatttttagaaagcttttatttactcttgaatgtgactgataaaagaagaatatcattttaggaagacttatgcttgtgttttgagtcaatttctatttcttatatattgaaatcctatttatttaaagtggatctgttcctatcttgttatttttaataaattaaaaatatgtttctgagaaatgtgaataatgaattatctgcttgtgttttttcttagtttaaatttgtttgtttgttagatagcatcttactaagtagccctagaactcactatgtagaccaggctggccttaaactcacaga

SEQ ID NO: 18736 - DNA, 1389 bp, Mus musculus
gagaatgcctacgccaaggtctgcctctatctcaccagttgtgtgaattatttaccagaacctgagaactctgccctcctgcgctgtgccttgcgcatgttccgaaagtttagccgtttccctgaatctctgagattggcactgatgctcaatgacatggaactggtagaagacattttcacttcctgcaaagatgtggtggtccagaagcagatggcatccatgctggctcggcgtggagtgttcctggagctgagtgaagatgtagaggaatatgaagacctcacagaaatcatgtccaatgtccagctcaacagcaacttcttggccttagctcgggagctggacatcatggagcccaaggtacccgatgacatctacaaaacccacctagagaataacaggtttggtagcagtggctctcaagtggattctgcacgaatgaacctagcctcctcttttgtgaatggctttgtgaatgccgcctttggtcaagataaactactgactgatgatggcaacaaatggctttacaaaaacaaggaccatgggatgttaagtgctgctgcgtctcttggcatgattctgttgtgggatgtggatggtggcctcacccagattgacaagtatctgtactcctctgaggactacatcaagtcaggagctctccttgcctgtggtatcgtgaattctggagtccagaatgagtgtgatcctgccctggcactgctttcagactatgttctccataacagcaataccatgagacttggctccatctttgggctaggtttggcctatgctggctctaatcgggaagatgttctaacactgctgctacctgtaatgggagactccaagtccagtatggaggtagcaggtgtgacggctctagcttgtggaatgatagcagtgtggtcttgcaatggagatgtcacttccaccattcttcagaccatcatggagaattataagactgagctcaaggatacctgtgctcgttggcttcctcttggcctgggcctcaatcacttggggaaaggcgaagctattgaggccatcctggctgacttggaggtggtgtcagagccattccgcagttttgccaacaccctggtggatgtatgtgcctatgcaggctctgggaatgtgctgacggttcagcagctcctccacatctgtagtgagcactttgactccaaggaaaaggaagaagacaaaaacaagaaggtaaagaaggacaagggcaagaaggacgtccctgctgccatgggagcacatcagggagcagctgttctggggattgcacttactgctctgggggaagagattggtgcagagatggcattgcgaacttttggtcacttgctgagatatggggaacctacc

SEQ ID NO: 18737 - DNA, 1222 bp, Mus musculus
aacctaccttctgtattaagccatcttgataagagcttccttactaaatgacttaagaccaacttcacaggctcatgagtcgagtcgtttgcagtaagcgattccaccccttcttcgctgtaaggatgaaagagtcagaggtggaggaggaagggattaagggagccttcttcctgtgtttttctgcatctgcctcaaaaatgtctctttccagccctggcctcagagtttgtagcttccactgaccctaatttagtatcttatgaaagctttttatttctgtgaaagcaatttttttttaactttttaaagttctagcctctacagggctaacttaaaattttactaaacagtaattgtaataatgaatatatttgtgatctagagaatttctctcccaatagattacctgtgatggggaagataatttccacacattgagttaagtcccagctatttcttctattctaacgaaagccatgccgtttatctatacatactaagaagactgaagcctgtctactgtcatatgaccctgaacatgccccattttgtctgattttagaacagaggccggcctggctagtatttggatgggagactgcctgggaataccaggtgctataggcttaaaagccaggtggtggtggtgcacacctttaatctgaacacttgggaggcagagacaggagagtctctgacttgaaggccagcctggtctacagagtgagtttgaggacagctggggctacacagagaaagcctgtctgtcctaaagaagcaaaagaaagagagaaaagaaaatagaaaaccaatatgaccatctgttcctgagtcaaacacagggggaacaggcatatagtcctattcttacactaaacaatgggggggggggtaggagggggataagccaaaaccaattctgtggtaaagaaacccttgcttagagaagaccgttaactttctaaaaacactcagtatggacaacctactgcaagactttcttgaaaacctctcgtcattagtcccacaaagtctaagctattaagtactaaactctatacatactcagctagttgtctactaactctatacaaactaaactagatgtctacaaagtatacatacacagctagttgtcttcaaactccatacagattcagctagttgtctacaaactctatacagactcagctctatacagactcagctagttgactgt

SEQ ID NO: 18738 - DNA, 1144 bp, Mus musculus
ctacatgttccagtatgactccacccatggcaaattcaacggcacagtcaaggccgagaatgggaagcttgtcatcaacgggaagcccatcaccatcttccaggagcgagaccccactaacatcaaatggggtgaggccggtgctgagtatgtcgtagagtctactggtgtcttcaccaccatggagaaggccggggcccacttgaagggtggagccaaaagggtcatcatctccgccccttctgccgatgcccccatgtttgtgatgggtgtgaaccacgagaaatatgacaactcactcaagattgtcagcaatgcatcctgcaccaccaactgcttagcccccccgctggccaaggtcatccatgacaactttggcattgtggaagggctcatgaccatggtccatgccatcactgccacccagaagactgtggatggcccctctggaaagctgtggcgtgatggtcgtggggctgcccagaacatcatccctgcatccactggtgctgccaaggctgcgggcaaggtcatcccagagctgaacgggaagctcactggcatggccttccgtgttcctacccccaatgtgtccgtcgtggatctgacgtgccacctggagaaacctgccaagtatgatgacatcaagaaggtggtgaagcaggcatctgagggcccactgaagggcatcttgggctacactgaggaccaggttgtctcttgcgacttcaacagcaactcccactcttccacctttgccggggctggcattgctctcaatgacaactttgtcaagctcatttcctggtatgacaatgaatacggctacagcaacagggtggtggacctcatggcctacatggcctccaaggagtaagaaaccctggaccacccaccccagcaaggacactgagcaagagagaggccttatcccaactcggcccccaacactgagcatctccctcacagtttccatcccagacccccataataacaggagaggcctagggagccctccctactctcttgaataccatcaataaagttcgctgcacccccccaaaaaaaagaaaaactgtgtttgtagaaggcaaacaactctagtgtttcagtctgagaatgtactaaaaaaccatttactttc

SEQ ID NO: 18739 - DNA, 1175 bp, Mus musculus
aagggcaacactctgctgcctacttacactgcacttcttttcgctgctccgttgccctatccttcgtggatcacaatggaagaagaaatcactgcacttgtcattgacaatgactacggcatctttctccttggataagagttatgagctgcctgatggaggcacccagcacaatgaagattaagatcattgctccccctgagcacaagtactcagtctggattggcggctccatcctggcctcactgtccacttgccagcaaatgaggatcagcaagcaggacaacgatgagtcgggaaccctccatcatccactgcaaatgcttctagatggactaagcaggtgccaggcatctgctgtatgagttgattctgaagtatcgatttgccctggcaaatgtacacaactcatgttagcctcatgaacctggactaagcctttaaaaagaaatttgtccttgaagcttgtatctgatatcagcactggatcgtagaacttgttgctgatttttgaccttgtattcaagttaactgctcccttggtatatgtttaataccctgtgcatttcttgatttagtccttagttcatgtggcttggtcacttggtggctggggagagcacactgtggaagagaaatccccagcttggtggatctctgtgagctccacatagtgatctgtgcaaggtattaaccgacagcagatgtccaggtttcccgaggctggcaagggctcctgaaccagttaccactccttcttgctagtctaacagggagggaaagtccaagccttaggaccagtttccgttctggtttttccctcctgaccgccatgggttgttacttgccctgagtagagaacgtttgcatcgacacctgtatatgtatccatcctttcaatttatgtaaggtttttttttttgtactcaattcttttagaaatgacaaattttggttttctactgttcagtgagaaccttaggccccagcaacaagtcatagtgtaaagaaaaataaaagcgctgcaggaacttacaaaataaataaatagctagctagataaagtgagggcctaatgagatgcttccaatttaggaataattaaaattaagaacattaatgaattttcacatcagttctttttccaaaatcattgaattttaaacaatttcaat

SEQ ID NO: 18740 - DNA, 1339 bp, Mus musculus
tgacagaatttttgctatatcccagcaacagcggcagcagcgaggcaagtcgaagaaaagccgaaaggcgggtaagcattacaagtttgtggatgcggttcctgatattttcgcacagattgaagttaatgagaagaagattcgacagaaagctcaggttttagctcagagagaacagcccatagacgaagatgaagaaatgaaagaccttttggattttgctgatgtcacatatgagaagcataaaaacgagggttccgtgaaaggtggctttggacaggtgcggatggtgacaagtcacaacagagcaccttcactgtcagcctcctacaccagactcttcttgatcctcaacattgccatcttctttgtcatgctggcaatgcaactgacttatttccagagggctcagagcctccatggccaaaggtgtctttatgcggtcctcctaatagatagctgtgtcttactgtggttgtattcctcctgttcccagtctcagtgctaacgccaaggccatgagcctctcaggatcacgagaggtcaggaaatgtatgcatgtatttcctaattggttataatgtctcgtccagatttacttgagcaaatttaagagaagttgttttcacacacaaaaagtgggggtatggaaagccctgagctagacacacaaaggatgtacctagggtgtaagaatggctttggctgcccccttgtgtttctggaaatgtttggctttgctggctgaccagtatctattagaagagtcaaaaatacctggctttttctttcttttttttttttttttacatcagctttctgttactataaagaaaaaaaatgaattggactttattatcattaatttaattctgttagaagcttccagattctgtattatggaacatatggaggcacataattccaagcaatacaggctgttaaaatataaataatgggaactgtgattataagacctggaaacttcatgaaattacgtgataaaatgatagcagaagatcataaaggaactgaaattttttaaaatggaaaacatgtaagaatgaacatctgtttgatgctgtttgtcagtgcaggaatggtatttgtggcttttcgataaataatacaataacaggtaatttcatattctcttcctcttttatgtaaaatgtttatagacccaaagggtaaagtttttgaaataaactattttatatcttgaaactcaataccaaagaacatggaactaaagttttggtgtgattctgatgtttttaattagaaaagtttcttcaagtttattttgctaaataaaccaatcataattatgatctct

SEQ ID NO: 18741 - DNA, 1187 bp, Mus musculus
aagtccagctgggtgttcagatccagagcctaatacgggcttctctagagtaggaacctgttgactagaattgtgatgaaatgtttaaatctaagagccccagcaatctggatggcaactctgaagttgcctagtaaagaatatccaagtagaagttagtggcagaaattgttttcattttcagcccagtaacacgggttacacagggtgtttccatgaagtttccagtgctcggcctggtgtatgctgatctgagagtgttttgtgacatgccccagatattctgccctgccctgggtagcatctgtagattgtgtattgcaactatattaccatgtggcaccatagctctagtgagttctttttactttcatcaggaaaccatttaatttgtaaaaatttattcccttcaggtatgatgccagcttgaaaccagttccacctccagattttggtaccccaacattgcattattttgaggactggggtgttgtgacttatggaagtgcactacctgcagaaatcaacaggtcattcctttccttcaagtcaggaaaacttggagggcgtgcaatatatgacattgttcatagaaacaaatataaagactggatcaaagggtggagaaattttaatgcaggacatgagcaccctgaccaaaactctttcactttcgcccccaatggtgtgccgttcattactgaggccctgtatgggccaaagtacacctactttaacaacgttctaatgttttctccagctgtgtctaagagttgcttttctccctgggagggtcaggtcacagaagactgttcatcaaaatggtcaaagtataagcatgacctggcagccagctgtcaggggagagtgattgcagcagatgaaaaggatggggttgtttttatccgaggagaaggcgtaggagcatataaccccatgctcaacctgaagcacattcaacggaatctcatcctcctccacccacagcttctccttcttgtagaccagatccacctgggagaggagagcccgctggagacagcagcaagtttcttccacaatgtggatgtcccttttgaggagacagtagtagatggggtccatggggctctcatccggcagcgagacggtctctataaaatgtactggatggatgataccggttatagtgaaaaagcaaactttgc

SEQ ID NO: 18742 - DNA, 2274 bp, Mus musculus
agaatatcccaggcttctggatgactgccttccggaaccaccctcagttgtccgccatgattaggggtcgggatgcagagatgttaaggtacgtaaccagtctggaggtgaaggaactgagacaccctaagactggctgcaaattcaagttcttttttcgaagaaacccctacttcagaaacaagctgattgtcaaggaatatgaagtgagatcatctggtcgagtggtgtctctttccactccaatcatttggcggagagggcatgagccccagtccttcattcgcagaaaccaagatctcatttgcagcttcttcacctggttctcggaccacagccttccagaatctgacagaatcgctgagattatcaaagaggatctgtggccaaacccactgcaatactacctgtgtcgtgaaggaatccgtagaccccgacgtcgcccaataagggagccagtggagattcccaggccttttggcttccagtcaggttaatctttgcatttgaaaatgcggccggaactggtcccttctcacctgtgcttgagcaaatgcaacgggtatgcagtgttttgatttctttcctcctgacttttctgcatcttctatctggatagtctccacctcgagattaagactggacatgcttctgctttcccatggccttcatgctgttctgaattagtatctgctggttcacggccctggcttataccctttctaagctcaacaatgaaactgtatgttacactgcctttacactgtttggaccctattgttttcagtcttacctgtttactgccacctagatgtcttgctttaactgggggcccttctatttatctgttcatcatgtggcaacgtggacacagagtttttggacagttgctgagcctaaacattgaaggagtgggccactgtctgtgtgattttttttttttttttttttggcaccactttctaggttatatcacactccattgtgtttgccagtgctcctcaccctcactctcccacctttctcctgctattttaaagaaaagtagttcagaaacatctgtaaggccaggagtcatttatacttagcatttcctgagaagatactctgtaaaagaggaaacaactctgccttgtctcctctcttacccactccccagcctggttagcaagctctaaaaagcttccagggagacagctagatggaaacagctgagcccttcctaatatatggaagaactaaagaagttttgatgggtactctaagcagaaaaagtgagctgaaaaggcttagaatcaaaataagtcagataaaaattgggctgagaatgaagacaggacacagcttacacatcttggtcagtcagtggtgatgggaagagaactaatttctcaggaaaaaatattttctctgagtgttgaatgttgcctagatagtgcttctttaaagaagcagtgcaagtttgagttattttcctctctttatatgtgatctgatataagtgaaagtataatattttgcccatcttttaccaatatttagtaaaatgctacttgtttcaacttactgaaaaaatttaaacacttttgtttgcatttatttgaaaccatttggaatattgtaagacaactcactctgtagaccaggctggtcttgaactcagaaatccgcctgcctttgcctcccaagtgctgggatcaaaggcgtgcgccaccactgcctggctaacagtagtctttataatactgagactgaatattcgtaacagttttcgatattactccaaattcttagaaacggcttggataattggtcttaatcaaatgtgtcaaattattgttttcatggaaaagtaaatatgtgacttgattgtcttgatatagttataaaagtactttgtcagcactgtatatttgttgccatttttatgcatgatggtaaataaaagcatggcatcctgttagatggcttttttttttttttaatccccaacctggccgtaaacttgccttaatgggtttgtataattgacaagattgttgaattattcaattccttaaacgtacacaattgacatcccagaggtaccaagagtagttgtttctcctgcttgaagagtagttgttactgtcattgttttgttgctgtagaaggttgacagttacaactgcttactgagattgcagatcttcccacacaacttgtgcagtatcaccataccttcacttcttcaggttcacaatttctgtctccacatatgatatttttcatgtg

SEQ ID NO: 18743 - DNA, 1151 bp, Mus musculus
gttgattttctgtggttgttggttgttcgctagtctcacggtgatggaagctgcacattttttcgaagggacggagaaactgctggaggtctggttttccagacagcagtccgacgcaagccagggatctggggatcttcgtaccatcccaagatctgaatgggatgtccttttgaaggatgtgcagtgctcaatcataagtgtgacaaagactgacaagcaggaagcttatgtactcagtgagagtagcatgtttgtctccaagagacgtttcattttgaagacatgtggtaccaccctcttactgaaagcactggttcccctgttgaagcttgctagggattacagtgggtttgactcaattcaaagcttcttttattctcgtaagaatttcatgaagccttctcaccaagggtacccacaccggaatttccaggaagaaatcgagtttcttaatgcaattttcccaaatggagcagcatattgtatgggacgcatgaattctgactgctggtacttgtatactttggatttcccagagagccgagtaatcagtcagccagatcaaacactggaaattctgatgagtgagcttgacccagcagttatggaccagttctacatgaaagatggtgttactgcaaaggatgtcactcgtgagagtggaattcgtgacctgataccaggttctgtcattgatgccacactgttcaatccttgtggctactcgatgaatggaatgaaatcggatggaacatattggactattcacatcactccagaaccagaattttcttatgttagctttgaaacaaacctaagtcagacctcctatgaccacctgatcaggaaagttgtggaagtcttcaagccaggaaaatttgtgaccaccttgtttgttaatcagagttctaaatgtcgcacagtgctttcttcgccccagaagattgacggctttaaacgtcttgattgccagagtgctatgttcaacgattacaattttgtttttaccagttttgctaagaaacagcaacaacagcagagttgattaggaaaaatgaagaagaaaaaacgcaaaaagagaagacacacaggaggtggtggctgctttctagatgctgatcctgagggccatgctgaccatgaccacc

SEQ ID NO: 18744 - DNA, 1177 bp, Mus musculus
acaaatggcataaggcaggccaagaggctgggtctagatatttctagtttagataataattaatgtggttcctatccttaatagtaaaatttaagataagatttaaagcaatgcctctttattaaagtattaaagcttgctttaatagctattcataggtattaattggcaaccaaactttgaaatatgatggtaatgcttctaatattgattttaaagatgataaattgttttaaacttgggttttgctttccaaaagttatagatatattctaatattgcaacgaaaacttaaaaattatggttaaaattgccagtgttccattgactgcagcttgcagtttgatttcaaatttaagatctttaattcacctgtatattgtaattaagataattacaagagtaatcatcttttgaaagcgctaatacagctcacttcatacaaaactgtgacaaagttatctagttatgtttgtctttgtgcatagattagaccctcaaacaatcagtttggctatagttgcagcctggcaggaaactgcagtatgggcaattttttcacaacactaaagttgtgaagagcgttttaactgtaagtcatcttaagaaagagtatcaaaagttagaggcgtagcctgttatattgttcctctagaattggtccttattgcaggagggccaagatgctcagattaaaaggtattttacgtttgagtcaatgcatggctctgggcagccccagagcagcttgtggcctttctttggttttgcaaacagtgcctgagaaagtttttctctgtgttcaagagaatttctttttaacagtgttgcagatctattcagatgtttagaataatgcttaaattcaaagagttttgcttctagtgaactggtaattactagaaaattttgcctctaggtatggctaatacagctttaccttatgtaagaaaaatttttattgtttctgcttctatacaagaagccaagagttctaatctttcagtgtatatttttcctaagtgaaaagtattttattaactaatgcttctcaaaggaagtttaccttaaatccttgctctcacccaaaggattcagagacaatatacttttattacttagggtattagtttactacaaaaggttttacaaaaaataaagaaagcttttataattg

SEQ ID NO: 18745 - DNA, 1173 bp, Mus musculus
aagcttggttttgtttttgttttttagtcaaagtgttagcatcttttattcaaatgaaaagataatcctttatatattaactcttactagtttactttctgcttattttccatctcataactggatatttttactttactggaccctaaactgaattctttttattttttaccattgctttattaaatgcaaaatagtctacctgttgtgctcttttcttgagtagagtgcagggtggagttcagggtaaagttgaaccactctggtggcacctcaatattacatcgtattaaaaaaagagataacagcattagcctttcaataatgttcctctaattgaaataatagatcaaaattaatggatacttttctttctaaatatcctccctgataataaaaccaagtaacacttgaaagaataaacttgaccctgagtttcttgaggttttggaagattaaagtcaaacctggtaaccaaaggactgagtggtgggtcgttcccgctttaaccaacttgtttgagaacccctagttggccagatatggtgcctggtatgtagtaggacttaactgaaatgggttttaaaaaaataactcctgaactgagtagttaaaaatactgtgtagaaaagtattctatattgctaggtttgttcttttaacagctgagatttattaagatgcattattttgattttaatcactgcctaaaacactttgggtggtattgatggagcggtggattttcctccaagtggctaaatgcaatttgacatacttttcatccaaagttttgtacatcctgttgttttctaatggaaaaaaaaatgttaatatggcttttttgtactactaaaaatagctttgagattaaggaaaataaataactcttgtacagttgagaatcgtgttattaagtctgtattggcagtgtgtgcagtggcctttgctgtggttatgaacactctggattataagaatcatttggtccaattcctattgcttgtaaataaagttttaccagttgatataatcaagcctactaaagtagggtgtttttacagattttatgttttaattcaagttttaggggaaataactgtttcaaggtgtttctataactcaatttaggatttagaggacacatgcttgatactgtacttagaatgtgag

SEQ ID NO: 18746 - DNA, 1877 bp, Mus musculus
ggcggcgggggagaaggcggaggagcccgcgcccggcgccaccgcgggcgatgcgtcctccgccgcagggcctgagcaggaggcgcccgctgccaccgacgaggccgcggcgtccgcagcccccgccgcgtcgccggagccgcagcccgagtgcagtccggaggcgccccccgcgccaacggccgagtaagctccagagccctcacgcaattcaagaacttttccccccagtttgtttgttggagtggtgccaggtactggttttggagaacttgtctacaaccagggattgattttaaagatttttttttaaatttcacattttttttaagcagcaaattttttgttttttgttttttttaagcccccttccccacagatcccatctcagatagttgtttccaccattccgacaggccgaggacgtgttagacagcttcctctgccttctttctttacttttactttttttttttttttttggcatcagtattaatgttttttgcatactttgcatctttattaaaaaagtgtaaactttctttgtcagatctatagacatacccatatatgaaggagatgggtgggtcaaaaggaataacaaatgaagtgataggggccactatgggaaattgaagcagtgcataacattgccaagataatatgccactaaaatggtggtgggtgtaaaggcttagggttcttgtcctttctttctttctttctttctttctttctttctttctttctttttttttttaaagaaaaattattacgatgtattttgtgaggcaggtttacaacactacacgttttgaataagaaggaaagagaaaaaaataaaaacaccaatacccagatttaaaaaaaaaaaaaaagatcatagtcttaggagttcatgtaaaccataggaacttcctgcttatctcatgttagctgtaccagtcagtgattaagtagaactacaagttgtataggctttattgtttattgctggtttatgaccttaataaagtgtaattatgtattaccagcagggtgtttttaactgtgactattgtataaaaacaaatcttgatatccttcagaagcacatgaagtttgcaagtctccaccctgcccatttttgtaaaactgcagtcatcttggaccttttaaacacaaaattttaaactcaaccaagctgtgatacgtggaatggttactgtttatactgtggtatgttttttgattacagcagacaatgctttcctttccagttgtctttgagaataaaggagaaacagatcttcagatgcaatggttttgtgtagcatctcgtctctcgtgttttgtaaatactggaggagctttgaccaatttgacatagagctggaatgtaacgttgcttacaagcattgctattcaactcctgcttaaggtgttctaattttctgtgagcacactaaaagcaaaaaaataaatgtgaataaaatgtacaaatttgttgtgtttttttatgttctgaggctgacttctaggtcttagattaattttttaggaaggccttgcatgccatcaaaagtacatttggctgtggtttttgataagaagttttcaagctcagaaattcataatcagtgtcaaattaagtatgtaggaagatcttatactgtgtcagttgttaccatttacctgcttttagttatagcatgcgagaataagtcctttaagacaaaagtggcttgaccctaagactttcaaatgtcttatgagactatttcataaactgtttccttgtcattgcaggtccagaaagttacattttataatcaggaagaatgtggagttcagactgcacataagtcatgaaaagatggccaaacctgtttaaatgt

SEQ ID NO: 18747 - DNA, 1300 bp, Mus musculus
gttaaataaagattatagagttcattgtactgaatgttaacagatcagtctaaaagtaaaaatagagtcactcacgttaaagttccatagcaccatgctgacactaagtcattttgctgaacttccgaaggcttttcaaggtgtattgtccagaaggattctactgggaaggaagaattcgttctcctgccccaacttacaagaccagctgtggctgatgttgttgaattctaggaaccagaaagagagggatggaggtaaggctttttttttctccttgattctttttcccaaagtctatcttgtgagtccttctagcaaactcccaataaaaggcttgtccttgacattgaacctctcctttgtgatgtaagctgactatactaacacaagaaggcattccttggggcgtgattccgtcctgtgcggctgttctgtggaacaggaggcagttgttttccgtccggcttcccccacaccgaagtgcgcgcctccacctcatggaagactcgatggatatgtacatgagtcctcttaggcctcagaactaccttttcggctgtgaactaaaggctgacaaagactatcactttaaagtggataatgatgaaaatgagcaccagttgtcgttaagaacggtcagtttaggagcaggggcaaaagatgagttacacatcgtagaggcagaagcaatgaactatgaaggcagtccaattaaagtcacactggcaactttgaaaatgtctgtacaaccaacagtttcccttgggggctttgaaattacacctcctgtggtcttacggttgaagtgtagttcagggcctgtgcacattagtggacagcatctagtagctgtagaggaagatgcagagtctgaagatgaagatgaggaggacgtaaaactcttaggcatgtctggaaagcgatctgctcctggaggtggtaacaaggttccacagaaaaaaagtaaaacttgatgaagatgatgaggacgatgatgaggatgatgaagaagaagaagaagatgattttgaagaagaggaaactgaagaaaaggtaccagtgaagaaatctgtacgagataccccagccaaaaatgcacaaaaatcaaacctaaatggaaaagacttaaaaccgtcaacaccaagatcaaagggtcaagagtccttcaaaaaacaggaaaagactactaaaacaccaaaaggacctagttctgtagaagacattaaggcaaaaaaatgcaagcaagtacagaaaaagcacatggaacattcctgggcactactggtaaattaagccc

SEQ ID NO: 18748 - DNA, 1754 bp, Mus musculus
gaaaggttgtcatctgtgccggctggaactcactgctcacgtgggaagaatgttagtgcctccagctcagcagtggctgaggacaagaagagggaatgtcacttgcccacctgtcagtatgcttacctcatgtatgattgtaggggaaaatgcccgtaggcagcttattttaaatatttatgaattttagtgaattcttgtgttgtcttaaccatattttagccagatccacatgctaattattaaatatttctcacatataaaatatgattctgaatatatggacagtaaatggcatccgatttatatggtatccataggttatcattgtaatttttcatcccattatttcatacacattgtatcatgaataatcatgaattcatttaatattctcaggttttctcattactgccaaagtgtgaattcctgcataagaaaaatctcagatcccagcaacaacaacttgggaagtttgtactaattactatatttgttgacattctttctttacagttctttattgttggaaggtgttgaacccctgagtacatgtgaactagaagtggatgccgtagctgctgacatcttaaataggctggacattgagggtatgcgcatgattattcctgatatgcattgttactcacaaaatgtaatgagaaagcagagcagaggtgttaccagagaagtgagatacggaaggagaaggcaaggtttacctgcgggttatataccatggacagaagtttagactcatttctcatcagtgtttgaattttacttagtttgtgtgtgtgtgtgtgtgtgtgtgtgtgtgtgtgtgtgtgttggtggtggggggtagggatgggttccatccaaaaaattaaaatggacgcaccatgataaacttggaatagagataatttgctcattatagcacacaccacatttttctaaaataatatcataaggcatgatagtacatgcctttaatcccagcactgagacgacagaggcaggcagatctctgttgggtcccaggccagcctgggttacatgatgagttccaggccagtcagggatgcactgcaaactagcccccactttacttattaaagtttaagagtttatagagaagagtgtttcactttgacccttgtagtattgttgtgattgtagctcagattggtggaaaccctgggctgcaggccatatgggaagatgaaaaacagcggagaagaaacaggaacgaaagctctcaaatcagccagcccgagtcacaaggtaaaggcccaacaatgctctgatgcttctaatgggaaaatagtgctctcagcactaaatgttgtgtcttaattacccctaatttttctatgtaaatctcctgtggtcattgctgtacaaccagtaaatctttataattatctacaaaatatcactttattatagtcatccctctgtctctgtgttcttgttttatgtgccgtatcttcttgacacagttagttgtttcctttccatcctcaaatatattcttgtcttctttttccgaataaggtactgaaaccatgaatccctgctcagaaacacctttttatttgttctactttgaaaatgttggccatgaaacattgtcttcactgttctctgaaactgtcatataaacgcaccttgatcatcatgtgaaactgagggaaatagtccttcgtaattaaatgttataatctgaaagaatttgaaggctcacacactgtagatgcagcaaaatt

SEQ ID NO: 18749 - DNA, 1122 bp, Mus musculus
acgagcaagctatcagtaagaccctccatctttcacaaagatgctgctacattagaacctccgtcttctgctaagattacctttcagtgtaaacacacaagtgccctttcttcccatgttttaaacaaagatggtttaactgaagacctttcacaaccaaacagtacagaaaaaggtcgagataattcagtcacttttacaaaggaaagtacttactccatgaagtactctggctctttaagtagtactgttcattcagataattcccacaaagagatttgtaagaaagacaagtctttgccggtatcttcctgtgaaagtagtgtttttgattatgaagaagatattccatctgttacaagacaagtaccaagtagaaagtactcgaacatgagaaagattgaaaaggatgcctcttgcatacatgtgaaccgtcacattagtgagactatattggggaaaaactctttcaactttgctgacttaaatcattcaaaacgtaaattatcctctgaaggaaacgaaaagggaaacagcacatctctcagtggtgtatttccctcttcgctaacggaaaactgtgacttgctgccgtcttcgggggagaacagaagtatggcccattctcttgagagcatcactgatgagagtggactaaacaaacttaaaatcagatacgaagaattccaagagcataagatggaaaagccaagtctcagccagcaagcagcacattatatgtttttccccagtgttgttctttctaattgtctcactaggccacagaaactttctcctgtcacatacaaattacaatctggcaataaaccttccaggttaaaattgaataaaaagaaattaataggtcttcaggaaacttctaccaaaagtactgaaactggagccacaaaagacagctgtacacataacgatctgtacactggtgcttccgaaaaggagaatggattgagtagtgactcagctaaagctactcatgggacctttgaaaataaaccacctacagaacattttatagactgtcactttggagatgggtcgttagaagctgagcagtcttttggactatatggaaataaatatactctgagagccaaacgcaag

SEQ ID NO: 18750 - DNA, 1340 bp, Mus musculus
ttggccatccagctaatcaaattaatgaacgtatggtttagtttgagttgctatctcaaaatataaggtggggaacaactaagaaaggatgtcaccctctggcctccacatacgctaactcggccatataaaaacatactccaaacacacacagagactaataatagtgataaggattctgatgagttagtgtcatgggatgctaaaataaaaataaaagtaaaaccttttttcttttgaattggtgctgccttctaaaagaaattaattttgtagttaaatagaaaagcatattactagctgcagatagagtattttgtctgcaattggggtgaatggggaaaaagaaattgttatatttgagacaccaaagaggaccctaagtctgttagataggaacttattttgggtaattatttattgaaacagaaacatttattctaaaaatgtatttatagggaaattggtggccggctcctaatggtggaaactcgacttccaaacgacctgattgaatttgaaggagacttttccttggaaggacttcgcctgtggaaaacagcattctcagcaatgactcagaatcccagaccagggtccccacttcgtaatggccaagcagttgtcaataaagagtcaagtaatagccataagatggtagaagataaaaaaattgtaattatgccttgcaagtatgctccaagtcggcaactggttcaagcatggcttcaagccaaagaagaatatgaacgttcaaagaaactccctaaaaccgagttaactccagtgacaaaatctgctgaaaatgtcagcccttcacttaatccaggtgacacatgtgcagtctctccacaagtggataaatgcccacatacactttcttcttctgcacataccaaggaagaagtcagtaagtctcaaattgctttgcaaacatcaactacaggatgcagtcagacactgctagcagctgcctctgcagctgtccctgaggaagatgaagatgataatgataactgttatgttagttacagctcccctgattctccaggtattccaccttggcagcaggcagcatccccagacttcagatcattaaacggggatgacagacattcatcaccaggaaaggagctttgctccctagctgttgagaacttcttaaagccaataaaagatggtatccaaaaaagctcctgctctgaatcgtgggagcctcaagtgatctctccaatccatgctagggcaagaactgggaagtgggatccactttgccttcatagcacaccagttatgcagaggaaattcctggaaaagcttcctgaagcaactggccttag

SEQ ID NO: 18751 - DNA, 1233 bp, Mus musculus
actagattgatggtgaagcagtcaatgaagtcttacaagcaggacagagccctgtcacggatgctcaatgcccgtcaactaggactaaagctgatagcaaatgtcacgtttggctatacggctgctaatttttctgggagaatgccgtgcattgaggtaacacatttaataagagagtagttactgaagtattttgctttgttactaaactttaaaatgtcatttccatgacatactagtttttcttaaattggatctataaacatgcatcttttcttatttcaataataatttttaaattatatgcatatttccacatttactaacataaggtttcagtgccagtttataatagtatttacagtaattttgatactaaataattccttttaattttgttgttgttttgttttgatttttcaagacagaatttctctgggtagccctggctaccgtcgatctgtagaccaggctggcctagaactcagaaacctgccttcctctccctcccgagtgctgggattaaaggtgtgcagcaccatgactgactccttttaatttggtagttaggtccaaatattacattaaagaaaaaacaccccatggactggagagatagttagttcactcagtaaagtgcctactgtataaacatgagggacccacacgaaatgtcagaaacagcaacttgttacgtgtatccaagtgttgagtgggtggtggcaggaggatccctggcgctcactggctcttactgactagtctgtttaactgcataaactctgggttccatggaagaccttgtctcaaaaaggtgggaaataagtgactaagacatctaatgtcaacccctgaccactgcacacacatgtcttgtgcacagctcacaagaggcaaagtgaatctcacacctgctcaagagctgacattagagttcatcaggtcagctgcttaatgaagcaagcctgctgacttcagttcagtccctaggacccacaaaaatgtggaaggagaaaagtgggttccatggagttatcttctgccttcctgtgtatgctacagtcacacacgcacacacatttgtgtgtgtgtgtgtacgtgtgtgcgcacgcgcgcagtcacgtaccaacataaggctagagagatggttcactgggagaaggggagagaagcgggatgggaacatggctcagtcagggcttgggggcactgtgcacactagagagcttgagc

SEQ ID NO: 18752 - DNA, 1177 bp, Mus musculus
taatcctccgtgcatagccagtataatcctccgtgcatagccagtatagcccagaggtcgcctgcagcacagtaggagaaagacatcgagttagaactgcagtgttttctttacgtccccaccctaacctcatgaaaatcaaaatgttcccctgtgctttgtaagatttctccttctgagcttttcttaggaaactaaatgcaatcaagctgatgtgtctgattacatttgtttcttccatagcagaatcactcacagtccttaaatttgaaatgacaaagcatttagatgtcattctgcagtcagattgtttagataatttctctcttctttcactgttttatatataataacactaaggactcatccctaaaccaggtaacagtgctatagagcataagtctcaaactgttacagcactgtctacttgatatcagctgagcaaagtgtacataattctcaaagaatcaacaatctaatttgaaggattgctcttggtttcaggcttaattctgaatagtttgttggcaagatgccttctctgacagtctatgtacttaatttggatttgaacaggaaaatgcttgcttatgatcggcgctctgagcctcgagttggagaacgagtgccatatgtcatcatttatgggacccctggactaccccttatccagttgataaggcgcccagcagaagtcttacaggatcccactctgaggctgaatgccacttactatatcaccaaacaaattcttccacccctggccagaatcttctctcttattggtattgatgtcttcagctggtatcaagaattaccaagggtaagtttactaaataacatatgtcctgtaaatagttcacttcagaattcagtgtaactggattttatgtgtgcagtgagaacttagcctccattattgaaacttgcacggacgtcgtgctcgccaggcttcctggaggagagattataaatatctgtgtgtactgtctcagcttctagcaagttccaaaccacagaaacattcaatgaatccccaagagtttcagtgctgattggccatttattgataactcaataaatcagctactgaaaaaaaagtgaattacaaaattacttcaaaatgggaaggtttttttttttaagattttatgagtgtttttgtttatgtgggtgt

SEQ ID NO: 18753 - DNA, 1695 bp, Mus musculus
tttcagtgtaacgaggtagcattgtaaatgaaagtgaaccaagaaataaaatgaatcttgagaccgttttgtactttccatgaaatatggctaggcttctgagataggaaacagacagaattctctgtactgagttaagtttgccagttaactgaggtagcagaaaagaaggaatctaaaaacctgttatttacataggtgtgtgtgtgtgtgtgtgtgtgtgtgtgtgtgtgtatgtatatacacacagaagcattcctattctgttttctttcatcttcagatatgcaggaactgtacaggttcctttgaccgacatatcccgtgtgtttccctcaactgcccggtacttttcaaactctcacgagtaaacagagaattatccaaggccccgtacctgcgacagttactggaccagttttaagttagcagtgtcacagaattccaggtgctctctgctcagtgtttaccactcagttcctctgcatggtgctttctcaacctccatcaagtcaaagatgttcactgtctgtctgccatccaagactatgaagatttctgctaacgggattaaaaaggatacatgctgctctctggatagcttacttcttacaatgtacaaattccgcatcatttcacctttgaacattgttttataataatacaggtgttggatttgctccagtttatgtaccatcttgtaaatccatttgaacagatcatgtttacttccctgtggaaggaacactgaaaacctcttaaagtcattcgtgtgtattccttaaactgtctgtatcaggatgtgttgcttagagatatccactcactttataattttgactgcaaaatattttgtaaatacacttttttacttttcaaataactgagtaaaataatgtgcaatgaattttatacaatgattttcacgttgttggtatatctcctctaggttttgcttgactcaaaggtagatttgttactttgatcaaactgtgcaaatagtaccatgtgtagcatttttgaaacattcttttctaaagaccgctgtcttgctatagctactaacggggcattgtgaggaactgtgcaaagacatttttgttacaaacctgtgggcctgttgcaatactttaaaaataaaataaaaaaatttattccattttgcttgttttgtatagacatttctattgcttctaaatatgcttaaaatattttctttccttatgtactgtacagttaatcttatttgccatcccttgaacacaaatgtgtatttaggatatttgtataactgtataaaatgaaaaaggaattatgtggtcagtgcattgttttttaaactggaaatccttttgttttgagagttaataatggaaaccaaattaaaaattgaataaaatatgaaatacagtgctatgacttttatcttaacataagcagaattctcttcatcggttctataagcaacacgggttccatctaaccctagactttcctaaattctaatgaggtaaatttggggcctagagatgtagctcaattggtagagtacttgcctagcatagaggaggccctgggttccatcctcagcaccacataaacacagcacagtaagcatgcgcttaggaggtggaggcaggacggcctggagttcaaggtcatttacatggtagatctgaggccagctgggctaca

SEQ ID NO: 18754 - DNA, 1154 bp, Mus musculus
gggacggctcagcaagtaaaggtgtctgttgccaggcctgatgacctagagttcaattcccagaacccacgtgtggaaggaggggactgactctcgagagctgtcctctgacttccttacctgtgccctggcaccatccctccttcaaatagacaacacatgccaaagtggtaagagaacagacatggagccagtgggcgactgctattctgaaaggaattcgggttgtggagggttgcgtcacagattttttttcccagacagaagctttcaaactgcttggtctgtcagtgagaactcctttctccatagtgggctgtcaagggaggaatcctgactttcaaagcagcttggtgttcagtgaagctgccagggtacaaggagatccatcctcttagtgcagccctttgaagcatggttgggatgagggctcctgtccttaccacgcttggctcagctcagctcagctcagctcagctcagctcagctcagctcagctcagctctcagctccagcttcctgcttccccagggaactggtggcttctgtttcaggcaggtccaggtagatggagtttactctcccttggcagttttcaccctgggagagatacgaagcataatcactgggtactgctgctggtatttactctccgtttcctccattgctaagaaccatcccatttggatgtgcatgtcaccccacctgtcagtataatgtctttacacttgtcttggatgctgcattattaattttcattgtagaaagatcatcttgctctcagagccaagtgtgatctggatcttatcacgtcctgttcgtgtttttattctcagtgtatgtgtgttacccattctgcccacttgtcatcatcctgtcaaactgacggctggctaccttgtccaattggaactttgcttatgaggtcttgcttctttctctcctgccctctctgtcaagaacagttctcccatttgtaactgtgcgtggtaatcctcccagcaaggctccttccacacctggaagaagcctagcgtcgtgtaaaagaatcctttccctaccaacctctcattgctttccggatcaattatttatttccttgtgtagtttgcatccactgaagtatgtgttaccatagccctagacttgctccc

SEQ ID NO: 18755 - DNA, 1170 bp, Mus musculus
cagggaagtgagaggctcccgggacccagtggggatgactttagccaaactccccaacaaaggggagacagaacctgtagagactacctccaatggataggcatgacccccagttgagggatggggtcacccatccatcttaaagtttttaacacagaattattcccatccaaaggaaagacaaggacaaaaaaacggaacagagactgaaaggccatccagagaccgccctacctagggattcatcccatctgcagataccaaactcagacactattgctgatgccaagaagtgcttgctgacaggagcctggtgtggctgttccctgagaagttctaccagcacctgaccaatacagatgcagatactcacaggcaaccttcagaatgagcccaggaaccaaaatggaagagctaggtgaaggactgaaggagctgaaggggattgcaaccccatatgaagaacaatatcaactaactggaccacccagagctcccagggactagatgaccaaccaaggagtgtacagggagggatccatggctccagatacagaggcagcagaggatggccttgtctgacatcaatgggaggggaagcccttggtcctgtggaggtttgatgccccagtgtaggggaatgctaggacagtggggcaggagtgagtgagtgggtggtggagcaccctcatagaggcaaaggggagggggggaagggggaatggaatagggggagtttgtggaagggaaaccaggaagagggatatcatctgaaatgtaaataaaatgagtagtaataaaaaatgagtctagaaatacataatttctcaactatgcaaaaaatgatgcaatatgaataatatgagggccttcgcaaatctaaagaatgagccagtttatcagaaaactacaaaggcggacagatacaaaggcaggttgatttctgagttcaagaacctgggacacagccagtccaggcccagatgtggtagacatgatgatttcaggactgagtccacccagccagttgaccatctgtgcctaacagaggcaggcaggtctgtgaattctttttcaatgttaaaaggaaatgtgtgtgcatgttgtctcctaagagtcaagaggctgaggcacggatcctgattcctaggataatcaaaaagaaacctg

SEQ ID NO: 18756 - DNA, 1175 bp, Mus musculus
agctgtcttcagacactccagaagagggagtcaggtcttgttacggatggttgtgagccaccatgtggttgctgggatttgaactccagaccttcggaagagcagtcgggtgctcttacccactgagccatctcaccagcccaagacgacctttttctacagattattccagacatactgcttgttttgccttttgttctttattttgtgttcttgtggttcattatcagctcaagctgtagctcaggctagctctgaactcacaatcctcatgcctccatagtgctgggattatagccatacaccactatgcctagcttcagatatacaatgtatatagtaaatactggggactgaagagatggctcagtagttagggaacatggctgtttttttcccagagaaccagagttcagttcccagtccccatgttgggtgactcacagttgcctgtgacactgtctccagaggatctggcatcagagggcacattctcacatacagacaggcatacacattaatgaaaaattcttttaaaatgtgtaatattaaaattaaatagcttagactgggcatggtaggacatacctttaatctcagcatttgaaaggtagggctggtggatttgaggccaagcctggtctacatagtggtttccaggccagccagcattatggtgagaccctgtctcaaaaccctaatagcgaaaataaataaacaccttgggctgctgctcagtgggaaagctgcttggtgccaagcctgacaacaggagttcaatccctggggcctgcacagtggaaggactcttacaacctctacacatgtgctgtggcactcctatacacatacaaacacataaataaatgtaattacaaaacaaaacatcaaactaggggctggagagatgtggctcagcgattaagagcactgacttctcttccagaggtcccgagttcaattcccagcaacagcatggtggtttacaaccatctgtaatgggatccaatgccctcttctggcctggggatgtatatgcagcagagcactcattaaaaaaaatagaattagggggctggagagatggtttagaggttaagaggactgactgctcttctaaaggtcctgagttcaaatcccagtaaccacatggtggctcacaaccatccgtaatg

SEQ ID NO: 18757 - DNA, 1773 bp, Mus musculus
tgcaagcagccatgtacaactaaatactgagagatactaagcatcccagctcgatagagagtaataatagctgtgaaaataaaatgtaattctttatttttatttcattattttttgtgtgtatgtgtataggtgtttcacctacattatggtttgtgcaacacacattcaaacaaaaatagctgggtgtgatggcacaagcaattgtgatgtcccagcatttgggcagatggatggatgaatctctgcgtttgaggacagactggtttacatagtgaattgcagaccaaccagccaaggctttgtagtgaggtgctgttaagaaataaaaaaaggtggaggagatcatgagatttgcatatgatgccagcatctatgatgaaatttctctgattccccccaaagggatgtggcccagttagcagaagccctgacgctggaagccctgactccatctctagctccacacaaacgttgcggtggtgcttacctgttttctcagaactccagaggtggaagggggaggggaggagaagaagccatcacaaccatgtggttgtgagccaccatgtggttgctgagcattgaactcaggagctctggaagagcagtcagtgctcttaaccgctgaaccaagcctgaaagggcttatttttaggtcccaatttcaggttatagtccatcttagcaaagaacaaagagtaatgctgaacaattggaaggaccatcccggagctacatcgcatacgcgtatgtaaacgttttcaccttttaaaagtttcctctgctgttaaaggcacgtctgtggaaacgtttgggaaatactgaaatattaggggtcttgtttttggggtttgttttgtatttttgttttgtaaatgatgcttggtaacttggcggggaaggtgaaggactgtcttgtcaagtactccggagactgaggcaggaggatccaaaattcaaggtcagccaggtgatttagttagactcagtctcaacataaaagtaaaatgaggagataaatctccctggagggtattagcatttgtgaagacctgggttcagtccccagcaccaacaaataagcaaggaggtgaagcttggagtatcatgtgacctttgtagccacagaagtacaccaggggtcagcagccttgtgttgtggagtgggatctggaggactgggcttctaattggatgcagaggagcagatgagggggaaaaaaaaatccagattattggtatgtgagggtgtggtagtgtatgcctctaatcccggctcagggtactgaggcagagatatcacaaaaaggttaggctaggaaacttatccgaagcctgtctgtaaaataaaatacatgtattaacttcttgtttgtttgtttgtttgtttttgttttttttttttccagacagggtttctctgtgtagccctggctgtcctggaacttactctgtaggccaggctggcctcgaactcagagatctacctgcctctgcctcccgagtgctggaattaaaggcgtgtgccaccactgcccggtaacatttttaatttcatgtattatcagtgtgtatgtgcacatgcacatgtaatacatatgtttgggtaccaacctgaaacaattcacatgtgggtgtcagaagacagctttgtgtagcagtttctctcttgccaaaaggtcagttggcctgacagtgcacgactttaataccagatctccagagacagaagcagacagatctctgagttccaggatagccaggtctaca

SEQ ID NO: 18758 - DNA, 1459 bp, Mus musculus
gttactcaaaaccaatttctacttcatacaggtgttttatgcaatggcaattaaagtttttcttccacaagttgagtctttgtaagaaaatgactccagttgcttgttttatgttctgctgttttaataattgctcctgcatttagagtcctatagtttttccaccacctttgatgaagcaatacactgttacactgtgggcttatattataattttacaccccaggtgagagtttggagatggtcccttgcttaattttttttcctaagacataagaatgtggtctctttattggcatgaacttctgtggaagataaatgacaaaactgaatgtatcaaatgaaaagaactcacagtctccagggcgatgagcaaggagaacccattaaagaaaactccatggaaatgataggctgtgcagtgcaccttaattagcgttaatggagtgcctactatgccctcactaatttactaagtgataggaatgtccactatgtcaaagcagaaatgtagtcctagcattctgacctcagtaagtgctgccgttgccaccaggttttatttactaaaggagattttgattcgaaggagaatctggtttctacttgtcctaccgtcagctggtctctggtcttcctttcaccgtggccttcagatgatcagatgaatgactgaccagagggaggaggcctctccaggttactcagccagatagtgaatgtatgaatggatggaacggcgcaatattctgaatctatttaatggcactagaaataatgggcgttgaagagtcggcatgttggtgggacttaaacagaaaagagcaaactggactaaactccctatttattgcccttctgttttcttggtagtttctggactgatgcagtgatgttttgttccttccgtatttataacgaaacacttttttagcgtttctaaacagagtctacttggtttgagatcaagtggttggaacactgtctggactctttctacacggtgttgattgaaggcttctttggggaagctttcggtcagctttatctgtctgattctgtaatgagcacagcacctattttgaattgctatttggagggccagtgcttatttaagctggattttgtaacccagtagattttggcttgaggtctgatttccccgtcttaaattaagaatcctaatgttgagaattgcataggtttgtgtggaacaaagcctagaacaactgtaggtaaactagtgatctagtctaattacaggtggggaagttttggtgccataatttctctttgttggtgttggacttttaatcagctgaaatgtatttctgtaccacaatgtaagcttcaataaaagtttgcttaattgtctagtaacattgagaaagttttctgtttggtgtctacttaactaaaacccagagaatttaaaacatttgaaggtagaagtgacaac

SEQ ID NO: 18759 - DNA, 1459 bp, Mus musculus; identical to SEQ ID NO: 18758

SEQ ID NO: 18760 - DNA, 1178 bp, Mus musculus
taagtgggcatgcatcaggttaaaaaggtagctgaatagaagcctggttggcaccgtggtgagctgcacttgttcatgatctttcctgtagttgtttcttgagctccttccctggcttcacttagactgtgacctagaaatgttagccaaataaaccatttttcctcaagctgcttttggtcagagtgttaatgacaataagaaaaagcaaactgaaaaaaaaatttttttttaaagatttatttatttattttatgaaagtacactgtaactgtcttgagacactccagaagagggcaccaaatcttgttatggatggttgtgagccaccatgtggttgctgggatttgaactcaggaccttcagaagagtagtcagtgctcttaaccgctgagccatctctccagcccctgcaaactgaaattctttagagtattgctaaagaggctgtgttgcactggatctgtgatagagtttagtgaagttctgtgtactcagttgtatttattgtggctctattttgattgttctttttaaagccactttttaaagagtactggtgtacatagcctcctagttgacggaataaatgtgttcctggattttgctaatcacttacccaaataatgaaaagggaacattctagtacttgatggagaacaaaacatcacagttcacacaagcaagctaactagttttctcgtgagctgtttccacgctctgttcatgtacttattgataattaatgcactgaagggcctcaaatgtcacttgtgaaaaatcacaagtagttggtaaaaatgtagtagacaggaaagcttaagtttaatcccacctttgtcagttttgattcttagtctacattgactgtactaaacccaggctcttttcaagatgaaaattaatcccttcactcaggtagctttagtccagttagggttgctactttgcatccattcgaaaactaaaagaacatggcgggcatatgtggtgcctgaggtctcaggtgagatcattcccatggcaagggacacatggttggaacactgaggcttctttaacaataagcctactgccaggccacaactggaaactagaactacaaatttggaaaaaaaaaattagggttaagtgggtggcagagaagcttaagatagggtcacacttagtccaggctg

SEQ ID NO: 18761 - DNA, 1122 bp, Mus musculus
aacaaaacaaaacaaaacaaaacaaaacaaaacaaaacaaagcaaggaaggaaggaaggaaggaaggaaggaaggaagaaagaaagaaagaaagaaagaaatttatgtgtaaactttttatcatgtaatcatgtattctgaaagttgtataagtgctgaggatgaagagaggaaaaagaactgagctgagattttgcaggctgcatttccattaggttagtggcggcaatctgagccatccgagccaccaccatgacggtgggcaagagcgcaagatgctgcagcacattgactacaggatgaggtgcatcctgcaagatggccggatcttcatcaggaccttcaaagcctttgacaagcacatgaatttgatcctgtgtgattgtgatgagttcaggattatcaagccaaagaactccaacaagcagaaagggaagaaaagcaagtccttggtctggtattgcttggggggtaggggtgggggtggggggagaacctggtatccatgacagtagaaggacctcttcccaaagatactggcattgcctgagtggcacttgctggagctgctgtcgggccaggcatcagcagggctgctggcagaggaatcccggctggtgttcccatgccccaagctcctgcaggacttgctgggccagtcgaggtgttggagggccatatcccaacaaatgatgaccccacaaggaagaggcactgttgcagctgctgtagctgcagccacagccagtattgcaggagccccaactcagtacccacctggccatggggcccctccttcaggtatggtgggcccacctcttggcatgtggcctcccataggtcccccaatggagctccctcctggccgaggaactctaatggccatgccccctcctgggatgtggcctcctcctccaggcacttgagttctgcttttatcttccgcacagcattactgtgcatagctcagagatgtggaccctgttccccagggtcaggttaccacagacctgtttgtttgttaggcagttcatggagtctcactggatctggtttccctttcagggctccctccctgggaaatgtgccctccaaggccctagactcatcttggtcctcctc

SEQ ID NO: 18762 - DNA, 1802 bp, Mus musculus
tctgagtcccttacattcacgtttcccgtggtaacggggctgtgtcgttcacttcaccagcctaaggtgtatgaataaccaggacttgttttcattgtattgcagctatgtgatttcaggagatggaaatgggaaattaaacatctgggactggaagaccacaaaactctacagtcgctttaaagcccatgataaagtgtgcataggcgcagtgtggcacccccatgagacctccaaggtcatcacgtgtggttgggacggcctcattaagttgtgggattaatgggattagtcctttcactgtctgggatcatttttgatccagtgtcttatttaactatttaattattaaaatgtgttggatgacagtttgatttataggtaatcttttcttatatggccttatgatgttggcctattgtttttaagagcttggtaaatttgcctcagagaagttcaatagcaacttcattttgttctttatagatgttatttatatggggaatgacaactggttatatttgacaagtagttactgttggcaggcagttgcgtttgtccctgtgatgtcactgaaaggatcaaaggatcgttttggagtgaagaaaaaaaaatgcctattggatatgggatcttatgggaaatgatgtagctaacgactcagaaaggtgccaggcacttaaccgacccacccagcagggtggcaggaatacaggcggagccacccacagtcacctacagtcacctacagtcacctacagtcacctacagtcacctacagtcacctacagtcacctacagtcacccacagtcacccacagtcacctacagtcacctacagtcacctacagtcacccacagtcacccacagtcgcctacagtcacctacagtcacccacagtcacccatagtcacccacagtcacccacagtcacctacagtcacccacagtcaccgctgctgaatcaagctcttgtcttcttccggttccattatttttatggcctttgtatttttacgtgtaaactagtgaccctcattggttgcagctttcttctaactattaagcaatgtaaaattagaaagcagtccgaagttcctttcttgactctcttcctagtcacgagagacaggactgtgtagacctaagcagaaagtgaggttgtctctgaagctggaactcaagggaacaagccaaggctttgaatgttgcttgcaatcactgtctgtaaggccctggctgcacccagaaatcagggtctcaggctctgctttgccactggatgaataataatgagttccctctggccagagtgtgaagacagagtccaaaataccacttgtaatttctttaaagtcacagttttgtccttaaaatcactctggttttacttgtgaatataaacagtaaaacttttgaatgttagaaaaaaattaaatttcttttcagatctttgaaaaaccattgacattataagaaaatgcctggagccccccagtctgaaaggccacggggctttctcttttttaaatcacatgctgaacattgcactgcctagccattgccatttctgtgtcttccaggaagggtggcatataggaggaaggaattatacaaaaccattctgtcgtccaaaccactattttaacaaatgtgaattactggaatgtagtaagagaaaaacttcaacaacagtattgcatgttaacaaatcataatttcgtaatctcaatttcttttattgtgtttttgactgtttctaaacagagtaattgtacataaaagttttctcttttttgaa

SEQ ID NO: 18763 - DNA, 1099 bp, Mus musculus
cagtccccagctgcaggcagaacacctgtgtttgtgagccccactcccccacctcctcccccacctcttccgtctgccttgtccacttcttcactaagagcttcaatgacctcaactcctcccccaccagtccctcctccgcctcctcccccagccactgctttgcaggccccagcagtgcccccacctccggctcctcttcagattgcccctggtgttcttcacccagctcctcctccaattgctcctcctctagtgcagccctctcccccagtagctcgagctgccccagtatgcgagactgtgccagttcacccactcccgcaaggtgaagtgcaggggctgcctccacccccaccaccgcctcctctacctccgcctggcatccggccatcatctcctgtcgcagttgcagctcttgctcatcctccctctgggctccatccagcaccatctactgccccgggtccccatgctccattaatgcctccatctcctccatcacaagttctacctgcctctgagccaaagcgccatccatccaccctgcctgtaatcagtgacgcaaggagtgtgctgctggaagccatccgaaaaggtaggagcgctgtcggtgtgcttcgggaaacctccccagttcttagctaggacagtgcctcattccacacttagaagcttttaggtggccgtgtgtttatacaaatggtcttaggaaacaggaaaatgtggaacttacattttaaatgactttcagggaaaacaacaacacgtttaaccaggagggcttcttaaaatgaatgagaagttgacagccctgggttgggggtgtggctcagtggttagggtgcttgcctagcccgtgcagagccctggggtggatcccgagtgctatgtaagactgagcactcagtaatcccagcactggagaaatagaggcagcgagggaatcaagttctaggtgattcttggctacacttagtcccatgccagcctagtctatctgagactgtctaaaaaagaaatttaaagcattggtcttctatgatacagaaaacttaataagcattctctctagtacctatattaacctccttaaaat

SEQ ID NO: 18764 - DNA, 1220 bp, Mus musculus
tcacgatggctttgctttattaattaaatttgacttttgtatctgcttcccctgcatgtatgtgtgcgtctcccttcttccttcctgccaggagcagaagagcagggaagccagaagagggcactgggatctcctgggactgaagttatagggggttgtgagctgccatgtgggtgctgggaatggactctgggtcctctggaacccaggcagtgctctaaccatgagtctcctcccccaatgtgttttattgtgatagtgattgtacacttcatctgagacattttaaatgtgtctacctagagttacataatttctccatctctaaactggacacaattggtcacttgccttagtttaaagcaagccctagagagtttctcagctgcaccataagaatctctcagttgttgctcctgaagcacgtgacctcagaaaagcttatgaaaaataaatgccaaggctatccatagtcatcaaggaaaatgttttaagcgggagacaaacagaaaggaaatcagcttcctgatgctgcctgtcacctcaggagaacagactgcatctctcagggggaaattgggtgtgcatggtatcaaccaccctgcaggcaggagtgtggctgtcctctttggctctgagtcaatgcttgggttagtgccataccatcctccctggagaggggtgatacggcatcggctcatcagctggcttcctctatttgattgacagcagttttcctaggagtagctggagtgcacttggaagtgaggctgggaatgaggggatagaggattgttaggtcctgaggaagctgagtcaacgctgtggcctcttagcagcttccctgcctcagggccggtctctggcctcatccctctccgtgttactctgtcattgcaagcacccaaccgaccccatgcttcctatattctgtgttgataatggaaatgcagacgtgacttcacttgtgtcaccacggttgtgcaagcacaccctggttggtgtgagcctctggactcatcccaggtccttctgtctttggcttatgcccgtcctttgtaatccataggtttgttcagctggggcaaagtcaacataaacaggaccgaggtaaccagcagctgtgttcccgttgctcagatggagttataaaactgtaagtacactataacttggaagttttttatttcatttatttgttttgtgtgtgtgtgtgtgtg

SEQ ID NO: 18765 - DNA, 1175 bp, Mus musculus
gccttcttcttacagcctctggtagatacagcaaagttgctcaggccacagacaatcaaaaccactagtgtagtctgctgctgcaagaatatttaaaatattagcaaagctcaggctttgcactttttttgttcattggctcatattagaataaataccttaattcatgatttttctctataaatgaagctctgtgcattttaaaattatggttattgttaataaatgattattaccaacctgattgacagaaattttgagttaattgtgtttaatgaagtgtgtgtaacacttgcacttagcttggctggtaactgaccagaggtcagtacagttggttttctgaaatgttgcattacctacagtactgaaacaattaatgcccgacatggaaacaaccaacgctcattctcgctgcaggaatgagctgcatgtttacaggtgtgaagctgctcgcttgcttcgggttacataattgaagcaggtggttttgggggcctatgtgtgggaacaaaaggaagccggtgttacagcccatatcctcagatagggaactgaggtacagggagaatatgtggtggctgagactattgagcccgagtgtgttacacacagtagtttctgacctagaaaacactgtttgagcgcggtagacaatagcgctccagcagttactctactgcacttctttatcctccgcagtagcagacggagcctgctggattgaaatcaccactcgacactgctcagaaacagagcttgttactttaaggtgcggttagtgtttgggttgggattttttttttttttttcttttttagtgtcacccagctgtataggttattttgatgactgttaaatccggataattcccaacataaatgaacagttaaaccagaggcagtatcaggcaagagtgtggggctcagcctagctcacatggtgctgagtttgaatcttgagaacaggcatggatatggttacttacccctgagaccctgcttttccgtcagtggaaaggagatggcactagatcccacacggcttttacttactgagttaattattctctcatttattacatccgaccacagtctcccctccctcccatcctcccagtctctcccatctcccctctcctccagatcctctcctcctcatttcccttccagaaa

SEQ ID NO: 18766 - DNA, 1173 bp, Mus musculus
tgccacattcaaacacaggagtctatgggagccattcctgttcaacccaccacagacggatttcctcagaaaggatcgatcagctaatgttccttccagtacagctgagaacactcagcttggaagtttttaccactttgctggaagtggtttagtccaaattttgtggataaatagcaaagctagatttttatgtgttcactggttctgctgctgtgtgtcagggttgctgtgtttgctcctactgcgtgttgatctgggccattcttagattccagtagtatttctctcattaagtggtaaaagatggatgtctaatttctttctttttttctccctaacagttcaaaatactatttattaaactgataaataagtgttatttatattactggtaaaagaggctactcatcacaaacttaattctagaataacagataatctagttccaaattttgggggaggggattaatttaaaattattatatccagtcctgtgtcatttaaatataattagtaataaaacttgtcagttcttaatggcatttgaatagcttctaggtgttctgcttttaaagtgtaattgagtatagaagcaggcactcacttgtcttcatactggcctcttcagacgaccataaccaaaggctaccttgcaggaaaagctactttattttacagtttaaagtgtccaggcagactgggcagagctgtgcaggcctttgatcccagcacttgggaggctggcaggtctctgaattcaaggacaaaatagtctacatagtgagttccaggatagccagggtaacatagtgagacccctgcctcaaaaagccagaaaaaaaaaaaaagtcgggttgaagagctggctcagagcactggctgctcttccgaggtcctgagtcaattctcagcagctccatggcagtgtgcaactgtgtaacgtgtggtttcatgagaccggatgcactctcctggtgtgtggatgtgtgcagacaaaacacgcataaccataaaataaataaaccataaggacaaagtacatacaacaacaacaacaacaacaacaagtgcccagccagtgctcagtcttgaagggtggccttgtagcccaagctcaggtgactgtgccaccatagagacactgcctgttgtgacagcagcagcagcagc

SEQ ID NO: 18767 - DNA, 1192 bp, Mus musculus
atagtaatttcagtagactgagagtctgatcggatctgcctgaaggtctcagaagttacagttgaaatgtcacctgtggtgcagtcacctggaggcttagatgccaaggaccagcctcagcctggagacgggttctgagagaaggggtgtctggaagcagtgaaaagaaggacaagagaaagtcagattgtggatccaagttgtgttctgcttgatccagttttccaggctgctgtgttccgctttctccctggagatctctttgtctatattctaagagacctctctgtccatgctcttcttgcttgtgtgtgtgtgtctccatccgtctttcactctgtctctctctgtatgtgtgtctatatatttatctgttctccaagcagttctttttatcctaaattctctggatagctcatctcctgtagaacacaaagtccagtcttattttacatagcaatccagtcatttactctaattcttaagagacagcaagcatacatttttttcccctaatgtagcaaaagaattcagagatctgtctgcctttgttaagcacaaaagatctagttgggtgggaccttgccctgaaattacaatttctaccactcgtgggcctaaccttgctctgtctgaccttgaacttgctctgcctgcctttgtatctctctgacaagctggctcatagtgtacctgcctttggtctttagattcatgaaacccctcatacttcatattgtatccttatattttgcatagttgaatatatatatcactcatgtatttagagctcttttctgcagccttaagggctgtcctgaaggtcccagaattttccattttgctgagacattagccacaccttcacctcctggacttatgctgtcagatcatcatggagtcacttgctctgggcaagcccccgagggtcttctttcttgttcttggttcattttgaagtagcagagggggaagaacatcggtgagggtaatatgtcttatgagatatttagggttgttgtacaataagaaaatgtttacctcttgtcttagttagggttttactgctgtgaacagacaccatgaccaaggcatctcttataaggatgacatttaatttggggtgcttacaggttcagaggttcagtccattatcatcaaggcagggacatggcagcatccaggcaggcat

SEQ ID NO: 18768 - DNA, 1232 bp, Mus musculus
ttcttggcagccttcgatgcagcctggatggtgaagcggtgggcagagggcgctgggccgctagaggtgttggctgaacggtgaggccggggctcagagactagtcagtactggtagggaagacatgattcgggacacgggtcaggaagagggggcaggagatgctgaaggtagggatggaggcacgggactacaggaaagccctgcagttgctcaggggtgggtgctgacagctcccttcgtgtctgtgcactgccttccaccaccaccaatagcgagagcttgtaccagcttctgtcacaaacatcccccgagaatatgcatcgaaatgtagcccagtatgggttggaccctgccacccgataccccaacctgaacctccgggctgtaacccccaatcaggtcagactctctaccctaccctcccgcccatcttcccagatcacctccctttcccatgccaggtcttccctccttagctgctgtcccagcagggggtcagccctaccacagcaggctcctccctgggggctgaaggggtaggtggtccgctgccttgagactgagaggaagctacctcaggtacaggacctctatgatatgatggacaaggagcatgctcagaggaagagtgacgagccggattccaggaagacaaccacaggtgaacaggcttgcacgggctagcgaagcatcttctgcatgcagcagggctctagggtagtggtttgtacccctgtgctgtgttctactggcagtgctgagtagccacagccgtgctctgcagtgccagcgcttctgccaaccccttcctgcggccatgggtgtaaacccagactacctgttctgtgagcctctgagcttcgctgcccttctgtttcccctcccctggcttttatggagcaagggtttagaatggggaaggaggccagcagcaggcgtgtgggccttgggcacagcatggctctgctcccctagggtccgcaggcacggaggagcttctgcactggtgccaggagcagacagctggctttcctggagtccatgtcactgacttttcttcctcgtgggctgatgggctagctctgtgtgccctggtacaccacctacagcctggcctgctgtgagtcctgcctctctcccgggcccagccctccctgtcactgcttggtaagaagatgctgggcaggagttggcagcccagcgagtcccagctccacctgtccctagag

SEQ ID NO: 18769 - DNA, 1192 bp, Mus musculus
ggcaaactcttggatcccgtggttccgtcattactgagtccccgaactctcaaaaacaaaaattcacacttaaaaataaatcaagcttcacggaagaaaaggcggctcctacagagccctaggcgagcgcggtcagcagaactcaagctcagcggtctcagagcctccgggcttcttacccgcagcgcgctaccgaggggtcacgtgacacctcgcggcccgcctcccaggcggcgcaggtggacgcccctcgctacgtcacgtgggcagttccatccttgccagggcggggggagatcatccgtggtgcagatgtgaggaaagctccattgtgccgcgcgtgatcctcccaggacaagaaggacggcttgcgacgcacggactgctgccctagaggtctccgcggccgcttctctccctccggccggcttcctagtggtctcgcccgttccgccccgccccgccgggctgctcacgtgaccggcgcgcgctcccgcggggcgggcttctcggggggcggcgccgcagggacgcagtgctagacggagcctgctttgccgcagcttttctcccggacgcctgggctgaagacacaatgtcgggctcctcccgccgactgctctgggccgccacctgcctcgccgtgctctgcgtctcggccgcgcagcccaacatcaccaccctggctcccaacgtgaccgaggtgccgaccacgaccaccaaagtggtcccgacgacgcaaatgcccaccgtgctaccaggtgggcgcccgccgcacgcgccgagccggtggggactcgcgcaacatggccgcccggccggaggacggcggcccgacggggtggggggcgaaggcgacaggcgagctaggccgcgagcgttgccctcagaggcgccatccccccaagcgcctggtaactccgcgccgcagctcgggacggcgacgtggcttgcttccgcggtggcagttaggagtaattggacgaggcgacgcgccccgcggtcggcggggtgcgcaaactttgggctcgtgggacagactcttgtcctcccctcgaaacttctccggaagtttctaatgaaggagttcgggataggtgggggacatttagagatgagttgggtgtccctttgccccctcccaccagcgagcctcctgtaacttcacgttgacttagctgagcggtgttgg

SEQ ID NO: 18770 - DNA, 3035 bp, Mus musculus
atcatgtcctggacagaatgatggatggcattctgccttaagtggagataaattctagttatgaagacatgactcaggaagacctgtatagaatataactcggagcacagttgatgcctggggggtctgggaattataaataccatgatacttactgaggattctttgtttatcatcatagcagggacaacaaataccacactgactccaacctcccagcctgagcggaagtcgacctttgatgcagccagcttcattggagggatcgtccttgtcttgggtgtgcaggctgtaattttctttctctataagttctgcaaatctaaagaacgaaattaccatactctgtaaacagacctgttaaattaatgtggactggcagttaacttgtgcaactcactgaaaccaaaatattgaagaagtcccacatggaagacgctgttccaggatctttacctttccaaaggatgcatacaggatattttggagcatcatcctcgaagaaaagtcagttaaaccatttagttcatcaggaatatttaaaatattctgcatgaatccgtgtggctgtcgtctttgtttaccatggctgctgctgtgggactgttttttcctctgacatgccaaatgtaacttctgtaagtggtggagagtgctgtcctgtgtaggcagcttctgactgcagttgaaatgtagtcccctagaatcctaaaggctgttattctcatcctagttccaggtgtaacttggtggccagaattgagaagagtgccaaatgaccacccgtcaggcagattgagggccatcacttcaaacatagattaaatttgtttagcactaaactatccctagagtaaatttttatgcttgacaagttgtattttatatattagaaataagatgccacacagggcaatccagatttagattaaagaaaggatacacagacattaatctgcaacaggtcttgttcatactcataaagtgtaccgtattaagaaatcagaacagtgccttaagacagactgagacgtcgtgaaaaatgtgttcacactgtgggaggcaaagcttggtctgagaatgtaactgttgatgtgagcagcagaaatctgcttatagataacatactgttaatatttaattaaaagcattgttttttctagagctgagaaatagaagctaaagaataattagagctgaaaggcttccttatatcaaaccatctaacatttttcttagggctgttaaactagacataaaattgatttatctttctctctgtacacaaagtatccaaatattataccttaaggattcctaccaggttttcttgaaaagtggcttttacatgaggcaagaaggaagtagttgtagatagaatcattttctagttctttaaatgagacaatcactttgttttctaatagatgtgacctgtgtaacttaaaaaatctgagggtttgagagaggttgctctagatttccaatgacgataccctggctgaataggcttttctcttccttgggcctttacttcttttcttcctccttggtttcagttcccatgtgctatcattataatcatgcagacttttacttcagttgcttctgaaagcactaagttttcagttttggagttacttctcccttgcctctgacacactgcacacgtctagaggctgtaattggaaataggcttttggtttcctgtgccattcaagtttggggctttcatttggttacagagttcagcgcttggttcccagggtttatatacgaaacagcggattgctgtgggctggttcataaagtgaaactaatgaatctatctctttgtcacttgctggtacagctagtttgtttcacttgcacatttgtacatatatctaatgttttcaagtgccttacttgtttaaactctgacttcaaaggtttttggggaaagataggtttacctcacagttatgtttccattgtaatttctaggttcctcacaaaaatctatttcagtgctgtagctgttagttttaagtgagtgctaaagttcttttaaaagtacacagaatttccattccttataaaggtggcaaaattggtttgtcatttacctccatgtgactccttgccccatataaatgtcagcatatgtagcaagttttctaagaatgtaacttaatttgaagctcctgaaattttgagcactgctctaacattgtaggaagttagtgacattttgcaagtctctacaaaagctcttgccacagaattcactgctgccctgactcttcaccatctttctttagcaaggtattttgagccattaatgattttgggttttttaatccagaaggtatataaaagccttttcagagttttcatctgatttgtcctgaggatctagttctatcaaataccttattttacctttgccatacttgctgcacaagcagacactgctggacttagaagtttctatttgagttccttaaactacaaaactaatatgtatgtgtaccaaactgatttaaaataaatgtttattagtctcttgatcaaaagtgtcatattttgattatgaaattaacattgtgtttgccttacctgtccatttgaggctgggttgtccattgtttcttttgttcctgtagactggtatatagatgggaactaatggctgtgaattagtggagaacagaaccatgggaatgattgatggttgggctgatggaaggggcatgcgtctagctcacattaaccaagagagagtgagtgagagagtgtgtcacaggactacttttgtggagcctgttgttctttcaactttgtgggtcccaaggattgaacacaggttgttggacaagtacccttttccactgagccatcttgccagctacatcctaccctttagttctgagtacatagggagtaaaactttgcttctgattagcgtgtcatgtgctgctgtggagtctggttctgttggaccgtgtgcaggaacatctatatttgattacttgagttacactaaagttgtt

SEQ ID NO: 18771 - DNA, 1475 bp, Mus musculus
tctatgacttctgacatgcacacattcttgtcttcagagttatccgtgtgtgtgtgtgtgtgtgtgtgtgtgtgtgtgtgtgtgtgtgtgtgtggtgtatatgctgtgtgtgtgcttcctctctaactggaagaattggcttgcggaaggcaaggctacctgaccagcagtatcagcgagtgactcaccgaattgaacctttgaattaattgtaatctttaagccaacaatctagtcctctattttagggtatccttacattaatttttacctaaaatgttagatttcttttctcttcaggtccgtaaactgcaggaaaaaattgagaactcaaggataaatgaatcttcaggtatccatggcaaccctaaaggatctaagaacttaaaaaccagcccccggaaatgtgtgagtgaaaccagctcttttcagagagacagaggctttcaaccagtgcaggtccacagcctgcagtcgaagctgaggcgcgatgacatcaagtgggagcagtgaccaaggcaaactgtctgtcatctaaatgaacctcaccagtgagaccgcacgccgtctccgtggtttttatttcatatgctcttaaggaacccttgaattatgtttctgactgctataaagtgtgaagtcgtacattttcagaataatggctaatgacctaccagggttcctggcatctaaatgactgcttttcattgttgttaaccaaaggccttgacctcatgaagctctttagaagcatctgttttgcagctcccataaggtaaatccaagaagctgtactgaatggatggatgctcactgaaatcaagggagtctgacctgtgggtactattccacagtttgatttttgcaggctgtctgtcacctgtagatccacacggaatgagcagaattccagacgtttgtttggtgtccctggaactgccaccttcccttgtctcagcggtgctcatgcttgctctgtttggaaagggagggcacagtaattgtgcagttttgtgaaaatgaccttaactcagctctgctatgacagccactaaatgagatgcataactgattaacctttgaagacagttctaattcgtcttccttcctctgctacgccctgtctccttttaaactccaacaattgattttatcttatatgttatatgtgatttacatccatatatgacaatgtaatagatgtctaggacccaaaaaggtaataggattctataagaccacaggaaaacatgaattaggtaaatgtggtatcatcttttatactttaaaattagtgatgtcacaatggatttctctgttgtatacacatgttacataataaatttatactttttgcctttctaaaagcctgtggaaatattctgggacaactagaaaattgatgccatcaatggaaatagaaactagagctgggcatggtggtgcacgcctttaatcccagcgtttgggaggca

SEQ ID NO: 18772 - DNA, 1191 bp, Mus musculus
agaccaggctggcctcgaactcggaaatccacctgcctctgcctcccgagtgctgggattaaaggcgtgcgccaccaccgcccggctgttttgaggcttttaaaaacttttttgtgtatgtattacaaaacagatttaaaatattttactgatttttaaaattatgagtcctactatatttgtaccagtaagcacaaaatagtttcaaactcataattgacattttactaattttcacatacagttagtagttcagaattttgatatctgtggcacattcactaaaagcaggatgtaaagagtaatggtgttggcaaatagccctgtcagaagcagacacaatctctaagtactgtgctacacttaagtaatggcaactgtcgacaactgactccatttattctgtctctaaacctgctcttcccttcctgtcctgttccatatcaacatgttaactccctgacggtcaaaggtactggagctgaggctggagctccgttggtagtgtttgcctggcctgcatggcatggtggtgcatgcctgtattcccagctttggaaggtgtagcaaggggaactagaagattggtcatcctcagctaatggtgacttgaagctagctgggactgcacaagactgcttcaaaaacaaaaacaaaaacaaaaaaaaacccccaatcttttggcgaggggatttgtatctgtactaaacatacacactcttgtcatttcccaaacaatatggtgtgactaccattggcattgtataaggggtagacacaatctagagagtgtatgagtgtatggatggaagggcgcgcacagcgtagagagcagtttatcaacctccactggaatctaaatggctcctacacagttggagccagtctgtgtcagtccagctagccagcttaatgcagaaaacttagtttcctagacaaaaaacttgaacccaaactagaatttcgtttggcctttgtactaagaaatgaattattactaaatgtacttttattattctcttagtaataattactcagataaagaggtgccaagctgagtgtagtggtgtatccctggaactcagaatctgagaatctataaattaaaggctagtctgatttacacactgagctccaggccagccagggctgcatagtagacagcatctaaaataaaaggaagataaaata

SEQ ID NO: 18773 - DNA, 1891 bp, Mus musculus
gctgcagttctaatgcagacctcaggacggagagcctcagtgtgctaactgaggggctttagtgttaatggtcctttacgctagtggtgtaattatatatggagcagttatatggtagagtcaactgtatgaatctgtgtagtttggaaaggaaaaatagggtgttttgtacttgagttttgtattttaactacccatcattccagctttttatatactatatttcatttatgaagaaactggttttctctgaggagtcacttcagtctgtaattttaaaaaagcaacagtcggaatatttatagttgattcttcactgtgcatacctatatatgcccttatccctttaaatgcctaagtagggcatgctactaagaatcaagctggtgaaaggcagatgtgcctatctctgttggaagccgactaaccctccgccctccgtggactcgaagctggaggtggactcagaaccctctgggttgcagtcacacgcagacccccttactctcccagtagtgtgtgtggcagttgcttggtagtagaaacctggtggggcctgagccctgccgttggcctctgcctcttgtggttcctgagaaggcagtagaacctggacaattgccacccctctgttttactgaatcccccgtcagtgttcatcactgttgtgattttatcccgacatggaaagcgctaagaaatgaactttccagttagccacgcgctgctgcaggtgtttgataaccctgtttaaactggtgctgtgtacatgggatgtactgatacagaacttctcttctagggaaagctaatcatttgtcaatgatttaaaaattattgtcactactgttgattactgtggactaagtgagcctcgtgaaagagctgattggaatttgtacctttgtggctgctcatgcattttccatggtgctacagacagcctgcccgggctggtggctaggaaacgtgcgtgttcagcgatgcctagcgctctcactcctgagcactctgacttggtgcccacccctggcgcgtgctggtttggcagtatgaaatgcccacgagggttttgtatctcacaaaggttatgtagcctgttctgtgaataatgagggaagcagtttcttggtggaaattttaacatgcctttagctgtggcagtgatgggctttctttttccttctgtctgggtcaggttgtgcacaagtcatgttatttggaaggtgcactgcactgctgtttacatgggcattttatgcgggtgctttgaagtgccttgcatcagggattagaatcaattgaattctttttcatgggactatgtaaagcatgtagtattgccttggtatgtaactattgtagttttaccatggagaaatacctttaaattataactctggagagcagccatgaggaccctctgtacttcctggtgcttttccttaacatggtgggtgagtagcgagtgcggggcaccctgtacatggcagggtggggcgttctcattaaataatactgagatttaaaaaaaaaaaaaaaaagacataaaacttttatgattgcaataagccttaaagcactagagttggacaggatctgccttctatgctattatgtctatttccctgccaataaccctgaggtagcacttgccacgttccgcctgagccgctcttacttcacctgaccagccctcatggccaggtctcacgatcccttaccccatggagtcttctcctctcttttctcctcccttctcttgtggtcctacctccaaccccaagcctgagaaccaaaatcctgcctacttctcttctgcccagctataggctgtaggcatctttattcaaccaacagttttaaattaaggagcaagtttgcatagcat

SEQ ID NO: 18774 - DNA, 2119 bp, Mus musculus
gggaacagggtgagacaagagtcgcctcggcagagtgggagagcagaggcagagtgctttgatttactctacacacagaacacgtggagagctgaggcctgccgggccctggagaggctcaggcgagacttggacggcaatgcctactggggtatttgcactcccaccctcagactccccacacagagaggccaagctctcttaagaagcccaattgtgtgtcagacttgacagaggtatagcctgggccctctgtaccttctgttgggaccctgctttcagggtagcttggccattggccaccaagtagcattctcagtgtcttaggtccctaacaaggaaccggtctgttgagacatctgagcaggtgaccttgtggaccttccagacttagaaccagcccatggagtcctgatgagaaagaagtgtgcagtgagccctcctggggagccctgcacgcctgtgacaatgtcacagaacgccaaaggcccatgtggaagactggcgttctcttcaggctctagaacctgataccttgtaccaaagatagagaagagcatggggcaagccttcgccatcctagctctaggactgactgggctcagcatacccggttaactgtgactgcattagaggtgtgttctccattgtatcctctgcaacataatgacggctgaagcacatagaactgttttcctacgtctcctgctaatggaggagcgtgcactaggtgtagcacaaagcagacattggggcttgatgattagcgtcagcctaaggagaggtacaccccatctcaggtgtgacttcagccaacttctgaacccatgtacaggttcatagggacagacaactctgccttttcttgaagcgctccatccactgaacgagcaagcagcctttgaatctcttgggaaagagctttaagagtaaggcggggagaaaacaagccttccctccctccgtcatcccccggactaagggaaaacaaaacaaaacgctacctattcgctaaacacaaaggaaaggtaataagagactggctgagtcgtcatcttcttcctgtatttgggaacatcatgattaggtggacgagtgttgagttttttaattaaaagcagaccttttgtagaaaagcaatcactgatacagaggtacaaagaagccagttctgggggggaagaagtagtgggaacacagggcatgaggttagagatgtctgtggatcacgtctgtcaaacaggactagagaaagatgcccaagcaactgacaggaataagtggtgtttgaactaaatctcaagtgtatagcatacagattagatggatgaagtattttctcttgttgaattttattcatttgtattctttcatgaatgaatgattgcaaggcctcggtcacactccaggaatacttgtgcgactgtttttttttttttttttttaaagcgtgtgtctggtcacttctctaaaatgatctccttgtctggcaatcagccttctctgtagacttgtcccggcacattatgtacgtgggaaatgtggacaggtgtgaaggagaccagaagaattggtgaatactgaaaagtgtgttgtgcatttaggcttcacgtggttaacgttttttgggtttttttttttttttaagaaaaaagttgcatgaatgaaaacaacctctgtacacattacctgtaaaaatggcctgttttgatttcttgcttctaccccacacaaactagaatttcgtgtggcgcgtggccatgtttaaacacctgcagcagttggtcgtctggtttgaggcagacgcaatcctgctgcattctgggtactgaggaccttgtctaaccatacgctgccgtgagttagctctgccgcctttcttctcaaggatcaaaaccagtttgatttgggaatctgccccttcccggtggaatggaggtgcgtacttcccgtggcgtttgtagatattgcctgtgtattccatttaaaaccataatctagtttgtaaaagagatgatgacgcatgtaaataaagctttggtgacactctatctcatgcccaggagtctgtcatcattgtcctgttccccccaggaaagagatggttgggtttgtgagg

SEQ ID NO: 18775 - DNA, 1104 bp, Mus musculus
gagagcgacaaaccacgtctgcaccagctggtccaacggcactgtttgtgaaacgtgcatatcttttgattcttttcaaccttgctgtgtgtacgctgatcttcctagaagtgtatgagtgacaggcaatagtatacaaggtgagatatctctatatatataggcttagtttgtaattcttcaagtgattcatggaaatacaagataaggcaatttaaacttttttttaaaaaaaaactttttctgcttctgtggaactcatttttgttgttgttgttgttgtttccaaaaagttatggtgctgtataggtgctttctgttgagcctgcagagtgtgagtgtaggtggtactctctttggtagacagcgtagttgggaacacctttggtacatacaaaactggtgtggcgatgctctgactagcacagcatatgcatatgtctccaaagtgatatctgaaggctttcttctttgcataaaaagcactaggcatttaagtgtataaaatattttatcatgtacagcaaagatggaactctatgcatggcgtcaggaatgtgggctaatgttctagcacaggcctccccgcttgagttctcgccattgcctgcactgtagctgtgaacaccaacccaggcgtgccacccaatcccctgcctcagcactggcccccttgtgcacctttgcttcctgagcactctgggggtggtgaagatggccatcacagcccctagcacagtgagagttccactgggtattgtcacaggtctctcctgcctcgcttggattcttgtgtctgagcgatggccctgttgattccactctgccttttatggaatctgtacgttaccacgcggctgtggtcctgctaggcctgtggcacgttgcctttcccaagctgctacatgtttataaccttcatttttaaagtccagttttgaaaacgtgtataggagtcgtgtgacctgctggccagagagcccatacttgcttatccaatccttgatggtgatgctagccacgccctgatgcttcagccatcagctgtccccgcaactgtgtcattttggtggaggactaactggctttctggcttcccagagt

SEQ ID NO: 18776 - DNA, 2285 bp, Mus musculus
taggacagtctctgccgccccaacatgaacctttccacttaacttagtgctttgtaccaagtcaaaaagatatttgtagtttacaaaaataaataatgttagcctataaaactaagcagggctggcaagatggttcagtggatttaaaaaaaaaaaaaaaccattgccaccaaacctgatggcctgagttcagtccccggggcccacgtggtggaaataaaagccaggcctggttgcgcacccctttaatcccagcacttgggaggcagaggcagacggatttctgagttcgaggccagcctagtcaacaaagtgagttccaggacaggcagggctatacagagaaaccctgtcttgaaaaaccaaaccaaaccaaaacaaaaaaactcaactcccacaaattaggttcccccatgtgcgtatgtggtgccttcccttcctcctaaaagttacaaaaaatgttttgtttgtttctcgggtggtttgttctttagaactacctggagaggtctttagaaacggaagtctctgaatgtctgtttgaactggaccttcctgctcacagttcgcctttctctttctccacagaactccatccggcacaacctgtccctgcacagccgcttcatgcgcgttcagaatgaaggcacgggcaagagctcttggtggatcatcaaccccgatgggggaaagagcgggaaggccccccggcggcgtgcggtctccatggacaacagcaacaagtacaccaagagccgaggccgggcagccaagaagaaggcggccctgcaggctgccccagagtcggcagacgacagtccttcccagctctccaagtggcctggcagccccacgtcccgcagcagcgacgagctggatgcgtggaccgacttccgctcgcgcaccaattccaacgccagcaccgtgagcggccgcctgtcgcccatcctggcaagcacggagctggatgacgtccaggatgatgatggacccctgtcccccatgctgtacagcagctctgccagcctgtcgccctccgtgagcaagccgtgtactgtggagcttccgcggctgacggacatggccggcaccatgaatctgaatgatgggctggccgagaacctcatggacgacctgctggataacatcgcgctcccgccatcgcagccatcgcctcctggcgggcttatgcagcggggctccagcttcccatataccgccaagagctccggcctgggctccccaaccggctccttcaacagtaccgtgtttggaccttcgtctctgaactccttgcgtcagtcacccatgcagactatccaggagaacagaccagccaccttctcttccgtgtcacactacggcaaccagacactccaagacctgcttgcttcagactcactcagccacagcgacgtcatgatgacccagtcggaccccttgatgtctcaggctagcaccgccgtgtccgcccagaatgcccgccggaacgtgatgcttcgcaacgatccaatgatgtcctttgctgcccagcctacccaggggagtttggtcaatcagaacttgctccaccaccagcaccaaacccagggcgctcttggtggcagccgtgccttgtcaaattctgtcagcaacatgggcttgagtgactccagcagccttggctcagccaaacaccagcagcagtctcccgccagccagtctatgcaaaccctctcggactctctctcaggctcctcactgtattcagctagtgcaaaccttcccgtcatgggccacgataagttccccagtgacttggacctggacatgttcaatgggagcttggaatgtgacatggagtccatcatccgtagtgaactcatggatgctgacgggttggattttaactttgactccctcatctccacacagaacgttgttggtttgaatgtggggaacttcactggtgctaagcaggcctcatctcaaagctgggtaccaggctgaaggatcactgaggaaaggggaaatgggcaaagcaggttagtgcgccacaatgcaatgggaaagcatcgccggtgggcggggcggggggggggcgggggaatggggggggtgactcctatcctgacagcgcatgcagcagtcaggactcccagccggttcatcagagttttacctgtaaacaagacagggctcacagctgtcagtaataaaaagaacacccaaatattcaaaaagctcactctttatgtcctctgttgtcactatgaggcaggttctcctaccctctgtgtgtgggt

SEQ ID NO: 18777 - DNA, 1174 bp, Mus musculus
ctgccacatcagactctaccgaagcagttcttatgtgccagggacccataaatggcctaaaactactggcagcccacctgggcgaaccgtgaactctgctgaactgtcaagcctgctggctgagtctctcttttcttacaccttctttcacctgcagtgacaaacagggtctgaatgaacagattccaacgtccctttagcctgtggagtgcccgtttatggaattttccattcatgctgcatgcttacctttctttaatatgtgtgtgtgtgtgtgtgtagtgtgtgtgtgtgtagtgtgtgtgtgtgtgtgtgtgtgtatgtggtgtgtgtgtatgtgttgtgtgtgtgtggggtctggtggccttcctcccttccatgttagcttgtctgtgatggtccttgctcagctcatgcttaggcagccatcttgatgagacgtcatgggggttgcttatgacatttctaggagacagtttcacatctaactcccagttcttctgacacacagtcttccctccccctctttaatgacccctgagcctgagtgacagagtagtgttgtagatgcatcagttaggcctaggcttcacaactgcattttaattggttgtggttttctgtaaaggacttcatctgtcccaaagagacatttattacttgatgagcgattagaactctactcagattctagagaagggtgtgcaggatcgtgtttcccttggataggttctcttacaactcttctggtccctctttgggcgacagatagtacactgccgcccgtgttctttattaggcgcttcccgtttaccctgcaatccgtgaaatagattaacacccagcgtgtatcagtactaagacagcgccctcctgtagtatgcagtctttagaggggctggtttatgcaatgcatgctcggcctccttagctcaccgtagcccagggaacagtctgatattacacagtctagattaagtttaaatgagtgacccagtggaaactctttcagaagatgaaatgccagtgtgtagctggttagtctattcattggagatttttttatgtagattttggagatgtctggtggtcatctgtctgtgtaattggtacctagcagtgtcctggactcattggttgattcatttgaatgttcagcaaagtcattaggctg

SEQ ID NO: 18778 - DNA, 1202 bp, Mus musculus
attggttacatcctgtactgcttagtcaccacactggtgtaatggccattagcacttgggaagctgggctgctgtgcccctgctctgcctgaaaaaccgggagttccagtgagggagagtagttccactgggcgcccgtcaccctggtgactctgggtgctttttgcccatgagttgccttgctggctccctgctgttttgagtcacaaaggcatcagatgtcatcaggtcaagccaaggacttccttgctcattcataaggccatggcacaaggcacaggtcaaaatataattctcaaggcagcatccagaagaaatttattatgcctacagtacaggctgtacttcagccactgcagtgaaaaaaaaaaaatctaggtggcaacctttgaccccattgatcattttcctttatcccagcacattcctcttagaagtaaatgctagaaaaacatgctagggacagtaaaacccaaacctcgggccaaagtctgggttcatgtgggcctgacctcattgccccgctgcccccaaacggggtctcactgtgtagctctggctgtccatgaactcactatgtaaactaggctggcctcaaactcacagagctttgcctgcctctgcctcccaagcactgagattcaagacctgctccaccacctcccacaccgccacgccccacacagccactgcctggcttcttagaagcacttgctccttggccaatcccaatctttagttttggtttgaggtccagcctcaggtcttagtcctttgtactgtgtcagctttgatgtctcttatgtaatgttgcccagtagccattggcatggaattaaaagtgtcacttatcagcttgtgaccttggacaagtcagtctctttggcacctcccctcacccctttaaatagcatggagatagagctatctccctatattagaaggttagtggttgaattaaaagatgatcatggttataaagttggtggcatgaagcctggtgaattataacctcccataaatgtcagctgctgctgctatcggtggtgacaaggtgtgctgggtgggtaattagcctcttctctgcccattttcttgtcaacaactggaggcaggagtgtcttgaccctttgtttatcaattagatctccgtgaataattgacaggatctttttagatgtgatgcagagtcctcacaaggc

SEQ ID NO: 18779 - DNA, 1293 bp, Mus musculus
acctgctgagcatcttaccacgttcatgacccagagggaaagaccattgtttgatagcatagcttatgggttgtccagagtaatgcttgcatctaataaatagtgcacatttcctagccttaaagtgtgtgtgttttgacccctcccaccaccatctttaataaacaatggactaaaaattttttttttttttttttttttatttccagggtcgctggtcatcctctggcccagaatgaacgttgtcttcacatgtttttacaggatgaaattatagataaaagctatactccatctaaaataagacatgcctgagtttggtgagaagaagcaaaacccgagaccattaatgattcatccgcaccaatgaagaagttgtaactaactagcatgctgcgcagacactggcatagcatgccctgggtacactaacactcacctgctccctttcgttccgcttgtcttggcagttgacaagacattcgtttgctttagtgaaactccctcgctccagcctctctaagtagctcttcccgctgtgtccgtgtgcacactgtagccccacagccccgtagaacctgcagtgtcctgactaaagctgccgacttgctctcatttgcagtttctgtgtcatgtttgcttcttgaatctgattgactagaatatttctcccccctgccccttgatgtgtgatgtcaccacctggtcctaatttatgtgcaggagcacgacaccacttgtctccagcgccacacatccgaggtgtactttgtgtgcagaatgtgtcttccttctggcctgtaatccccttcccatgaaagattaatgagggaaatctttatattctgtataaaaacaaaatcaaatttatatactaaaatcatttgtctaaaatttaagttgttttcaaataaaagttgaaatgcattcctgtgtgctctggttgcacggcctccagagcctggcgtccgtgctctgtcctgaaagcctcccttcccgagagggttgtgtactcacgcagcacttcattcccggaacgccatcctctttaaaggcagtgggatcaagtccaccttacgccaccctttgaacgggggctttaaacactggaagggtttccttggcttcctgccttgttggggggctgcatgctgacaaatgctgtgtagtctcaagtcactctgtcgaggcctttagttagccagtagcacactccaacctcagcagctcttccccaggtagagaagtgacttgctggaacttagccaccgtgtaggagtggcaggtgccggt

SEQ ID NO: 18780 - DNA, 1204 bp, Mus musculus
aggaatttaaactcagccctgtgtctctccccagccaaacgtctcaagtcgagcaccagttttgccaacattcaagaaaatgccacctgaagcctgcaaaacggggactcgacctcacgttgtgccagtaagtgttagaccacagcacagtcgagaagaagatgagccaaggtcggacaagttgcattctcacgaaatgttgggactgcagacctataatttattctgaataagggttctcaaattcccttttcctgagcacccctttttttttttttgaagatttctgtatttttagttttcaaacatagcaatgttacatattttaaggtatatctgttacaataacaagtgagggcttttttctcaggcatatgaatgactactggacacttctgatttatcctcgttagcagaagtacacaaagcagaaaaggctgaggtctgctatttacacattagtcactgggagcccactctgaaaaagaaacatacttgccaaatggtagcaggctcagtgattaacttaagtgaattcccattgtagtattgttgtatgtatatacatacatgcacacacacacacatatatatatacacgtatacatagatgtatatatgtaatgtatacttaatatatcatacattaaaataatgttctctagttccctgaagtcccttttgaaaccactagttgattataaacctccttaacagttttcagagagtgattccacattatgcatttatccttgttaaaggtttacagtaactgaggttctaatatgacttttataaatactattttacatcttatttttgtctttatttagtaagtaatttataatcactggactgcttaattacctttgaggacaagatggattcatcttatgccagggatttgcatcatgaatttcattaagttatttggcaacctgtaacttgttagtagttcaagtcgaatgtcacccaagtgtgtcatactgtgtttaaatttgtgattttttttaatgaaaattttatcttggaatatttggagatttggggagaaacaaggacaaacacaagagcttaaatttcagaaaatagacagggacctgagggatgctcacggtgagacagctgcgtggtttacactggagatgactcggttgacaggctcgcacaggaagcctcccagttacgggaaagatgaaagtca

SEQ ID NO: 18781 - DNA, 1106 bp, Mus musculus
tagcttagattccatatttggagcccacgtggtagaaagagagaactgactcctgcaggttatccacaaaagctgcatattcaccatggttcctacacacacacacaccattttttttttttttttttttagggatggatgttcagcagttcttgcagaggaccacagttcagttcccagagagggtccaacacattcttctggcctcactgtgtacctgtatgagtgaacaaataaatgaatgaagacatgatgctagagagtttaggatagggagcagggtatgctagccagggtggttctgaaacaggtactggtgatactgagagaggctggtggacagcatcagcttggctgtattcacctcagcaatttgtcctctgagtttgaggtatgatgccacatatgtgccccttcaaaaaatgaaatacacctttaaaaactaaaaagcatgaaggaatgaacagaacaaaagctgatcttttttctcttatagccatgatcttattgtatttaaactatgaatccttccactgaatattcctgctgtgcccccaaaatttttggtatgtgctgttttctttttttcttttttcttttcttttttttttttttggtttttcgagacagggtttctctgtgtagccctggctgtcctcgaactcactctgtagaccaggctggcctcgaactcagaaatctgcctgcctctgcctcccaagtgctgggattaaaggcgtgcgccaccacgccgcccggctgttttattttcattcatctttaaagctttccaagttctctgatgtgttagattcttgattatagttctattaaattttacttttgttgtcattttacttgtcactttttaaaaatgtcatcacatgtagtcacatgaaagataatttgtggcctaacatacaggccagtcccagaaaatactatgtatggggtaactgaatgtttctgctgttggtttgtgcatgactggagagaacttgttttgttttgttgttttttaaatattgggtctctatttgttgttagcagcaagctactccagaaacacctgaagagtgacttgctccatggacttggagtagtgt

SEQ ID NO: 18782 - DNA, 1118 bp, Mus musculus
ggaattaacatagtactgttaccgagtctttgttcaccctctttggctgtcttcgttaacttagagcttctttatattttctcagcagtaaatgacaggtgtggacatttgtattgctgtgcacttgataacatttattggttattttaaatgaaagaaataaaatttgtttcagtggcttttactgctttgcaggcatgtaatagctttttcttaaaacattgaccttgtatcaagcatcttaatgacttgacattgattttaaccatttatagatgttctaattactccacatatgcagttgcagctgttgtgagggaagacaatttttcttttaacctttatgccctccatttctgccttttgcctttctaatcccgagctagtttagttttgtggacagtgaattagcttcagagactcaaaacgataaatactgactgggatgctcagaacttttgtttttgattttgccttgtaggaagctgcaataaaggaggaagaagacgacatttctgacaagggcagtgattctgaagaggaagaaaccaatagagattctcagagtgagaaagaagatggtagtgacagggagtctgatagagagcaagatgagaaacaaagcaaagatgatgaagcagtaagacctggtgtccttatccatgtcccccttaccctcttatgctgagagcagagccagtgcacaccccaggtccagatgtgttagttacatcacttgaatcctgtttctgatgactgctggagctgggggttcatttgtttaattgtttgcttgccttaactcatccattttagaatctcattactttacaaatgtgtttgttttgaggtattctcaaggaaaattgtttcagacaaggattagaaatcccagttttcttaagtttgttgaaattacaaagcagaagcaggtcctgtgtctgagtgacactagtctggtctcttaaggaaaagtgcagtgatggaaagtgtctctggagatagcagtaagggaaggcaggagcagcccttagaggaccttccatgccttccagagcatatttagaagtaaccctggtactagataatcaggaaaggggaaagctttgattagttgc

SEQ ID NO: 18783 - DNA, 3143 bp, Mus musculus
aatgtagagttgcagctacaaagttcactctctgtgattgccacagtcagagaaaaccttcactagatagtgttttcattattcttctccaaatttctgacatacgtatttaattgtttatagttggaagttcatgaggccaagcctgtgccagaaaaccacccacagtgggacacagcgatagaaggtgacgaagaccaggaagacagtgaaggatttgaagacagctttgaggaagaggaggaggaagaggaaggtggagactaacccgagtgagtggactacagcgtttgcacatccttgcaaacattgctgctctgtgagaggtcataaagcagcagcagtgagggctgatatggagggaagggttgccgactttactagaaacggatgcaaaaaagaggccgctggtgccagggtacaatctgaaaagggtttttaaagcctttcaggtatggggtggtgcgtttatctcatctgcaaatgataataaatcctttgatgttccaactgtccagaagtgtgggctgtgcattacctgatagattatgctctcagtaaaagtcaaggcacatgaaaacaatctataaatgaggagctcttctttgttcagctttagttttagtaaacattaaaatatgataagcatcacacatgttttaagtaatgtctgctcaagtttttaatctgttagtaagctctattattcatttatcaatattttacaaatggtaagattgtaacagttccatatgtaagttgaaaccataattttcatctatcttggccataacttagcattctcacacattccacataatacagagggctacattttagaattttccattcttaattgcccagagttagcagacgttataaaagtggcttttattggcttacagcctcttaaagcctctggtggtgtcagtgcaggatcgaattaatccgataagcttcagggccaaaagttactccgggaccacacgttctctgacgctcggttgatgtcattcagccttttggaaaaggttcactagaaaagctgcactacattcgtagtttaacctacctgactctgtccgaagccttctgaagacagtaactacagcatacaaaggaggcacttttgtattcatttggactcctgttaataaaatagaagtttgactcattttatgtttgtaatcgtgtgtgtctttttactcctagagaaagggcataaatagggtaatgttttatttttcaactctaaagtttaatattgtacctcactgtggaagtgactgctatctctgtctactcttggaaagcccaggaggaagaactcttctctctcatttagtacaacctaaaagatagtgctcaacacagagtagaaatgtgtgtgtgatgagtcactgaggtcagaggaatatttttattactagacatagaggacacacacgtctacagtactataagactgactgcaataatcctatcaaactctccataggccaaagtactgttgcaatactaacttatcacctgtttatttaaaaggttgctactcttcctgcagaattatcgctggtattttgttactacagtagttggaaataaaatttaaaaattaccaaaaatgaattttttgttattgttctaaatttaagatgtaacatgtaatagttgttctcactggaaccctgcttccttcctctgcaggcccgggggtgtggctttgccttcagatcgagactggctgggaagctccagggttggctggcgctgttagacgcaggcgggagggagggagggagggagtcagctgtgtcaggtgagcagagatgaacagccagagctgtgctggtcacatttcctagttttcctgagggagccaggctcaaggaccgcttctctagtggctctttgccctctgaaaggtatacagactgttcaaacaactggcttctctggcttgagagtctctggtgaggattttacaccctgataacagcaccatgcttacaaaacagcatgtcttccatgattggaaattccaacaacttgattctgtttgcctatgttgtgatgtgtagcaacatctcaacctaaaggaccagttttcctcttaacaagtgctttggggaaagactccagctagggtgctcgtctctctactcagtcacttaactccacatccctatttttctctggattaataatttgtctgagtttgcatttagttgaagggagatacagagtgaaattgattatgaaattaagtagtttacattgtgtaaaagttttaatctctagatctgcagaatgtctgtcaaaatagagctttccacaaggggtcttcctgctagtggaaagtgtggcaggtgcgaaggctgacatcgggccacctgactgaggtctcagacccaaaagcagatgttcgcagtctctaaactgttgggatttttgagaagactcgagacattgaattaagattctgtgtgtggagcaatctcgttctttgctctgcctttcccagcatgccctaggggtggagaagaacaggctgttgagtggtactgtcctgctgtgctgggacgttcgggcctgtccgacaccagttcctgccatgtggaatgaggcagtgtactgaggctttctttgtgtgacttgatttgtgttttgtttttgagactcactatatagccttggctggccttgacccacagtgtagcctaggatgtggaccttgtaatcctcctctggcctccgtctccggagtaataggattacaagcaagagccaccacgcctggtgttaacgtatctgctacatgtattcaggtatccgctccagctgcctcctaccatacactggagtgttgtttagtaataatgtgtatttcaaatgcactacatgtttttgagggattgtttatcatgtatttactgaatttccatgtccgggctctgtcattaggcactgtagctatatggacactctctgtgttaaggacttaacttggacttttagtcagcacatggtgggaatttctcctttctccactggcacagtggccaatacctcccctttcctttcctttcctttcctttcctttcctttcctttcctttcctttcctttcctttcctgttgttg

SEQ ID NO: 18784 - DNA, 1174 bp, Mus musculus
tttcttgaaaaaaaggcggggggcgggaactgtctcgacaaagtttgaaataggacatactgatttctagtttcatggctgcgttcttagctgtgtgtctgtggctaatttttctagtcttcaacaaatacgcagacgtgtttttattgggtttaattcaatttacaaataggtttttactcttcactgtgaagtaatgggaaaaaattgattttctaccctttgcagctgtgtccagagaggggggtggagccagggtttcctaggcagaagggtgacctctttactgcctattctttatggaatccctccccctttgtttattctcgatgaatagagaactcatgggcacagccttttccttaaaggcacatctggggaaggtgagggtcaaggataacctagggtctcccttgacaatagtatgaattttagaaaggcaccttccctcaggctgcagtctgagcaagatctcagctggcaagtgtagccagacgtcctggactgtaacaagataaatgcggtctctcagatggatctacctattgtaccaatcaggtagaatttaggtaaagagcacaggacatactccatgctgtgctataagggcccactttgatgttccctgtttgtgggagtgtgacatgaccctgcaagatctttgttacatatacacgggtggttggacttaagtaagacagagaaggagaaaattgtcccagagcttcccactgaatggaacttgatcaggctgtggatgagccggatgtctgttattgctagcatgaggcagaaatgaccttgaattagaccttggagagactctttaagatgataaagcaatgagcggactctgcctagaagaagatttttaactctgggtgctcgctgctgctctgaagttagatccttgtctcagaaagcatcaggcagttcccacatacagaactgcttgtgtgaaagctttgagattagaccggtcacttcacacaaacgtttgcccttccctggaggttcacggtgcctcttccagggacacgggctccttagtgagtggtggtattaagcttgccaaatgtcctgcctaaacttacccatgtctcactggtgccccaagttaaaacaaggccaaacaagtcaggggaggcctctaataatttttgaaggagagcta

SEQ ID NO: 18785 - DNA, 1182 bp, Mus musculus
tgtttaaagttaggaatcccagtcccactgcctcagtagctagaaaaaaaaatcccacaaataataatgaaaacaatgtatgagtatgtctaaactattctccccacacagaattccactggtagatggactagtccctcctttgccgatgcctggaagcttggtgggtagctgtatgaactcagagagatgtttgtactagaatctctatagtttatgcttatttatggtacatcggggagttcagagcaaccatgtgtaaatttttgaaagtattcaaagaaaatatcctcattccttggttttccagggaaacaacatattttaaacaaaataatcaatgggaaaaaatgaaaaccaggaataaccctttcaccccattctttatgctctcctggggcagtagacccacacagtgccctctgctctgtggttctccagtctcttacatgtttctagagctgtggaaatgggtagagagaacacgtgactctttgttcctggtccaaattccacaatgttcgttccttgctcagcagcggaggatacactttgcatttgaagaaagctggaggagtttcacgtaatttgggcttcttggagcttagtctggttgtagagccacaagccccaaaacactgtttcaaagcatagggttagcttcacggggaagccaaaagggaggtgttaatgtactcattggtgagtttgtttctacactgaaaaatccaagacaacagcctctcttggagggcgtgggaaagtcgacctaaacccatggattcccacttctaaagaaaagaaaaactataacagaatggaaaggagttggtacaagtgggaattctccatccctaggctggacctgagctgtgcttgctgaagtatttaatgattagaaatacccactgggtgacagtacctgaattaaaggtactagccctcagtttgcacttggaatagttctgggtggaagggctacaaagagccactgagagccaccaggctgacacatctacacctagaactagtgagtatatataggacagagttggtgtgatcaccagctctctgaaagaacagtgcctagataaaacacagaaatgcttatccagtgaactaactcccagctgcctgtatccttagaaccaggggtttgtagagggagggaccttaatgtgc

SEQ ID NO: 18786 - DNA, 1198 bp, Mus musculus
caatcctagtggagtaggcgtccggtagcatactaccaagaaggaagctgtgacttggaaatatttgctcagtcagagcttgtcggtggcggacccggtgttgacttcaggcctgtccattcaatcgcagagggtgagctctcccatctatccaagcaggcaacaagccaaaacattggtttgttataataaacattgtttattaaccgattacagaaagaagagaaatgggtgttcctccagcatttaacttagacactgctccttccctgggctggggacacacagaagaatgtgcaaagtaggttgactacgtcctatggtgggggggggggacgaggcctgggggaggggaggaggacgagtatcttcacagggtatgcaggctcttctgggtgtttccccataatatttctttggagctatctccaaagaaacagctagctatcttcatcctcctagtggagaaataggattggggaatttgtccaagattatctaacttgtgggcagagtttcgattcaaatccaagttgtggaagtccaaagcttaatttccttttgagcaccgtaggagaatcgtctcactagtccctctgtcaccacatttacaaaaggtctcttatcaccttgaggcaaagtttataaagcacagcaatgagcctccacttaccaactcgcccggtgtacacgatccgagcccaccaacctcttgctttcatggtgggaacgtgagcacttggcttacagccagagtggaagccctgaaccagagctaatggctagtgtgagaatcgtttcttggccaccatggtttgaggtctcctttcctgctggtggctttgccagtggggccagaacaccagagatgaggccactcttctttcctcctttagcctacgatgccttcagtctgaaggcagtggtcttggccttctggaaagcatgccaactgaaaacaccccagataatttaatctgcttgacaatgctttgagtgacccccccaaaagtgagaacctttagaaagcactgggacttgtcactcacacacacacacacacacacacacacacacacacactcaaggaagaatgggagggtaaaagatctcattgccattactgtgctaagagaccaggacaggaacagtgacagtccctataagtgtctaaagtatctattaaaagcataaggtg

SEQ ID NO: 18787 - DNA, 1311 bp, Mus musculus
ctgtggaggcttgaagggctaaagcaacaaagtccttgcactctgggaggaacagacagcttctggggcagagagctcactgaaatcacctttagttcaccattttcctcaatggaggaaaagagacactgggttcaatgtgctcgggattgagtggtcagaagtacggcaagatgaaaccccctcacgtaaatgacccagtgaccttctgacctatataatcagcaccagcagaaagcacagggagcatacaggcctctggagtcagcaagagtttgagggaaatcagcccacagaattccaacaacccacatttacctgctactgttctctgagtagtctaagttgaaatgtttaaaaattaggctgggctcggtcttagcgccatcttccttgagactcctgcgccatgagagcgaagtggcggaagaagagaatgcgcaggctgaagcgcaagagaagaaagatgaggcagaggtccaagtaagcctgccggtgcacccacgacgcctgcaggagcagaagtgagggatgctgagggccgggacaagctatcggactgtgtgctgccatcggtaatgagtctcagtagacctggaacgtcacctcgctgcgatcgcctggagaaatgaccgcctttcttacaaccaaaacagtcccgctggccctctgccctggacccccggcactctggactagctctgttctcttgtggccaagtgtagctcgtgtacaataaaccctcttgcagtcagcttaagaatcaaaaaaaagaaaaaaaaaagaaaaagaaaagaaaagaaaaaaagaaaaaattaggctggactgggcatggtggcgcacgcctttaatcccagcactcgggaggcagaggcaggcagatttctgagttcgaggctagcttggactacaaagtgagctccaggacagccagggctacacacacagccagggctatctcgaacctcccctcccccccccccaaaaaaaaaattaggctgggcggtggtggcgtctcccagcacttgggaggcagaggcaggtggatctctgaggttgaggccagcctggttttcagagcaagttctaggacagagaaactcagtctacacagagaaaccctgtttcaaaagaggacaaagaaaattttatttatttatttatttattttcgagacagggtttctctgtatagccctggctgtcctggaactcactttgtagaccaagctggcctcgaactcagaaatccgcctgcctctgcctcccaactgctgggattaaaggtgtgtgccaccacacccagcacaat

SEQ ID NO: 18788 - DNA, 1287 bp, Mus musculus
ttcacagggctagggtgccctccctaacccttacgattcaaaattcaaatttagactagatgtggtagcccaccctctaggcagaggccactggagtttgaggccagtctagttagtctgcagagtgaattccagcccagtcagggctgaacaatgagaccctgtctgaaaaacaagaaaatgcaaacgtagcaacttgtttctctctcctcatgttttacatcttctatttttatcttttttttattattaaaatgaatttttgaagaatcattaggctctttgggagccattttatttagaaaaaaatcataaaatatttgagatgagatgctgtaagattacttcagttgctgggatttttttaaagatgattttagatttatgcttttttcaaaaaagaagaaatgccatattcaggcattatgggtaactgtggcttcaggtggcatagtgactagttttactaatcctgtgtctgatatctgattttggaagagtccatagacccccttagattcagcagacgggatggattataagtagtgtgtagcccctttcttattctatgtgagcttccgttctgcggtggcccagcctgtctgccgccgccgtgtggtgctcgctgtgtagatgagaacactggaagatgatctgaatgtaggtagaacggaggcgtgggtccttacagccttcgtgggagctgtgccctccacacagatgttgctgtagagggacacattgcaacacagtgtgtagggacagttttgtgtgatttacgggtgagcttttgggttcaccgagaactgtttacttcccatgtatttgtacaaagtccgtgtccccagacctcagtgttagctcctcccatggtcttgaacctccaaagccccagcctagggctcttttgcaggtgttggaagaacccaaaccatcttaaatggagtgcccacaccccttcccagtcccaccagaccttttccctcaaaccttgcaggaagttctgccagcctaccctggcccacccctagcatggaggtgcgtatctcttccccttctgcactggggccagatgcctaagaaggaaaggagaccgtgtttcccaaactcagtgcatcgcatccccgacctagaagactgagttgcccggggcagtcataaaacccttgtgggacattacagacgtgataactttaatggcttaatattttgctacattaatatgcagaggtgatagaaataatctatgaattttctcataaagataagaactttagttctagtaga

SEQ ID NO: 18789 - DNA, 1048 bp, Mus musculus
tgtacccaatgggcattcaattttcaatgctataaagcttctgtcctctgtcattctcagattatttatgctataactgtaaacctaaattattgacattgagaagtgcgcagagactttgtggcacacacgaatctccttataagaagtgaggggaggggccccgcggagaacaaggcaaccttcttgtgcccaggaagaaggtaatgggcagccagaagagtccccttcccccctcacttggcctctctctaatgccttagttacacacacacacacacacacacacacacacacacacgctaccccaaagatggctgtggcactctctcactgcttccactggttggagagaattccatgggatttgttctggtcttgaggatgtaaccgagaggattccaagccatgtgaaaattgtcctgctttccagaaagtggagtgtggccctgcaacatcagaagcacaatcggccattgagtttttacaagtcccatctcgtcacatctgagaaatggcgggctctaggaactgagcgggactttttgtaacccagagtgtgttaaattctgggaacctgtattttggtttccttaatactttaactatgtagggcttctctcctcccaacccccacctccacccccagtcccatcatcccttcagtgaaaaagagctggtcactctgggagctgtttcctgcccactggaccgtatggtgtcctcactcacccatccgtacagggagttccagtgggcatttttttttcatgaagcaatataaatataaaatacttattttttcagaatttaatggttttcatgaaatctgttggcaactactttccctgtcctcatctaaattctttgtttgtgttttggatgatttttgccttgtatccagaggactaaagattagccccgatattctgatgttcactaaaatagtatgtcacagtaggtggtagtggtcttggttttctctgttagtaagctgttaaagaatgtctgaagatactcttgaatgtacagtgttcgaatcctgctt

SEQ ID NO: 18790 - DNA, 1059 bp, Mus musculus
gctgcccttccccttcagtgttgaaccccaaaccttcctttccttttaagttaggaagtgaggggttcatatcagcagcaatcatcaactgaccaatgggatctacttagtggcgactggatttggcctgatcacaccacagtgtggccatttgggtccttgtagagattgtctcggtttctactatccccccagcaactgcttcctacctgatccagagggacctggagacccctagttggaggtcactgggtcattctgaagtggggggtgagggcccaagggctgtcactgctgtgggcagtctttgtctcttgtagatccagccttaatgtctgacatcccaggaagcgcagaccctgcacaaagtggatatcagagcgatactgtgaggagtaagtaaggagcataggtttaccaaagagaatgagctagcacatcatgtctgcctgttacactgatctgagtgcacccttagaaaactgaatgtaccacagacccaggacagttttggaacttgtatgctctctagcaactttgtgtgaatttttatacaagcactgttttattaattatataaaatataaaaatagaaaaactggtctctttaacgcttcatttctttaggccacttagagtgtgtctgaatttgtctgtccacctgtttggggacttcagtgcctggatgtggggtacagcttgcaaggttttggtcataggcgagtggcagaactcaccaactccatccttcagtgctacttgtatacagagcacaaattgaggcactcttccatctccttcctggcctggtgccagccctgcctgtcccagcaggacatcacttcctcgaccccagtatttccaccctgtgtcacatgggttgtagtttctcaaagctaacctggtaacaaaaagatacatgttttccctctgctggttacaaatcagcaaccttttaacaagtagcatggtcaagctggagaggcccgtggttaggtgcactggctgctcttctagaggacccaggttcaatcctcagctcgacaccatctgtaattc

SEQ ID NO: 18791 - DNA, 1176 bp, Mus musculus
acacaagtaaaatcaaagtgaacaaatctttaaaaatgcggccaatgatggatacagaaagacatccagatatccctgaaaggaaagagctgtatgctgtagagtgggggcttttaacattcattcctttatgtagtgcttgcacacgtgtgagtgtagaggccagaggacagtttgcaggggtcacctctctccttctaccacatggttctggggattgaactttggctgtcaggccaggttggtgacagtatccttaactgctgtgccatctcacatgaactgcagcatttcgagctcctgctgtgccagcacagaaaatacactgcttccatttccttttattttacattgctaggaccaaataggccgtgtacatgctaagcaaacagtccacaactgggctacattcccagtgtagacatatgctattttctttctttattctaagcctacaaagttaaaaatctcttttgggtgggtctctattaaatgggaatgcattggactatcgtttcttgccagacatggcacctgtgcctgcaatcatagtactttgaagctgaggtaaaaggatcactcatcatctgagacaagtgtggactgtgagtgagttccagagcagcctgcgcttcaggaggagaccctgtctcaaaaaccaaaactaggggctgggaatagatagatggttcagtggtcaagaacacttgttgagggacaggtgtggtagcacacgcctttaatctcagcacttgggaggcagaggcaggcagatctctgagctcaaggccaacctggtctactagattagttctgggatagctagaactacaccaagaaatcctgtctcagaaaaccaaaacaacaaaaagagcactcattgctcttacatagtctcggtctattcccagctcccacaggatggctcacagtcatcttggttccagttccaggctgtaacaccttcctggctgccacaggtaccaggcgtgcagtggtgcacagacacacatgcagccaaaacagatggataaataaagtaatatatagtatatattttttcttttttatctttttaattttatttttatctttttctctgtttttcctttattaaggggctggagtgttgactcagtggttaagaacactttgatcttgccgagggccagggct

SEQ ID NO: 18792 - DNA, 1798 bp, Mus musculus
actattatctgcttgagtgttattacagagtgcaaatggagatagctgtggatggttctgaaatttatctgtgatttctttttccttatttattttagatttactgcaaccaaacatctgttgcaccgtttcccggtaaccagaatatttctgcttccccaaatccaagtaacgctaccaccagagggggtggcagctccctgcagtccacagctggtctcctggctctctctctctctcttctacatctctactgttagagactcaggccaggaaacgtctctacttccccatcttctacacctaccccaaatggcaaccacaagtccaatgtgatcaggaagaaacaggtccacctcgaattggctgttaccatatctcaacagaaaacacggagaattcgaaattcgacgggattaaaggacgcgtgaaaggtttgagagaagagagatgccgctattgaatctgctggagttttacatcccaagatgaagacagcattcagaattgatgtgatttccttgaatgtggcttaggaaatgtggacacttaaaactctcacttgaaattgggcacaggtttgatgtagagataaggacggggtgcggaatggagacccattttgtcattgattcatctgaccgataaggccatagtgcagttaggtgatattcgaaagcttctttgatgctctttatgtatatgttggaaggaactaccaggcgttgctttaaattcccaatgtgttgtttcgttactactaatttaataccgtaagctctaggtaaagttccatgttgttgaactctgactgttctctttggaattgaacgttttgcatcctcctcctgtggctttaggtctgacattgtatttgacctttactagtaattaacatgtgccaggcaatggtggattggaacccatccccaagtccagccaccactgaataaatctgatttcaaaagtcaaacagtagacatttcccattgtcgtttctcactcaccacaagcaccaaattcactagagtacactggttccagagagcagaatcatgttggccttggctaatttcaaaatgctgtcttttactttggtatatgttgagggcttttcataatttaaagtgtgttctgttagcaaggcaaaaattatgagtcttaattctacaggcaaatatgcaaaggagccaaaactgtaaacccagcatttgggatgtgaagactggaagctaactctcattgaattcacaaagtcttttatacaatttctgtacatactttttttttttttaagagaaaaacaaacggtggatcagaatagccacgtttggaatactttggttatccattcatatttttagatagttattggtcctgtgcctgaaagggggcttggttctaccgtaagtttttccaatttccttgatatacacataccttctaaaacctagacatttcctgaaaaaaatcttttgttcgcatggtcacacactgatgcttacccgtacagtagtcttgataaccagagtcattttctccatctttagaaaccttcctgggaagaaggagagctcacagacccgaagctactgtgtgtgtgaatgaacactccccttgcctcacacctgaatgctgtacatctatttgattgtaaattgtgtttgtgtatttatgctttgattcatagtaacttctcatgttatggaattgatttgcattgaacacaaactgtaaataaaagaaagaaatggcggagagagcagtctgttgaatttatttacttactttttaaaaa

SEQ ID NO: 18793 - DNA, 1181 bp, Mus musculus
ctggttttagttttgagtgatagtcactcatttaagttgtagttaggagtaagaacacaagaagtagttagcttccttgggcacctcacacatggcctacactcacaatagacacatgcacatagatttagaaaatcttttaaagttttctgttgtgaaatataactcaaaaaaagtccaagtgataagtgatataaacatatatagtccaactattaccacaaagcaaacatgacaggcatgagccgtattctaatcagtagatattctggagaagggctctagggattggactcagcctgaaacatgcggagtgccaccccccagcgcagtcagtcctcagccccagtctcccatttgattgtgattatcagtgagaactcaagtgtctacacataggaattcatgaaacatctcttgtggtgtcacttctcgatggaagaatgcagagcctcttagagaaatgggaggttagagagggcgcacagtgtgagtgagccttagtttcagtaaacactggggacactatcctaaccatcagatcagtgtcagatttgggagccatcttaaagactgccaaagatgtgacagtttcagtttctgaaaagatcattatggtagcttgagtcactagaaagatgtttaaattcatgagtttatgttgattttttttggggggggaagtagttaattttggaacattatgaggaacaaattataaattgataaagggaaataactaaatatgccgccatcccatcagtgccactttgatatgacatgtatgaccgagtaaaccgtatcatatttgaagggaggcattttttttgttttttgtttttgtttttcaagacagggtttctctgtgtagccctggctgtcctggaactcactttgtagaccaggctggcctcgaactcagaaatccgcctgcctctgcctcccgagtgctgggattaaaggcgtgcgccaccacgcccggctgggaggcattttttattaactacagccgttacatgaaaaggggtggcatttgaacatcactccttggcacccctggtggacagactgaagtcctgagctctggcagcttgctgaagtctctagctttgtcaggtaccatgtggggatttctgtagagactgaagcccatccttgtccagtcttcagaatgcagcaga

SEQ ID NO: 18794 - DNA, 1099 bp, Mus musculus
tctacatgtacgttcatgggatgtagccttttgtgctaatcatttgccaatgctcagtacaaaactgtcagctcctgcacttgcctgcagtcagtgggaagtacatggtgctttgttttaatttattttgattttgtgtcatgtgtatggatatttgcctatgtgtatgtgcaccatatggcatgtcttgtacctggggcgcccagaggtggttgtcaggtcccttggaactggaattaacaggtgattgtgagctgccatgtaggcactgggaattgaacctgggtcctcaggaagagcagccagtgttcctaaatgcggagctgtctccagcctctgcacagtgtttttgttttcataagctgtggtttgacccagctctgtaaatttttgtggcctttttgtagctcaaaccccgccatcttatgttaatgtctgtgagattctaaaacgggtcagaacctctcccaaggaccttcgtgtgcagcatcacttgtgataatactgggaggtagcagaaccttacgtaggacctagtgggaggaagtggggaggcactgctggaggagataccaggacccagggctttcctgcttctatgtcttgatcgcctgtaggcaggcctgaggagcattctcttgattgatggttggtggatgggtccagcccactgtgggaggtgccatccctgggtaggtagtcatggggtgtataagaaaccaaactcagtaagctaaggggaagcaagccagtcagcagcactcctctgtggcctctgcattagttcctgcctccgggttcctgcattccttgagtccctgccctctatgatgtaatctgtgagatgtaataaaccctttcctcctcaggctggtttttggtcactgtttttatcacagcagtggagtcctaactaagacagaaatcagaaccaggaatggggttttctgtgagacctgaccatgttgtttgcaaggattatggaagtatttggacccttgggctggagaagccattaagcgcttaaagcttaatgggctattctgtgggcgcttgggatctaggtgtccttacagggagcctgtgatggaggcctggc

SEQ ID NO: 18795 - DNA, 1153 bp, Mus musculus
attctaataaacaccctttctaaatatatagaaagaatcattctataagttctgtaactagagaaccctaatacactataattccttctagaactcaaggtttttcaatgaaaaactacctgtgtgtacattaccaagtacactgaccaaatgagatcacagcctaacactactatacaaataggactgaggatatagctcagtgcgcacttgcttagcagacgttagaccttgattcaaaacactggcatttcctaacaggcttttccttaatgaagcaagggaaccgcacagggagagaaatgatccttacctttcacatccaacactaaatttggtttcatcttgctgtagatcctgccgtcggacttcatgcaccagaactgactgtcgacattttgatcgagggccagtcctagtttggagccagacgtgacgaggctgcccacgatcgtcaggcagcagtcttctgctatctgcataggaaacaacaggctgtctcagaactcccactaggaagtccctggctggttctagctcatcttttagccattttagctattagcttcagtaactgaagccaagcaacgggactttatttcagatgatgtgaacgatttcaagattaccccttgtaagactgttaccatagggagaagcctcagggggactaagtggttaacacagctgctctttcaaagcacccacatggtggctaacaactgtctgcaactccagtcctgggggatccatcttatgccctcttctggcctctgtggatatgagtgcatatacatgcaggtaaaatatccatacacttaaaaattaaaaacaaaaacaaaacaacaacaaaaagccaacacaaaagaacctaagaggagccttggtatagtaaattgcccacagcttgggtctccctgtcagcagtgcgcatgctcagaggccacatctgaagctcgccgtcagcctgagtttccagctcagcctgctcttctttgtagctgcactagaacaaccactgactatatcccccaggcctacccccttaaacctggagttacattcatttactccttgtctctccttcatgagaaacacctaaaattgtctaaattggcacgttatcatccacatataaaaagtagaatgcaaa

SEQ ID NO: 18796 - DNA, 1197 bp, Mus musculus
atgtcagtacctaccacacagcacacctgtagtggaatcataagcaatgtgctgtgttttaataggaagctaggtttttttaagttttatttactttatgtatatgggtattttccttcatttaaggatgccacatgattgttgtacctgagcaagtgagaagaaggagccagatcctctggaactggacttgtacacaattgtgattggtcatgtgggtggtgggaactgaacccaggttctctgcaagagcagccagtgcttttaacccaacattggatttttacatatttagatgattccaagcaattagtcaaatatgtatattaatggacttacaaatatatatacagtaataaaatctcttcacatgacaatgttatttatgacctaatgttaaatatgacctaatgacctactatatgatcacaacatgttatgtctgacatgtttaatagaacattggggcatggagtatagtagggtggtagaatattttcttagcatttagaggagaggccctgggttcagttcccagcctccaaatatctaaatgaaaaaaaaaaaaaaatgtatgtttgtgtgtgtgtacaatcactgtggaatactggtatgcattcttttttgtttgtataaacacacacactggtcactcgaacaccacagagacgccacacacaccacaaacatatacatcacagacccacactgcaccatacacacctcagatacacgtatactacagaacacagaccacacacaccctcctacacacacagacacaccacgatcacacttaccagacacaaccacaccacacaaacccacatatatacacacacatctctctgtctctctgtctgtctctctctctctgtctctctgtcacacacacatgtgtcagtcaatggatcagtaaggtggatcctcagttcatttctagcatccatgtcagatggggcataatcacctgtaactccatctcccaggggtcctacaccctcttctggcctctaggatcctgcactcagatggcacacacaaccatatacacgtaaatacaaatataaagactggctgtgtggaggacgttagtatagattttgaatgtctaatcctcttgctttggcctctgtgctcagtactagaattctttttctaaatttatatttcattttattttgtgtgcctaagtat

SEQ ID NO: 18797 - DNA, 1377 bp, Mus musculus
ctcaatgaaaaaaaaaaaaatggaaatgtgccacagtttgtatttctgattaacaaataagtggggtatttcctaaggtgaccatggtggaaccttaggcaggagaatggaaacattggttgaattttcaatagaattagacttaagaaagtaaaagagaaattctgttattaataacttgcagtaatttttttgtaaaagatcaaattacagtaaacccatctttccttaatgagactttcctgtttacagtcagtctattggtatgcaaacaatcttgtaactttgataatgaacagtgagagatttttaaataaagcctctaactatgttttgtcatttaataacatacagtttgtcacttttcaaagacctcctgaatctcatagagtaagccactttttcttctgtgttcccatttctcactggcatagcaagggtgcggggcataaggcgacttgtctcaggagctgtcacaggatttattactgtgacttgaaaaatctgtcttctatatactaaaggtataaataatcctatctgtctttgctgttacgttggtcactgtaaacctgtcaaatcatagtatgccaagtatctgtctatgataatttttgaatattttgaatctcccgttcctttccagtgtttttgtttggtttggttttggttttttgttttacgtttttgttttttggctcctggattatgtcattgtggcccctggcagccagtctttaaagcctgcaggtgacctgtctctagactgcagtagcttttccttatcattaccaaaaacatccagaggttactggaactcctaccacagtaaggaaagtttgctgcactctctcgatggctgcttggagactcctgctgttgatttgtgagctagcttgctgtccacattgaatgtcaacccatctgagtatgctaaaagatgatatcataaaataatggttctagattcaataataaagatgaatgttttcttataaaaattatgtggtggctcaagtgaggtcctgatagcgctccttcctcctttctccttcccctgtcctctcccctggccccctgccctctcccctatcctctcccctggccccctgctctctcccctggccccctggcctcctgccctctcccctaccctctcccctggccccctgccctctccccctgccctccttagcttttgatcttcactgatttacagcacattttttcacaaaaatgagataaagttggccaaatagcaaatatcctagaatggaagttgtaagcataataataaaagaaataacagtgagggtcaatcacagaaaaaatagaagcgagcaggaaagcattgcctgacaaaacaaagcgcccttt

SEQ ID NO: 18798 - DNA, 1102 bp, Mus musculus
gtgaagaagataaaaaagccgtgttcagaagatctgtcgtaaagcacagatgttgtgtgtgtgtgtgtgtgggttggggggtttgagtctggctgtcattttgctgttggcttgtttttgtttttttaatatcaaaattgcacaaagctggtgccctaccaagaaggatttgatatagaaaggctcaggccacacttaaaatacaagcaagcaaagagaacagaaaaaaataaaagtaaaaacgggtattcttatcatcttaggttaagcgggtaatgaacattcctgtccccaacgcatcaactgtattgtatctgtaaaactcagcttttctcagtatttgtgtttttgcattgtataattaacttaattaaagatgaaagggcattgcaaaagtgttcaacaattacctcattgagtgtatccagtaggagtgcaggaattaatgtcgtatctcatgagttgctacccagctgagcgtgtgtgcttccaaatggtaggctgggtggttcggtcctgtattctcctaagcccaaaggttacctgttggtgttcaaggtgtaataaagaatgctgtatatttatgaacctatttataccagtataccatgtgtatatatgatatatttataaccacttaaattgtgagccaagccatgtaaaagaacctatttttcctaagagcaaaaagaatctctctgaagttttgcttaaaactccatgacctcgctatgactttggtgcttgggcaccaccctgcctactaccagagagcagagcacctcagtgcagaggtgagggtgtgtagcatcttgggatggatagaaacaccacaccatccagtcgcatttgatggccttgctacatgtgtgtcagttgggtcacagaataaaaatcatttttctatttctgctctcctcttcctcttcctcttcttcttcctctttctctccctcctctagaaccctgactcatgctcactgctcagtctgatgcttaccttagagttttgtatatatagatcaacttacaaagagggaaaacttcagatcctctgggggaaacccaagagccttactgacctgttgctgtgactagctag

SEQ ID NO: 18799 - DNA, 1120 bp, Mus musculus
agcatcaatgcacatgaaataaaattaagtaaattaattaattgtgtaacaaaaagaaaagattaaacctttaacacacagaggtccttgcagcagattccccactatgctcttaaactccccacagtgtagtaaaaaaaaaattttttttgactgagtgtgccagtcctgtgctgaggcacagtacccacatggaatggactcatctcatgcatgtacaacttgatgagctgttggtgaatttcacctactgttccagacttctaggtgatgaatatcatacacaaaccttatagggattacggtagtacatgtatttaatattttgttcttcaaaactcatcagggaagaagtctccaaaggctgcaaggatactttcccccactcaagtgtcccccaaatgtgcatacactttcttcccacctcataacagatgttcttatatcttgctagaatcagagtgacagtcgatggcgaatttctgcattatatttccccctttcagttcctggattctcctgagtgggattcgctaagacccacagaggaaggcatttttcaggtaaggaccaattatgctgcatggttcaggccccaaccttctaaacagatgaatatttgttgtaaagcgagcaagcatacaaatagaacaacatacaacacacacagcttgaatttatatttaactttagatacagttcccttcatgcatgattcctagccgtgagtcctgatgactgacgttagtcacgggtacaaccacagaaagaatgggaatccaggagacaggaaggggttgtgatgagaactttctacgttttccatgttgaacctcatatatgggaattagttaatatgtaaagacttgactttaaacactgccaatgtgattgtttagaaaatgccaagagaaaaagatcgtacttattacaaaaccaatggtctttgaaagtagaaggggccagtggatgtcagctattctaaactttgtcatctctacgctgtcatgtgctggtagtactaaaagacaaacatttctgtccattatatttattatgctatactgtttcctataagccaacacatacatgtgcatgcacattcaaatgtatgtaaata

SEQ ID NO: 18800 - DNA, 1102 bp, Mus musculus
ttctgcagaccaggctggcctgggattcatagagatctgcctgcctttgcctcctgagtgctgagactaaaggcacgtgacaacaccgcccattccaacagctgaatacctcaggttccctacgaacaagttgttgttatgttgggaaagaacagtacccttaaaagtgtcctcggggaataaattgttgtttaatctctctgttccaaaatcaggtacttgggattcaccagatggctttgggcagggcgtgagggaggtgatgtctgcaattctctaggacccaaagataaagaaagcacagaggttgtcccagggttgtctaaacttctgcacctgtccttctgggagggtgtgtgtgcttgagacttatagtaactttgtttgtaagatccgacttgccctattccccggcctcagcacctggagtcttctttgggggtcagaacaattcacagccacttctctgatcttctttttaaaacttaagttttaaaaaagtgggatgcctgtgtgcctgattacttatgatgaattccttccttccttccttccttccttccttccttccttccttccttccttccttccttccttccttccttccttccttctaagatcatttccaaagggttaagaagccctattcaatgcatcttcagttgattaatattttaaacgaatacctcgcagccctcgcttctgttttagaagaacactatgtgagtatagccataaggacgaacttgacattttgcttacacttctgccacacacctgaaagatggtgaattactgtaactcagctctgccagttgcccaggttctaaaatctgtacttttgtatatttaatgacaccaatgtctaatttctgggtaatccaggaaataccaaaatacgggaaatttcagaatgcaccgaagtcttgcagcttataagaaatcttgtttgccatatcttgtgtgtgctaccacctgcctgtctaagacgggcacagaaatgaaagatgtaattgtccagtagctagttcacttgttcactgggcagtttagttgtcagactagagaattctgaccactgtgacgggggaggggcaggaga

SEQ ID NO: 18801 - DNA, 1941 bp, Mus musculus
aggcaaagcatactgcagcattccaagcctcaggcacacaactaactagcaccagcttgccatgggggaacttaaagtgcagtgttgccttgagccagaggggaacggggtctgtggagcaccactttgcaggggttcctcatagtgcggtgtggtttgagccatcttttgacctcccccttacagcaacacaaatgtaactcctaaaaaacgattcactaccagcctttagcctgcgaactattcgttctctacacagcaggacacagtggacacatttttatacttgcatttctaatctttggatgtatttttacaaatgaaagacttaggaagatttttatctgcttatcacctggaaattttagtgtgcaatctaaagaaaaagataaagacatcacattattagcatcagtccacctcccaaatataggatgttttattgccaattatttttgtattctggctgagctttattttgcaccagggcaggcctaacttgccgctggttgtatgtagtttgtgaatagaagcccataagtgttaatagaccttgtaacattcgctgtaagatgaattatacaggatgtggggaatctcagtaagtcttaaagttaatttaaagtaatttatctgttttctctaagaaatgtttatcataaaatatatatgtaacttcccattttggtataaaatctagggaagtgtgtgcaagtggagttgtgctgactttgaatttctagatgtcttaatgagatttatttgttttagaaaaagaacaacttgttgaaagcacccagttctgtcttacatactgtcaacagcctcttcaagttgtgcctgtgtgatctgtgacctcctgttcctttaaagtgagacagtgacctatgactcattgttgaccttatacttggaacagaactacggcatttacggtggagtcctgtacgacgagaaagtgtcaggatatgcaacgcacctgtggcttaccccttgacggcccagcttggaaatgatggcaccgactacctcttcaatcacttgtggctatcaaccacaggcacttagcaccaggctggctttaattagtgtgtgttgtttttgtggtggtaacaactctatccatatgaagaccaaagtgaaccctggtttctatatgtctttaatgcagtgttgtatctagtatttggaaattatctcattcagtgtttagattacctcactccattttgattcatgttgtttacaagtgaacatttttttaaagatacacttgaaattgcgttagaaagaacaaaggaggagttgctattagactggcacagtgcattccacagacttggtggactgctctctgcagacatgggcctaggactgtctttgtaccgaatgtcttactctgttggctattgatgtttaaaatttcatgatagaaaataaaagacacaatgttggtgtttaagatgggtttggagatattttgtgtgctgtgatttctgtggttaagaaattaagtaaatggataaaaggccctttcagaggctttttggtttggtttgttttggtttggttttgggtttttggagatagggtttctctgtgtagccctggctgtcctggaactcactctgtagaccaggctggccttgaactcagaagtctgcctgcttctgcctcccaagtgctgggattaaaggcgagcgcctggcttcagaggtatttttgtcaatatcaggatgagttaaaggtttcagcatggtctggtagtggtggaaaacatggaaggtttttttggggggaagggggtggcttgtcttcatctggattgtccattattatcatcaggaattgtataaacatctaaattgagacctaccctttgtgtgtccagaaagagtgtcgtgaagcttataaaaagctcttggagaaatcattttagaa

SEQ ID NO: 18802 - DNA, 1695 bp, Mus musculus
tgcccgccagttctcagggaagacaggaggcagaatcccagccatgcagctctgcggcaccaagagaagtgggaggggggcatggctgcacagtactgtttcctcaggaggtgaagtcagaaatggcagagcactcagacaggtcaccccaagaagtttcttccacgaaagcgtttgcagcaataggagagcaaaacaaaaaggggcctttgattcagaaacggaaaaagacttagtacttgtcagtgttcccttcacccgggcgggaagtctacctcatgcaagcacaggggaatagtggtccacagagagcagccggccgggatgttaactactgctgaggaactgggaagttcttaattagacaaatcactcttaagcaaactacatttaagcagggtgtcatgttttatagaattgagatactacatatagtatgtgcataagtgagaggggagacttgaatctgtatgtatgtgtgaggatttcacataagagtacaggcacacacacacatatatatatacacttttatatatctgtggttgtctttgtgtgtgtgtgtgtgtgtatgtgtgtgtgtgtgtgtgtgtatgtagataaaagcacatactcttcctcagataattgggcatctctaagcattgaaaatccatgtgaagcatttgagatggtttcatagttaacccttggaattttttctaaatactacttcttttatattatgtaaaaaatgaccacgtgactgttacctttcatgtgaaccaaagcatacttcagatctcagagctgccagtcaaatggtactaaaggcttttgggatacttggtgcctcccaagtctgtattcataactctatcttgatgctgatagagtgttttgctgttgctgttatctgtcttctcctgtttgaaggtagtaacttaactctagatgcctccgactgccataagcttttaatccttggatacgtagctccagaaaagacaatgaatgtgaacttcctgtgctgatatttcagtgtcttttattctgtttgattgtaaattacatggctattaagaaaaatgaaggggagggtaatgtatatagtaacatggtccttttcagtggtattttgatgctaggtcttttacaagggttctgaggtttttaagggatggtggcaacagaagcctcctttgactaagtagcttttgaaccatcacttagatcaggaaggtctcttacttactactgaagccttagagaaaattttaattatttgggtatatttttggtagctgtttttatttcccctggagagtcctcagacctgtttataaaacaaacaaaagcagcatagaaataaaatagtggggcttagaatgaaaattaagttgcccaatagatacagcccatgattgatactaaaaagaatagtgtttgatggccagcagagtgaatgagtggagcagagttaccaaagtgcccactgttctgtggctagaaatactttatatgataatattgatgccatggcaggttccttgagtatagaagcggaagtatggtgtgtgatagattcaggatgagcactcagatcaagttataggatcttctcagatggattctcagtttgctaagattggctaggaactgattgtagtattgggctgttttccatcatgttttgttttcttttgttttttgaat

SEQ ID NO: 18803 - DNA, 1174 bp, Mus musculus
atatttttaccagaccgtactgtggttgctttaaaacaaatgaatttctgttagtttatgtatagtagaatcttctttttttaattgtattactttttttttttaatttattgtaggtttgaatataggtgcatatgtgaaggtcaggacaagtgagttctctccttttaccatgtaggtcctgagacttgaactcaggtgttagtgtgtcagcaagtgctttacccaccaagtcatctctctggttttataatagaatttttgtggtagaattgatgggacaaagaatgtagacatttaaatttttgtatctctgaattgctttttacaagtggtataggatttcaagtgccagcactgtaagttttatcaaacctcaataaaataaaaactatatttttgtaatagataacagaatttcttgttttgataatcttaagttatacagatgatttataaagcagtaataatcttgatctctctctctctctttccctactctttacagagcaaactattcatggaaggatttagaagcttgaaagaaggagagccagtggaatttacatttaaaaaatcccccaaaggccttgagtcaatacgggtaacaggcccaggtgggagcccctgcttaggaagtgaaagaagacctaaagggaagaccctgcaaaagagaaagccaaagggagataggtaattgtacctggcttatttgtgagtctattcaatttggaaaatatttaaattttttttattcttttgcttttatgggttttatagagagagcctagtgcaaactgtcatcagtgtgtagctggatagactgtgtcaggaagaaagtcttgtcttgaggtttggactgtcttcagcgtactgagttaggttagagtggtgtgggatagtgcttgaccaccattccccagactgttggaggccagaggaggagctcagattctcagaggaaatgcctctctctggacagtttctttcattctccacctgcttttcccaaagagagctttaaaatgacaattcacacattaaaatccaaacattaaaaaactgaagttattttaaactgactcttgcatgtcactcattaacacctgcatatattcccactatctgaatctgccaaaattacaaacagtgctgtcagggcaattgaatctgt

SEQ ID NO: 18804 - DNA, 2190 bp, Mus musculus
taaatttaagtttggacttaagaattgcgtattttcctctacaaattaaatattaatgtccctaaggtggtttggtgctgtgaaatagcagaatccctatggggtgtatatatgtggggaataataacatcagttgctttatttaaatggctcccctatgagattagagaagcttgtgtgtagagcaggcgtgtgcacatacactgcctttttaaaccagcgattcacaagggcccttcgtttaaataatacaaaatcagcattctgattaatcataaagaagcgtcccagattgtctttaagataacatgtttgagtttttcgtgctcattcataaattattttgatgtcagcacagatgaaatggcgattggttatctcttcctcttgccagccccttaaggatccgaggtgaattagtagcaagaaagcatgtaattgacagagtcacgtgtgctcaggggccagaaaccggagagagaagagaaaaaaatcaaaagaaggaaagcacattagaccatgcgaactaaatttgtgatcgcacaaaatcaagatgttagactgatgctgaagatcactccggtccaaagggaaagttttcatctctggagtttgaagctgagggccggtggggcaacatggccgaaggttaattttcttttctattgttttactgtgattcctctcttcttttctcccctgcttctccccaccacgtagtttttcaccccttctctcctttcccccattaccctaatactgggcattatctccccacccccttagagtgccgtggggctttggcaaaacctattgttacagatctccaaaatgttttgtaccgcccacactgattcacaacttggaaagctttcagagggctattgtttgaattgtgtgtgtgtgtgcatgtgtgtgtgtgtgattacgtgtagtttcagttagtgagttcaagaaaacttttatacacctgccccctcccccattctaccctaactttaattgaaagttagggggaggggaacgcacattgcaaataccccgggattcccgtctgcctcatgtgcattaaccagtagccagccatccttaggatttctctttttttctttctccttgctaggaaaagcaatctcgctgaaaaattactctttgtaaattggaatagtattagatcagcagcctgtgagtgaagtgtcagaagctgtaaccgtagaatgttgccgagaaaggagccagatgaaaaagtctgcggctgtacggaaacgtggaagctgctgtgagcagtgcagcaatgtggcttcccctccctggctttgcttttaaccctttttgtttcaattttttttttaagaaggaaaatgtttgccaaccttttgtttttaatcttcatgtcttcttttcccaagcaaaactttttgtttagatgagcactgtatagaaatgcaggctaactgacttttgtcctcttccgtgtcaggcggggcaagcaaaggtgaagagccagaaaaactgcccgggctggcagaggacgaaccccaggttctgcatggcactggccactgtaaatggttcaacgtgcgcatgggattcggattcatctccatgataagtcgagagggaaatcccttggatattccagtggatgtatttgtacaccaagtaagccagactttttaatcccttttttaccggattccatgcttgggagttggtgtgtagttatgttaatatatatagaaaaatgtgcttttaagtgtattgtaatacggaaatattcgataaaaatcaggtgattgtccagttttcagatgtgtccctgctggggtatatttttataaatagaaaatgaaggctggtacttcactgactggtacaacataactcgagttgatattatttaataaaccttcccttcattcgacaaggaaattgcattctggaagcgccccttactattggcttacattgcctggacttatgaatgaacatgaagtgcaggaagaaaccctgggatcctgaggtttcccacagccagttggcttgttgtaagaaagtatagataggcaccctacttttggatacttctaatgacagtaccacctgtactagtttatcactgtctgttctgtggtcatttgcgggcttaggaaaaaataatttggttaatagtaaaataaaatagaatgt

SEQ ID NO: 18805 - DNA, 1122 bp, Mus musculus
tttgtttgtttatttatttatttttaaatttgtactttaaaaattatccttcattgaaagatacacaagactgctgtgcggggctctggctgcgcctggtctggcaggcaccatgtgtgcatcccgcgatgattggcgctgtgcgcgctccatgcacgaattctcagccaaggacatcgacgggcacatggtctgcctggataagtacaggggtttcgtgtgcatcgtcaccaatgtggcctcgcaatgaggcaaaactgacgtaaactacactcagctagtcgatctgcatgcccgatatgctgagtgtggtttacgaatcctggccttcccctgcaaccagtttgggaggcaggagccaggaagtaatcaagaaatcaaggagtttgcagccggctacaacgtcaagtttgacatgtacagcaagatctgtgtaaatggggacgatgcccacccactgtggaaatggatgaaagtccagcccaagggcaggggcatgctgggaaatgccatcaaatggaactttaccaagtttctcattgataagaatggctgcgtggtgaagcgctatggtcccatggaggagccccaggtgatagagaaggacctgccgtgctatctctagctagccctacaagtgtgtgcccctacaccgagcccccctgccctgtgacccctggagccttccaccccggcactcatgaaggtctgcctgaaaaccagcctgctggtggggcagtcctgaggacctggcgtgcatccctgccggaggaaggtccagaggcctgtggccctgggctcgagcttcaccctggctgccttgtgggaataaaatgtagaaatgtgaaaaaaaaaaaaaaaaaaaaaaagaaagatacacaaaatgacattgtgaaacttggaattatttaaaaaatctttaaaaaaattttttttaccctttattttctttctgcagacatccaagagagttgttttttatctgtaattttacacatttctgtatagggatggtgctcttgaaccaaagctggttttatgcagtgtgagattaaggaagaggctctacttgcgtttgtgcttgtcgccaagtggtttataggcgactttgtaactgacccc

SEQ ID NO: 18806 - DNA, 1196 bp, Mus musculus
ttttttccagcttctggctattataaataaggctgctatgaacatagtggagcatgagtccttcttaccggtaggaaaaccttctggacatatgcccaggagaggtattgagtgatgctccggtagtactatgtccaattttctgagaaaccagcagactgatttccagagtggttgtataagcttgcaatcccaccaacaatggaggagtgttactctttctccacattctcaacagcatctgctgtcacctgaatttttgatgttagccattctgactggtgtgaggtggaatctcagggttgttttgatttgcatttccctgatgattaaggatgttgaacatttttttttcaggtgcttctcagccattcggtattcctcaggtgagaattccttgtttagctctgagccccactttttaatggggttattttattttttggagcccaccttcttgagttctttatttatattggatattagtcccctatctgatttaggatagataaagattctttcacaatctgttggtggcctttttgtcttattgacagtgtcttttgccttgcagaagcttttcaattttatgaggtcccatttgttaattctagatcttacagcacaagccattgctgttctattcaggaatttttttccctgtacccatattttcgtgggtttttcctactttctcctctataagtttcagtgtctctcattttattcgcagttccttaatccacttagatttgatcttagtaaaaggagataggaatggatcaatttgcattcttctacatgataaccacgagttgttccagcaccatttgttgaaaatgctgtcttttttccactgaatcactttagctcccttcttgaagatcaagtgaccataggtgtgggggttcatctctgggtcttcaattctattccattggtctacttttctattgctataccagtaccatgcagttttcatcacaattgctctacagtacagctttaggtcaggcatggtgattccaccagaggttcttttatcattgagaagaggttttgctatcctaggtttttgttactccggatgaatttgcaaattgccctttctaattcaatgaagaattgagttggaatttcgatggggattgcattgaatcagtagattgcttttggcaagatagccatttttacta

SEQ ID NO: 18807 - DNA, 1150 bp, Mus musculus
tttgaagaagttcacaggcaaatttgtcccgatatcatatagttaatatttatcctggactatgtatgtgtcttgtcagtacatattcagtgattttggatcatgtcttttttgttcttaaataatagtgactgtttttatacatgtaagccttcctctgcatgtttcttatgcagtacagtattttttctttctccttgagaaattaaaagaaagattgcttttggttacagcagtcatcagaaatcattcaattgggaccattcattgaaccaactgactccattatccaagtaaatttcttaggtataagccaaagaagtatataaagttaaatttgccaagagctataaggtattttctatgccttacctattagaatactttggatagtacccttacactataatacaacagtgcttaggaacctaagattcttcaattttttcataaattttattattccttaatattttatatgcttaatactaaattatactaaaattttcatactacaattttgttttatattacaataactatgtatacacatgaaaaatttggttaattgacttggccggttttcctttgaggactgtgtatgaagaaatattttgcaaagaaagtaaaagttgttcacctaaagcgatataaaaggacaagattcctagaaataatttaaagatatagctaataatatgctcagtgatcaatgtattaagaatttaagaactgctgataatgtaagaacagattgatcacaaaagaactatattcttctctactctaaatacaactggtcatgaacaattttctgtggtcattaatttgaaaatgtgcatttatagagaagatgacctccaggagatgatgagattttggggcttataggtttgggtagttcattgataagtctgaagtactagcagaaagtaagcaaagtttacaaggaaacaaagcattgaaataatgaaactgacttgtaaattcttttgaggaatttacaggggagggagaaatgtgaaccaaaggtaaatatggaattgaacttcaagatcattggtcagcaaaggcttcctgagaatctatttgagttacccttcctgggaattttagcagtgagggatatggtgcctgaaatggctattta

SEQ ID NO: 18808 - DNA, 1147 bp, Mus musculus
tttaaattagctggatttatttgccagtattatataataaaaccagcaatattttgtcattatctctgattgaaaatcttaccagagcagttgcttttactctttattattggaattttatttttgatacttgcagatgattttaccagaaggaatccagagagagaataccaagctgtatgaggaagtcaggatcccctatggtgaaccaatgccagttgggtttgaggaaaaaccagtttatatcaaagatttagatgaggtaaggtgagccttttgtgtaatagaatcttggaacatgccatttgtcattggtcagtgcagttaagaatatagataactggttgcttaagaagtatactattggagtatacatggtgaaaaatatgtacgcgagttccttatacatgaaacaattcatatatgcctttgcattacatatgttagcttgtgtttattttgcttatgttttgcatgtatgtgttcatatgtttgtatttatacacatgttcaagagcttgcatgtgactgtagaggtcagaaatggatgttatatgtatttttctagcactgtctaccttatattttgagatgggatctttcattgaagctggggtagctctaaccaagcaaactgaaagacattgaaaaaagaatttgaagaaatcaaaagacagaaatcccatgctcatggatcagtaggatttacatagtaaaagtagtcattctatcaaaagcagtgtacagatgcaatgcaatccccatcacagttccagaacagttctccccagaactgtcgtgaataaatagtgtttaggttcatatgaaataaaaaaaaacccacaaaaaaaatagaatggtaaaacagtcttaaataataagaactacagaagatatcactaaagctgatttaaaattctactagaaatctatagtaataaaaatagcataatactggcacaaaatcagaaacattgatcaatgaaattgaacttaaaatccagacataaatctacacactgtggacacctgacaggaatattttgtccccttctcattttgcttactgaccagcctgcccttttgccacatatttaaaatataaaaaatttaaaactaccatgtaaaatagatttttttcttaaga

SEQ ID NO: 18809 - DNA, 1198 bp, Mus musculus
aataatgagattgtttgaatcaatagttgttagtagtgggtaaatggtctcagagtaaggatttaatagaacccaggctggtgagatggcttggctagtaaatttgcttgccaccaagcatgacaacccaagttccatccttgggatccacatggtggaaggagagaactagttgttctctggcttccgcatgtacaacaaggcaagcatggcctgctctccttgatgtacacacacaaaaataaatgaaaaagaacttgctcaagtgtgagaagtctggcactgagggtgaaaggctaaatactgttagagactaggacgattcttaaaaattagactatgaagtaattcctacagtggaagacttccattgatgttatcttccagatattaatttcttgttttgtatatgtttaaaactatgtggttgcttgtcttgtgtggtaggggacacttatttgatgggtgtgtgtatgtgtgtgtgtgtgtgtgtgtgtgtgtgtgtgtgtgtgtgtaaaactcagaatagaaatgaagttgaacccctgaggcctggttcacttgaatccagatccaagcaagacttgtgatttcttttaagagggagtgaagattgaagaggctgagttgtccaggggtgaaggactggctggagaagtcactcacattcataagtccaagtctgagtattttaccacagtacctggtacagactctggcagataactgctccagataactatttccggggtcagtgcctggctggggcagttactctacctcagctgaggtttggaaggaagcgggaaagaatgaaattcacaaaggtattttcaatagcattatttagtatatggtgctgtctgtacagccttaggaaagaaacacttgtgtgccagccccccaccactccagcaggagacgagagaggaagaacttaaatgaggaagatttactttggctcgtggttttaaatgtttcagtctcaggttaacccactgggtagtttgatgggcttgtaacaaggcagaatttaggattgtgtggtgaagcagacatgcttacagtgcagtcaggaggcagaaacaaacgagcgaggaaccaggggcaccataacaccctgtgaaagcaaggcccaggagcctgcgtccttcagacctcacctcttaaagttcctgccatttccagtagatcatta

SEQ ID NO: 18810 - DNA, 1179 bp, Mus musculus
tataaattttctttttaactgttgctcatttatggtctctgggtggtttcgttcttcatagtatcaccatgttaactggtaactgaaagtgcacttcgtatgtatattgttagtgatgctgagataccttgtagtgtaacattgcctgtaaacaaggttagtattttaactgtacaaatgaataaacacgttacatattactgtttgctcctgataggctagacctcttaaaagaaagattgttttttcctcaagtattcctcccacaccaaacacataccccagtgcatgacttgagaccttcaaagtaggtggtagccattgtattcatttaaggaaaaaatgttcatggtaacagatctgaaatatttttgctttgacctgaaaccatgctgctcctatatcctttcagcattgcctgggaaggaccagggccattttattttcctttttattcatagattatatgccttatatactatgattgaatcgctaggaaatgtaagctatataaccctttgaattttttcaagaacttcacagcagatgtgaaagcaaaacttggatgagcattttcatgtgctgcctaggagggattgtgtgagatgggtacagaatatatttagaaagagtagtttatggttctacaggtccgtctttccatctctgctttctggtttggaagcataggagagtgctgtggcgtgaaacctgctctgagagcatcctggtactctcccaggcccactggagagttcacttcagagtgtgtggtcccaaagcactaagtgaaaagtagtctttatagttcatgttcataggaaagatgcccatataacactgactcttcttgaacaaagccaaaaaatggggggaaagctgttgcaaagccattacaatgaaaacgtgtagagcatgagaggtgtgtgcgtggacatactcacacttattgtgtgaaattgtcttctgcagttttctgttctgaacatgatgaaagtgacgtattcgggttagggattattgttaaattaaatttgagagagatgaagagcttgcaagtctgttgattagaattaaacaattacaaataacataacctgtccatggtgctggaatagaccccacagcaaggggcttatgttgttttcatattttaaaacaaaaaatatattaatttac

SEQ ID NO: 18811 - DNA, 1131 bp, Mus musculus
ggaggctgtgtgttgcctagagaaaggcgggaacctcagggcttcatgtgaacaattctaagtgcataaacccctgttttctgtggtataccttaattagctattgcatggaaggcagttttgattttcctggaatctaagcaccaaagcatgtgtttcccaaaggggttttactaggctcttacaggccaagtggatgctatttcatttggctccttttcatgtataacaggacagtgctaactggaattctctaagtaccctttaaatacagcagagtaaatgataccatatattccctaaggataactgcggaatttcagatgacagaactttactcagtgaattgcaaaaatctaggttgacatttttgcttaattgaaaattttgtttcaggttttttttaaaaagtatcttgtacattcctgatatctaaattaattactatcttaaatcattatgatgagttcactctccaggtaactcaactgcagtacaaaacggttttctttaggcaatcctgtatcaatcaatgctgctctaggaatagtttgggaaaagttactgtgcatttgactttggacttttaaaggaaacgcagacaagtggaaaatggcctgttttcaattatgttgatctgtgtgcatggtattggagcattacactgttaatgtttagtcccaaatgttaattgtctggaatccacgaaaaacagctttatacatttttgagctgttcccaagctttgtcttgtgatagtcaggaacattactatgtcatgaaatacattgtgttcaaacagcagttggctttaagtacctgacttgccagtcatttaaaaagccgggggccaaggtaggcaagatgaggtaaagacattttggtacagtgagcatattggtttttatatcagtatatgtttgactaaagcaatactcgtgtgcaaactctgtaaatgtattagttctattgtatcagaactaagtacagagtgcctgctcccttctttcctgacctacagacaattgcaccctgcctgccgggcaaactgaaaatactgtacttaaagaggtgtgatttttgctaagtcactgttttaaaggatttacacctaagggaatcttatgtggg

SEQ ID NO: 18812 - DNA, 1112 bp, Mus musculus
gggaccgtggtcgatttccagcatctacacttgctgatgcggtggtggattctctctgtgtaacttccagttcatttagattgcttttaactccttgggaatcgtttctgtcatggccgtgagggggagataggcaacaaatctcaagctgcagatcctcccctcagtctgaggaacagcccaatcattccataggagaaaggctagaggcgttggcgcgtcgccctcctcatccccagggggcgccagcggcccggagccagcctcattctcaagcgcacgctctctttagcagtgcggtggcggctccagccacgactcccggtcgcgtcggagttccccggcagccaatcagaactctccatgtactaacgggggcggggctgcggagggcggaggaagatggcggcgggggctaggtgaggtgttggcagtggcgaggggctcgggcgcggggggtggggggacgcggagcgatggcccgcgccggccgctggggcggataagaccctgtcgcgccgcgggtgtgggccggagggaggtgacggtgcccgagcgccacaggagtatgacggggctgtacgagctggtgtggcgggtgctgcacgcgctgctctgcctgcacctcacgctcacctcctggctccgcgttcgcttcggcacctggaactggatctggcggcgctgctgtcgcgccgcctccgccgcggtcctagcgccgctcggcttcacgctccgcaagccccgggccgtcggcaggaaccggcgtcatcaccggcacccgcacgggggaccgggaccgggaccgggaccggccgccacccatcctcggctgcgctggcgcgcggacgtccggtccctgcagaagctgccggtgcacatgggcctgttggtcacggaggaagtgcaggagcccagcttctcagacatcgccagcctcgtggtgtggtgtatggccgtggggatctcctacattagcgtctacgaccaccaaggtgaggccgggtgggaggtggggtgaccgaggcacttccgagtctgaggactacgtttctagctagtttgttcccggtcgtcctgcgaggccgccgccctctccaggccctgcgagt

SEQ ID NO: 18813 - DNA, 2711 bp, Mus musculus
catattcctcataatttatcaacaaacacaaaaaagtgtcttacttgagagcgaatgagtgtgtgtgtgtgtgtgtgtgtgtgtgtgtgtgtgtgtgtgtggaaataaatttataaatgggggcacattggagaatggagtatatagactggagttcaagcaagtaacagcagtgtgtgtcttaggaactgagattccagatagagaggcttcggttcctgctacttccctgtttgtctggggagtagaggaatgagtagaactgatttagttgtctgtggtgggtggggataatttttgtgcagtcttttttagtgaccaaactttaattttgaagaagaatatattgacttactaaggggaagtattctcattttgagtgacattcagaggttcacgtttgcttctctgccgagcaaagggaacgtcctcagatttccgtccatttcatttcttcattagagtaaacagtgggacttgggaggattagtctggtgtctattctgggctagagagatcatttgacgaaaaaaaacttacactatttgatgtacagaatagaaaacatttaaatattgaattaggcactcaaaaccaacaaagagaatgagcaatcatcttaaagatggaacctcttaaaggacaactttgatttccttcttcgtgtgaagatgctggatagtacccaaatcacttaaaacctgtttccattcgctttttacttaaaaataaacatttgcgagaagttaccaaggcagctcttgtcctcagaaggaacctgctcctcttgagtggcacctgggattttctcctcccagtaaatctcagtgatgatgtcatggtgattgagtaggatgaggcctgtattaccgaagtctgggagcataattgaacttggtcttctgtgttctagagaacagcactgctctgacaagtgaattcttgataaatggctaatgcttttctctcacactgctaatctttggatggaaaccattctttatattgatggacagttttcagaaaactatcaacaggtgtacaagagtcatgttcatttagaatagagcagtgtaaatgctaggcctcagaaatctgaaaaaagatagcaaagaaagtgggtttggaacgtatggtttggaattgcttgtcagactctgaagaagatgtgtttcagcttgggattacaaaccccatttataatttttaaatatacttgaaataaaatgattaaaatgaattttggtccagtcacattactttgcacttcttcttcttttttttctttttgtacaaaattttaaagacttaatttattgccaaaattctgtgtaaagtgacagtgtatctaacagttgttagagaactccccatttctgttcccctgtgctgtgtatggtctgtgttcctctggtttgattccctctggcggtgggggaggggcggagttgtgtgtaatttaagacaatttaaggtcttttctaaacacgatagttataaatgtcctttttagatcttctggggtatgcacagctttaatgaattaaatttactggaatcaattgaaataagaggactcaaggtttgttctaatgaagtttgtcaaattactctttggaattgagccaaaatcctagagttgagtttttattcttccttccttccatacaacaaaacaagtccatagcctatgacccaagactgtttgtggccttaggaacaattgcttaagcaggtcaagcattttgaatttcaatgtaggccttcaggatcttctcacatgaggtcaactgctaatgcaatctctacacttcaaaaagcactgatcgttctccagttcttgccaagatcatcccaagttggatatcatcaaaactatctttgtgctcccaaaacttggtgttcatgtgtatccctttaagttgtttctccttgacacgctccacaatggcaaagataccaagtcatacctactcaacagatggcatgggacatatgaagaaatggagacattaacttcgttctaaagcctgattgtagattgctccttaaaactgaacagttagtgtttgaagttgaaatgctgaatataatgtgaatagcaaaatctggtatgttgtgactaaggcttaagagtgcctgtttctgacaataaaatgttccaatattaatgaacagtgccaaatacactgtgcatatctataattttccatttgaatgtatgttaattactcccttctatgtgatggtcccatgcttagagtcagtgaagttcttgtgatgtttgttatgcttgtagattttggcaacttgtaaataatgtgtataccaagtttttatgattaaggaatcaaatttattgaattttattattgaaagttgaaataagatgtatgaacaaaaaaaaatcaataaaagaatatactcttttcatggactgtagtagtatgtgaatgttacatttagtttgaacagttctgaagtataaggagaaatgtatgaccagatagcaatcctgcttttagatagtatgctcttgattggaacaaattttcatttttttaaaaatctgctaaacatttgcaatcttacatttgtattttaataccagagtgaggtttagctttgtctttctgggattctcaggttccacagtaattacaagctgactttttactgaacataggaatgttaaaaacaaatgtgtaggt

SEQ ID NO: 18814 - DNA, 1163 bp, Mus musculus
tgtcagatgttgtagattccgacataattgtacataactatgttcctgatgacccagattcagttgtaatccaggatgtcattgaggatgttgttatagaagatgtccagtgtacagacatcatggacgaagcagatgtatcggaaacagtcatcatccctgaacaagtgctgaattcagatgtaaccgaagaagtttctttaacacattgcacagttccagatgatgttttagcttctgatattacttcagcctcaatatctatgccgaaacgagtcttgacaagtgaatctatacatgtgtctgacattggtcacgttgaacatgtggttcatgatagtgtagtagaagcagaaatcatcacagatcctctggccactgatgttgtctcagaagaagtgttggtagcagactgtgcctctgaagcagtcatagatgccaacaggatccctgtgaaccagcaggatgaagagaaaaacaactgtgaggactaccttatgatctcttgtggaactgtagatattgtcgaaagtgagcctgagaatgagcttggagttgaactacttgatccaaacaatagtatttgcgttcccagggaaaagatggtttatatggctgttaacaactctcagcaagaagaagaactgaatgtcactgagattgctgatgaaatttatatggaagtgattgttggagaggaggatgctacagcctcagagcatgagcaacaagtagaggacaacaaaatgaaaaccttcatgccgattgcatgggaagctgcttatggtaataattctgatggaattgaaaaccggaatggcactgcaagtgccctcttgcacatagatgagtctgctggcctcggcaggctggctaaacaaaaaccaaagaaaaggagacctgattccaggcagtaccaaacagcaataattattggcccagatggacatcctctgactgtctacccttgcatgatttgtggcaagaagtttaaatcgagaggtttcttgaaaagacacatgaaaaaccatcctgaacaccttgccaagaaaaagtaccgctgtactgactgtgattacactaccaacaagaagataagtttacacaatcacctggagagccacaagctaaccagcaaggcagagaaagccatagaatgcgat

SEQ ID NO: 18815 - DNA, 1128 bp, Mus musculus
ttcttcctgtctagctagcttaaaccaaaattagcttcctggggtctggactatgtattctaaagccagaacgggcagcaatttctataattagtcattcattccctcaaagactgcaccgttctattatcaatccctgtccattcctgttcaggtctcattctatatcatcccatctctaccttctggacctaacacattttcttcaggagtatgcagctgggattgctcactactcttgcttcctgtctgagtcaaactgtaaaatgagataattcacgtagcagcaccctgtgcaaggcaagcacgtgacctgcgaccatgtccactctctggccttcccctccacagaaactcagaaactgggcttgctttcctgtcaaatggagccctcagtgttgagagcatggttttatttctagtcctttccctgtcatcattttcacagagaccaacaagtgttctattaatccagccctctcctccaaatatatgccaaaataagtaggacttgaaattgtgtccaagtcatgagagcagttttctgccatgtaagtggaaaagaaattacaaacagaagttggatttttcttgccttttttactactgctcactctctggtcacgacaggctttctctgatgataacaacacttccatttggctctgtttgggttttttccttgacagctcagaagtcatgtttcctctaggtatccagggtgtgggtggttaaaaagaattttccagaagcttccagatgaagcacctctcttagaaatgtgtgaaccaagccaccagctccctcaaagtacagattttaatgagtcatttcaattttaggaagcacattaatctaaaaggtgcatgagccagaaagcagaattttctcaagtgggagttagaaatagtccttgttacaggcagaggggagctctcctctcactccttgtatatgaatcatttgccagatcctcacatgaaaagatgctgacttaggtcactcactgtccctggacgttgccacccacagtagtttcaagaataacagcttgaactcctattggctggttcctctgtaaacgctgcacagtgtgtttaattcactttgggtcaagccattgaatag

SEQ ID NO: 18816 - DNA, 1193 bp, Mus musculus
ttgtgtatcaagcctttaacctcctaggaagtgttaaatagtattttacttctagtctgttcatgctgagtcattctaacacagccacatagaacacaggtagattaatagctgtcatggggaagacatggttacctgtgcaggtaaaatgagctgagtcacgggcataataatgccctgtctttgtatttgactaggcaaaacttaaaagaattttatttttaagagcacagacccttttaatatttggaataagattcttgtctaatgttaacattattatatcttagtaatgattgtggggtcgtaattttgataaactgaatttaactttcagtagcttgttagaaaaatccaagagctagaacatattgctaaaatggatattggacagttctaacttggaagctcatgtccagtaccgttcttgtttctgactccgtgggcatctctgcaaggatatttgtaaaagggactgtttcattaaagggtgttctttaaatatcagttagagttcattgagcagcgggagctaactaagcagctgggctgttttgcatagtactgctgaactcaagcatgcctctggttctgcttgccgaagctctcatctagagtcctgccactgcatctgtagttacagtgataggatgttctctgagtgagcatgcatagcagatgacattggaaccaccttctgcccccctttgtttccatctctgacagtggtcaataagccaagagaaattctctattgggtataaagtctaaacctttcaactttgccctcccccaaaacattgatggtaattgctgtatgaatgtatcatacatttaatcatgaaagggaaggatttgagatttcttatttaaaggaaatattgaacataatagaatgtactttgaaatcaataagtcatcggcaacactgttgcagctgcatacagagagaaccttttgtgcctttgtgcctgcagtgtttatttctcttacatgaactataagaatgttgattattgcaccttgttctttggtaaatatacttaagaatttttctaaaaagagccatttcttgttagatgatagagctaccttagtaaacatgaggggatgtatcatatttgtatgtgtttgaagccttttctatatagagagcaggaaattccttttaaatgtattcatttgtgtgtatg

SEQ ID NO: 18817 - DNA, 1225 bp, Mus musculus
ccagctcacctctatagaagacactagttattacagtgcctcatttctgaggctatttttctttacctaagtagtggggtgatagtgacatttccagaaaacgaggctgcattgtgttaaggaatagtgctggcttgatagctacaagttgaaagagaaaaagaagccccccttttttattcagcatgacaaatttatagaaactgaaaagattctaaatttgaaacctaaacaggatcagtgcagcacggtggcatagacctgtagtcccaacacttgggagactggtacaggattgaaaccacctttggctaccttgcaggaccatctcaaaaaccaaactgaaaaagaaaagccgaatctaaacaaagctcctctttctcttttctcacttgacttggccttctttatcatcttagattggaacaaatagtgtgcttattaagaaaatggctacaggccagggagatttcaggttgaggtcctagaaaatgataacttctgacctttctcacttcccagggaggaatgaaatattggccagcttgtgtcctcaagtttttgggatgtatctagtgaagcttgctgtggccatggtactggctggtggaattcaaagaactgatgctgcaggaaccagggttagaggtcagtacctactgatacattctgagaaatacgaacatgtagagggcaagggaggccctcacctgcttgttggagggtgagttaaaatggcaaaggtttgaaaatgaccaaataaaacctattacttaggatagtaacttcaagaaattaattttaaaagctgcctctagagctattttctaaatgtagtttctaattgggtttttcatacttagtctatatccatatttatcagaggctactttctctaattctagaaagatgaaagaaatcactagtttttcagtggttatatactacaagcctaattagctctcttggagggaaagggagagagagtgtgtgtgtgtcttaatgtctccaagctggtttccatctgtgactgtcaactgctatgcagtcatctgcctgctgattctcctgctggtagacagcaaatatgccatctgccaggagttactgctgtaggtcacacttgaagcacagactgcttcaagcgtgcaacactatctggatggcacaaagctcctgtgcagcaagcaggacacacacagagctgttaaccagtgaacccaca

SEQ ID NO: 18818 - DNA, 1162 bp, Mus musculus
ttcagaggccgagcgagagcagcgcgaagaagcctgcgcgcccccgcgcaaggcggccccctcgagcggccgcgcgcacgccccgccccctccaacgccgcgcgggtcgggctggggcgaccacggccgcagcgcggtcccggcgaccaagacagtgcgtgttgagcccgtaagtgaccaccgcagcgtgaggtcccgggggatcgtttccctcccgtggttagcgtcaggtctcgtccgcatcctttaatttctaaactccccgcagggctgggaggccacagccaaccacctgtggattagaagcgaatttccaaatgctttccaaagcatccctccgctaggctctcgctcgccaggcggcctggaggcgcgcaatgagcgcgcacccgcgaatggcgcgcaacgcgggattgagacgcgcggggcgtggccacagctcccgaggggcggggctacgcgagcctaggtgagggacaaggctctatccccaaactgctctttttggcgccaccttgcagtggatagtatgaaataaagcaaagccattttatttgtttggatgccagaggcaagaggagagagaatttgatagttgtacaaccatcgtcccccctcccctagacagtaaatggcttaagtttgtaacgggatgcctgagtttataggttgataaacttgtctaattgcacggatgttggaaaaaaaaaaaaagaagaagaaagctgtgtttaaaaaatatcggtctgtttaacactgtaatttaccggtttaactaggcaaacatttaacctgcccctgttaggaacttaaaattctttgcccgccctctttctgcgctgttggagttgggtatgttgttaattgttgtttcggatttctgctctacattcactttgtatttgtaaaatcgtaaagatattcctttggtcactcttgagggtagtgctgtgatttttttttcccagctaagatccacatcatgaaatactatgatccctttcccaaataatctctttttttactcttggctgattgattatgctattacctaaccaaaaccaagtcgcttagtattttagtgttggcttactttgactgattctctgaaaaatactctcttaatctcataccagcctcctgtacttgtcagtgttcttgg

SEQ ID NO: 18819 - DNA, 1175 bp, Mus musculus
atcccatctattttttcgcattagttgatactaaggctgtgtggttcaaaaagtggatggtaaggaaaaatgttttctctctatcatttgagggactggcctgtgtttctgtgcttggtgtgtgctgagttctaattgcttttctgcatgtgttaatgcctttaacctgtacacggacaggtgtgatggtagatagacatcaatctcccatttagaagctattttgcccaggattttttgtcaagtcagggtcaggatagttttttgtttttgtttttgtttttttttttttatttttgcagggggtggggtgtttcgagacagggtttctctgtgtagccctggccgtcctggaactcactctgtagaccaggctggccttgaactcagaaatccgcctgcctctgcctcccgagtgctgggattaaaggcgtgagccaccacgcccggcaccaggatagtcttttaagtggtggtctatttgaatcttcttaaaaggaatgatctattaagggttctaaaagtcacgaatcaaaaagcttcaaaaattttaaatagatgttttaagacatgaacattcagggctcatctcccttgggtgtagaggataatgcctagaatcagtttctgtttactgcttcctgaacctggactgggggatatgtttaatgcctgaagtggcagtttccactgaagcttatgacagcccaacactgaaagccgtgtttaagcagtctttctactgtcgcccctgtcagctgatgtggagtaacagtccctctcggagcaatagcagcagcaaaatacagacttctgtgctgatgtccttgtctttctcactccgtctgccaggctgtaggttcttgtctcagtggagcagagagagggtcagggacctaccatgtgagcgctgacccccctcttgtagtcctcagcagggcagctggatggccgaactgcctttgccttttgatgtggatatggtatatgccccattaattagagcacaactctgtctctagtgctaagcccttacgttacctatgtaggaatgtctgatgaatcttttaaattcattatttttacttaaatcaatgtaattgactagcctgaatcttttgtagcccagaaaggataatttttcttaattttcacaaggatgaaactagctttat

SEQ ID NO: 18820 - DNA, 1730 bp, Mus musculus
ggcggcaaaagtagggaaaggggaggtatgtaacggtatttaatgtagaagattcaaagagcttaaattctagtaagagtctcattggatgaaacatagatagggctttctctctctgccccccaactgaaccttaagaatggttctgtatacatgagtgagtgggtgatatatattttttttaatttttgttttactgagattctgccatagagctttgagcaggaatccaagtcctcaacatggcatttcctttatgaaaagacaggttgtcctacatccccgctaaaaaacattccagtgtttaaaaacttggcagtttgcaggcgagcttccctggcctgaccctctaggtgtggatggaccttatgctactatacacgattttcattcttggtaggtatcaattcgaagttcagacaaggttcaaagaaaaagattgcccatgtatttgcatctcagtgggttctttttcaaatctgtcccacctttgtgtcttccatatattatcctcagctggtcctcaccctcaccaaatgatttctatcgacatttttaaaacagtgagaaagtcttttttttttttttttttgagttagcatcagggaggcaagccatgctcaatatttaacaatcgcttctgtctatgtgtgggtgtgcaagtgtgtaagcgtgtgttttgtcattattggtacaagcagaggcagtataaactcacagatttgaatcgaattcacacagtgttcaaatttgaaccttcctcatggatctttgtggtgtgggccaacgtggtgtttacattatagaattcctgccgtgcaaaagtgtaaagcacacactttttccctaaaatattttttccacgtatcctattatggatactggttttgttaattatgatttttttttcttttttagaatgtagcagtaatagccattactgaaatgaatgatttcctttttctgaaatataatcattgatgcttgaatgatagaattttagtactgtaaacaggctttagtcattaatgtgagagacttagaagagggttgcttagagtggactatcaagtgagcctaaaggaactttgtagtaactggtaatctggtaatttttgtcctacttaactacacattaactcagaacttgtattctgagtttaacagtcttttagattgacgagcaacttggatgtttgcactaagattttctttgagatactagagggggtgaaggagttttcagcagtgcacatgtaactaatttatttgaactgtaagctaaagacacctaccagtttcttcaagtgacttaaaaaaactcatcacagatgattgaaatgtcgagttatcatgtttcctcttgcgcgccagctacacaaggagtttttggacaatgagaaactaatttgtttgacattccatgttaaactactgtcatgttcagcttcattgcatgtaatgtagacctagcccatccaatcaatgtgctcgggaaagtgttctttattcaataaaattttaatttagtataataaagataacctgcatgtcttgtgtgatttaaaaaacaaaaaaaacaagaaaacttaccaaatttattcaagattaccaaaagtagatcccataattacaatgtcttgggctaatgaaatccacttttattttattttcatcttttgcttgccggtatctctgtgcaatggtatgttgctgcttgcagtggccag

SEQ ID NO: 18821 - DNA, 1647 bp, Mus musculus
catcaacacaaaagaacaacaacaacacaaaagaacaacaacaacaatacccccaaatcctaattacaacaacagaggactctcggctatgtaataagcaactataagtgaatttcaaatgcctcaaaaatgctaaaggaatgtgaggaaaatgtttccccaaaggagattgaaagatggttgagaaagccttacatggtgcatgtatcaggttgaagtctggacttagtttgcaggagatgggagaaataacttgtgagcaagtttgcttctttgttttggaatatcagtttgaaaactgcttataaaattaggaacaatgatctcgtaaattggggtttgtgatggaatgcagggagtgctgccttcctctgttatgtttctggcaatgcttgtctattcccatagcatcacaattctgcagcactcatcatgggattttgttataaagaaacgtttcgggcgtgattccgtcgtgcgcgtctgttctgtggaacaggaggcagttgttttctgtccggcttctcccacaccgaagtgcgcgcctccacctcatggaagactcgatggatatgtacatgagtcctcttaggcctcagaactaccttttcggctgtgaactaaaggctgacaaagactatcactttaaagtggataatgatgaaaatgagcaccagttgtcattaagaacggtcagtttaggagcaggggcaaaagatgagttacatcgtagaggcagaagcaatgaactatgaaggcagtccaattaaagtaacactggcaactttgaaaatgtctgtacaaccaacagtttcccttgggggctttgaaattacaccacctgtggtcttacggttgaagtgtggttcagggcctgtgcacattagtggacagcatctagtagctgtagaggaagatgcagagtctgaagatgaagatgaggaggacgtaaaactcttaggcatgtctggaaagcgatctgctcctggaagtggtaacaaggttccacagaaaaaagtaaaacttgatgaagatgatgaggacgatgatgaggatgatgaagaagaagaagaagatgattttgatgaagaggaaactgaagaaaaggtcccagtgaagaaatctgtacgagataccccagccaaaaatgcacaaaaatcaaacctaaatggaaaagacttaaaaccgtcaacacctagatcaaagggtcaagagtccttcaaaaaacaggaaaagactcctaaaacaccaaaaggacctagttgtgtagaagacattaaggcaaaaatgcaagcaagtatagaaaaagcgcattgaacattcctgggcactactggtaaattaagcccaaagatggggaaagaggaaaaggagaaacaaatatagtaccatcaacaatccagacatctcaatcccctttcctgattggccatccatccccccttgcaggctggaagcaatcttgtttttcctaaagcacttttcttttactcttgtgatgcagaactttacttctctaccacttgtgcatatgcctcatttctttgaccatgttttaacctatgtatccttagctgctctcaataaatttttaaatgaatcaaaaaaaaaaaaaaaaaagaaacctttcctggtgatgggtaccac

SEQ ID NO: 18822 - DNA, 1098 bp, Mus musculus
tatggagggtatggcaggaccatcatgattccaggagctactgcacattatcacaaactccatacaaaggaagcttaaatgaaggggcctagtagcttgatagcttagtaacacaagccattaacctacaatcactttgacttttcctcatattgtaggtatgagccttctcgtgagatgaaaagtcagtggacagcagtctgggtgaaaatctcttccagttggattggccttgtgctgtacgtgtggacactagtggcaccacttgttcttacaaatcgggattttgactgaatgggatgtctggcatgagtcccactttggccattgtctatttgacagtaacagtattcccaatttttgtaaagttgtatgtgctgttgtgtaagtgtaacactgtttttctcttgcatgaaatagatttactctgccaattttatccatgttcttgctaagtctattgatgatatgaattggaaagggagaattttgaatatggtgagaaattgggaaaaatggacattgataggcatatcatctgctttgtgtacatatggtattaaaactgaaaacaaatattcttgacatttgggtttcaaaattgtgttagcacttattttagaaacattaattaagtgtatggctgcctttgaaatacttgatgtgttgttgttgccttacagaggactacaagtataaagcaaatagctgttttaaaattatgtaaataagtcacaggctagttatttgaaaactctaagtcactttaattttgtcagaatcttctcttactaggtaggcccaggatgttccatagttagtggaaaacagtacaggaggtggagggaagctaagcaatagacaggagccgtcacaggaagtcactggcaatacgggtttaaagcaggtacttagatcacggttttctctgtaagaaaatatggccgtcacccccgcccaccaaaaaaaaatgatttgctctttgtgaacacacaattatgaatttcatggcgatgttaacaattctgcatttagacaaggttttgcaaaagatattgtgttagaaaaatttgaaactaaaagcttcccaaacaaaat

SEQ ID NO: 18823 - DNA, 2227 bp, Mus musculus
caacaaagagtgctcagatgagatattttctccctctaagaatgatccagcactcaggagacagaagcaagtggatctctgtgagttcaagaccagcctgggctatagagctagttccaggacagccaggacttcacagggaaaccatgtcttgaacacacccccctccaaaaagaattatttaatctttataatgactagagaaccttaagagaacaaagctgaaactgagtcagacatagaagttacacacacctttaattcagcacttgggagtcagagcaggcagacaactgatttttaaggccagcctggtctacataacaaattccagaattccaggtcagctgcagctacataatgagacctagtcccaaaaagtaaatgaatgaatgactataggggaggtgacagaggcaggcaggaagcagcaatggcagcttgtaaaaatggttgggcaaaactgcaacttggagctgcctggcagcaagcgtgtgtgcttctgcttccgcctctgtgtttgtgcccttcctctatgtgaaactgtcctggtcacttggtttctgtactgaattatatttatgatgacatccaaatacttttgcatctctataggtttccactttgtcaagcgccatcatgtcgagcaccagtggctaattccacttctgtagatcatataatacttgtattgcacttaggatatttcttacacctctgtcaggtttttaagtgttcctggatcttaggagagtaggccagcttctctataccacaaaataacagtttacttaaaaacgttcaaattatcctcaaagatgggcaggaaagggactggaaagatagcccagtagttaacataaggactggtcttgcagtttcagtagctctgattccaggatcgcatgcctctggcctaagtgagtacctgcactcggaaacataccccgttctactcccaacatacacaaatttaaaaattaacagggttattggattttggttgggttttgagggggagttgtttttgtttttgtttgttttttaaggtttgtttgtttgtttgtttcatgtaggtgagtacactgtcgctgacttcaggcacaccagaagagggcattagatccccattacagatggttgtgagccaccatgtggttgctgggaactgaactcaggacctctggaagagcagtcagtgctcttaaccgctgagccatcttctccagccctgtctttgttttttgtttttttaacttcctactacttttcaaattatctctctccattttttctggtactgttttgtaatgtctagtacttcttagtgttcctgatctgagcttgttttgataaagttctatttgctctggacatcctgatagcctgcctctgcaagtggggtgagggaaggggtcagtgcaggctgcagatttcccccctgctcccagactccgagtgctcccaaagcacatgtccccagagtggaaggaggaagtgcacttgccccagctcgtggctctggttgttggtttagtgcttctgtccctcgccagtgtccagcttctctgtgatgtatgagcttgggcaggaatgtctctctatttctgtcttcacactgtgtgcttctgcgctgcttctccctggcagtgtttagaaacctgtcacctgcttctctgtttactctctccctgagttagttagtagctctcacgcttgtcttcgctccagttttgttttcatggggcagggattgctcggggagaagatgggaatatttgtgttcattttgcatccccacactctctggtaactaacctctaaacgccagcttctcaagagtgaaataagaagactggaaagaaaccaagagcgtgagaagtctgtggctaacctggagtacttgaagaatgtcttgctgcggttcattttcctgaagccgggtagtgaaagagagaggcttctgcctgtgatagacaccatgctgcagctcagccctgaggaaaagggaaagcttgccacagttgctcaaggtatgtgatgggacgcagtcactggtgtgcgatcctgggcactaaccatggctcgtgcataagaattgatgtgtgcctgtaacctttttctgttaaattttattcacttggattacttttgtaacacacataactggggttgaaaagctggctctttaacacttgagtctgttgcagtacatcaatgagttcaa

SEQ ID NO: 18824 - DNA, 1134 bp, Mus musculus
aatagtcttaaaagtcctctggtctcagtagtggtattagacatatgttcgggtcacaaagaaagagaccaccactccaactgaagtgtcatacactttacaaggcaaactttactcttgatcaagagagtgtgttgggaacaccaagatagtaagcaaaggtttcattgggtgggaaggatttaaatagtttcctaaaattcttacaaagtaggagagataaaaatattttagttctttgtcttaaacacaagttttatagtatttgataaaaaaaaaattcacatttgctatttattacagtggtaccagaactgtttctttaaggagaaggcagaaacttttgggagcagtatttggacaccataaccattaagtaggctaaggccagaggcactgaatgtcatgcctagggcttttggaatggttaaaaataaaaagacaggaaagaaaagggaaggggaataaaaggaagccatataattacctgagcaaattatctgagcgtagaccctaacagtaatcataaagtactcttttacagtgtcaggaaaacttgcttcttccaaaataccatggaattatagatcgactgaatgagctctgtttgaaactttaagtctttacgtttgtgtgtgtgtgtgtgtgtgtgtgtgtgtgtgtgtgtgtgtgtgtgttttggcatatatgtgccacagcatggaatggggtcagagacagtttgggaccttttatgggttttaaggatcagactcaggttgtcatgcttgtagggcaagtcttttacctggtgagccacctcccccatccccctctccttgtatttatggatgatgccccttcaagaaagccctttattatttttatactggtgatacaacccagggccttgtgtatgctaagcacacacttaccatttggccattattttatccttatttttttttcctttttcttgtttagaaaatcaagtcctttaagataatggttaggatatattactaagttttttattttgttttaaattgaagagtaatgaacttgttatgggaagcctgctagagaagaccactcagacacagtctatagccaattgaaaaatctttattccaactggctgaggctacacttagg

SEQ ID NO: 18825 - DNA, 1134 bp, Mus musculus
agtcttgagagttgctgagtagtcattttcaattccctaccccacacccctgtccctgatacacctaccttttatctttatgtatttggttataatagatacctctagaaagtggaaacatgtagtatttatcccgtagtaacctggtttgggtttttgtttttaatttggtggagaaaggtcttcaaggtccacccatgaatcacatgtgagaatttcctttcttacaggcagtcatattccatcatttttctgtagcacatcttacttattcattcttacgttgttggaaccttttagattttttttccttcctgagacagatcttaagtgtaaactgctcttgaactcactgtaacccaggctggcttcacactcagaatcccctcacccacacttcagctttctgagtgctgagagtacaggtgtgtgacttttagctattgaattgttctcaccttagtgattctttgagtaaattctaatttcagcttttgtgaatgatgctccctggggaaaatggcgggcaactatctctaagaactctggagtattatccagaggtagaatccctgagaacagtggtcgattttctgtttcgttttgtttgataatgagtgggattaatatctcattatagttttgtttttctaggaaaaatacagaatatcattatctgcacctgtttcttttttggtttttggagacagagtttctctgtgtcgccctggctgtcctggaactcactctgtagaccagactggcctcgaactcagaaatctgcctgcctctgcctcctgagtgctgggattaaaggtgtgcgccgccactgcctggcttctgcacctgtttcttgtcctgttaagaagctaagctcattttgtttagatcttttgcccattttttttgttgttgttattgtctatctggttgttggtgtagaatgtgtgtattctaggtagcaatcccttctaatatatatgactttcagatacgtcttccaagcctattggttgtcagtgctgggaattgagcagggcccaggaagagctctcaactgctcaaccctctctagcccttaaaaaattgttttaaatgtattgataacggatacagatgaacgagttgccttgt

SEQ ID NO: 18826 - DNA, 1099 bp, Mus musculus
gcagatttctctctccttgtttggttttcccagtgtgtgcctttctcccccatcccagtcgatattaacaggaaaggcctgttggtaatgaatgctgtaatggaacaatgattaacaaagagtttcctcactcatttcctctaatactgtatcctgattattcaggaaggctgggactgagaagtgaagactgaagagaggaaactccaaagccagcctctctgcttatctactgacccacttgtctcagagcaattcatgacagatgtataaatcaccaagtgactgtccagcatctgcatttctgaaatgagaccatcagctaagttcccgattattggctctaaagcaacagttattaagcctcctccctcacccctctgataagaatatttacagaactccaaaacctacacagaaagaagcagggctgttgccatggggctcatcttctcccacaccacactatctcctgggacataatgtttcttgcttattgtatttgtggtgataatcaatgagaagcatcgcctataggctccttcatctgaacatttggttccccgctggtggctgtttggaaaggttgtggaaccttgagggaggaagtatgtcactggaagtgggcttgaggatttattgactcaccccacttcctgctttctttctttgcttcctgtctgtgaataaaaatgtgatcagccagcttcctgctcctgccactagggcacgccttccctgctatgatgaactctgtccttctggaactgaagccaaaataaaccctttcttccttgagttgcttttagtcagagtttcatcacagcaacagaaagtaactaatacagtattccttgttttaaattggcttgggggtttaatgtaattatctaaactatagtgtttatggaaatttgattcttcaaaagttatagtttctggtttgttcttcattttatatcccaaacttttctgggttaatttatgggattccccagactctggttttttgagacagggtttctctgtgtagccctggctgtcctggaactcactctgtagatcaggctggcctcgaactcagaaatcctcctgcctc

SEQ ID NO: 18827 - DNA, 3060 bp, Mus musculus
gtcagctttcacgggactcacataagctttgcttccctgatcgcataagaaaatcatttcccattcatatactgggaactgtatgggaagataagtgcccaaacagttcctatgttgtcatgtgcttatccagttagcattgtaaaaggaacatgcatattactaagaagcaaaaacatttcaggatgactgatttctttttttattaaatcactaagcttagttttctattttgttctccttataaatttttccttcataaaattacttaacatacttgtaactactaatgcatcttttacatttttaagcaaaacaaaacaaaaatttgccagttatctggaaaatattgcatacattgtgatgttggggaaatgaagcattttaaaactatattacacataaaatgcatagtattcaaatgggacatgaaatgcactataatgcagcttcgaatgtatggctttcaaaagtgagcgtgagccaggtgtggtggcactaggcttcaatcccagctctctgcaggcagatctctgtgagtcctaggccacccagggctgcatattaaaaccttgtttcagaaagaatgactgtatctcgtattatctttgtgctaatatctatacttcatacataatctaacttgccttgccttagaaaactgcatcctatatcaggaattctagatatttcttataatatcaaaatgagtattttgattgagattcataaatttagaatcattcaccactgatacatactttaaaaattcttttctcaggaagccagtgaaagttaattcctgtcctcttattagaactatgctgatatactaaaacattttaatgaaggcttttttatttcaaatgtcataactgggttttgtttactataaagcagtaaagcagtataaatgatacctttagactgaaagagggtggtaagagtatcaactctaaggaaaaattggggagttctactttataaaactgtttatcctgaaatgtctgggccattctgtttgtatgaactcaatatgcaagagtatgaacattttttaaatttttctgctgctaacatgttaccttctttttcagttgccaagatatattttgcaaatactgctgaatataatgactcacattgtagtctcagcatttgggaggctgaggcagaaagattaccaggagttggagacaaatcctaggttacagtgtgagatactatcccccaaaacatccccacaaacaaaaacactagtgtattgttttgccgtaaagaatatctctggggcctaggaaaacgttcagtcagtaatggactcacaccagccttaggacctgagtttaaacttggagggagcagatccctggattttacgaggtagccaaactcagcctaactagtgagccccagatccaagggggaaatcctgtattccaaaaagcaaggtggatgcctcctgaggaagggccgcctagactgatccctagcctccacatccacacacacacatgcacacattcagaaatatggatgtgtacacacaaaaaggatatctcaggatgctgttactctgccattaaaagtttataatcatgaatttttaaaatacttgattatgcacattatggaatacatttctgtttccagataactaacttgtaaccaatcattttatttcctaatatccttttcatattaagagaattatatgtgactaaaaatatacatgatttgtgtttgttaagcattttaaatttgtctttgcttttgacaataagaaccaaaatttcttccgtgtgcctttgtcagctaagaatgactagcagtggctaccttagaagtatttatgaactattgtacatgcgtttaggcagatagaacttgtagtctagcgtcttgatgtaacttacatacctcactggaagtatggagcagaaaagcactcattcccgtgctttccccatccctttcgaggtgtgtggccttgcctgactgcctttgcttacgtgacatcgcttaagccagagtccccactgctgtctttgctcacttctcttcagacaggaatattccagtaagtttgatctcataattatgtggtaattcatctagagatggtgcttttcactgtggggtaaatcattagagcccttagtgtggaagatggaggtctaaatggggccaagacagagacttcatctacttcctattagttgtggggtttcactggctgctggcatttgtcagtgaacatctgtttgaatttctgagaacaatctgaaataattcattgtgcttatgaaatttctaagtgccctttttgtccttatcctaatataacatggaaaatggatacacaaaaaagattttttgtgtcatgttcaaagccttattataacactttgcctgaaataggtcattttgcctcatccatttgccaaattagccaatttcaagttagggaaactttgatgtaggctgacaatatccttgtattttattttagattgtaagcttaatggcaagaaattatatcaataattgtgctttttatgtagcaaccattgctgtgtacttttggtgcttaataaatattcataattattcatagtgtgttacatatcatttagtttgacctatctttgagaattcaaatattcatttagtataatatgttagaaacatcatatatgtaagtaaaagaaaatggcctgggtatggtatacaagccaagttttagcaccttttgtattaacttttcctggggcaacacagataaatgtctactcatcccagacagagaaccattctacccacatagtttgctgatgtggtgatttcactgaactaatttccagcagtttgggtgaaggctacttacaagaatttggataactttaggacagctgcatcatagaaaagctgcatccttgcagcactgggacaacctccaaagctgcgtaaatggagccccacccttcagttacctttcctcctacatattctagtgcctctcacaacacgcccctctggagcagaatcacttacatctgg

SEQ ID NO: 18828 - DNA, 2100 bp, Mus musculus
cttgtaataatcctgttacaccaagtttatctactgcacctccctcttttaagtttggtacctcagagatgagtaagcctttcaggattggatttgagggtatgttcgccaagaaagaaggacagtgggactgtagcttgtgttttgtccgaaatgaagccagtgctactcactgtattgcttgtcagtatccaaataagcagaatcagcctacatcttgtgtatcagctcctgcctcttcagagacaagcaggtctccaaagagtggatttgaaggcttattccccaaaaaggaaggagagtgggagtgtgctgtttgttctgtacaaaatgagagctcttccctaaaatgtgtggcttgtgaagcctccaagccaactcataagcctcatgaagctccttcagctttcacagtgggctcaaagtcacagtcaaatgaatctgcaggaagtcaagtgggaacagaattcaaaagtaactttccagaaaagaattttaaagttggcatttcagagcagaaatttaaatttgggcatgtggatcaagaaaaaacaccttcctttgcctttcagggtggctctaatacagaatttaagtcaatcaaggatggatttagtttttgcattcctgtatctgctgatgggtttaaatttggcattcaggaaaagggaaatcaagagaaaaagagtgaaaaacatcttgaaaatgaccctagtttccaagctcatgatactagtggtcagaagaatggtagtggtgtggtctttggtcagacaagcagcacctttacctttgcagatcttgcaaagtcaacatcaagagaagggtttcaatttggcaagaaagaccctaattttaagggattttcaggtgcaggagaaaaattattctcgtcacaaagcggcaaagtggctgagaaagcaaatacgtcttctgatctcgagaaagatgatgatgcatataagactgaggacagtgatgacatccattttgagccagtagtgcagatgccagaaaaggtggaactagtaacaggagaagaagatgaaaaagttttgtattcacaaagggtgaaattatttagatttgatgctgagataagtcagtggaaagaaaggggtttggggaatttaaaaattctcaaaaatgaagtcaatggtaaactgagaatgctgatgcgaagagaacaagtgctaaaagtttgtgccaatcattggataaccactacaatgaacctgaagcctctctcggggtcagatagagcatggatgtggctagctagtgatttctccgatggtgacgcgaaactggaacaactggctgcaaagtttaaaacgccagagctagctgaagaattcaagcagaaatttgaggagtgtcaacgtcttctcttagacattccacttcagacaccccataaacttgtagatactggcagggctgctaaattaatacagagagctgaggaaatgaagagcggcctgaaagatttcaaaacctttttgacaaatgatcaagtaaaggtcaccgatgaagagaatgcaagttcaggtgcagatgctcccagtgcatcagacaccacagccaagcaaaatcctgataacaccgggcctgccttagaatgggataactatgacttacgggaggacgccttggatgacagtgtcagcagcagctcagttcatgcttctccattggcaagcagccctgtgcggaaaaacctcttccgctttggtgagtccactacaggatttaacttcagttttaaatctgctctgagtccatctaagtctccagccaaattgaaccagagtggagcttcagttggcactgatgaggagtctgatgttactcaagaagaagagagagatggacagtactttgaacctgttgttcctttacctgatctagttgaagtatccagtggtgaggaaaatgaacaagttgtttttagtcacagagcaaaactttacagatacgataaagatgttggccagtggaaagaaagaggcattggagatataaagatcttacagaattatgataataaacaagttcgcatcgtgatgagaagggaccaggtattaaaactttgtgcca

SEQ ID NO: 18829 - DNA, 1277 bp, Mus musculus
actgaagaaagcagaacatttggactttaagcatgtagtatttgggtttgttaaggatggcatggatactgtgagaaagattgaatcatttggttctcctaaagggtctgttagtagaagaatttgtatcacagaatgtggacagctataaaataatttttcacagtgagttttatctatataagcagttgaattgatgcgtaattgttacagacagtatagtaattatgttcaccttttgaaaacagatgtttccgatgtataaatgtaaaattgtagcttatagctgttgtcactttttagtgtgtaataattgatcttgcatggtgtgaaataaaagtttaaacactggtgtatttcaggtgtacttatttttatgtactcctgacatatctatattagaatggctaatacaaattttgttaaaagcaatagaatttcccagactattgaagtaatatgatatatgcaacttattttaattcctgttaagatatctggacttcctgcatggtacttatcattgaataaggggaccataatgcagataattttattttagatttgaaatatatatatatatatatatatatatatagtaatcttagctattcctgtgctcatttatgtatagactgacatatggatagagccacagaagataggagttaaccaaagtgctcttctgtcatttttatgctcctgtgtagttaaaaattaacttttaagtaggatactgtcttttcttgatatgttgtgctcttttgaagacgttaatttttacattttaaataagttgatcatttccttagctagccttctctccttcctccccatcctcctttcttctcttccttttttccttctttccattcacatttctgttacctgtctctactacctcagaaacttcagcttggtcctgatgatagaattggatttttctctagttcttgtgataaagtatcaatatttttaaaagatctataccatgttctttggttaaagatttgctttatattagattgttgcagtacctttttctggtgaattttgtagcagaaataaagtgataattgataacagccatgacatttaaaacatttgattacttgtgcatctaagttgtctgttccttccgtaactagatgtgatttctgcccagtgctctgagtgtcaaagtgaagaaattcaatgaagcatgggtaaatggtgggagtaactatgaatctcttaaggtagccaaatgaaggagattcccactgtccctacctgct

SEQ ID NO: 18830 - DNA, 1157 bp, Mus musculus
caaacaaacaaacaaacaaaaaacatacccaaaaaaacccaaaaaaacaaagacagctgctaaccattgtggaccaaatgtcatgctaccactaaacaaaagacccactcagtctgtgttaaattgtatgtctttttaaagatatttggagatccatctaagctttaaagagggccgggcagctggagaacctgagatacagacctggttctcttgtgttagctgctctgtaagcctctggatagcaatagctaatttattatttcattttttaaaggctttaaagtgcctgagggatgccctgaaactaattttctatttctgggattccctgggttctttataagagatgatgacacgactagggatttttttttaaagtatgaaaattgtccctgcaatacttttctcttagtggcattgaattatcacagagacagaaaattggtaaatttttaaaatttctaactctcccaggaaactccttgcctagtatttatttgatatgctttaaccatgggtgggggggtggacctcaagctgccagtattgatctacagactgtagcagtacactgggctgtactgtcagggatggcaagatgctctggggtgtattggacacctccagtttcttcatttctggattgagttttcttttcttaatgttggtactcttcacatcaccttgagatttagacttgtgaaggaacaagtctgatgaggataatagtcttgaaaggagacactgtacagaattggaagaaggaaagaaaagacttgttcattgtgatactttctgtaggtggccagtttgcttctcatagggaaatcctggaccacctgtcatgttggctcttaaggaactgctgttgtaagcagctcatcaagagttgaagttcatgtagccttgttgggaatatggaaaaggaagaaagccacagtactgccagttcagtctgggaagatctggatggttctgcacatgcaaaaaggacttgaagtttctgtatagacgcttgtaccgatccatcttcagctggctgaatgttgtatgatagcccttctccaaagcagaggtggaaggttctggtttcaccacacattttataaacacatctcctgttttgaattggcctatgtattgtaggtatcttt

SEQ ID NO: 18831 - DNA, 1158 bp, Mus musculus
cttgtatgctcgtacttgggattgggcctccagcgtcctgtagggcagacagcattcttactgctgagttgtagcccacgcctttttttttttttttttgacatggaatcatgtattctagggcagctagagtccatacatttattatgctaaagggtctaacccagagctttattcgtgctttgccagctgagcaacatctcacccccagcccaagcacaaagatctttaagagcgcaggactcatcctcaagacaatgtggcttgataattgtttttctttttcaaactcccatagctaaatatcctgtatgtgctgtctatttgctctttgtataaaagctttgtgaaagtaatgcttttgataatttttgcttccaatttttttattgttccatttaaaggatttttttctttccagctccaattttatgtaacacaagagttccagagcacagatggccatcacagtcaaagctgtttgtatgcattgagctcttgctccttttgccttatcagtaactcagttattatctagcaaagggctaaagctattcacatttgtagaaaaatattttcacgtataaggctgatctgtcagccaaggtgcatatttctcacacatatactgtcattaggaatctgtaagttcctatcttgctgtggatcttggtcactttcctgctgccggatgttattttactgactgttactctaagtagcaaaggttcatcgctattgagacactacagaactccttcatattatgcatagctgattgccattttattctagcatgaacctttttttttttttttttttgctgtatactaaacagaaaacactggaggcatgtatgttggactgtattacagagttaaagctaactttaaactatgtaaccttttatgactcaatgtgccttattgtgtattgctgtgatatagcaaaatatgcttagaaattaaaacatacatttgaagcttggttatgatattatttttcttataatatcatatgtatttttttaaaatttgcctttcagggactaaaaaaattgaaaaaaaataaagttgaaaattttattagaccatctgaatttgtatttcaggaggtatttgcattcagtgccttaatagtcctagagcattttaatgt

SEQ ID NO: 18832 - DNA, 1213 bp, Mus musculus
aatatatttatttatagtcctttggtaatcataaacatagaatggccataccattgtattcactaattttgaataatatttaatacagattcataaatgtaatgatatagaaaaagatttgatcattgtagatctggacagaatttactacttgagagggaaacaagcttacttaagtactatgtaaaacggtccatggttatagttggtaaattaacagtaggagtaaaataacttgagcatatggcaatgaaaaatatgtttttgctatttcctctttgtctcttggctcctgtagttgaggcagacttctccgtctgttagctagtattgcctgtgattcagagtgtataatgcaagtgtttcttccttgcttatgtatataataatagtagccattgatcagaagtgacatcttgctgtttgctatttcactgtgttttcctgtacctttcatttgacaagcattgattgtgttccaggaattaaagctagtattgtgcttttcttatttattttctctggctagtggaaaatgaaaatcactgtgactttgtaaagctacgggaaatgcttatttgcacaaacatggaggatctacgggagcagacacatatgaggcactatgagctgtacaggcgctgcaaactgcaggagatgggctttgtagatatgggcccagagaacaagcccctcaggtaagggaggctcttggaggaaggcaggaacgggggaagttagaaaggattactcgttctttcttaagctccagagtgaggaggatgtattgttagaaatctaactatgaaagtgattcatttgacgtctccaatcaactgatatccctttgcttctgaagattatgcctgactgtaaaggagctaagaaaaaaacagttcttttatacagctacttgggaaactgttccaagaagcgtgtaagttcaaggtctgcctgaactgtgcaacctgttagggccaacttgggcaatatagtaacagcttgtctcaaaaagttaaagaaaggtggggtggggaggagtggcacccgtgtgcaatgttgagagtgccggcatgatgaggtcctgagcagaggagaaaggagcagttagattgcgcagttgtatgtgagtaactgaaggaagcacttcagtttttgtttgtttttgtttttgtttttgtttttgtttttgtggggcaggggtgcctagaag

SEQ ID NO: 18833 - DNA, 1150 bp, Mus musculus
ttcaatgctgctagctattgaatttccttatatatagttgaaaaatactattccttaaaattaaagacttttacaactgtgatccgtaattacattccattcacttgtgctaagagtaaatggctttataattattttaaaatttaacttacaaacatattaaatcttataacaagagtagaaacttctgtgggagactggtttgaccaaatccttctctctagtctttctggcctacaacatagagggcagagtaagcagccaagtcctcagagtcgaggggactgcgtggttatacagagctcacagcattctgttgttaactggcctccccaagtcatagagatttctaacaaatttgtcacatctcaaaatagcacttctttaaatgtgaattgaagatgctcatgaaatatataagttgtggctcagtaggtcagagcacttgttctgcaagcatgaggatctgtgactgaatccccagcatccatctaatagggtatgcatagctgagggtatgagtaacctaacatgaggaactgagacaggcagagcctcagagcccagtggccagccagcctacctgaaagtagtgacttctggatcggggaggctatctcaaggcagtaagaaaggcatcaaggaagtcacctgacattctacttctatcttcagaataagcacacgtggggctcccaaacattctcatgcctacactacacacaaacacacatacacacataagttgctacccacttatgtgcctttatctttgttttaggatttaagtagatcgggtacattgataagcactttttctgtacacttaagtgaaaagccaatgtaaaaagcaatcatgtgttccatgtcttagacgtgttagctatatctagtgccaaataagcttacagttctcatctaggacttttaaattccatgctaagataaggcaactatcattaacttgcttttcaaactaaatgtttaaaactatgataaaacattaaattttttctggagtcattcctgggcaggccaaacagctcagcagatgaaagtggttatcttacaagcttaaagacctgagtttggccctagaacccacagtggatggagaaaacttaactcttaaaaattgtcctccagcttc

SEQ ID NO: 18834 - DNA, 1239 bp, Mus musculus
caaatgtctagttagttgcagctttccagtggtgagctgtgtctgtctgttttggaaacccaggctctcctatatcgaggattattggcttgaaattcagtgtcttattcattatggaagtttgaccttctgcttgttattgaggcatccctcttccccagaaagttctcttttattttcttcagtgctggggattaaacccagggcctttgatatgccagatgaccactctgtgcccccaaatcgtaaggatcagtgatgacattttaaagatcctaaatgtgtgttgttggtttgatgcagaacctgtactgggcactgctgctttgtgtgtagttccaagggtcatctatgtgtgtgtacacacattgtcattgttgttgcagaaatcgtctgtgcatgtgtacacacatcattattgttgcaggatcatttgtgtgtgtgtaagctcgtatgtgtgtagatgtgtgtgcatgtgtgcgcacacaaacatcgttactgtttctaacagatgtacgaatggacactgagttgctgttctaacacgtttattactttctttgtacgcagactccccggagacagaaaagactgttctgccgctaccatgatgggaaccggaatcctaagttcatcctggccccagccaagcaggaggacgagtgggacaagccccggattatccgtttccatgacatcatctctgacgcggagattgagattgtcaaagacttagcaaaaccaagggtaactttttcttctcagtttaccagatatgtgtgtgttaatcttttaatttgcaaggcgacaggaaggataactggggcggctgtaactttagatggttttaactgttactgcctcaacacaacagtgttaacttagagtttacactagttgtctcagtttgttatccacacaagtaacatatcctatagctgggcttgacacagtgagtagtgaacactgtagatatgtgttcatacacagagtcagtggtttgctgtctcactggaagacctttcgcgtaggtcatagctctcagtaccactcagagctcaattttttcatgcctagtattttttttatctgaatgaatactccaagtattgtaattttcctttagacataataatagtagaaaagtataattaggaacagatatcttgctagttttaaaatagtattatatagtttactaattttagtttattattattgtgttaaatttttctttta

SEQ ID NO: 18835 - DNA, 1179 bp, Mus musculus
atgaacgtggacaagaatttcgaaggccgtgcaccctgtcagaattggaatgacaaccaggcttcccttggctcctgttgtcctctaacgcaccaggcacgatggctgattataactccgacgtttacagctgactaacactccatgattaattgggccatgagcctcagccccatgtctcacctgtggacaatcacttattttgtggatttctttaattaatactcaatcaccacatgatgtaaaacttatggttcagttttcacaggatacaaggcattgaaaatgaggaacctaattttgttgtttaaaagagctttttggttaatttttttaaaaaaagcatccagaagtagatttcaccacaagtcaggagctggtggagcaggcgaggctgtgtggcaggcgtgcaggtggcaggcgagcagagcctgtgggcttacagacggcaggcatgcagacgccagtgtgctgctcttccgatgtgtggactgctgagcactggtaactaactagggcccagtcaggtctgctattccacgtgcagagttcctattatttaaagaaactctttttatcaaatccccctcctcaccacgggtgaattcagccagtttgagaaaattactttgttcaaaaagtcctgcagaactggcctcccaaccgagtgctcagccttcgcccttttcctcagtgactgcaggttgtccagagactgttccaagtgccaatcagctgcagcaggcactggtgttggcattctgattcaattctgtgccttaggagactgggagttagaaaacggacaggtccttggactgagggagttgatttttaaaaagaaatgttttataagaagccaagatgtttgtttttctccattctgaaatgtgttataacaatgacctatttatgatcttaaatcttttttttttaaaaagtctctgtgtggtattttcatgtttaaatccaaatgtaagaattgagcactgctcccaggcccgttctaatttacttctttactgcacagagcttagatttactactcacggttagaccttcgtcacccagaacaggctcccttgggataagcttcggggaatttgttccaggatggtgaggctttggtgtgtgttgttacagtgaagaccctgcagttcctcagaactgcagttcaga

SEQ ID NO: 18836 - DNA, 1859 bp, Mus musculus
aaaaggaatgatccgagatgaccgtgaatcccggcagagagtgcgcctgtttgtaactcacgccgttttaattaaagcatggcaggtggaggctggggtagagggtttttacctttaattctaaaaacaaaacacaaaaaggatcttagggaataaagggatcttaaatgctgaggatccagcatcatggaatccaagtgcaaagggcttagcgagtcttgtcttaagcatctccatttcggatgagagtgaagactccgtcgcagctgggcggaggatgttgggtgtttgcttcttgcatctttgcagggtctgcggaacactaacacaccagcaccccactcagctccaggtttttgtttttgttttttaatttaaagtttcttatttttgacataggaataaataagtgtataagaaaatcaaatcttctgattcatgaatggcagagtctgggccagtgcggctagccttcattttaagctggacctggccttcattttaagctggacccggtctctgcaaaggtaccagaatctctcggccctgcaccccttttctgaccacctacctacctgcagatcctggttggttggtcacactgcttttaaccacataatcattggaattaagttatgattgtttgatgattgacacttggattatctcttaatgagatctcatgtctatctccccggggctctgaatcaatgtctagaagtcactggcaatactgcatgagggtttttgttgtatttttttcctttttttttttcttttggtttttttttttttttttttttactaattagtcttgagaggaggaaaaattccttcctttatatactgatcccattgataacccccacttcctgcacaccacggatcagaaggcccgtgctcatccatattaccaaaagaggaggatgtaaggtttacagatcggctaaaaatcaggctccgagtctatttcagaccaagagactctgggttaatctaacacacacgtcatcatgtgctctcacaactccaccaccccagctgctggaaatcaagggcggatctcaaaggctgcagctatctttttaccaggaatatcttcctatggcttcctttagcctgtcttctccaccccgtttatttttatcttaaacagagagacaggagaattactcttacactctgatagagtgttttctaccatcttcccagatggtccctgcgctcgaagtcaaagcactctgcctagtggcctgtttttaactgttctggggacaggatggcaaggaggacgggggcttgccacacgaccgattgattgggtgtttggttttggtttgcttccttcccatgattcaccccgcctcatgggacaaggagtttctttttcctcctcctttggggatcattgtatatgaaagaaaacctttgaatgacaaacccagactctaggtgccttgcagaggttgaaggccagccacgccactgcttccaccaccagccgccactggcctgccagagaaaggatgcatgtctcggtccccagcccgcctcctccttccttcctgtccttcaacctctcccctgtttcttttccttgtgcagattatttttaagccatctatcctgtttgtgtgcagggttcttaagaaggcatggcacagtgcaatgagcaaatcctctgagtgtgggaggcggggggtgggcgagcaagatgttggacacgtgtacaatcctgtatcatttatgaaatatgtataaaaagcaatgtaccttccggaacaataaatacttattcaatttttgaatcatggcatctcgttctttacaacaaagccagaaagatcctgcctttcctg

SEQ ID NO: 18837 - DNA, 1200 bp, Mus musculus
agtatttgaattgtggggaggtgccattacaggcaacaaatagatgactagaaattcccagtgatatgacaaatctaaagaactgatttcccccttgttgcttaagaaaaacaaaacaaagcttttatacaaacattcctggatacttagtatccaggaaacataaatgtttcatgtgtctatataaatattacctccatttcagacaggctaaatcctactctacatagatataatatctaaattatgtctgttggagcaatgtctattctaagcattctctgtcaggtcaattattttcaagcctctgttagtgctaaggtatgtaataagacttagggtttcagtgttgaagtacaagcatgtggtacgtattagcaatttggtggtggtgggttgcatacactacaatggttcctatatctgtatctggagggctgagggagctgacccagctcctagctgtttgggtcctgctttctgctggggcacagtgagctccattcatttacacagctaggggcctattaaatcttctagtttgcaggcctgtggtaaatgtgtgttccttgcaactgaattatggctgctatgagactgtcagcttggaatttatggcaatagaagttttaaatatcccaaacatttcagtatggagagaaggaggcctttctttaaagggaccggggccagacatctattctgaggttggaatgaatcaacagtcatgttctgaagaaagctgtatctagagaagatggacggaggccactctgagtgcatctggtggtttctgtgtgctagggaatataaagcagctgtctggtctgttaggaagctcaggttcttagttcttttggaccgagaccccttaggtttgtttccagctctccccggtgagattgtttttctttcacaatttaagacgatctgaaagaggactaggggtgtgtaactcatcagtcacgaacttgccgaacatgcatgaggtcctggttccatctccagactgaagaaacaacagaatgacacatgggcacgatgtcatccttaaaataagaggtgccagagaagaatacgggatgtgaacattccaaatgaactcctgacagctgacagcaacattatcgtaacatcaattatacatacatttcttccagatttacttcatttttgtacatataagtgtctgcctgcatg

SEQ ID NO: 18838 - DNA, 1200 bp, Mus musculus
tgcaaatctgttctacatttttttttacagatttgtcatttcaagagtgttataaatatagaatcacacaatgcgtaaccttgtgagattaccttctttctcttagcatggtaaccttgtgactcatctaagttgccatctagaccagtaaatgactccattggacaagcattgtgataaaatgcatgcagtctctttaacatttgcaagtgtacagttcagtgacaagaaattcaccctcaccactctctgtttacaaaatgttcccatagcctcagtaacaacttcactcatcaaagactccctctccctccacatctttgtaacctttactctactttccatctcaaggaatttgcctagtctacacattttatgtaagaagaatcttataatatttatctttctggggctggtgagatggctcagtgggtaagagcacccgactgctcttccgaaggtccagagttcaaatcccagcaaccacatggtggctcacaaccatctgtaacaagatctgactccctcttctggtgtgtctgaagacagctacagtgtacttacatataataataaataaaaaatcttaaaaaaaaaaatatttatctttctggttctggcctattctacagagcataatgtgcccaaggcccatggatactgtgtcatttatcatttttttatccccatttataactaagtagttttatttattttttttactgtgcagtatttttactaataacatgggtggaatattaatgacttgcttggcaaatccataaatgacagggagttgtcagttttgcattttccaaatagagattgacactagttattggatagactgtattcatcaagctgtggaaatcactgatgtcaaattccatgtgtgatcctcacacggtactgtaactgtaaaggaatgtgacgtggttcagttgcaatgtgacaaacatctgacaatgacatgtgagtgtcctcctcacatctcctatgacagtgagaccacagaccaacttggcctctattaagagaagtataacatactgaacatggactgtgatccagctgccgcactgtatccatggctgggtaccagtatattttaaggattaaatatttagaatttgtgtatttagaagaaaaaaagaggataattttataggaaggtagtagccactcactattagattcaga

SEQ ID NO: 18839 - DNA, 1161 bp, Mus musculus
cacctccccatctttctgggagtaacctctgggctcagccggcttccctctccaccctgccctgaccccatcagtgttctgctaggctctgagtctgcagtcggatggaaggtcctaaaacaggactgaggcttcaaagtagagaccttagttaactcccttagcaagtgccctgtgggtcagtgcaggagccctcccaaccccggccagcccgggagggaggcagctctgctctgctctgacatctgtctctcgctgtggatttatagtagcaagaacactccctgccattttcctcctgctgtttttaagctgcaagtttggaaatgagctggcaggcgaaaggaagtgtgatgaatgataatgcagatgaccctggcaccctgagctggcaggaagcctggccagaggagggtctgtgttagccaccaggggctccaggaaggcactgtgcccccagcagaatccagattccaagtggctgctttaagcagctctccagaacttcccagctctgtggtttcctcccaggctccctgcgatgcctcctctgggactctgcttcactagagcaatggctgagcccctgtccctgtgtctcatcccctctctatggacctgtggagcccagacccagctcagagcctagctgccctctgtctaagacactcgtaaaatatcactttaattatagcactttgcaggaaatacccgcaagagctctgtgtcctttctttcttttaggccgttcctctgggcccttgttttttgtcatcagccagagactgatgctctctcgtcacaagcaacttgaggcaggtacaaaagacacatgtttgcacattagggtagcattgtgccatctcctttgaagtgttgcttccgaggaactgtcacacacagtccctgacacagacctatgagcatccggtatgttggatgtgcattgagaaccatagcaacagtgttgtctgatggactcggctccaccgctcagtggtgctgagcccggtccccatctgttcgttcatctgtgaaatgatagattgagctggatgggcccgaagttccctcctatgagcccctgcttcagctctccagaacctccagggtctgcctcagcgtgggactccaccctgactcagaacacagccaggggtg

SEQ ID NO: 18840 - DNA, 2832 bp, Mus musculus
agcaggcaggaggggtctgtgggccctgaccactccctctctggtgggacctgaggccctcactccagtgctccaaacctgggagccaggaaaccacgggcatccggccccgcccaggcatctcccctgtggtcttgaagaagggaacaaaaagtcacaagttcagggtcaaaagaagctactgagcacaggagaggtggggaaaagtgaaagttgctattaacaggcaccccaccccctccaccccttcccttgtatgtgggtaatgggcttggtgcccagtgcccagagcagggagcctggctcaagcctaaaggagtgtgggcagagccagaagttctttgcactggtaccctgtcctccccctcctctgcctgtgtctcctgtcacagagccattcacagactgtttcaagaccactcgatagctagtgtcagctctggggcagtggttgtactgcagagggatcgaccagggccagctgctgggctgtggggctaagctggaggtgcctgccacaaccgctcacctaactctttccctctcctccccagactatgaaatccctggagaatttttggtgacacacactgagccagccacagtgatggactgtatatttaaggaaagacatacacagaaaaaatttaaatggaactggaagccaaacaccgcacagccatcctctctcagacagtgaatgcagaaagctcttaggacagacagacagacagcctacctcgggctgcttcctcctctcccagggcaggcaagaagctccgcatcactggctcctaggataccgaaaccatggcaacgaaagtagaatgtaaaacttgcagcaaatgtctgtggggaaggactgggggaggggacaccccactgtgtctcctccctcctccctgagctgccaccagtcactcaaggagaaatcaggctgaggcatgggccaaggaacagagaggagagaattccagagaacgtaacttagaaatgcgtatgtatgtatatatatatctatttatatgtaaatagacatatataaagatatatatatatatataaagtcttttaaaactattcagggattcaattaagatgttcagctgacttgctccataatttagaaaacggggcctgtttgggaaggcagcctggttttcacaagctagacagtagccgtagccgacagcatacggaaagtcaaatcagatattagtgtcgcccttagccccagcctgactgatggcagcagtaatcatggtggtataaatccatagaaaacttgcaaaggtctccaggcttatggttaaggtaggggaagagcctggggcagggaatggtgcccctggagatagctgctcagtattgggctacagcagagatcccagacaaagccctctgggatggggccagctcctcaagctgcctcctctctggccagcctcaggtgggctcgccgccctcatgcccgggagccctgcagccactcccctgcccatacctcttccccacccaagtccccaggtgggtttgccttacaggtgccacagggcacagctccaccattgccaacaggttttctaagttgcgcaccaaggactccagaaggctgctcctcccagagctgagccaggccctgagtgcagcccagcttgtggagagccagtgctgtgagcgcctgtcttcactccacagtgggcccaccgggctccactcattggatgaagaatccactacgaccagaatggcttccccttcagatgaggctctttatcaaaacagccattgctgccaggggaaggaggaggttcaactcctcctgcgtttattacgggcctttgggaattgccgtttcccccagttttcctctggccacgggtgtgccgatcacctacagacttccaaagccttacttccccaagctgccagcccagaggtggtaactgacaccaccaccaccactccccacccccacccccccacccccaccaagggtgtctctctcatacaaccccctaacgaatgggatgcttgctgggaaaggaagcttggttaggaattgtcaaattggtcttttttttctttttttttttttttaaacaaggtcccaccctgcaatgaagtggccaccctggcctagagagataataataactgggtgtgggccagagtaccccacccgtagtggcctggtgctctgcccctgccaccccacctgtccagtcttggtagctgtccctggaggggctgagccatgtgcaataagaacacagatcctaaaggatcccctgagaagctgtatttcttgaattagaattctgatactgtacatgtataaatatatgtttattatgtgattggcagtggtgggtctgcattgaacagggggtggggcaggaagctcccaccagctgctattgacaccgcccagcctgtgcctccggagctcctaagtgacaggcctggccctcctaacaaagggtatggaggagctcagatggctgtggggccgcaggatgcggtgcccctgacaccagccctagatggggacctgcccaccaccctgtcaccgggctgggctgcagcccattcctgatctgggacttggggaaaattcccaaatggctcttgtcatctgtgtccacagtctgccagccacagcctcctctcccagggagacggagaaagctaacactgaggcagcctggggctcagggtgagccagcggcagatctgcccggcctcccggagacagggccggcagccgtgagtggcaggcccaggcccctcccgctggcgcgccagccaaaggcaggcgggctgcctggt

SEQ ID NO: 18841 - DNA, 1132 bp, Mus musculus
ccgggagcgttctggggctccgtgggggcggggccaggccgctgtcaccaggcaggagagaacgttgcgaacgtgcgcccggtgcctattggctgaggtgggccacactcccgggtctcgattgggctgcgacctggagggggcgtggcctcgccgggagagcccttataggctgctgctcgctggtgctagggatcgcagcaggcaggggggaggtgcgagagggttcgaagggacaggtccgggcagcgatcgggggttggcaccagttcgctcacccttcgagaggcagagcgctcttgtccgcaatcttcgctgaccgcgctagctggtgagtgtccctcccgggtgtgcacatcttgtcggggagtgacctcggctcttggggcctcagagccctcaatcctgtgcaacgccgacactgacgccaaatccttgtccctcttgtctttcagcggcttctgtgcgccttcattcggaccttagcagccagcgtcctggcgtctgaccccgccatgcctagcctctgggatcgtttctcgtcctcctcttcctcttcgtcctcgtctcgaactccggccgctgatcggccgccgcgctccgcctgggggtctgcagccagagaagagggccttgaccgctgcgcgagcctggagagctcggactgcgagtccctggacagcagcaacagtggcttcgggccggaggaaggtgagcactcagccggggccgaattgggttcggggatggggggtgggaggggtcccgggaggtgggtacgaagcgagctgaatcggctcaaagccaccttggcttcccaccccagcacgaaaaaacagattactctagggttagaagacaagactgcggggcggaaactgaggcacggagtggaaagggacactgtttgcttaggcaaactgcacctcccccgcccgtacagctcctgtggaaggcgctctaatacaataccctttccctgtgttctctctatccagactcctcatacctggatggggtgtccctgcccgactttgagctgctcagtgaccccgaggatgagcacctgtgtgccaacctgatgcagctgctgcaggagagcctgtcccaggcgcgattgggctcgcggcgc

SEQ ID NO: 18842 - DNA, 1305 bp, Mus musculus
ccattccctccccggccccttacatcccaccagcagtttcccctcctttgacttcccacaatccctcttctccatctccccattgcccacccccatccacccctctatttcttttttgaaaattatagagctctcatcagtcaaccatggaatatcaagtttcagtaagactaggcacctcccctcatatcaaggctggataaagtgacgcacacagtaggaggaaagggtttctaaagcaggcaaaaaagtcagagacacccccctgttcccactcttaggagtcccacagaagaccaagctacaccactgtaacatgtgcagagggcctaggtgagtctggtgcaggctccttggttgttggttcagtctctgtgagcccaggttagttgattgtgtgagttttcttgcggtgtccttgacccctctggcttctacaatcctccttccccaggactctctgagttccacctaatgttaggccgtgagtctctgcatctgtttccatcagttgctgggtgaagcttctctgatgacagttgggctgggcaccaatctgagtatagcagagtatcattaggagccattttctatccaagtctttgaactatccagcctgtcctggtcctctaggcttccactctctacatgggtctcaagctggaccagtaactggttggccacacccatttttggggcaggtgagagaaggtttcaagatagggtttctctgtctgtagccctggctgtcctggaactcactttgaactccagactggctttgaaatcacagaggtttgcctacctctgcctcccaagtgctgtgattaaaggcgtatgccaccatcccggctccttcttttttctgttatgagaacttcacctgtgttgaccaggctaggctattctggaactcctcagctcacacaatcctgcttcagcttcctgtgtcgatgagatgacagcgtgtgacatcatccctagctcagataactttgtgttttgagtgttaactagtgttctaggttagtttcacatggtctttctttttctgtttttcgttattgtaatgactttgtcctgattcgtttcttacttaattcctagaagtgaaaaggaggtaatgtatttgagtctttttcatgtatttatccacattatcttcaagaagataattaagttctccaaagtagaattgtttggcttctttctaccctttgtcaacactataggagttcttctgtgtattgcttttgtcatagggaagggggagtgaggcagaggtttgatttccaggctctttgt

SEQ ID NO: 18843 - DNA, 1102 bp, Mus musculus
aaaggtcggaaaggtatcagatctcctgggattggcgtgacagagagttgtaagccaccatgtaggtgttgggaaacagcttggtcctctgcaagaacaagtgttcttaactgccgagccacctctccagccctgatttgtacatttgtagtgcttaacattggactgtcacctgcaaggttaaaaattgacgtaaagcacacattctcagtttagagttgtactaattgataggcaaatattgttcttaaacagtatagccggttgtttgatccagagtagcatattgctacaactccattggcttaaaacaacacacttaaaagaacatctggtttaccatctgtgggtcaggagtgggagggaagtcagcccaggctgggatcttctcaggatcacaggcttgtctgtagataagcgagctgggtgacatgggaattttattgtttgcttacttgtttataaaaagtacaaacgcatatacccacgcagtgacacacctgtgaaggtcagaggcagcctgcagggctcagttctttcctgcctctgtgtacttccagggatcaactccaggctcacacttggctgcccagtgtctttatctgctgagctgtctctccagtctatgtcagaagatttgtgtggtttcattggactgaaatcacagtattggcagagctgggatcctttttagttctcaggaaaagtatctcttttcttgcctttaaagcctagcttttagaggtctctcacattactcacctagtggcttcttttctttacttctaattctaatgtggcattttttgcaccttcagttgtccctgctgctgtgattgcagcaggaacaagctgttggcctttaagaactctgacttgagtgaatgcatctatataattaaaccagtccctattaccaagcccaagacatggaagagagtagggcctagtcctccgggagggcctaccacagtagtgcagactgtactgcagcactccttagtgaagagacactgacagaccttccctcctgttctcccccaccccgccatttctagttacttatgaatagcgtgggctcactgtgctgcctcagcctctt

SEQ ID NO: 18844 - DNA, 1180 bp, Mus musculus
tccctcaagagcttgatctttaaatgtaatagtaactgggtttctagggagacagaacacagatctgttaccttcagacattatagaagtcacagaaaatatgaaactcaaagaagagcttgcatccccagagtagctggcacacagttcctttgagccaggagagggagaggagggaaggagaggccagaactgtgtgcagtcaggtgtgaatgaagtcctgcaggcaaccagtcaccatgctgcctgccctcggaacatgtggaagtctgcctggacacagtgaggactcttagagtcttctccctggtgatacagtgttatcctgtccttacatggatccatagcacttggacctgactgggggcagtgagactcaggaggcggggacagggcagatctctgtgagttcaaggccagccagggctacacagcgagagggctaccctgtcaaaaaataaaaaccaaagtaaaataaaagacaagaaggccaacccagaaacagaaagctgggatggactgtgctctcagatggagcctcagcacctaggaatctcagcattttactatagagacttgaacatggcagtgggctgttgtatgcaggtagacaaggaagactggtttatggtctacagctggactaaggggacaggttcagctactctcggtaggaaagtgtctgcagggaagcagtctttaggctgtcagtatccgggaatgggagggttgggaagagagccatcgtggacgctgtttgcacactgcttgcatttggtcccccaggaaggcttccctctgagctgaggctatgcatggagttcttggcatggccttgcctctgccaacacagtcactcagggcttcctcagctccctgtagtcaaggtcgactaagcgtagacagtcacaaggtgggagtctctccagggatctcaggacccacttcaggggagaagggccatggaggaaaagaagcttccacttctcagggtgtcaggatgcagcggacaatggcctgccgtgcctaccgtgcctgctgtgcctgcggtgcctgctcaggacttgttagcttctgcagttggtgctagtgctgccgtcactgttaatgctgtgtacggttcagcttcatcttttagcatgaaatctcctgtcatgagtgagttcaaaacaatttaaat

SEQ ID NO: 18845 - DNA, 1915 bp, Mus musculus
taaccctcaggtgtcttcatcccgagctgtgatgaagatggctactaccggaagatgcagtgtgaccagagcagaggtgactgctggtgtgtggaccagctgggcctggagctgaccggcacacgcatgcatgggacccctgactgtggtaaggagcatgcggctagttctcagggtggcgtacgtggggcaggactccaggctcagaaagtagacacagtgtgtgggttccttaccggcctttcgtgtgctttcccaacagatgacatcgtgggtttctccggggactttggaagcggcgttggctgggaggatgaggaagaaaaggagacagaagaggcaggggaggaggccgaggaggaggagggtgaggcgggtgaggcagatgatggaggctacatctggtagatagccctcgacggcctcggcaggccagggtgccgacggccagaaagacaggccagaagagacctggacaacagcaggcaacttagcaaatggatccggaagtcagtgcggaggaccctggctccagtgggggaggactggggagtgtggcttgtgtgtatgtgtgatatgagatgtgtgtgtatgatgtgagatgtgagtgtgtgatgtgagatgtgtgtatgtgagatgtgtgtgtgtgtgtgtgtgtgtgtgatgtgagtcacccaaaggtccctatgttattgattttcaaatgcacactttcacacacaaggatacactaacagaccaaaatcaatgagatgtccctgatcctgcccctcagcccaacacctggaatccctgccctgcctaatcagccctaccccatcctgcctttcttccttcctcttctgaggccagggagagggagggagggcaggcagctgaaagctgagcgtcctccccaaattgggctgatttgatatgaaagccccaccacggtcttgtggtgatgaggcaggacctgtacacacagcaaggcttactatccgtctcctgacatccgaagagctcgtcgcaggtgtgtctaatggcccttgggctgcacgtggttaagcatagctgtctctgtggcccaacacaaagaggtaaacttacttaaaacacaggggttttgttgctgtttgttttttgttagtttgtttgttgataattggattgaggagttaatcctctgtcacaatgtcaaaagcatggacatccctgatagattatctctcaacctagtcccgagtaaccagagatagctcagcagaagaggcagaaatcatgagacagaggacaatgggtcccttgatttcaggcctcagattaacccagtcagcacctgtggcctcatggggctctgggctgctttcttggcgaatggggactgtcatcatatagctgagatttggagtagcctgctatgagggcttgcagttgcactctctgttccctggcgagggtcccccttgtcccaaggagcagaggaccagcaagcagcccgtgtctgctcaccttctccctgaccctctaggaaatggttccctcttgccccgaccaatagaagggcgtgtccccgagacccttgtgaggaaccacggggagctgtgacttcctgtgcccagaaggtcctggaggagaggccccaaagccttagtcctctcagccatgactttcctctgtctcaagggtccccaagatggccctagaagaaccatgccccagactctatttaaagccctatagcatatatgaatagagaacggtgtatctatcagaggggaccacactgagcagctaggccctgatgccatgcctcagcacgccctcagacctccaggccgggtggaaggggcttttacccagatgtcctgtggggttttgtgtgtctattgctccccacttccccctctcaaaggaaatttccttgatatatttg

SEQ ID NO: 18846 - DNA, 2170 bp, Mus musculus
cccagtctggctctcccccagcctctcaggggcactggctggtcacatccactgagtattgatcggttggactttagggaagagcctcctccttcccattcctttctgccaccctggaatggccaccttaatcgtcatctcctcggggggaatacggaaatgtcaccaagctccataaagtgcttctcattccacgacacagttctgactctccgggtgactgtcacctgctcccatcctcttcttcctccctcccttcctcagacctctgcaaccatcctctggtccctggctcagtcacatcagccctctgcattctagaagcagccatcccgcccccctctctcctccccctcctccccttcctcctccctccagctggagttacttgaaacttcctgctctcgctaggatggagtctgattctttctctgccccagctggatttccagaacatccccgggtagctgtgaaggattttaggctctctggggtggggagggggtggtgtagaggaagacgcatccccttctttcaccctgccccgccctgccccgctggggagctatgctctgtgtgtccctggatcttctggttttgtatctgatgtagtaaacatgttttagtaagaaagcagaaggcgtggaactgtggcaggccccaggggtccagaagtttgtccctctctaaaacgctccccaccccatactgcttttcaccccactgagaccgagtcccacaaaggtaggcagaacagctgttcctggtggggctgaaggttcccaagtagcttctagttaagcaagcttcgtgtttcctcaggagcaaggtcacacaggtcagattattgtcggtcctgcgggcctcatccttgaataagctgcctgcccagttcctccatccgtgttcctgcctgctcccgttcccttgttgcgggcaggagaggtagggctgtgttggaaagagttcaaccaaattacggcagcaccacatcttgccgagccctggagctgccctactaagagcctccttagccctgggtgctgggaaggatggtgtacgttggggaagtttgaggttggagagagtaaatgtgccttgagagaccactcagaggtcccaggaggaacgggggcggggcttagcctgggagttctggcaggaggcaaagttggtgagagtcctgggacatcttacccccagtgttccacaggagtcgtgaccacgtgtgatgggtgggcacaggtctgccttgctccagccccctcccttggtttctgttggtacccatttggcttttatctgctttctgcttcaccactaagtgcgtaggtggggtcttttgatatcggctccccaaagcccaagcccacagccctaggagagaaccaggggcccatctttgacacctgggccatcacgagccctcccgcctgcagttgtcctagggaaagacctgggggtgcaaaaggagattcaagacatccgtaccaagtcaggcagagctacccgcttctcagcccgtgtcccacttaaaaccgtccgatgtgtaatcactgagcttagagttaaacattgtggtcaagtgcttgggttccgtctgtagatttaagtgctgacgttgtatctctcagtaattttagatgtcttttaaaaaatctgaacaagtgttagacccgtgtgtgcgttggtgggcactcaagcatcccgtgggtgaccccattctttccccttcctctgcgccacgccccctcctgccccgcccatccccacctgcctccacccgggaccctcaccttgctgtggtctttatctgcctattactcagcctaaggaaacaagttcactctacacacgcataaaggaaagcaaatgttatttttaagaaaatggaaaataaaaactttataaacaccacctgctgagaaacctttgcttattctgccttagtgttgtcttaagagtagatcttggcagatgagaccctgtggtccagactatctcagttagctctgtgctcttaccattgcaagagagaccttggagaaggccagcctgattcatccacagaggaccaggcacagtgtgaaacgcttagcattattgcaaagatgcctcccgtctaaattagcctctctgtcagtaagcatgcccctacgtctcagctaca

SEQ ID NO: 18847 - DNA, 1164 bp, Mus musculus
tctgagggagaaagtccttatggtatcagcctgagtttgatccttggaactcaccgttggtggagaagaccaacttctaaaagttttcctctgacttaacacacacacacacacacacacacacacacacacacacacacaccacatacgcatgcatgcacgcatgcaaataaaataaaaataaaaatgctacaggaaaatggagactcatccccacaagggaaaggagagcctttcatcttgccccagagaagggtgtgcttaaacacaggagcccagcagtaccaggggaaagagaaccatacaaattagcatgaaaatctgttagtaaaaagtctggaagcccttccttaccagggttgcatgcaaagaaagtgctggggaaaagcagacagtatatacgtgtgagaaaggccaggttgaggtggacattgccatcccaatggacaaaagaggaaggagtccccagaccaggacctcagaacacttcaggctcggccaaggtgtcctaagctagatgaccaggcttccaggagagtgacctggtgctcagctcagtctcttctgtaatggatgacctcatccccatagtgcctgggtggctgcactctccttgagcgagtactgttttaggaacccagaaaaggccggccaagtcagtccctagggtcttggccagcgttttgcccccctttgcatgtgtctgaaacttaggaagaaggtctggggtgagatccttcaagcttaggggcagtctggggtcgggaagcacacttccccatagtggcttgtgtcggggctgctgcccttcccagactgtgtccctcccccatgtctgaccttgctggcagtgacaaggtgaagttcatcaacgtactcaacaaatttcccctccctacttcctactttatgtccgtccctgtgtccttatttacgtatgtgttcagtctgtgtggcaacagcccatgtcacctctatgagtggaaatggatagcacagaggacgtgaagataaacgtgccgggaaggaatgtccagctaaagccaggggaccttgccctgcgcagtctggccttgactctccagctctgcgtctttgggtagattaattctctgaaccaatgtttcttgtcaagacagtgaaggaagtggtgatgggagggtc

SEQ ID NO: 18848 - DNA, 1451 bp, Mus musculus
agtggccactccaggaagcaggttgagcggggtagaattgaggtggtcgcaagtgtgagccacggtaagagatcaggatttgtgagctgcacagatgtgtgtgtgtgtgaagtcagtccggtgccttagcttgcagctgtgagcacactggccaaacatcggtctctgactcttcccctctccttggtggctcatttttctttaaggaagagctgatgatgggcagcagtgacactggggggctgggaagcctgcaggttagacacctggtgtgcaacttcctaatcttctaggcacactgagtgagggaggaactgactggatgacaacaggctgcccttgggaaaggctctcagctgtctcttttcctttccagagcaaccctggggaagtgtgctctgcgctcaacctctgccagtcccttcaggagtacttggccgagcaaaaccagaaacagcttgagtccaacaagatcccggaggtggacatggcccgtgtggttgcccccttcatgtccaacatccctctcctgctgtaccctcaggatcacccccgcagccagccccaacctaaggttagctgagggtgggtggagtcagggcaaacacagcagaagcgccacagtgctggacagaacacaggctctcccttcaggccatgccccactgcctgccctttcagtactttggcctgagtgaatggccatgggttaaaagcctggttcccaggagctgctgagcctgtctagtgctgtggccgcttgtgagatatggctttctccctggagcttgttgctgttctcttgtaggctaacgaggacgtctgccaggactgtatgaagctggtgtctgatgtccagactgctgtgaagaccaactccagctttatccagggcttcgtggaccacgtgaaggaggattgtgaccgcttggggccaggcgtgtctgacatagtaagcctctatctagccccatggtttggataatgttctgagctagggtagcagcaggtagtgctaccttcccagtggccccgaggaaggtgcctcagggtttccccggtgcgtttagtgagacctagatgtaattttggttagttgaatctgcagtggaggaaaatcacgttgggaaagctgttttttcccctctgtcaccatgtactaaaatgtgtaccatgcacgacacatgcacggctgtcagaggacaacctgtgggagttggctgtgggtcctcagggatacaactcactctgtctggctccatggcatcccccttctagaacgaagggctgtggtctgtgaatgaggctcacagctctcttttcccacagcagtggggttgcctgataagcagcttgaaggacattgagttctgtggtctcagaactcacttagtgcccgagagcctgtgaatggccttggaagatccctactggtgttttgcagctgtgtt

SEQ ID NO: 18849 - DNA, 1742 bp, Mus musculus
ggtcttggcctctagcgcataaagctttgtcgttccttctcagggacgtgagtcagccgggcccctcctgtccttgtctgcactgtcacaccccatggatagcatgtgggcctgaggctgcccctcttgagctcttgttcattgctgtaggatttttcagtcaagcagcagggactgggggctggagtcctgcctactgcaggagtactcttacatgacagcaaggggctgtgcctctggttccgtgccagtgttttcagagatctcacagctctgagggccacaggtcctgttttgatagcatcctaggttccttagcttctgtgacgtcagcagaaagcaggtcacacttggagtgacgctgacaagcaagtgacgcgtgaaggcttgtcctgtctgacctgacctgtctccctttctcctcataggctgtcgatcattgcaaacgccatgtgtggaactagtttcccagctgcagaagtcacctacttgtgggtctagggtaatgaacacatagatctatttgacttaataagtaggaaccccctttgcccttcccccatctcctctcccttactgtagcatttctgtcatgtaagaggtgctgacagccacttccgtgtcccctttctgctcgaaggatgaggataccttgggcatcagctccccggctgcccttttcacccacctgctggaggggggtggtgagccagagggcaggagcattttctgagccctttcttggtgtgtgggggatctatggccatctcctaccatgagggagctacccagcttcctgtggtaccaaggagttattttggatgattagaagcacagaatgatcaggcctttagagcgatggaatggccattgtcatagcacagagatttcagaagcacctgcaggtggcttgcttgggatgttgctgtccctgggtcagccttccattctgctttcctgtcttcccgtctgccttgttggggttctgtggggtagggtggggaggggaaacttgtgaatgtaacttgcctgtgccgtgtgacggtcacgtgggcctggtcttttgtgtgtgaggcccttgaccgtgtggcctctgcctggctgtttggggtcctgcacggctttcccaccacctgtagctcttgttgacctgcctgttcacctcatgagtgaagcgtctgcctggcagtgggccatgaactgaggggtctctgtgtagagtagaagcttcctgtgcctccggttgccaggagacagcctgtgcagttaaatggacctagattttgttttgcactaaagtttctgtgacttaataaagttctgttaaccaacagatctggccttgtgtctctttgatacctcagccagaagagagtgggttctgggtccccttccccttccccttcagctcctagcagccgctctggccaaggggctccctcccatccccccaggaccttcatacggcaccaagtcagggtattgctggttccatgtgagttgcttttctttttaaacagagcattccagagactttcactgagcatcagttaaacaaaacctggaggaaatcctgagggagtaacttaatttagaaaagggttacacacaaacactctacattcaacacccagggggagggacatcagtcacggctgtcacctgggcacctcaggacgatggggcggatgctttgttccctcatccactggtgtgtgtgcaggggcggagcgccaccctga

SEQ ID NO: 18850 - DNA, 1153 bp, Mus musculus
aggagacaggcacaaacccactcaccttggtgaaggcatccacgactttcgcctgcctttcaaagggttacctatgccagaagaggccttggcaatccacagtgcccctgaccctgtgctggtgtgccatttagagaatgaaccaactatgaatcctaaagtctatgtctctgtcactcagcctgggaggccagtaatctctgatgctgagggtgcatagggactattggggggcgttgactgcagccagggcagcaaggtcagaacagtgtggtatagtaggaatatttaataaatccaggcgtggacgaggaaggagaggctgaagccaccatggaagggagagaatatgcaggagagaggagccaccatggcagaagaccgtgcaggagggagaaggagagccgccatgtcaaaggaccaagagaacacggctcagagggcttcttcattgggtcaagagcagccaagatggaacacagacattagtaagcagtaactcggagtttattggtaggaaagtggattctaacagcatggaggctattgtgctgcttatggctgtgtgtgtgtgtgtgtccgtctgtctgtctttgatctgggaacataaaccactgaagcgggtagcaaccccgggcctggatttattaaaatattcctgctccagtgtggtagggaagagccctctcctaaccggcacaggctcagtagagaagcctgtggtatcccagaatcctattccgttcactttacatggaccactgtggctatggaaatctctgccaggctggggctgccttccaagcctgtcacttccctatgggaaggatgggttgtgaggaggcttgcaagtaccgagctctgggcatcccctgtgcagtagaaggtggcagctgactggaggcttaggtctaggctagcattatgacacgggtccatgatcttttcctgtccttgcaaaaggctagcattgtgctgctagatcccaggatgactgatctgggtgtgcaaacattttcactctcttctggccatcagaggttggatgacttccctgactaatcctctggggcctgggcatctgtatggagttaacggcaagcaaggaggccctcctgagcctgggtgttggctgcatggaagatctaagtat

SEQ ID NO: 18851 - DNA, 1131 bp, Mus musculus
caattgatatctcctaacaatttctgaaaatcattcaaggtatgcattttatcccatctctcaatttagtacctaaatagtgttttacttctgtcttttgaaccttttctggggctatcaccaaattccacttctccaactatttagttagagtcccaaatacttcttccacttccacattagaggatccacaaatcaaaatatcatccatactacgctttccctttttgtctccctcatctttaaaggggggaggagatggcaacagaggggctgacagttcgggcggcctacagcgcctcaacctccagcggaacatccaactacagatgtcactgttgctattggtcccatcgctgtcactagtagacccttcagagctagattccttcttctctttttttatctttggtttgttgtctaagctgtttagattttcggcggctagcctgagaagcaatctcagcattgttctttccgctagcgtccctcaagcatgccctgaccaagatccaaatggctaacatttttactgtcattttagtcgcagttgaacccatatcgtttaaattcccttcgtctctattcctgagaaccttagtgctctgtccccttttttctgggaaacctatcaggcctatgctttctttacttgctgaaattcctttcgtctctattcctgagatccttaatgcttcgtcccttttttcccgggaaccttaccgtcatctctatacctgagaaccttaatgcttcgccccttttttcctgggaacctcacaggcctgtgctttctttaaatacggttgcttaccaaaatttccttacctccgtttactaaaatttcctactgctgtttatcactgcttaccaaaaattttttacttacctttgccgacctacgcgatgagttccccgttccccgtatgggctaccatttgtcgtcgtcctactctggccagcgacaggaacgacagggacacaggtcgggttcatgcagcaactttacttcaggctttttcttttacagctctcttccccagcagcttcttcttagggcaagggctaagctactcttattctacttctggcttctacctagggcaagggctaaacaaactctcttcacta

SEQ ID NO: 18852 - DNA, 1787 bp, Mus musculus
tggcccctgcatccagagtgatgcacacaccgccccttggacccatcctgaagaagacggctagcctcgggttctgcgcagtttccctctactttgtcacggccttcatcatccccgccatctccaccaatatccagtccatgcacaaaggcaccggctctccatggacctccaagttcttcgtgcccctcaccgtcttcctcctcttcaactttgctgacctctgcggccgacaggtcacagcctggatccaggtgccaggtcctaggagcaagctgctccccggactggtggtctctcggttctgccttgtgcctctcttcttgctctgtaactaccagccgcgctcacacttgaccaaggtgcttttccagtcggacatctacccagtgcttttcacctgcctcctggggctcagcaacggctacctcagcacgctggtgctcatctatgggcccaagattgtgccccgggagctggctgaggccaccagtgttgtgatgttgttctatatgtctgtgggcttgatgctgggctcagcctgcgcggccctgcttgaacactttatctaggagggggcggcaaggatgtgggtactgtgtgagtgtgtgaggcttgggtccttaggagatggacagggtaagccaaggtctcgaggtgttaagcaaggggttgacattttgtttgatgcagagcagagcccactcagactgcctttctctcagactgcttgtgagccacatccttgcacatcttgggcaaggagacattccaaacacagcccagcctggctcatacctgtaatctcagcattcaagagaatgaagctggaggcccactgtgagttcaaggccagcctggttacatagtgaaaccttttctcaaaaaataagctaaaaacaaaaaccctgagacattccaaacacttccagagaacactccagagccgactgaagggcagggtgaggttgtagccaggatctagcccagttggtaggatgcttgtttagcctccatagagccccagctcctatccccagccccgaataagctgggcatgttagtgaaagcctgtaatcctagctcttgaaaggtggaagcagcagggtcagaagttcaggtcatcctcagctatttagggagtttgaggctaacctgggctacaggagacactgtctcaaaaaaaaaaagacgcaattgtaaagagtggggtatgttacagtcatagctcataagtagcccatctctaatttgtattgtcacaaggccagaagccagcctcactctttccagctgacattgaggtgggagagaatctcagggctccctgttctaagagaggctcctggatttgaggtcccctctgcaatggccagtactcagacttagggccctgtcgttgtcctactctggccagcgacaggaacgacacagacaccaagttgggttcacgcagcaactttacttcaggctttttcttttacagctctcttccccagcagcttcttcttagggcaagggctaagctactcttattctacttctggcttctacctagggcaagggctaaacaaactctcttcactactactggcttcttttacaacagctaacttctaccacttacaacagcagcttttactactccatccttctcgcagcaagggctaaacttttctctctactcgcaccgactcacttccttctagctccacccccacctcatccaatcagaattcacatatgctccaggaatgagcttaggtcgttcacagataggctgacag

SEQ ID NO: 18853 - DNA, 1175 bp, Mus musculus
ctcccattaccaagacagagagacaaccaagtgagcttgcaggcctgatttaaagcacattagggaattctggggtaggtgatctctatgttaatctgttgggtcccagtctatggacattccattaccaggatgtgggggctggaaacttgctagggaagtctggaaactgtggctgaggaagtagctgaggaagtctggggatggctgctgacccattgtccttgcctcaggccaggtggtgggcagcttttgagacctgagctgcttgcctggacttgcccagttcttggagtcagagagttaggcctagtctccttaactgcccatttgaagcctgttatgaagtcagcctagccttctcagtcttgtcactgaggcaggtgacacactgtggccatgatagagtagaggcttgtgcaacttttgggggttacagggtaagatggcaggtgtcccccagaagtcccatgtgggaaggtcctaccgccactatcaggtgtgcatctctgaaatgtacccgccatgcgtgggtaagtataaacctcagaggacaatcctggatgtcagcctccttgccctccatcttgtttgagccgctgtctctttgttgtttgtctctgactatgccaggctagctggcccatgagaattctgactctgtctcccatctccctacctgagccttaggattacagatgtgtgcttcagacccagttttacctaggttctccgttgtaccttgggttttgtttttgtttgttttgtgtttttttttccctagagttatctgaggataactcaattgagaaaacgcctccctcagatcacctcataagcaagcttgtgggacatttttcttagtgattgatgtggcaaggcccagcccactggagtcagtgtgacccctgggtaggtggtcctgggtggtataagaaagcagcctgagcaagccatggggaggagcaagccaccccaatgccctcagtggcagagtatgacctgggcattgaaagatgaataagccctttcctcctctgcgtgatggtgatggggtgtgtctcagagcaacagtaaccctaactgagacatgaggatttacccactgggccagctccctcatcccagccttgggcttttaatttgtaaaaatggggcctatcccaggcctgcct

SEQ ID NO: 18854 - DNA, 2450 bp, Mus musculus
tccagatacttggatagttcctttttaagaaaacaaaacaaacaaaaaaaagtaagaaaaggaaaaaaaaaaccttttatccttgaatgtggctaagagtggctatgcttgtgatttgggccataggcgagtgcacttgtggacacatgtgtgtgtgggtgtggtcaataagagactgcacagggaaaggctttgctatgtcaaggcctcagtttccccagctgtgcagggagctgagacagggttttagccatggccctgagttctaaagtcacaagcagaagctggggcctggtggccttcgtcctctccggagccccctgcaggtgcccttctgtggcctcctctggctttggagggtccagctgtggttctgggagactgttcaggtctgtttggtgattcctggtctcgtgatggccaaaactcttactgagagggagggggtgttccagggagggctctctccctgggtgaggctgggtggctctgtgtctaagctggcactagccggtctgcacccctgtgcctctagccatcattttacccgctgatctccctactggggtcaggagatatgaaggtaactaagtagacagctgtatacccactcttgaccacagcgcattctgggatgttccatggggccagtggaagggatgaattcttgtccctttcagcccacgggcagtgacagggactaggatcactggtattgatcctattgagatgctgacttccctgaactgcccttgaccagcctgaaagctttgaaagttggggcctctgtgaggaggcaggtttcatggccacagacccagcaagcatctctgccctggttttcctgaagtggggctctgagacagaccaaggtgcccctggcatctaggtgaacagtgcctcatagagtagtcctcagctcctcctgccaaagatgctcatccctgtgggcatactctcactggtcactgttagcccgcacatagaagggggaagccaaggtggagctgtgctgtgtgacttcaggcacataactgctttctctgggcttaagtgtccttttatcctgggatgctccacgaggccccttgggttcccacgcttctctgagaatcgagtagagacaagttgattgtggtctgcatgctctctcctttgcccgtcctcggaaacctgcctgtctgggacctgagggagcacttagtgagcaagtcccagcttacagtccgactcttacttagaaggtgctcagcatctggggcacagaagctagagctggagcctggggtagggctctaaccagacagcccaggtaaggtcaagccaactctgagctgagccagacagggctgttgggttgggtttccattcctgcctccaatgagatgaagcctctccccttcccattcctagccagcttggcgttgctgggtcctgcagggtatttctgtgtcatcttgggtagtatgtgtgtttgggagcatgtgtgtgtgtgtgtgtgtgtgtgtgtgtgtgtgtgtgtgtgtgtgtgtgtgcatgcctgtgcttttcaacttggcacatcagggcacccctcccagaacacgcacacctatccccacatgtggacatgacctctgtgcccaggtttgtgccactggaggtgggcgtgcctgtttgctgtccccgagtcacagtcagttggtgtatctcctatgtgcctctctgctcttctcaatggggccaggtgtctgagttctggccataccccttgagggacagggacccttcttatccctggatctttcagggctctctggtcccccatcttgaggctcccaggcatccgagacagcaccttcctcccaccctcagaggtcaagtgggtgggagctcaggtgccggggtgtggacatggctgtgtgtctgtgggttctgatatgcaggggacggtcccggccctgttcgtccattctgtaaataacttgtaaatagtctttagcattcctcttgtaacaagattaatttttatgaaataaattatatttcctagtctaattaaaaaaaaaaaatccaggtcctggtctgatgtcttctcggtgtcttttaatggcagttgggagtgtcctgttctttttgtacgtccacagcagctcagagctccagaccttgatccagctcaacagccccatcccacaaaagggaaacagggctttctgacagttacacagcaagttagggcccctggatctcaccttgctcaccagccaagccttaaagcacacagcagaggagaggaatgtagagagaatagggtgtgtcccatctgaggctgagtggtcagttgaatgccatacaggcaggagagtgatgggagtacattgggatgtgtggctgggtgtgaacctggtggtttacaccctaggtaaataccccatctaaggaggagagtgtcatcagtcctgccacgc

SEQ ID NO: 18855 - DNA, 2550 bp, Mus musculus
actcctttgtttccttgtggggcttttagtttgaagaccctgaaggatcccactgcatagtgagtctgtcctggttattaatgttaccctagaaattgctttaaccttatttttctctaacgtctttagcatcgtctttacttaatcattgtgtggtggctccgacctgtcctgattatttagggaaagtgtgagatagcaagagggtgtctctgctgcctcagtggggtgttctggccatcaggcaggaagcagttatgtaccgtgttccctcaggtgggtgtctgtctgtcccacgcagggggaggttcagcctctgcttcaggagatgcctcttgtcctcaggatcactgtcattacagcttgctttacttttccaagcacacgtcggccagactactggcctctttttttgttttatttttaaataactggagtatattcccttggcagggtttgaagtgctcctttgtcttgtgcatgaccatggctgctgccatctttggagatgcctgttggcagtcatatacttgtttgttcttattactgtagggtaagaaatgaacatgtttttcagagaatctagggctttctggctgttggcactgcctctctggatggagtaggggtagatcactcctgagccctctcctgggccagaggagccacaaccagaccctttcccacattttcgtgaatagccacataggtaagcgcctacatcctgcacatgtgggcagtagtcttccccttggacattgccttaagccttcatgtaatgagaatctgcttttattgaagaaaacactccacaagtgtccttgacttcctcattgggtgtgaagatgtgcagaggacacttgctccatcagtgtgtgttcttcctgccccttccccccttattcagcttccaaaggtacgacagcattttagcttcaggtactggacgttcctcaggccccgctaaaaggaagcagacattttggagtagaaagggatggctacagccattacacttggggcctggggttccttcttaagactgattgcccagggctatacagggacaggaccaatccctggccaatttcccatttgcttctcccttttagggattgggggctctgaagtaggcagagccccgttcagctctgatgaccgtaccatgtgcctttctacccattcagtgagtgacaaccctcgtcctcacccaggccctggcagaagtagaccactctttgaggtgtgtctgcttataggagagaacttgggacagatcaccagaagccatgctctgttccttccccttctcagggattcctgagtattcagcctgggcattgctcgctgggagagccagaccaccaggctcttcctcaccctccttaggaagtggtcttcagcactgttctgaccccaggtgttaccagctggttcatcacagggcatgtgtatatgtccacttccctcctgtatgctctacagtgcattatgaggctcagggatggttggtgtgtcagagagaggctgaattcctgagtgtacacattaacagtggttagactgttggactcctctgggcctcctctctggcttacaagtggctaaaatggagaagcatcctttatagtctcagcagagccagggaccaagccgctcccttcctttgtggtagcactagcatggggtgctggtgtttttcagagggacccgctgcagccattttaattcatgattaggaaccttagtgtgacttaagagtttcattgtgtgtttatgtgtgcatgacatgcctagtcagtgacaggggtgggtagggtgtctagtatcatggtatcacgtggcttagtagatgccacagtagcttctgcaaacactgtactgtcttgtttctgtattagatgtcggtaatcatgtgaatatactgccatgtcacttttaatattaccagttttatacttggaaaatggtacttgcctctttgaaatctattttgtctctaatgtccctaccatctctatgttctttcctaactgcagcaataacccttcaaaagcaattgaataataaatgtcccaaactgtaatcattggatggttgatttttagatagatagatagatagatagatagatagatagatagatggatggatgggtgggtgggtgggtgggtgggtgggtgggtgggtgggtgggtgggtgggtgggtgggtggatggatggatagatagatagatagatagatagatagatagatagatagatagatcacaaatacagcagttgctgaatgggaaactggtgagcattcccccatttccctttccccctggaggcatctaaattgtgacatacctgcaacagtggccatcatgaggcacttcagctgggagcttcattgtctccaggagctgtggttatgtctttctggagaggtctataatcttggcccttagttccctggggtcttggctctgaactcctctctatccaatctaccagaacatacttatgtgccaggccttaccactgtctgccttaccactggg

SEQ ID NO: 18856 - DNA, 1099 bp, Mus musculus
gactcaaggagtacagctccatgggtaagcattggtccaggggtgctgcctccatgcttactggctaatgttggcataggtcaagatcacttggcactcactacacatactgtagctttaggggactctatgctcttttatggcttctgagggcatttgcactcaagtatacatagtcccacatagacacacaccacacatacaattaaaaataagtatttttaaaaagagtaaaagagttgagtagaaactcaatcctgttcttctattaagaacaaaggaatttcagtaatgacttaccacagcttatttttaaagctggaaatacaggaagatgtaagctgcctgctatgggcactgggaactgaattctaatcctctgcaagaatacatgttcttaactgctgagccatatgtctggttcctgaattttaggtttttgtctgtcctgtctatattaatccctgtgtttccagtgatgcctgctcgctgacagagtgacctttactgtttctgcagatggttcctggcaagaagggaaagcctcaggagctgtgtacaatggggaaccgaagctcacggagctgctggtgcaggtgaaaccctgggtgcttatgtgcatgggtgccattcatttcctagttcgtgtaactatttaatctctttcttgtaataataatcacgtaagggaaatttactgttgaaataaaaccatagagattaaaaagtttcttttcacttaaattggtaaatgtgaataataatgtcaaatgcatcttcaaatttcagaaaatgtgaaatgccacttatacctctggactttgctgtgtcctctgtatttctagcctttcatttgaggatactgcttgttttttgagacagggtctttacattggtcctggctgtccttgaactgcttatgtagaccagctgtttcaaactcagagatcttcctgcctctatctcccaggtgctggggctgaaggtctattctgctgtgcaggacttcattttgagattttccatgctatagccaatgttgtttgatatgggagttggggcaaggctgactcaaagcacactccacagatgagcctgg

SEQ ID NO: 18857 - DNA, 1733 bp, Mus musculus
taaattatttgccctcttgttctgtttggggctgtgacgctctttactcccgtgacagggttgggggaggagagggagatcagggactgccctaaccagaaatacctcagctagcagagtccgggctccacttcccagagtttttatatgatttgttcctctagtctcagtaatgccccttcccatacccactgggccatacagggctgaagcccatgcaggagcctgtcagagattcttgcttgtccatgacttctgactaccagggaggcctgtccagccatacacacacacacacacacacacacacacacacacacacacacacacacacacaccaaagacaaagcaggactcaggaggtagggctgcacacaggcagacttgggaagggtccgggatggatgtagaggtgaggcttcatggctgcagggtcgggcaggggagagttcttctcaggcctggctcttgtcagctgatggctgctaatctcgggcagagatcagttcacctttgccggccatagtgtcactttcgtggcccgatctgtccctgtagatgtcactgctggtgactctaggtaacagactgaccctccaatgtcacacccaagtcaccagaggaggaggcctggatacacagctttgacatccaggagttaacaagctggggcttggtccctggttagaccaggatcggtgacttcagtcatcacgggggcttgcaggagacccagcctgaaaggtgaccaccggaaagatgtcacctctaagactgtccccctcagtcatcactctctgctgaagtctactcctcctggagttgagggcgggggctcttcccttctggcttaaactgggcccgaatgcgtgatgctcagaagaccagtcaggtggctagcgacttgagaatccactcagctggactgtgcagagggccctggcaggatgctagctgctgttgatcccaggttagggtagggaagatgcgtagagcaccttccatggtcctcagactctcaggaaattgcctagaccctcactcagtttgagggccaagtggcagaggtgcttgtctatccaccttcctccgctggaggaaggaaagcccctggcctgcaagctctggagagctgggatgctgggaactctgcatgctcctcccactcctgtctcctgctctgcaggtgcctggagctaccctgagtcaagtcatgtgtggaccggcctggagatgctgatttttaaaacgttacctatttattaatattgcccttggtgttttgtttttagaccccaaaagtgatgctctgtggtgtgtgtgtgtgtgtgtgtgtgtgtgtgtgtgtgtgtgtgtgtgtgtgttttctgttttggaggatggggacagtgtagccagcactctaagagctgggcctagcagttgtaaggtgattgcagatgggaacaaacaaggaagggccagaaagacctgaatggctttgggcaagttaccacaccaagggtggagatggctgggaggtagctttggggctactcaagaaaagtattttaatgatcagagctttgcaactctgcaaggggtagtttccttggatggtggtgaaccaggttgtttgtttgtttgtttgttttttgttttcctggaaggatccaagcagaatctgaatgccaagcaggaagaagggttgtggtgcatcttactggacaaaaagctgatgacgtgaacgcact

SEQ ID NO: 18858 - DNA, 1241 bp, Mus musculus
ctccagagcaatatgcagacttgagttaataattgcctgccagtgttggtcggctcatcctgacaacttgaaccataccatgcaagatgccagtagtggggggaatgggtatggagtgtatggggtgtccttactgccctggcaacctctctgccaaccatacaagtcatgtatctcttctctggaattcttgagagcagaaggtttgaggtttggagcgtttgcatatcagcagctgcaatcttggggcgaggattcaagtcgaaacctgaagttcacatttgcttcatactccccttagatacacagccagaaggtgatttttacacgatatttttagtgcacctgaatatttgacagtgtcccatcacaagcccaggtgtggaattttccacttataatgtcccactggcattcaaaaaaaaaatcctcacgggagctccttttgcaaggctcagcagtcagtggggagatgatacctggtcacagtgctaacagcatgccacttgagtgctcagccctagacaggacacccttatcaaccccagtaccaaggcacggggaacatctcagaagaggaggcagaggaagatgtaagatggaggaataggggagaggcggggtgaaatgctcctgcctggacatgaactatttctagtgtggtcacctgcacaagatcggtacaagaacaagccaatcaaaatccctacacagatagggcagaggcctctgtatcaaggaatcgaggcagtgaatagtcacagggacttgaagaaccattctttattgaagatgggtccattgacacatgctccgttagatggctccatgcccatgcgcatatgaatagcactaactagacttggtggatgtgtgtgtgtgtgtgtgtgtgtgtgtgtgtgtgtgtgagagagagagagagagagagagagagagagaggaagttgggagggggatgaggagagttggagggacatgggggaaaaacgtggtcataggtcattgtatacatgtttgaaattcttaaaagcaagcaagcaagtcaggaggcaggcaggcagggctgcctcttctgtctggaatggttgctaggattcaggcagggagttgatgcaaggaggatccaggtgggctgggttagcacttagtggcacttggcgcctttgcctctgtgtgaccgcaggtggccttaggctccagggtcttggttcttggcaccatgcttacgctcttagcctgaa

SEQ ID NO: 18859 - DNA, 1207 bp, Mus musculus
ttctctgcccccactcccttccctggggctacaatggttgcttgtgttggccaaggattatgtgtccagacccttctctactgagaaaggctttgttagggagagggcactggggacacaaggtaaggaggcagctgggtggccttactccagaatgtgaacagggctgtgtggagcaaccactgccttaggctggagaccctcctaggaaagcgagttctggcatttctcaggctaatgccttaggactttgcacaggaataagtagcttggtggggaaggcaggtggcactctctggggagtggccttcccacacctatatccaatgttcaatgccaggttccagtgcagcgaatgctaggtgtcatttgtccccagtcagaggagattggctcatgttccagtaagctttgagtcaggtgagagaaggctggaggatagtggatgggggagaagggttaagagtaaggatgctggggggggggggcatgagtgggggtggtgcgtggggggaggagcctagagaagacaggaaagcccagtggatagcaggacattgccctgtctggggggagggccatgcacagagaggaggtggaccagcctgcctgtagggagtgtcccacacagaaggaaaggcagcattagctagatgctgtggtctagttatccaagaggggagggggaggcggatgggaagagggaggggggagaggagatggagcgctgaaaagtaacactgcagtagcaagtgtagagagaatccagagcccacagacaaagagggtgtgcctgacctccaacctgagctcctctgaacagcccaaatcccaggagttggagggggtgggggggctacaggaagggctcgccaactgtttcctctctatctcaccacaggacaactgaggtcacactactgagtaccagtagagtcagacctctccagctgaggtccctgctggctgagctgtgaaagaagagcccctcaccaaccaccacttccttcccgctggcctgcttgaggtcttggggtgaagatcaggtggctcaagtttgagacacaatgtatgtttattagggagttgccggtgtacgtgggagacagagctgacctagaggctgctgttgttacagcatatatccagcaggtggctgctgcttgctgggcatcagctactgttagagacttgacatatctgatta

SEQ ID NO: 18860 - DNA, 2095 bp, Mus musculus
gcctccgagcccagcaagggaagggcggtttgaggacagtaggcctgatgctacctccacccctgatgcccctatctctgccctctccaggtggcaaccaaagctggcatctatgagatcctcaaccagctgggcttccctgagctggagagcatcgaagagcagcccctgtcgaggctccgctaccgctggcaggagcagagtcgagacccagagccctgtgatgttggggacttcctgtaggccttctttggagacccagagccctgtgatgctggggacttcctataggccttcttcttgccccttgctaggcaggttgggggacctgagggtctcattgcttcggatggacacttgtccgcttcttggtgagacttgaggggccgagagcctttgggaagaggtgttttttttgtagggtgtaagatggcaccaccattttctgtcaaccttcggggtgcgtaatggcctctggccaggcctagcacatgtacctcacagaccaactggcaagcagccttcagggagctcgatccccaaacagccagtcaccacctctgtcccctcttcactgttggtcgtcagactgcctgagtggacagcaggctggtcgcgtttgtattttcacttccttcctctgactggcttgctcttgtctctcagtctttcatcccaggcagctgcctgaggtaggtgaggaggatggtgagccaggcaggtctacaataaaggcagctctgtccggctccttctggctcgtgagtgtcaccggcctggaagactgagggaatggctcccctctctcctccccgtctttccccagttccttccctatgttggcccatgtgcccagggagttggaagcatcagggagaccctcttagtgtggggaaggaagtcagagaccattgacacagtgaagaggcaggatcatgtgttggaagcctgttagcaggaccaaggtgactcttgggagagactcttgtggacacaggccgtggtggcttgtcagaccttaagggtccaggcccacccctgccaggatccctggtctgctttctccaggacacactgggacactgctgagtaatgagcagcttattacacacaatgggaagaggggcagagagggctgtgtttggttgagtctcggctgggactgaagtttgccataagtagtggttgtacatccaggagcctggctacctgtcttaccccttgaaggacaaggatgaatctctgggtagctgtccttcaggaagatgccagctgtgctatttgaagaggccaaagttgttcccagcctggggagagtggtgaccctcttagctgaattcttttgcaagctgctgtatgtctgtccacgccttctcaggtttgctggtgtctattttgtacaagtcagtgcttttcagaaaaggtctagccagtgagtcagaggccagagagacccttcacactcttgtggttggcactgacttggagatatgctgggaccaatggcagatcactttacctctctgcctcagtgtcactgtctgtaaaattggagaataatacttgcctacctacctcacaggggtgttgtgaggaatcctttatggttttctgtttttttgtttttgtttttgtacagagcttttgagcattaaaaccatctaaacatgtaacatactgctttgctgattggtcttcagtgtgaggcagacatggaagccgtgcggataaatgtgtcccccagagtaagggtggatgcaggagaatggaatgtccttgttaccagcacccctgatgtttagaggctgcgggtgttatagatgtcacatcctccttccttgtcattaatcacagcctaccatcttatactggatgtttaaagtggacgtgctgatccaccatccactgtcaatcaagagaatgtaccagaggcttgccttcaggccaatctagtgtgtgtgtgtgtgtgtgtgtgtgtgtgtgtgtgtgtgtgtgttccttacttaaggtttcttcttcccaaatgcctctagcgtctgtcaggttgacataaaactaaccaacacacacacacacacacacacacacacacaca

SEQ ID NO: 18861 - DNA, 1170 bp, Mus musculus
gatgctgctccgctctggatggaaccgggcccaggctccatctgggatgtacctcctccatcagactcactgcctgggaaagtcccagttgacattccacccatttcgagttttccccccaccttctgtccatctcagcttctcccagccttgagacagaagatcccaacagcatgtggtaacttggcttctgcccctcaccctccagaatcagtctttcccagatcccttcctgcttcagcaatccacttacatgttaatcagaagccgttaagagaacatggcttagcattcggcattggggctgctttgggcaataaagggaccccaggggctacagagaagcggaaaaataggaagtccctgctctgtgtgtgtgtgtgtgtgtgtgtgtgagagagagagagagagagagagagagagaccctccgtgtgtgacgtgagcaagtatagaatggaaatctgggcgtggctggcttgttagtcatggcaaaatagaactggtcctggggtacagcgggactcccagagcttgctgagctgagatgccgggactttgattttagccttctcattctgatctttgtacacacacgctcccctttcctcattggtgggacactgtaggctctgagtacccagtgggctgtgcctgaggctaggctcacttggcatgtgccgacgctaagccgtgttctatcgaggtgaagaaaggcccacggatgcctgtctcggcttctggacagtccatgatggtggctgagcccttcataccactgtgattggtgttgtatggtggaagtcaagtgggagtccttctggggcagtcttatccatgttggcctccacttacctcagttgctggccttagaggcctagccatgcctctctattctccagggcaactatgaggctttgtctaggctgggtgctgtatgtgtaggcgcatgtgtgacagggtctctctctcttagctttggctattctggaactcactctgtagatctcacagagagctttacctgcctctgtctcccagtgctgggattaaaggtgtgcaccaccaccacctagctgtgctcacagagttttaagaactgcctcagaggcccagtgagtaaggccgcttgccaccaagactggtgttttgagtttgaccccctggacttc

SEQ ID NO: 18862 - DNA, 1168 bp, Mus musculus
atccacggaggggggtggggtgatcatggagaaaaccctgtgtgactgaggtggtatccgtgtggcagctgtaggtctgtgacagatgcggctgtctgtgtggtttgcctttccgggacttgctggtgtatctgtgggcagggtctgcctggcatgtgtggcctgtggatgttgctgtgatagttgtcagggctgttgccttttgcttggctctctttgggtgcatcgccagtggagtgctgcctcctggtggctggtcaggcaaggacacagcaccagactggaaaatttatgcatgcatcaaagttggcatactgagtcccagaagtgtgttgtgtctccttatatgcccagtcttgggtgcatgggatagagacagttatgggggtgtgcatgaacacagctgttcatacatgcatggttttgtatgtaacctagtgaactgtgagtgtgttatgtgtatcatgagtcaccaggggacaaaaatctggggttaccatttggatggcagtccccattgtgaatctggatggccagtggcactcttggactcaaactgtggtcttgtcaccccaggactttgaccggctgcttgaggccctgcgagctgctctcaccaaggacccgggcacaggctttgtcttcagctgcctcagtggccagggccggaccacaactgccatggtggtagccgtgctggcctgctggcacattggggtgggtgtggtcctcaccttccatgtgaggtcagaggtcatccctggcaggggtgggtactggcaatggtgagtgtggaagggcagaggtcatgtcatctaggggaccttctttcatcagtcctggcagaccctcagcagggtttctgggggtggaggctgggggtgtagaatagggagaaactccatcttagcttcgtcattcctcagggctgtcctgaggtgggcgaggaggagctagtgagcgtgcctgatgccaagttcaccaaaggcgagtttcaggtgggtatgcccctccccccaacacccccacccctgcgggtcacaagtcttgggtcatgttggcagcttggtggggtggggctgtctgtctgggaagcagactgtggctcaaaacagcttgactcttaagcctctgtcacagtagatggggtctagatccttccttccgc

SEQ ID NO: 18863 - DNA, 1398 bp, Mus musculus
gaatgaaaataatttcctatttttgtaccagaagctaagttttcactttagccagaaatagtaactctgcctttgccccagcaaatgcaaactgaccctccctccttcctccctttcagagcctgctgaaacgataccaaccccaccgggttccttccacgtgctgtgcccccgtgaagaccaagccactgagcatgctttatgtggacaatggcagggtcctcctggaacaccacaaggacatgattgtggaggagtgtgggtgcctctgacagagccagggggagtgctgaaattggcttgcattccacaatgctgatgaactccaaggagactccattgtgtctatccagggagcagaaacgttagaagagttctgcctgctggagctaaagagaaaagccccgccccctgtgcatacagtgctcttagacctgccaagccagagagaggctaccgtggcatggcaggatggggaagccttgcaggggctggctcgctgggctccctggaaatagggtttatgaactgcttgaaattgtgtgcaaaggctggggtgtatatatatatatgtatatatatatatatgtatttatttttgatgccatctgtaactttcttgtattctcaaaagtggtctgtgacctgctgtccctccctcaagattagtatatattttattagattataaacgagccatttggttctccctgcctcaagctgtggtagggaagacccacaaccttctggctggctggcagtgacatactggccttggtcaggggctctctgatctctaatgacttgcctaaaaaagccactgtccagttctccagggccagttggtgcctttgaccagagaggtgggcacttgtccaagaggggactggccatggtggactttagaagccagagtcctgagatgtatgcttggcagacacaacccaagtctattaaaagtctgtgacaattcacctctgtctcacaatgtgtttctaggttcctgagttccgatccagcaggggatgggcttgtggtcttagcttttgcagaggttatgtgaggtgtggggaactcactgcctggcatcccctagtaaaacaaaaagtgggagagcctgatgcatatgtgggaagtgcctctgagagcttgggaatgactggcctagtagcagacacttgcttagtacacgtaggaccctgagttaaaccccagcatgaaaaagtcaggtgtgtagtggagcacacccttaattccagcagttgaggcagaggcaagcaggtctctgagttctaggacaatcagagctacacagtgagaccctgtctcaaacaaaaagctgcatgacagggagggccatggggcttcatgtcctctaggccttctccatctgagtct

SEQ ID NO: 18864 - DNA, 1146 bp, Mus musculus
ataagctattaggacagacttctatctgcttgtcctagggagaggcggcaggaagtgaagattcccagatctacaccctcaactgccatcttctcaagaatgcttgctttgcaggtctctgaggcggccgctttaagcattgcttaccacttctgtttgcctttagccacgaattgactaaaggaactgggggcattctggggagctgcttgtcaggcaggtaacaaaggatgttagatgttaggttcctgagctgcagaacaaacagcagttccctttcccttctggtgatggtgtggaagccaggtgccaggtgagtcagtgcattggtcaaggtctcccacccagaagcagcgtctctgtgagccaggccagctcagcatgcagaggagcaaacgaacaaatcacctcctgggtgccttgttggaagtgtgctcttaaagaaacctgtaagagaagcttgagcggtagctcaccagtgcctcggatctcacgggatgtctgctgcttcctgctagctggtctcgccatccttcggtggaagctcttgttgggattggtgtgctgtccttcactagcagtttctttcttgtagccatacttgctttagcgtgtgctggaggtcctagtggactgtgggtttgggccgggggctggcctgggtactgtctccttgggcttctcggaccttcccagttgagttgggttccactgagtgtccagacacccagctcatgcacacggctccggtgttggcagccatgtatcggggatggaaccttcttcccatctctatcttgagtgttggcggcttgagggggttgtgccatagccctttcactccctcgagaaggaaggcaccactgtcttcatgtatgtagttcaagttctttgatgtgttttctggactccatgcccacggcagctatttattaatgtgcgaaactcaatcactgacccatccttaccacaggaaggtggggccttcccatgtagtgggggaagaccatttcttagggcagaaggttctgtctgaacttggagtggggcatggttcctccaacccctagcctctcatcttttactgtcgggaattgggtttctgctgttgactcggtcctgcagtgcttagcagtgtttcctgct

SEQ ID NO: 18865 - DNA, 1297 bp, Mus musculus
tgtgttttcaaaaggaaactttatttttaattcttaattgaatattggtgatttttttttcttaaaatagcaaacaggcttgtcagtgaggaacaagggtgattttttttcctttccttttaaaaaaaattttttttaaatgttgtttttattaattctttgaggatcttttacagtgtgcttggattatacttattcctctgccctgctgcctcccagatcccacacctctacccacccaacctcatattctctgttcatatttctctctcaaacccgtcaagccctgtccgtgttggctgactgttcctgagtgtggggtctgctctggagggggagcagtaagccaggtgtcggtcgcatcagtagagaagactgactcttctcccagccagagtcagcaccagcgtctcctcggtgaggatgaagcttcatgtccacttccctttatgctgggatttggcctgatctgggcatatataagtctcatgcaagctgtctcaatagctgtgagcccatacatacatccgccctactgtgttcagaaaaaggctgtttttccttggatagatccctgaaccttgtgtgtgtgtatgagggggttgtaatatagatgttccatctagggctgcccactccaaagtctcatactctcaactcagttgagatcagttgttggttttctgtgttaactgccatttacagcaaaaaaaaaaaggaacttcccatgaagctggagagatgctccaatctatggatataacagtatgttattcagagccatttttagtgttatatccatttagcagaatagcggtcttagggtctcccctagagacatgatctacctagccacaggctctcggcctggccagcagtgtcaggtatgagttccgtctcatggagttgggtcacaaagtggttggttacttcagataacggttgtgccattgatgcactggttggcatatcttacttacagggttcaataggggggtgaggttcacagggggtgaggttcatggggggtgagtttcacagggggtgaggttcatgggggatgaggttcatggagtgtgagggtcatgggggtgtgagggtcatagtaggtgagattcatggttattcttcttctctggtgctatgcatagcgctttccagtctggtaagagctagcaagtaggggtgaagctttccattgagtgtcagctagattctccatgctctatgtctgactcatgtgatttcttcagcagtagggtctccttaccaccgggttctggagggaagtcaagcc

SEQ ID NO: 18866 - DNA, 1108 bp, Mus musculus
cctctgtgctctgcgtagccaccccccaccccagcccttggtagctctgatcatcggttcttttaaattatttttattttatttttagttaaaagaaatttaaacttacggatgagtgtgtgcacactcgcagacacacacacacacacacgcatgcgtgcacacacggaactatcttggggaaatgtgatgctgtttggtgtggtgtgccagtcagaaaggacaactttcaggagccctcggggcttctccttcatccttgctgaaacactttttttatttttgagatagagtctcccgtagcccaggcaggattcacactcactgagtacctgaggataaccctgaacatctgaccttcctgcctctacctctctacctactgagggctggaattgagtaccacccccttccagtttatgcatgctgagaaatgccatcacagccctctgcatcttagcaagtagtccaccaatcagctgccctcctgtaccccagggcacgcctccccagcatacccgacctctagctggccacgctgccagcttcttgggttttgtttattgggactcatttctgcccgaggttatgtgtcattcactgccagaatggatatgttgggtagcctttcataaagtcccagggctttgggaatggaaggcctctttattaacactaagtagtgttttaattagaagtttcggggaggggtgtgctgctcagccttcttgcagtacgtgtaattacgaggataattaagcctggtgttcaccggtactctcttccaaggaacgtctctcttgatgctcagctaggtgctgcagggcatgctaggaaaggaccctggagcccagatgtgccccagtatggatggaggggctcagggtcgccctgctgcttcattacccaccaccctccacagctcctggcatccctctgtggataaatgccaccaggcatcacaggacttgaatggcagaagccttcatctctggggcaagaggaagcctgggagaccagagaaggcagaccaggaaggtgggaacctcacggagagagacctcagggcctttgcccatgctgtttctcttccgaggttacctttctt

SEQ ID NO: 18867 - DNA, 1107 bp, Mus musculus
gaaatatctttgagatctctgagtttctgtaaagattttactcagcaagcagagtaggctctgaggcagctttaaacgcttagaaggatgctccccatccccagccttgagggccaccccccaaccaggcctcctatctgggtcctgaaagacggagtccagtagcatctgtgctcagcccagccgccctgttttccagtgagtgccaccatctgattccactctgcacttgacgctgctctggcctgagaggaagaacaagggcatggaatagcgacatcctgggccgtctgtggtgggctaagccaaccgagaggagttgggacgcttctgtcagctttccgaggttcaggatggggtgccgcctgtcctcagagttttccagtggctgaatgtcctcaggtgtcatggctgggaagtatgtggcttccatggctgtgtagacaggtctctggtctgtctgtgactctactgctctgtgctctccccaatgtagcatgcctgctaccccatgtgcactgcacgtagtgtctgcagattaccggccggaaagctcaatgccacagagcagggatttgaaagcctcaggatgcctgtaatgcccccaagaccaagtcaggctgagtctttcagctgcaggctgtgatctactgaggaactgtaaatggtaaattagtgggttgagaccacagggttttttttttttaatagagtagaaaatatcagggcacatcacatgaagcatggtaagttgttacttttgtgtcttttaatttcattttcactgtgtgtacactcaggtgtgtatttggagtcatggtgaaaaattgtgtttcttaccgtgggtgtgataaaaactaccagggctgtcaaggtgtaatgtgcttgctacccaagctggtgagatcctgaccacctgagtttaatcttgggggctcacataaaactagaaggagaaaaactaacttcacagaaggttctttgaagctgaacatagagggcatacatctcaggatttgggagacagagccattttggtctgcatatagtgagtttcaggacaaccagggctgtgtagagagaccctgtctcaaaccaaccaaccaa

SEQ ID NO: 18868 - DNA, 1184 bp, Mus musculus
ctgtgtatggtaggagattgttctaggtttcttctgaatccttaagaaactgcaggcagctgggcatggtagcacacttttcccccccttgctttcaaaccattttattattattattattattattattattattattattattattatttgatattttcttcatttacatttcaaatgctatcccgaaagtcccctatacctttcccccaccctgctctccaacccacccactcccgcttcctggccctggcattcccctgtactggggcatatgatcttggcaaaaccaagggcttctcctcccattgatggccgactaggctatcctctgctacatatgcaactagagacacagttttggggggtactggttagttcatattgttgatcctcctatagggttgccgaccccatagctccttgagtactttctctagctccttctttaggggccctgtgttccatccaatagatgactgtgagcatccacttctgtatttgccaggcactggcatagcctcacaaaagatagctatatcagggtcctgtcagcaaaatcttgctggcgtatgcaatggtgtctgggtttggtggttgtatatgggatggatccctggatggggcaacctctggatggtactttcttctgtctcagctccaaactttgtctctgtaactcagtggcacacttttaatcccagcactggggaagcaagggcaggtagatctctgaattcagggccatcctggtctataaagtgagctccaggacagccagggctatacagagaaaccctgtcttgaaaaaaaaagaaaaaagaaactgcagtcttccttcccatcctctccaaatggttgcctatcacatgcccctcagtaactccctcatccctggaaaacatttcatggtcctcttgatgtgcccatggctgcacccagcaggcagtgaggcaccaggcatctcagagaggttaaaacccaggcactgtgggcatgcagtatattctgtaatcccagcccttgagagataggagtgttagggagtttaaggtcatcctcagctacctagtaaacctgaggcagtcatgagctatctgggaccctaagtacacacaggggttgggggaccggctgagtcagaaaagtgcttttcttgcaagcataagaacttgagttaagat

SEQ ID NO: 18869 - DNA, 1192 bp, Mus musculus
ttttgagtcaggacggcactgtgtagccatggctagcctagaactcatagggatctgccagcgtctgtctcctgggatcaaaggcacatattgacacacctagtttcattctctgttctgaagcttacatttagcttagcattatatgcataatcgaagctccaacatttcattataattcttctctatagttaaaagttcttaaatggaaattgtaaagtttgtttgttcgtttgtttttttccttgacagtttctctatgtagtcctggctatcatggaactcattctgtagatcagtttggccttgaactcagaaatccgcctgcctctgcctcagctgtgcaggattctaaggcgtgcacccccacatccagcctgtaaaagttttagaagcagctggtagctggtttgtattttttcagcagatctcgtgggggttgcacttgttcagcagcgtgtgtgtgtgtgtatgtgtgtgtgtgtgtgtgtgtgtgtcagagtgctgcactctaaccctcgctttgttttagacatgggaagacccaggacacagtgacaagcacactggctgctgtggtgacaacgacccaatcgatgtttgtgaaatcggaagcaaggtaatgaagttgaattttccctgtgacattaaaattaacgactcataccagtttctgttttgaaaattaatgtgaatgaactgtgagcactggtgaatagtcaggcctcctgaaggctttgggacgatctgtgaaggactcagccaggttctccagatgtgagaagtgggctcttgttctaaaattcaagagctcaagctcggcagaataaggagcaactcaaaccaatgttgttagattccattttttttttttttttgaaaaaatgtcatttatttttatttatatgagtacaccgtagctgtcttcagacacaccagaagaggcattagatcccattactgatggttgtgagtcaccatgtggttgctgggatttgaactcaggacctctggaagagcagccagtgagtgctcttaaccactgagccacctctccagctcttttgttagattctttagtcagaatttctgtctgttttgttgtggttctgggggttaacctcagaatctcagaatgctaggcaggtgaaaaatgtaaggacatatgactagcttagttcaatggcttcaa

SEQ ID NO: 18870 - DNA, 1104 bp, Mus musculus
gagacagaggcagcagatctctgtgagttcaaagccagcctggtctacagagtgaggcccaggacagccaggaatacacagagaaaccctgtttttaaaaaaaaaatcaaaaggggcaggggtgtgtgtgtgtgtgtactcgcgaggggaactgactggacagtttccaatgacctccacatgcatgcagtgtgcaatttcatgtgtacaactcccccacctccatcacacttcgtgtgtgtgtgtgtgtgtgtgtgtgtgtgtgtgtgtgtgtgtgtgtttaagacagggtctcactgcatagtctgtgctctctggccttgaactcacagaaatccacatacctctgcttcctgagtacaaggattaaaactgtgtgctatcatgcttgacaataaaagtatttaaaaaaagcttgactcaagtctattaaatacacacacacacacacacacacatacacacacacacacacacacacacctttcttatttcttacttgtcaccatccccaagatagaacccccctgctttcgttgtgtaataccgtttgtgccgactctggctgttcctcaggtgtgtgccagaggtgagataatcagggtgaaggtcctgggcatactggccatgatcgatgagggcgagaccgactggaaggtcattgccattaatgtggacgatccggacgcagccaattataaaggtaaggaaatgggaagcctggaaacagaacgtcttctaacccttttgtctctactcccagttgctgggtaaaggtagcactggttatgatgctttcaaaaagccacgaatgaagaaaaaaaaaaaaacaaacaagcaaacaaaagccacgaatgctaggcggtggtggtactctcttattcccagcaccaggaggcaggcgcaggcaggtctctgagttgcaggccagcctggtctctagcatgagttctaggacacccagggctacataggaaaacactgtttcaaaaaccaaccaaacaaaaaaaggcagtgaatgatgagagtccatgcaagaggcacacaggcattctgtaatccggagcagataatacccatgagaccacataaagtacaaatgca

SEQ ID NO: 18871 - DNA, 1274 bp, Mus musculus
cctgcaatcccagcactctggaacctgaggctggagggtcacaggctgaaggccagtccgtctgggttacatagcaaaaccctgtctgaaaaaaacaaaacaaacaaacaaagaagagaaaaaggaatccataagtttcttctgttgagaaaagggccctgctggcatggtagtgcgtgcctttaatccctggtgtccaagagtttggggatgacctgggctccataatgagtttcaaatcagctgagaccatatgaaacctcatctccacacaggaagggagagggtagagtgagaaagcctttggctaaacgctgctgagttccagccctgcaactgtaactttgcatacgtgttctggaagtctagaggaggagccttgcagagcagtatatctagtattccttgtttggcaagcattctgagttacatcgccagctttttctttgttagatgttgataatttgggtttttaacagattccaatttgtctttttttttttttttttttccccttctggatacagtggataaatggttccatcagcagaaaaactgaagagcttcctctggaacacgagctgttacggccgcatcctgttcacctggaagcattagatgcaaaagattttccaagctctaaatttctgtagctcaccgaatgaagtagactctgctgtgactggtccactagttcagaactggttcagaaggttagccatctagacacctcacatctcaaccaagacagcttttattaaaccttagctctcaaagccgtggggacatggaagtcatttgtgcatggatgtgcagtgtggacacctattggatgtacatgtttactgtgttaggaaataaaattattttactgaaacttggcttaggatagtttcttattctggagccaacattcccacactggcgtcggtactgtgtttctttcctaccagtagtcttagaattcagttatatactattaaataaagactgcacagtggtgcacacctttaatccttgtactcatgaggcacatgtaggcagaactcttgagttcaaggccagcctggtctacattgcaagttaatataacatttcgagtacctgttgaaaaaaagcaagctgtttgtaggaatctgagaatggaacctcttgcacatacagaaggcttgttccatgtctagttcccagcatcccattcgaaagcaaaaacttttaaattactattatgttagcagacagtgaaatctttactgaaggtggaagtcaacaat

SEQ ID NO: 18872 - DNA, 2228 bp, Mus musculus
aagccacacgtctgtctacgctcattgcccagtggtgacatgtgctcttctccacactgcctgctgttgctgccgggcagtgtgtggggactggggctggcagcatttgccagggaaagctgggtgccatcatgggacacccgagaagaaaaacatgtctcaccactggttgatttcaaaagaaagtgattctattttttaaagaaagtgttgttaatgtaattggtatcccttctctaactttttcagttcacaatttacttggtccagattttctattctttttttttaactagtaaatgaaatttacatacttcataaaattatgaacagatagcgcattgggctctgctgtgtgactgcctgttgagggtggtacccgagacaagagcctggagaggacagagcctcggccttccccagggtggtctccaccatggtaaggggagtcctcatctggagtgggtgaagtatcatggtcacgttgtcaactttatttgcagttaccagtttcagcaggctttgcttttatactgttgtgaaatttcatctctctgtgtagcaccttccttttttccattgtagatataaaaagtgacttttgcctcatgaaagagttacagacatctgtcatgtagaccccatgctgtgggtgtgactgatgcttttgaacatagtctagagggacggttctgaaccggagggtgcagctcaaaatcatcagcttaaggctctgaattctgtgcgattctcatctggcagcaacaagagaacccaggaaaaaccctcaggggactctgtgttttctccttcagaaataacagaaaacccagatggccttctggcagcagcgagtgctaacatgaaagcagcagcggccctgtgaggatcatgaacaggctttttatatatatacagatagcatttggttttcttgctgccgtgtgtgatgttaactttatattttacccttgagtgcatgagaggagatggtctgcagatgggagggtatcttgattctgatttcctttaatgcaaggtgagagtaggttcttaagtggagattctgctgttgctgctgctgtattctgacaggctcgtgtccagcaagagggtagggaagctagaagcacactcctggagagtgacttaccacattttagttttgagcactgagcctatgggacagtgttttgttacactgccgggtttccaatgcagaggcttggtgaggtgtctgtctgcaaactgcatgcactgcgttcacccacgtacagctgggatgagaactgtcagtgtggaagggcctactgttaaagccctgagtgagctaggtaggtgactgttgtgcccttcattgcctttggctaaagactgtccacatgtctgtccaggcacatgacaggtgtgagggcctcagcgttgggttcttcatctgtctttctcgtttgtccctaattgctcggtagcaacctagaagactggactctgcccagggtggctctttgtgaaagtggtttattctggccaccggagaaagatggctgaacagtggcaccagtctgcttcatgctgcacagaacaccgtcttaagtaaggtggccaaaagaggttgctgcagcaagtgcaactctgccagggccatggccaggggctccaatgaactgagactcttcattctgtttatcagagtgcacatgtgtcctgtttcagcaaaagtaaaactgtcatttacaaaaggtcagtctgtatcctaagcattttaataaaaagctaaaatgaacttgcctctctccttttttaaaattgatttattctgagtaagcatgcgttgttgggaaggaaaacaagaattcttacttatagggaaggacatttaaagagaatgtgagtcttgaattgctaccaggataaaagaccaagtaaaaaaggctgagcactagtagcaaatgcagtactgtttgatcatgaagtggcccaaggttgttggtcatctttgcaacagtgctaaggactgtgcttgcacgtactagctacacgttcagagccacacttggcgaaacagaagtctgattccacatttacattacagttgcttatagaaagcaccagaagacagaacaaaatccgaaacaaaacatgctggatgtgtcctgagatcacctttacaggggaaggagactggttctgtgggcaaagggtatatttgccagggacagagagagacc

SEQ ID NO: 18873 - DNA, 1164 bp, Mus musculus
ctgtccaagcatcagcaaggcctggtcacagcactcacctggttatggtcaggcatacacagctttgtatagatgtgtgatgtgttgggaaagcacatctggttaagtgtagatttcaaggttgatacctgtacctgtattctgacttcagtccatagcacactcattcattctctctccctctctctccctttctccctccctccctccctccctctcaaaataagacactctcaatatgcccagagctcacagaggtctgcctgcctctgcctcccaagtgttaggatcaaagatatgagccaccatagccagcccattccaagacttgtctctcgtattgctctcttcccagtgctaagacaacagaaggctagcttgtcaattgtttcctgtgtccccaggaatgtggcaatctggggacaagtggtgtttgccactcaggagacctctccatatgacatagcagtggtgagcctggaagaggagctgaatggtgttcccacgcctgtccctgctgggcacttccatgaaggtagaggacaaagggactgaagtgatggtggtgtgtgtgtgtgtgtgtgtgagagagagacctgatagccagcaggcagaaatgggcaaagcctgccaagcaagagagttgggagcttaggtagggtttggggcttcttagacttccctgtatatcagacgttgacacctcaagtgctgagccaagtggataccttattgagggcctgaagcagggtgatatggggtcctgggccttgggaactccagtgccataatttgggtggcatgtcttagatttttttatgttttgagacagcatcatcataaatagcccaagtgggcggtaaacaccccagacggccaaggctaaccataaacttctgattctcctgcctcttcttctggggtcacacatgtgctatcacactcatttcatgggatacccagggtttgtgcacgctaggcaagcacaccactgactgccccagcagtctccagccccaaagattctatttcatatggtgacaaaagagagagaggtcctctagattagcatctgtcctctgccgtacattcttaacacacacatacacacaccatctcagtttgcccttttgtcaaatggggctggtgcgccttcgggtgcag

SEQ ID NO: 18874 - DNA, 1185 bp, Mus musculus
atctttaattcaaccccagcactcgggaagcagaggcaggtggatatctgagttcaaggccagcctggtctacagagtgggttccaagacccagggctacacagagaaaccttgtctcgaaaacaaaaattttaactagaggtatagcttaatggtggaacatcacccagcatgcaggggactggggagagaggtgctaggccttctcccaagcgtttcgaaaacaacgacgacaacagtaataataattccattgaaagcttggctcctcagatccagtaagcaacctttcacatgcgcagcagccctgagcagcagagacaccaaacacttccatcactggcggttcagagaaacaacagagtgcttagattgtcgctctgccgatctccaccataacaaaatagcatacaagagttcgtgccactgccactgggccccaggacaatcctggtgaggagggaggcccagcgtgaatgtagcttcttgacctagccgcttggcttcgaattcagtgcttctcaaacatcctagtgctgtgaccctttaatacagactctcaccttgtagtgaccccttaaccataaaattattttcgttgctacttcatagctgcgactttgctactgttatgaatcacagtgtaaatatctgatgtgcaggatagctgacttgcaactcttatgtgaaggggtcatttgaccccaaagaggtcaagacccacaggttgagaaccattggcttaggtgcttataaatcttagacacaaaagactacaggggcctgtgggctcccataatcattgttatgataccaggtgtggtttggtttggtttggtttggtttggtttggtttggtttggtttggtttggtttcattgtttgagacagtagctcttgtagcccaggttggcctcacttgtctatgtagccaaggatgaccttggacttctgaccctgcagtgtccacctcctgagttcctggattagttgtatgctattgggcctcatttattggtcaaacccagggcttcctacgtgtgactctctacccactgagctgtatcaccgtccatattgtgttagccgtttctttcctgtttactgtttccccggcctggggtatggctcagaagcacacgattggctgacaccctgagttcaacccatagacaccctccgata

SEQ ID NO: 18875 - DNA, 1201 bp, Mus musculus
tgataagggggttcctggctgaggggcaccggagggggcgcaatgacatggaaagacagtgtgcttatttatgcacaggggactatgaactaagtcaaaggccaggaaggagaagaatctacagctaggcttgaaatggcctgtggggcgccgcgttagtaacagggatgacagtgctctgctttccagccactgttgctcttgtttttctctgattctctatggggtgctgggaattgaaccctgggcctcctaagcactagacaagtgtcctaccactgagctacaccacccactccactccttttacatatagttccattttctttatttttatatttatttaaaatctatttatatatgaccatattattttattaattaaattattttatttttaattaagtaaaattatttaattattaaatagttttattaatttttataatatatttaagaaatttattttagtaaactgtttaattaaaacattaaatattaaaatagaaaattaaaatatttaatataataaatttcttaaatatattgataaatatattatatatgttcattcttttattttcgagacaagagactgtaacccgtgctgccctcagattctctgtcctcaggcctccctaatgctctgatcagtggtaacaggaggggtgtgttcctgtgtgggtccactcttattctgatgttgtcattgctgagctgtgactccactcagaccttttgagaacctgggggtattctgagttcctaggtcctccctgcaaagtggggaagttagtgctggaactgggaaaccctcaagtcagggaaagggtcagtttcaataaagtacaacgtgagatgggccatgtggctttggattgcctatgtgggttctttcctccttaaaaaaaatagaacattctattttgcggctgctggtagaaagatggatgtagaaagaggaatatgttgctgcctggagtctttgttacatttcacttctgagtgtaaccacagtgaaattaaaatgtgtctggagtccctgccactgggatgggaagatgctggggcagagtcatggggccatcccgagggctcatcagaccagatggaggcaagtgtgaggatctgagtttaggtccccagagcccacataaaggctcccagagtcaaagcagagacctgagacgccctagagcaa

SEQ ID NO: 18876 - DNA, 1179 bp, Mus musculus
gaaggcttttaagctagcactctctgagccctggtatgaagccctgggattcctaggcaaggcctcagctgtcccagctcagtaagcctgtccctgccttaccttaaccatatgcaaaggcccccattgctctcctaggggctatcacccacccccatgaataaaagactgcttatcactgctctgtagctgggactacccagggggaccccagagttacagagaggactttccaccctgcctgggaagccaggagccaggttaggggagaggacatccagagagagcagcctggtgggttctggggatttcagagcataacttatccaatcagaggagagagtatggggtttgtctggagtccccagcaataacgtgggcaggttcctggttctctgctttccttccatccttgtagacactgggcgtgtcagtgttgtcaggattgtggattgttttgttctgctctttttcttttttctttttgtgggaaagggttttggcttgtagcctaggctagcctagaagtcattgtgtaactcaagatgacattaaatttacaaagatcttcccatctttacctgctgagaactggaattgcaggcaggagacctccgacctcctccccacaacacacacaaacacacacagagttactgcactgatattgcaacagagtatcccatctctaaagtagcgaatgctgactttagccgaggctcctcagcggtgggcaggctgtatgggcaggctgtaagtgttcttttctaatggctcaggtaatgctgacaacccttcttgaaagcttcaccattcctctgtgcgttaggcccagaaaaggaaagtcacatgctcatggtcccccagatagaaggtgacacagctggagaggacccttgtgtgctgtgtctcccgaggctgaagctactgatcatatgacagggcggtcttccaagtagatattggtcccatcctatagggtgagacacatcaccttcccagaccatgtggtgattttaagcaccttctagtcttatcccatggaaagtctatgtgatggggatgttttccctgccatagttcaggaaatgaacagagaaattaggaagcttcttcccactcaggcagctgctaaggagcagggtttcccttcaaagtatccattttgccttaagtcaa

SEQ ID NO: 18877 - DNA, 1560 bp, Mus musculus
ctatcttctaggtcagtctcagggatgccacctcttcttgggataaaataagaggcgccccaatggaagcttggaaactttaacagaaaaaaaaaaaaaaaacagttgcagtaagaaaagtggagtttgaccctagttctggccactccctggtctctgtttgctgtgtctttctatgaaaaagctgaactctgtctctgggatggacacaaccatctagggaaagccgttctgatgaagtttccgtctcgaaggcgctggcttgtctgtcattctatctaccctccctgatctctgctggcgtggggtagaaatcaatccttagaataataagacaagcctgctccgccgtctgccactgccgcctgtgctcactgagtggttcatctggccagaaaagcagactacacggactccagggacctgtacctataatccaagacaagatgtccagcaagggctctgtggttctggcctacagtggtggcctggacacctcctgcatcctcgtgtggctgaaggaacaaggctatgatgtcatcgcctacctggccaacattggccagaaggaagactttgaggaagccaggaagaaggcgctgaagcttggggccaaaaaggtgttcattgaggatgtgagcaaggaatttgtggaagagttcatctggcctgctgtccagtccagtgcactctacgaggaccgctatctcctgggcacctctctcgccaggccttgcatagctcgcagacaggtggagattgcccagcgtgaaggggccaagtatgtgtctcacggcgccacgggaaaggggaatgaccaggtccgctttgagctcacctgctactcactggcaccccagattaaggtcatcgccccctggaggatgcctgagttttacaaccggttcaagggccgaaatgatctgatggagtatgcaaagcaacacggaatccccatccctgtctcccccaagagcccctggagtatggatgaaaacctcatgcacatcagctatgaggctgggatcctggaaaaccccaagaatcaagcacctccgggtctctacacaaaaactcaggaccctgccaaagcacccaacaccccagatgtccttgagatagaattcaaaaaaggggtccctgtgaaggtgaccaacatcaaagatggcacaacccgcaccacatccctggaactcttcatgtacctgaacgaagttgcgggcaagcacggagtgggtcgcattgacatcgtggagaaccgcttcattggaatgaagtcccgaggtatctacgagaccccagcagggaccatcctttaccacgctcatttagacatagaggccttcacgatggatcgggaagtacgcaaaatcaagcagggcctgggcctcaaattcgcagagctcgtatacacaggtttctggcacagccctgaatgtgaatttgttcgccactgcatccagaagtcccaggagcgggtagaagggaaggtgcaggtgtctgtcttcaagggccaagtgtacatcctcggtcgggagtctccactttcactctacaatg

SEQ ID NO: 18878 - DNA, 1190 bp, Mus musculus
gtgactcacaggttgagaaccattgctctatgtagtccaaagcgcactccacagagcgtctagcagagtaagaatggactaactgtctggctcctgccttctggggagggagccccccttaggcctcagacctagggacttcctttcttttggtgggctttgcaaacgctagtggaaccagcatctctagaatgtgggatggaggtgagatgctggcttcagttatggagagagtgccaacctcagggtacctactcactgcgtgcttctcccctctcctctcctgtccatcctggtcacctttttccaggtatggttaggggagcacaggctctgagattttgtgccttggttggtcccaggaaggaagcatggttataggatggccatgggggggggggcagccgggagtcttctggttggtgcctcaattccaaggaaacttcccctggactcatatgtcttgtcttaaccttccagggctttttcaacagaggccacggcgcacctccagggggccctggaccccgccagcagcaggcaggtgcccgactgggtgctgcccaatctcctttcagtgacctgaaccggcagctggtgaacatgggcttcccacaatggcaccttgggaaccacgtggtggaacctgtgacctccatcctcctgctcttcctgcttatgatgctcggggttcgtggcctcctgcttgtgggcctggtctacctggtgtctcacctgagtcagcggtgacctccgggggactcatgagggcgggagtgttcagtaggattgactggactgggctttggtgcgacatcatgcacagggggagggagcttgggtgggctcagaaggtgtgatgggcatgagaccggctttgtagatttttctcccgctgcaggaggcagagggactctctgggccagcattgctgaaaaagagagtcctgtggtttcctggaatgtttttagggggcatagggcttccgctaaaaagcacaagcaggaataagaaaggcttagtatgttgtattctcccagaacacaaatcttctaccaggcgcaaacccggagctgagagcagctgggaactgtccagagttttatagcaatccttcattttaatggtgtcctttttttattggctgattttatgtataaggaaggatattgacattctatttatcatga

SEQ ID NO: 18879 - DNA, 1310 bp, Mus musculus
ttctgggactcagattcagcggcctgggcctcctgcatgctgaggcaggcgctctaccagctgagtgagctgtgtttgcaggcccccgctcaccctttctctagcacatcttcctaatttcagtcaacccccggttctcgagcctcatcttcctcctctgaccttctccccacgtctttcgcctttgcagcttctccagaatcatgcaccaaacagtgaaggaactgtcaccaaagtgtaccgtgtccttcctcctgtctgaagacggcagcggcaagggggccgcccttatcacagctgtgggcgtgcggctcagaggagaccctacgaacgcctaagagccaggatcctcccagcccccagcccgccacccttccagcactcctctctagaaccgacgaccacacaccgcccccgtgttccacccagcaagctccgctgggagacccagcgccggcacccactctgccgcagagggaggaaggggactgcagtaacggagcatcacatagaataccacccggagcgcgtgctgttgatgatctgatctctcgcctggacccctcatccctgccctgccactttgcatgattcaagttcgacctggccatgcattgcccaagcgtgaacgtagtggcacccacgtctaccgcaggcgtccagccaggaaagagcgacccccctcttggactgtcttctgggcccttccaagcccatctgtggagtcgcctccctccttccccccacccccgtgtgaagtgtgttatcaccagcagacactgccggactcctgcccacaggggcgtggcctgaagggcgagtgtgaacatggcactgctgttcccttccccctccctgcacccgccgcagcctgccatcccatttggatgtatcaatgccactgagttgtctgtccgtccgtggagccagtcctagccacattattgacagtcttgcattttgttttgtctcgtgatggtggtggtggtaggggtacgcttaggtgggcagtcctgtggggaaaacatcttgtctccatcttgctaggaagaaccaacccacaaaacaacgccatcactggaatctcccatcgctttagtgagccattgtcgtatgtctagtaaactttgtactgattcaaaagtcggagtggtgtttccttggggtgggggcaagggcttagcatatggtgacagccacgctaggggctttatggactcctgggtggggagaaagcttcaaagctccccaggtatgcctatagtcccagcacttgggaaatggaggagtgagttcaagtccctccttgg

SEQ ID NO: 18880 - DNA, 1197 bp, Mus musculus
cacagccacctgtacctcgagctccaggggatctgacacctctggctgccgcaggaacctgtaactcatgcacacagacatacacaattagaagccgaagacaggagagatggctctcaccccttctgaagttcacagtgtgattgtcagctcgcacaatcaggcaagtcacagcttcatatagctccagatccaggggatctgacaccctcctctggcctctatgggtacctgtggcgtatacatagacacacctacctacaaatgtgtgtgtgtgtgtgtattcttttaatttaatctatttagaaggggaataaacccctgggatgccattcatagacaagcagaatgctttggaccggtccttgttccaagggttccatgggcctgctccatccagctcactgggcttttgtgctccacagtgaccgattagcgctgctccaggtgcgggccatccttcagcagctgggtctaaacagcacgtgcgacgacagtatcctggtcaagaccgtgtgtggggtggtgtccaagcgggcggcccagctgtgtggtgccggcatggccgccgtggtggaaaagatccgagagaacagaggcctagaccacctgaatgtaaccgtgggcgtggacgggacgctctacaaactccatccacagtgagtgtggcttcctctcttggctggggagttggttgagggtcacagggtgtcggcacagttcctcacggaggcatagtagcctggggcatttggagacaggagcctgagacggtgagtagccctagtactttggggagccagaggagggcttcagctgggccagcctgcaggagtgaaactctccctgcttccctttggccctctgaggtgtgtgtatgtttgtgctataagtgtgtgcactggccagctgtgcttggtaaaaggaaattcagaacgaggcagaacaggagcagggtaggcccgggctctgtggcagggagaaatgtttttatcagaatcataagccctgtacttgagcccgctcaaagctagggtcttagggacagtgaccacatctgaacagaaaccctgtgcattggttagcattctatagaggaagggacctgacagaatgaatctatattcaaagtagatccatcattccagctagtccaacaatggctgcctcccaacagaaaggccaagaatcttatag

SEQ ID NO: 18881 - DNA, 1117 bp, Mus musculus
gcctgacatccatcatccccaacctgctgtgtctatggcaaccttcctgactgagaaaagagcaagccaagtacaactgtttgtcatctttttttttttaaaggccatttgtaaaaccaaagtaatacaaaatgtaatgtccaatctaagtcccggcctatgcaccatcccccagggatttaggcttgtcagcatctctccttggctgctctcccagaggactggggttcaattcccagcacccacatgacaactcacaactgactggaactccagttccaggggcgcgatcctacattctcacacagacgtacacgcaggcaaaaccaccaaagaacataaaaaacaataaaccattaaaaggaaaacttgcctcagggaaaccctttaagtggacagacagacagatccggctctatcttcattgtgacctggtaaaggccatttgtcactgagggtgtctgctttgtccctacattcactgccttcaattcacttttccattctccttctcaggccgtactgatcacgtggacaaagcggttcaaagccagtggcgtggaaggggcggatgtggtcaagctgctgaataaagccattaagaagcgaggggtaatttctcttgggttgtgcatagtctggtactgggaggaatctccatctttaaatggtttaagagtcatgttgtcaggtgtgaggggcacggagtgcttaataccctagcagagaacaagaatcctatccgagggagaaagtcagatgtgagctctccgaaatgccatcaaaagatacctagtctgcagcagagaccatccccgtggtcttagagcagccttctgcatgcacccggggggaggggggggagcgggggggcggggggggggaacggacggactagagggaggagccgccgtgcgcatgcgcatgtgattcttaggtgctcctttggaagcttgcccaggaatgtagctccatgagtaaaatccactccctgaagaatcctaagccagataattaaggggaccttgccgtttccataatgtaatcactgctgtctaatccaattaattgagtcctggccgcagtgaagccacccatcagcttggttgtgtgagaa

SEQ ID NO: 18882 - DNA, 1892 bp, Mus musculus
tctaggagatcatcctgtggagaaaagcacccgagaaactgagaaaacagaggacgaactttcaccagcggtttgaatctccagactcgcaggcctctgcggagcagcctgagatgtaagcaggtgggcagagcagcaagtgcaagaaccgggccaagagagcagctcagctggctgacgacagtcgcagcgtgcggacatcccaactccacgtctgctagtcttccttatcctagagtgctgcgtttattttacagtatgattaaaggttttgtgtatatacattttaaaaagtgcttcttggaaacactggagaattcctaagctgccttttttgttttcttttttactgcacactgataagcactcagaagcataaacattaaggattttcatgtgagtagactggtatttgtaattttgctttctttatgcataatgttgaaaatccttttctctgttttcatgctaatgattacctcttattctctatgtgcaaaaaattaaatatttttgttcaagtaaaatgagaaaaacctgagcagcccttatgtcctacaaagttttaaggcatggctcctcagtatttttgagaattgtgtttatttttacatgtggatcagaaaccaacctggtgttacatggtaggcacttctgggtctaccattcacagcctcctgaattttaatctttgggatctctgaggtatatgaaagattgtcaccccagggatgacatggtttgtcatcgtggccctcttgccccttattgaccacgtttgctatgactttctgtatcatcatgtaggttctgcagtgtggagttgacacattggcattttagaacttgttaaacctgtatcattttttttccataaagactttgaaacatgtatatattttttaatttaaggactactttccatgtgtatgcaaatcgtcacctaggaatgagagagcttgggagaaccagccgaagtgtccatagccggacaatttcttgttaactggaatattggctagttcaaacttgacttcacgtagtctatttaaaaaaacccgaaccaaacagaacaaaaaacactaaattcataccattctctgaaaagaaggctgcagtcagctgagcacagacacacaactgaggcgtatggggcaggaggaagcctgtgtgggggccactctcactcagggcttgttggtttctgtaccagtgttccttgatacacctcagtacaggtttgtcagttaactttactttctaggaagctcaacagcccaacttatgtttccttaaacctattttttactatgatggcactttgataaaatggccagcaaccagccctggccaaaggttcacataccacgtcctggagcagctattgtcaatgtgggtttctaaggacggccatgttctccttcatgtaagtgcctgttcagagtctcaaagtttcaaaatgccaaatattttcatggtcacttgcatgtataatctaggaaatattcaaggagattttgaaaaacaattgtatttaaccagcctcaagttgtgcaaccatgatatataaaataaataatttgaaacagaaacttaagtttgtagtttaaataaaatgactttattctcaaatcttgtcattacagcattgcccagtggttaggaagacagtcacaacagtgaacttttattagtagtactagcttcaggtttgttaaggttttgttttgctttgtttttttaggttttatttattttatatgtattgctgttttggctgcaagtatgtctgtgcaggcatgtgggcagtgcccaaggagggcagaagagagcattagatctcttggagctgaaattacaggtgtttgtgagcggccatgggggtgctggga

SEQ ID NO: 18883 - DNA, 1192 bp, Mus musculus
tcaaagatgtcaggattaagggtgtgcattactatacccaacttaaagacagttcttgtcaaaataattaggtattgctgtcaaaactgtcagttccataaaaatgtcatagaaggagaaatttgagaccttgttagatttaatcaagacaaagcgattattactttcattggcagttgtttcaaagtgacatttttataactttttgttgtttctagtttgctttattagggcatctttactatttgtctgtagatgaggacttgatgcttaatgatggtaaaattctttgacctggtggctctgggctgcccacactgaccagtgctttttttcctgttacaccactgaataaggtgtgtgtttagtctgagattatagttcatagctgagctgcttaggtgagggaagtctgtatagtacttgtcagcagtatggataaagactccattcttctggcaatcacaaaacttagaaacttggtcttagatcaacacaaaattcagtaacaaaatgtccaaatgttttgctgtcttcctgtgccattgtaaatggtatatggtacattgacacatataagttataaagatagcactatttacttatacagaatatcatatgctgacatgtgagctttgagactgctttgtttaaagaaatgtataaatagacctgttttcccaacattcagttttcctcactttttaaacatacagcctcacctatttctacacaaaatccttattcacagtaaaggggaaataccaactttaaattggagagtagtggtgtacatctttaatccaacatgtgagagacagaagcaggtggatctctgtgagttcaagaccagcctgttctacatagtaagttccaggacacctacaactacatagtagatgccccctttcccctcccaccaataaagagcctggacaactgcccttaactgagtgattggaattagcagcactaatgttgaaacaagctaggaatggcaacacttgtgagagttaggggagtgtaaggccatccttggatttatagggtgcttaataccagcctgggctatatgagacttttttcaaacaaacagaagcagacgttatatgcttcctaatatagacacactaggaaaagtacaactttataatgttcttgctaaaaatacaagagcagagcagaatcctag

SEQ ID NO: 18884 - DNA, 1170 bp, Mus musculus
ctaccagctcttcctagactccctgagagacccaaacaaagtctttcctgagcacatcggggaagacgtcctccgcccggccatgttagctaaattccgggtagctcgtctgtatggcaaaatcatcactgcagatcccaagaaagagctagagaatttggcaacatctttggaacattacaaatttattgttgattactgtgaaactcaccccgaggctgcccaggaaatagaggttgagttagaacttagtaaagagatggtcagtctcctcccaacaaaaatggagaggttcagagccaagatggccctgacctaagccttggtcaaaggaaagagacgtgcagcttgaagccactcccctcccctatagcaaatgaggcccagccccacagtcaccttcgccagggccagagggatgcactctgggctccagaagcaggcaggtacccgagtctatgctaggaccttaagcaccataaattaataatttatacctaattatgtaagttgccttgctaaagtgacaggtgttttgcattttcgatcgcttgttttcctgtttaagtataaacatctcctgcctagagttctaaatgttaagtccttgctgacagtacttgttagatttcatactaggaacaacactgggtagtgtacctggtagaagagcctgttgctgtgttgaatgtgagaaagtcacttcagatgtcattctttgtaaaatacttactttcttaaactccaaataaatctttcccttttgaaaatactaaaaacttaataatgttgtaaaatggcttaattataggactgaagaacttgcacataataaatttacttgtttcaactagtaattacttttattacctcttttttccttgtaagaatggttctcttttttttttttaagatttatttattatatttaagtacactgtagctgtcttcagacaccagaagaggggggtcagatcccattaccgatggttgtgagccaccatgtggttgctgcgaattgaactcaggacctttggaagagcagtcagtgctcttaactgctgagccagctctccagcccataagaatcgttcttttaaaaaaaggtgtgtgggctggcaagatggctcagcagttaagagcactgactgctcttctgaaggttctggg

SEQ ID NO: 18885 - DNA, 2614 bp, Mus musculus
ggacctccagacggatatcgaggccgcatgggtcagcgtgatggcagccgtggtgctttcagaggacagcggggtggaagcaggaacttccggggacagggacagcgaggaggaagtagaaacttccgaggacagcgaccaggaggtggcaacagaggccagaagcggagttttagtaaagcgtttggtcagtgagtagaggccagaagggactgttcccactgtggaccccagggtccaccctgctgacaaagcccgagtgcttccttcctttttttaccacttctcagcgccccctttcttgcagagaggcttctgaactgtccactaaccatcacaaattcttcattttgaaaaaggataagaattcattgcatcgttttccaacatacttttagatttacaaagtaaaaccaaccatggatctgcctatcttggtgtgtcgatcttgtaattttatctttgtgtgtgtgtgtgtgtgtgtgtgtgcactcactggggcctaagctcagaacctcacacaggcagagtatacacacgccctgcaactaaactgcatctctagtccctatacatgtgtcctactcatccttcaaagtgagtccctaggggatgcctcagtctctggaggattgcaagagccagggcggaatgtgtttgtttgcattccttggcatcctggactcttgcaaacaattgctgtgttcatatgtgtctgctgaggtttgatgctgagcagagcttttcaagagccgcttcagacttagctgattgaatagtttgtgcccggctctgggtgttgagcgtagaacagacagcagattcactccagtgtcttcacacactcattaggtgttttctgttccagtgaagtctccagacaagggtatatagaaagacatttttataggacccagtgtaaagttcaggcccaaatgcctaacatgtctaggtgtttttgtcagtaatgagactggataaatggtatgtaagtgcttgcaccccacttttggaagattaatttaccaagaagcatggggttcagttggtgttgctgacaaatatctcaaaaaagccacaaaggtgtctttgatcgtgacaggtgaggaggtggagaagcgtgctttgagtggtgagcaggtcctgactcgtggctcctggaggggctgtgtctgctagtgtgcagtctggggctgttaaaggggcacagtgggacaggcttgttttcagtggcttagatcttaaaccacaacgtaaaatctatttctgttaagcagcttctctgaaaaattatcacagctcagagagcccttctatgacaagctgtgccattttaagctcttactttgagggaactgaagcatagcccctgcctactgctggtgttctttatttgggaatcatcccgcctagcacagaagcttgagtggtggggtcctctagctgtactagagattctgcgcagggctcttagaacaggcttgggaggaaagtcagaaccacgcactgtcattttggtttttttttaatttttcttaattgtttggatcaactaagaccttcattttagtatggtccttacctcctaactggcctttacctggcattaaagggctctgataaccaatcagctcccggtagctgaagcagtgcccttttttctatttaaattcagttttccccttgaactctgaccagatggctcatcctctgtgctcaggatttgttgggttttgtttttcttgttttctttgttgataactgtagcttgtaagaaatgtgggcatggtttaatgaagcatgtcactgttgggataaaagagtttgccagttcaagatgatgaaaggacatactggctctgcttgcaggaggaaaggctaaaagacattttgaattaatgggttaccctatagaaaaatgatctgtcataaaccaaacagtgaaggggaagaagggaagaattccaattgacacaatttaaatgaaacatgacttttcaaacaaatgaagtttcttttggattgcagaaactaagcaatatttatatgtataattcaactattatttggtttaaatgggcttgttgggaaatgttatcatttttactattttctacagagaaaatattttccactttatcaaataaatctggactttgaaattacagcctgtttttatgttccagctgtctatgtatgttttcctgaaactgtacataaaatgtttttacattaaaatgaattgctgtataaagtactgcattatgccataataaagataccgatgctttatatttagttcttggtggcttttattttatagcagtgactgctaggtctgtaaatctagtagcttggcttgccttttgtgtatactgcattaaagcagatcaggttataacggggagttagccttggctaaattgtcataaaaatgaacgcaatcctatgttaacataccttcactgtcttcagacacaccagaagagggcatcggatcccccattacagatggttgtgagccaccgtgtggttgctggggtttgaactcaggacctcttggaagagcagtcactgccatccccccagcccttcagtgggccattttctacag

SEQ ID NO: 18886 - DNA, 1189 bp, Mus musculus
gtctgtgctttctggattgcaccatctagcggcctgatttcagtctttggaaccttgtgtttgaattagataaacaaagtggttacgttcagagttcagccactagtgggcagcagagcaatctggtgcgtcatcttgaatctgtttcatcttaggctccggtacctagatgaattcatttcacccaaagcgggcctgtacagtagttattgcaggttgtattttaagtggatgaaggggcatagcatgcacaggcctttcttgtctgttatttggtttcctgcgggggtgtgggaaatagtgtttcctgattacattagaatgcaatgaaaccagatgctctttggaaaaaggataagcctggaggaggtagaccatgctgctcctgacttgggtttatttagtttccttttttccctctaagccatggtggcagcagacagccctgtaaggtctgcgtttacttcctgtaccaagcattagatgtaagagttgagaagggagctgcaatgtccatctaggctttagtaagtgttcctttctctcttcagcacctggcgattaagtgtcactggacagaaagggcagcggtgattggggatgtgatccgagtgtacagtggtcatcaagggcgcacgatcatcttctgtgaaaccaagaaggatgcccaggagctatctcagaacacgtgcataaagcaggttggtccttttcatacctgaagcctgggtcttcagtgagtttttatcttggactctgctttcattctggatttcaattatccagtgacttccatgttgtgttagattaggggaagtgtctctgatggtcagggtttatgaaatctaccagtcctgcctcatgggtggtggttcactggtaaagctacacctacaaagtaggtatagtctcctttgggtgatattctcaaccttggagagtgtagttagaaagagttgatgtgggctggggagatgacccagcagttaagagtactgactgcagaggttctgagttcaaatcccaacaaccacatggtggctcacaaccatctgtaatgggatcgaatgcccacttctggtgtgtctgaagacagctacaaagtactcatataaataaaataaatctttaaaaaaagaaacagttgatgtaacagctgagagctacaaacagtttgaagattttttcc

SEQ ID NO: 18887 - DNA, 1196 bp, Mus musculus
caggcgcagaggatgagcactctggtcctggtgtttccatagagtagtcacccttctgtgccctctcactttcttatgcccactcagccaccccacaggaggtgcctggtttttagtcttgagtgagtgactgcaggaaagaaggctgagttcaagaacattccgaactacattctgatgccctgtctcaaaacaaaccaaaataatactgtttctatttctctaagagtgtcacttatggtctgaaggcttgacattttctgccagccgaacaggaagtcgttcttgtgccactgtttcctggtggatcattttcctattgtgttagtgcactggcccagccattcagggaggggtggatgccccttgttgctgtcattaactttgtagctgtgtagtaatagtttagaataaaaagtatttaaatggattctccatggttgataaaaggagtttgaaaacaaggcatctcttttcgttggtatttttttacagttgaacgaatgcggagtgggattgatatcctggttgggaccccaggtcgtattaaagaccacttgcagaatggcaagctagatctcaccaaacttaaacatgttgtcctggatgaagtcgaccagatgttggatatgggttttgctgatcaagtggaagaaattttatgtgttgcatacaagaaaggtaagccccaaatttaagggactggtggaggggacctcaggaagggtcatggtgaaattgtcttctaggagataataaggacactcgggaaaacttgttttttgatacagggtttcctgtgtagccctagttatcgggaattcagtctgctcaaggctggccttgacctcaggctctcctgcctctgcttcctgagcactagcactaaaggctcatgccactactacctggctaaagtttggaaaaattaaaaaaaatttttttcttaacttggaaattgaaaaaaaataggttatataattcacaaaagcttgggagaataaaagaaaaaattcgtattgtgccagcttgatcactgttcctaacagttttcagtgtatgtactgttaagatactaaaattttgtcaagtgatttattcaaccacctacctcgttttataaccgtcactcataccagagggttctggtcacagttggagttctgcagtacctggagttggttctataacacaga

SEQ ID NO: 18888 - DNA, 1186 bp, Mus musculus
gagaagacaaaatcaaagaccgaagaagcaacagaaggaatggaagaggccgtttcctccaaagcaaagaaaacaaacaagaaagggccttctgaggatgatgtggatccccctaaatccaggaaggccaagaagcaggaggaggagcctcaagacgacactgcttctacaagcaaaacctccaagaagaaaaaggagccccttgagaagcaagcagactctgaaaccaaagagataataacagaggagccttccgaagaagaggcagacatgcctaagcccaagaagatgaagaaagggaaagaagcaaacggagatgccggagagaaaagccccaagctgaagaatggactctcccaaccttccgaagaagaggcagacattcctaagcccaagaagatgaagaaagggaaagaagcaaacggagatgctggagagaaaagccccaagctgaagaatggactctcccaaccttccgaagaagaggtagacattcctaagcccaagaagatgaagaaagggaaagaagcaagcggagatgcgggagagaaaagccccaggctgaaggatggactctcccaaccttctgaaccgaaatccaactccagtgatgctcctggtgaggaaagtagtagcgagacagaaaaggtgagtgtgtgcctgtgctctctgtgtgtgtgtgtgtgcgcagacaacacttgcagggccagtgcgagggtcctggggtgggacttgggttgtcaggcttggggataaatgctttccttgctgttgtcctggctgctggcaaagctgtactaggctgtttcattgttagagagaaataggtagtaactaagcataattgcaatcattttaaaagtgtttgggcagtggaagtcgaacccggggccttgaacatgcatgctatgttaacagtagaagaaaatttgttatatcagcatctctttggggtatgtatcagctgcagaggggctctggcctccatatgcaccagcatgtatgtggttcacaaacctgcaggtaaacacccatacccatccataaataagtatacagagtatacagaaactatagcctgtcatgtcaagacactgttcacaaatgaggaggtgtgttgaagttcagggaaagccttgctccacttgctaagtctgaaagcagctggaaagttccatctgggtcc

SEQ ID NO: 18889 - DNA, 1166 bp, Mus musculus
agattttcagatgaattctccccatctcataagtcaagaagaaaagacctgccaaatggagatgtggatgagtatgagaaaaggtcaaagcgagtgtcatcctcagaaaactctcacaagtcaagcgataaagcagaggaggtacacagcagactattgcatgtgttctctttgaaatgtaggcccgcttgacctgtgaggttcattaggattgattctgtgctgttctctgcttcgtggcaagtgttgctatttgaaccatagaaccagtatggctgaaaccccagcctttggctcttgtttctctcattgtgctgtccttaaagtaaacatttattttgtgtagaggtcagaatatagcttgtgggagtcatttttccttctgctgtgtaggtcccaggaatcaaactcatgttaagtttggcagcagctatctttcactgaaccaacttgctgctaccccacctctttatctttcttggggtagaatttcactggatattaaattttgggaagtatagtagactctacttcaagacctacttttgattattcatttgtttgagatgggggtctcatagtagcccagacttgtctcaggcttgccaggtagctgagggtctttaccctcctaatgctgacttccaagtgctgagattgcaggttcctatcaccatggtgagtttttattttttatttttgtttttgttttatttctggagatagtgccaccatgcccagttgtgctgggtttatatctgctgtatcttttagaatagttactttcttaagtatatgagtattttgtttgcatgcattgtgtacatttttgatgcctactgaggccagtaggagggtgtaagaactcctggaactggagttacaaatggttcttataggctcaaagaaaggattcacctgcctctgcctcctggtgccaaacctggctagctccttatttgtttttttcttttttgatatttatttatttatttatttatttatatgctgggaattcaacttatgcttcctgagtgctagtattaaagacatgtactattgttattgtgcctggattctttccttgataaaaacatatactcttcaaatctgataatagctagtaatttaagccctcattagggatcagacctgggatagtcagt

SEQ ID NO: 18890 - DNA, 1221 bp, Mus musculus
atctcaccagcccctggttttgtttttataagatatacttatttatatgagtacaccgtagctgtcttcagatacagcagaagagggcatccgatccatcccattacagatggctgtgagccatcatgtggttgctgggaattgtactcaggacctcttggaagagcaggcagtactcttaaccacgagccatctctccagctctttgtacagttttaagttataaatctgttactttgtttttgttttcttgaaataggtctcttatatcccaggctgacctcagttggctgtcaccaaagatgaccttgcatttcttgtcctccttcttccaatttcgttgtactgcgattagagtcatgttccactatgtttggtttataaagtgctggaaatctgtgtcagttaactagaggacacacagaaaggcaattctggcctccatcacatttcgagtgggtgtcatacatgcacaacataccattttcctctatcactcatgtctggcagctaagttattccccagaccctgttacctgttactttttttgttttctttaaagaatacgaggctagggaagtggctgagcatgcaattaagaggaacttgttggggctggtgagatggctcagtgggtaagagcacccgactgttcttccgaaggtccgaagttcaaatcccagcaaccacatggtggctcacaatcatctgtaacaagatctgactccctcttctggagtgtctgaagacagctacagtgtacttaaatataataaataaataaatctttaaaaaaaaaaaaaaaagaggaacttgttgctgttccaggagcctgacccatgtcagtttccattacccatgtctcaaggctgcctataactagctcactccaggtgctctgttgcacttttttgactacattggacacatgtgcacatacagatacatactcatacacattaataaaaaataaagatctcataatgtacttgaatgccttcagtctcagcattagggaggcagggacaggttcaaggccaacatagtctacatagtacgtttcaagcccaagttacaaagtgagaccctatctaaaacaaaaagaaaaaaataaaaaccaaaagaaccctaactcaccaagaacacttcaattgacaaattgtcttccttaactaaagaattataattgggccaagcttggggatacacacctatagacc

SEQ ID NO: 18891 - DNA, 13647 bp, Mus musculus
acagagccctcaggcatcaacctgtctcctttaggcagatcagaccagggatgtcctcctggcctttggtaacaacagactcttgctactgtagggcaatggacccagatgtggccccagtggcaccaccagttcctcacatcagaaaaatccagtgctccaagcttagatttctgctcttctggctagcagaatgacttcctagaacagtgtgagctcctaggtccctcgagctctcccttctgctttccagcatggtttggaaagtatgtgtcaatattcttttaatgaatagaaagaaaaattatatgttggtctttaagtattcaaggaaaaccatataattcatcatgcctgaatcaaactattttgatgcaaggaaagttggagatagcataaaaatcgctggtggcaaccaagctttacattttattatgtaatttatattggactgtaaaatgagaacaatccccacaattcctgcagctgaagaacaagtctaatgaagtacgtttgacttttagataagtatataaaactttgctaaaggatatacagtttctgtaacctgaaacatggaccctgcttagaacttcggtaatgggaacttggcaggctagcccaggaagactgagttcaagcctagccaaggatacatgtgaagatttcgatgactcaaataaagccacgtagatgctgggaaatgaacggttcagccctttctgctctttcaggcgctgtgaatttctgtgtgcatacaaggctgatgaaaagagcaaatgaagccctgagggtcattagtagtgttctccagtataaatgctaaaaattgaggaagactgagaaataatactaagaagacgattaatgcaagaacctaggttaaacatatcatgttggctagtcttgaacccagtcctcctgggctagcatgccaagtgttaggctcacagtaatgcttatttaaaactggataagaggttacatgcttatctttatagcttgctttgcattcaggaatcttgtctgtgttcattgcaagtgttcagttctattcagtaagtaagtgtgccttttattctatgttggaatatattgttcactatatagatttactatgttatactttttctacccactgtattatggtaagaatgacttatatgtccaccacatatggaattaattgtagtggagtttgatacacgcttgcaactcactttaacacaaccaacatagtattttaaagttacattatatgtattatctttttctataggaaaaacagcttgaaaagaatttacaagaattggctacagtattagctccactttacaagcagatggctccagttgcttatcaaaatcaggtattttttttttagaaccttcacaatgaccttaagaatatttcaaatttctatgtcaaataagttactattcatggaattttttctaagttcctcttaaatatgtataaatagttgtaagtttgtgtttatgcttacttgcctgtgtgtaaacacatatgtagaccagaaattggggacgaggatctttttttagcattctatgtctttgagacaggatatcttgctaaatgtggttctcacacttactggtagccctcaaaccccagtgacgctgcttctaccctttttgggaaaaacatacacagaaagctaggctttctgtataggtgctaaggtgcaaactcaagtatgcaggattggatgtcaaacatccttagagtctgagccctctctcctggcctgaatgatcttcaaatgtacaatttcttattgctatctttcaaaagtactcaagtaggggtttcctgttggttttgttgttgttgttggtggtggtggtggtggtgttttgttttgttttattttaataattatttatttattttatttatatgagtacgctgtagctgttatcagacacaccagaagagggcatcagatcctattacagatggttgtgagccaccatgtggttgctggcaattgaactcaggacctctggaagagcagtcagtgctcttaaccactgagccatctctccagccctcctgttgggatttgagagagcctcatatgctactgtctagcctagacttctaagtgtcagtgactgaattctgccttaggcagaagtggggcattcagttgtgaggtagtgcatccgtatcctttgggatctgcagaactgccaaagataaacaaaactcttggcagggacagacctaggttggagtccagcctggtgaacaagagtcctagtttctcaaagatggctcagtggttaaagagtacctgctctgctggggttgatggctctaaacttttttaatctcagtgcttggaaaccctgcagaaaaagacatattatttctgagttcaaggccagcctgttctacacagacagacaggggctacatggagaaactctctctctaacacacacacacaaacacacacacacacacaaacacacacacacacacacacacacacacacacacacacgaacttcttgcccgcatattctattcatattttttccattttatgtacagtagtattttgcctgcctgcatgtctgtgtgagaatgtcagctcttgaaatctgggacatttgtgagctgccatgtgcgtgcagggatttgaacctgattcttaatggaagaaaagtctatgttcttaaccactgagccatctctccagcccagcacctctgtatctgattgggtgttcattgtgtttgtttggaggtggagagttcatggctgcaactggtttctaactcggctcccccaccacagcacagcagcaagtgccttcgtccactgagccatcttacctacaagaccttgatatactttaattgccctagctgggtacttccacatatatcgagacacaaccaaactcacacacagaatagtagggcagaaatcttgcatggcttggtggttgggttatttaggatgttggctgatattttgaagacatggatttggtacccccattcacgaggtcactcaaaactgtcccgttttgtcaccctcttccggcatctgaacatgtgtgcatgctgtacacagacccatatgcagacaaaaccacacaatacaaatcttattttacagttttgacatttatttctaaggtggaatatgaagaagttgctggagactgtcgacttggaaatgaagaggggcgtcctttctctggtgtcacctgttgcatggatttttgtgcccattctcacaaggacattcacaacatgcacaacggaagcaccgtggtatgcactgagtactttaatcctttatgctttaggtgtgctcctaaaatgtcattgtattcaaaaagatttttgattgtaaggtgtgtgtcttagttagggtttccatctctgtgaacagacaccatgaccacaccaactcttataaaggacaacattcagtagggactggcttaaaatttcagagattcagtccattatcatcttggcaagaacatggcagcatccaggcagatacaatgctgcagaaggaacattttgatctgaaggcagccaggagagtatctcttttgccctgggtggaacttgagcataggacctcaaaagtctaccctcacagtggcacacttcctccaacaagaatctatgggggccaaactattcaaaccactagagtatgtatagaaaaccatacatacttgttgttggacaaggctttaatcccagcaatcagtatactaagactcttggatctccttctaatagatactttcaaatatatgagtctaaggggccaggttgttgttgttttgtttgtttgtttgtttctcaaaatcaacacacctgctgtagtttggtagaacaggccttattcctctcctgtccctcaggtgtgtacgttgattcgagcagatggccgtgacacaaattgtcccgaggatgaacaactccacgtcctgccactataccggcttgcagacactgatgaatttggctccgtggaagggatgaaggccaaaatcaaatctggggccatccaagtcaatgggccaaccaggaagaggcgactacgttttactgagcctgttcctcgatgtgggaagagggccaaaatgaagcagaaccacaataaatcaggtactgctggtctcagaaggaagaggatctctgccagcccaaagggagccccaggtgccaaatagcttctgtggttgttttcacgtttgttgggtgtaactttgtgtctatgaactaccagtgagatagttttttgttttttgtttttttgttttgtttttcaaggttcacacaacactaagagcttttcatcagcctcatctacttctcacctagtgaaagacgaatctacagacttctgtcccctgcaggcttcctccgcagaaacatctacctgtacgtacagtaaaacagcctcaggtgggtttgcagaaacaagtagtattctccactgcacaatgccttctggagcacacagtggtgctaatgcagctgctggggaatgtactggaacggtgcagcctgccgaggtggctgctcatcctcaccagtctcttcccacagccgattctcccgttcatgctgagcctctcactagtccatctgagcagctaacttctaaccagtcaaaccagcagctccctctcctcagcaattctcagaaactggcttcctgtcaggtggaagatgagcggcaccctgaagcggatgagcctcagcaccccgaggacgataacttgcctcaacttgatgaattctggtcagacagtgaggagatctacgccgatccttcctttggtggcgtggcgatagcacccattcacggctcggtgctcattgagtgcgctcggaaggagcttcatgctaccacctctttgcgctcccccaaacgaggggtcccttttcgtgtgtcccttgtattctaccagcacaaaagcctaaacaagcctaatcatggttttgatatcaacaaaattaagtgtaaatgcaaaaaagtaacgaaaaaaaagcccgcagaccgggagtgtcctgatgtatcccccgaagccaatttatcacaccaaattccttctcgagttgcatcaaccttaacccgagacaatgttgttaccgtgtccccatactctctcactcatgttgcgggaccctacaatcgttgggtctaaaggcttctctcatgtaatgcctttgctaatgtggtgtagtgggtatttttgtttgtttgtttgttttcttttgtttttttgttttttccggtgctgttaaaaagaaagtcattctgttgtttactgtagctttgtttcgcccatttcaactccgacgtaaatattaaaaaaaaaaaaagggtgaatacttaactgtgattacattttgagaattggtagaaggtgaacattttcagcaaaaataaactttttatagttttaaatacttaaaggaacatcttggttaggtgttggccatgctagaaccatagagtctggtgctttcccccgggtttgtttactattcagagggtttataacaggttcctgcaataagaagtaaagaccaagatgtagtgttaactctacacagttcctggtgctttaaccacatcaacacacggagtgatgagctgagtgattgttttctggtgccattgctcaagcctcttccaatcattgccatcgtgtctgcacatttctttgaagtaaaccaatgaaatgctttttctcttaaaacatttctcctatataaagtagttctctattctcatgatggttggaagctgttcgctaactataaatgtatatattttaaaaagcactttctacttttaagagtaacttgaaatagtatagtagcagaatcctattgtctattatgtgtgcatatttgaataccagagaagtcatttgttcttgctctgtagagtcccatcccgttaacctcagcctgtactcaaataacacacggcttctgttctttacttatagaatagagggtctctaaaaaaaaaaatttaaatacaagatgctaccaatatcaattttccctctttaactagaaaaaatattgtcttctgaagtcacctcgtcaattaactatatgacccaattacaggtgttttcaaaggaaaaggaggcaaattgggatcagtcaaaagttcccagtgtttcaagattagaaaatacataattaagagacatgtccttcccaaatgagaaggaaatattctatagagataattgaggggacatgcttgcgttagcattgtcacccttaccctggagttccatggtaatattgagagccaaactattcattaatagtgccctatcaggtttaggaaaatgggaacccaaacttgcttagtaatcctctattgaaggtcacaactgaaatcagcatcctgattactttgtgttccagtgttctgcccattgtttaattgacttctttatataccaagaatgatttccccaaacaaaaaagcctagaaccaagcgacctttctgagagatccaaatgcacaggtgctattgccattgcttgggttgaagtctttggatctggattaggattcctgtccttcagggaccctgatggtgcttctcagagatgccacaagaagcccacaactaccacaatcttggtgcaaatgtaagccgttgcagtaaactccttagggaataacttattaaacacaatacatggtgcaaagtgtcagcctctgactgaggcacgttcaggaagaggaagggactgtaaataagaacgtgtccactgactttcatcccatcctgcacagggagctggatgctcttgggatccatacacatgtggatctgagttagtgttctgtgtgccttagagttctgtttataaacctttttttaagtttcttatgtcggtatgtgaatgtggtcctttcttgctgtgtctgcttcagttaggtatttatttgttagtgtagaccatcagaaatcctccctcatgagttaacctttgaggtttcagaccttatctagaaatcattttcttgccattatgggatagaatcgcctcttcctgcctttatttgtccattcatctgtccgctcgattagtttgttttcccttgaattaccccttatcacacaaacttataacgaatgcttggaactgctttctaagaacataacaaactacctataaatgaagagctacagtaatatatattcaagctgatgtgtttttaatgataaggccacattcttggtgcttaatcagttgaatacaccaatgttgatgaatgggactgttggtgtttatgaatctagttgcagtttgacaaaataagtacatgaaactaaccactttcaacaaaaatgttgtcattccatcgctagagttagcatcagagatggagtgcctcagccaacagccctctgtggggacttcattatattactttcatggtctctgatgtgctttgtaggcatcctctacttggttggtgttctactgcaccatctgctggctatacacggctttaagaatggactttcttaaaaacaaaatacaaccggacagtggtagagcatgcctttaatcccagtacttgggaggcagaggcaggtggatttctgagctcgaggacagccagggctacacagagaaaccctgtctcaaaaagacaaaaagtaaaatacattggtttgagatgacagtcacttatctgacaatctttctacacctctactgttttaattagattgcgttcctctgacctcgtttgtggagctctgactaagactgttctcgctgtgaacattggatacattgttatatgacttccacagtagccctggtgatgctacaattcattcctgcctgctttagaattagacatcacctgccctcttaaaaccatttttggtgggttttggttttatgagactggatctctatgtagttccggctgtcctggaactcatgtagcagaccaggctatcctagaattcacagaactatcttcctgctcctacctatgtgctgggattaaagttgtcctcctccactctcctagttcttttgttcttgtgcttgtcagcctcgtgtatatcctgtttccagttctctacaaagtaccaaataagaccaggtactaaagagactgttatcactgtcattgaaatatagtgtttggacttgaggataatagaggcaaatttttgggaacaagtccacatcttaagtgatttcccaagcataacgttgcatttgtgagacacagaacttcattaggtgaaaaccgtaagccattcacttccattcaccccgttaaacagttaactgagtggctattattctgtaaatgatgtactggcttgattcacatgaggtaacctactacttctgattatcatttcacaagaacatgtacaaaactaaccccaaattattcattcatatatataaaatgagacttctgtgtggggtggagctatcaagctatcatgtcatcacatgacctcttctatcgattgtgggtgcatttacctttgtgccaaacaagtaagtgtatgcaaccttaacacaaagctaccctgagtttcaccccctcaatgcatgggaatctttttgagtctagatttaatacaactgagtttcatctatactagaaatgtataacaagaattatgacaaaggatagtgtggtggctgttgctgcaccaatagtctccttagaaggcagagctcaatccctgagttctcgggacagacagcgcctaattgcttgagggccattctgctcttagagctgttcaagacaaactacttttctcactcagagaggattatattactaagaacttatcttgatttttgtccaagtcaaaaataaaacaactttctgtcctctggtgaggttcaggacaagaaagacattggtgagattaggtcaagattgcctttactgtctatcctaggctttgccaggagaacctatgacattaacctactaactcttcccgatgcagaaggcaatccttgtctctgccattccctctggaacctagtattaggaataaatacccaaggagttcttgaggactggctgtgggaaccattgagggaagcatgccttcactgtatatactctgtagccgcggttgcacagtccctactgcccctcccctacttcagtgctggcagctcactgtgatgtggccgtcaccataaacaggcgcgctgcttcacttctctgtgctggtcacgttggcatatttagccatgtggtgtggtcattgcttagtggtttgagatgactaagtttttttttttttttcaaatgaaatgggtgtttcatattgtatttcatcagaaaacagtggcaattgtgaagaccatttagatagtcactgtatcctcccacaaaacctaattctgtatattttcttcaaaattgttaaaattcctaagcatggttttttaagttttgttttgtttttttggttggttggttgatttgtctttgtgtaatagaagttgggcttttattaaattgtgagcctggacttccttaagaatctcatggtggcgtatagcacagttttgaactatggctaaggatgttgagaacgtctttttccctttctttgcttctggaactgggtctcactatacagacctggccaggacaaagatcaagttgctcttgaacctgcaagggttctttctgacctctggctgtgccactcttagtttctctggtgctgggattgaaccaggcctttttgtgtgtctggtaaacaccatcaacattccctcccatcctagaccttggggttttttccgtagggaatcatcatttgtgtttgttttcagctctacaaaatcttagcatgctgccaaatccttttctgaaccttctggttcaggtgatctcttattgattgctagggtatagacacagggctccctgcccagctaatgtacatttgtattagcccagctcttttctcagataatcagtttgttcaaaatatgtgttactcataaatctcacattgaccctgagaccccagtgatcaaaattaccttgtggcagtctgtaatgtttccagcttcaaaattacaaggttaataatttatttattccttttctacattcagatttccttatgattaaaaatcttctgtactcctgtatgtacaccctggctccaccacccagatcatcccatatgcaaatatatctgattagttccagttttccatttctctgccttccttttgcctcagcaccttggcttatctttttcaaccatgtgtcataaagtctaacaccatgcttggctcaagtgtgtgtgatcccaactgcttgagggactgagacaggatgatagaaagaaaaggaacaccagcagggcgcagagctgcctgccatagagttcatgaaagagtggtgcttgccaaccttgctggaagcaatccctagtactgcagaaaggaccaaggatgtgtatgcagaacttttcaattaggagtaagtacaacttaagtttcatattcccattcttttggccttttccatctccagctgctaaaattgaaacctgcaaggcagttttagtcactggatcttatatgcagacagagtttcttttccttctcctcattttcaacaatctcattctgttgatgggagcctgtttcctaaggtaaattaactctagaagttcttcagctgtactcgtcccttaataatggccctgatgtactgcaagtaggatcctgtctccaaccccagctcagacagtacagccccacatccttacacataatctagtttcaaacataagtccttggtgatgagctaccagaatccctggtgaggaagtcatggggattaatagttcttgtctgccctcttctaattttaactgaaaataggtgatcttttgacaataaataggacatgaacaaaaaacaaaaaacaaaaaagcttagcatctctccctaggtgtgatgtgcccatctataattcagctcccggggaggcagaagaaatgggatgggatcatgtcttcagagctctttgtgggatttctcaccagtactgaactcagaaagcagttcagccgccagcgagaatagccaggagcttactccatgtcacacagcaagtcaagtaatacgagtgaaatgtagttgcctgcatgtatgtgtgtgccttgtgtgttgtctaagtagagctgataggagaaaaacagaaaacttataagcctgtttcatttccgttgtttagccagctgttgcacatatgaaagatctcaaatccttatttatgcatcaaagcttaggtttatggttttgtgagtgtgtgtgtgtgtgtgtgtgtgtgtgtttaaaacaggttcacaatgttgctctagctggcctggaagatgctgttctgtcctcaggttgctttggtcctacgtcagggactgcaggtgtaaacctctccattcagtgataataagcagagagagagagagagagagcgtgcgcatcctgttgccattaataggaagacactttcaccaagtaattttctaaataggaattttaaagcccctcataatcaaagtttaatatatttaagtatgctgaaatgaaggtttcttgaaggagatggtgctagctgaacaattttagttcctagcccttcattataaatatgcaaaattgttgataacaggttttattaactctggattatatcttttgtcttgttgggtgtttggctttttgttcgtcctggtgtgtgagtgttccctctgctttgctggtagccatatcaatctttggagcaagtatcctagagttaagagtgctgagatgtatttgtaaagttcctagtgatttgtctataggttattttaacaacctctctatatagaggtatattttgactatagtgatacattctttggcacaaatataagggaagaggccaaagaaccgtgaatattcagtatggcctcctcttacgttggtgagtcgtcttgccaacatcagtttgtgctgtgataaaacggctgactgactatatttgactttacaaacacagctcataggaaagattaaatatttttattgcgatgtatggtcatattttttttagctttatggagttaacattgtgataggtgctttaagagaaatatttttccagaaatggttttatagctaaactatgggcagcttttgcattgtgatgtgtgggtcgatggctctatttgggttactaggaaatcatgaagtgttccctatggagatacctgtccgcatccatggcagagagatcagcatgaagtctcagttgactcccttttctctcatagagtgagctagcacgtaaatgaccatgtgtggcattacttggtttacaggactcagcgggctggttagcggtggtgggaataaggcatcaattcacattcctcaccacatacagtggggctgagtccgtttccagtctcttatgtgaaggcctccccagcagtccctggaagaggctcgctgttcattttgatggttacaattctaccgttgcatctcagtaattgaaggcttttatctttggaaatgctgttaaaattccaaaaaccagtttagttcttcacctatgaggaaaatagttaaagcacttcatgacattaaagggaaagagaatcctatacccatgatagtttcaatacctaatcaatattgagtcctctgcacagaatgggacgcttcgtagcagtacttgaatacctgtgagttggaattgcatgttacttgaaagatctaattaagctaaattttggtgcacagcagttgtacatgatttcatgtttatgtagcaaaatacattgaaatgtactaggattgaaacataaatgtaaaaatagttgtggaaattgtcttattttccttatgtctcatttgtttaaagcataaattttcttttaaaaaattctaactaaggataaaggaatactgtaattgaagatatattttaaatctttgtcatgtttttttttttaaagctattgcaaattgtatcattcctgactatatagaactttgtgggtggtataaaataaattttatacttctattttgcacctggtagtctatttttttcttcttcaaaatcttattttaaaatataatatttagtattcccatcttaactgcaaaagacttatggtttgagcaaacaaatcatgtttgagtacaaagtcagctccagctattgataacagaacacatatttaacatactcaaagtcccaactcactccatagcaccaaaagcagggtttgttttgttttgttttgttttgttttgatgtctctgggtgtgttgctgcagatatagctggtgatgaagtgcatgtctgtgcccgtagaagccacaagagggcatccaatctgctgaggttggagtcacagaagattcaccctaatggtactgggaaacaagtcctttggaagagcaaccaatgctcttaacctcctagccatctctccatccccgtaaaacagatttgcatcacctcccaaatggtctttgttcatctgtcaat

SEQ ID NO: 18892 - DNA, 1192 bp, Mus musculus
ttcgtggagcatgtatttcaacggctgtaagtttgggaggagtgaaaaccccagaaaattcagacttgctccaaactaccccttacatgtgagtttccttttgcattttcagtgtataatctacagtatataaccctgttgcagtgcctaaatgtctcctaaaaacagtcataaattactaaaatacgcatgtcactactatgagtccaagtcaggtaaagacgtcaactcttacagttgcccattagtctcactgctccccagcaccagagggaaccattaataaaagaacttagggttttatgggcaaccagagtcaaacaaactcaattgccagcattttaaaaactaagaaagtgccgggtggcagtggcgcatgggtgggctcacatggcagaggcgggaggatctctaagtttgagaccagtctgatctacagagcaagttgcagcactaaacaaagaaaacgtgtctcaaaaaagaaagcaaaaacaacaacaaaactaagaaagtgtactttccacagaactactataagagaattactggaatgagttctgaaggaagtgacgtgaaaaccgggtggatcattccagaccgcaagaccctcataagcagagaggttagtcaagttttttattcagttttttaaaattgaagcatgaatttataagtcattcttgttgaaccagatggggaggttggggagcagctaaggctgaataggtttggaaatgttctcctgttttgttagggtaaaaattattcacgtcagagatggtgggttgcaaacatgtccacttgtcatccctaaataggctcgtttaagtagatcagagcactccacctaattgcatgtatgaatctctttctctgatgcatcacaatatttttgttaaactttaaaaaaaagatttatttattatatctaagtatactgtagctgtcttcagacacaccagaaaaggtgtgtttctgatctcattttagatggttgctgggatttgaactcaggacctctggaagagttgccagtgctcttaaccactgagccatctctccagtccttaaacttgtttttaaacgtgtgtatgtgtgtgtgtgtgtgtgtgtgtgtgtgtgtgtgtgtgtgaatttcacatgaatttcacatcatgtactccaatcccatttatctctctgcttcccctca

SEQ ID NO: 18893 - DNA, 1266 bp, Mus musculus
ccacacttagaagatgaatcctggggtataatcacttcagccaagcaaggcacttgaggccctcgtgggtgacacagagactctttgtctcagcaacaggcaaagcaccttagcctttcctgtgcaaagagtttccaggccttgagcgatggatgcctcagtatttaagagcatttcctcctgctcttacagaggtccaagattcgggtcctagcacctacatggtgttccaaaactgcatgtaactcacactacacgttcatatgtgttatatatatatacacagtaaaaacaccatatacgtgaaagtcaatagaaaaaaattgtttgtttattttacagtgagtctgaagcctgggttatatattacttcacccccacctcccaaaaaaaaaaaaaaaaagaaaggaagaaagaaagaaagaaagaaagaaagaaagaaagaaagaaagaaagggaagagaatgaaagagaaaagaaagtctggctcctgatgtataaagcttgtattgatgaatacattctggtctttcaggtgatcagaagaagtggtcctgaagagaagcttatttgtttggttcgtgagcgtgtagaccatcactgttcgacggctgtgatagttgtccttatcctgctgtgggaaggtatccctcgcctgatggctgaccgcctgtacaaagagctcactgagaacttgaggtcctacagcggacatcccacagaccgaagatgtaccctcaacaaaaagtaatcagacctgcattgttctccctccctctgttgtgagcagcaaattgataagtaactgccaactgagactagcctgtgagtagcaggactctaaagtaccatggaaggaaaacggacccacagggtcccgtgctgcacaccgtgggaggcagctggacttccatgagttggagctacatctgcacagggagaccttgtgtttcttctccccctacacctgcagtgcaattaagactattttgctgggactggcgctcaacagctcagaacactgaccgcccttccagtggacctagtttaaattcccagcatccacatggcagctcacatctgtccattattccagttcctggggagctgacacccttacacaaacatatgtgcatggaaaacaccaataaatatatatatatatatttttaatgataaaagaaatttctgcttgaggccctattttatgtatatgagtgtaccattgctctcttcagatacaccagaaaagggcatcatatccca

SEQ ID NO: 18894 - DNA, 1816 bp, Mus musculus
caggtgttaaagttctgtcttttgataataccaataattgtaacgtgtaacttcctggtacatgtttacgatgagtacgtagttgtgcacatgtagtagggtgaattgttaccagactcactttcagtagggtatggaagctaagcttctcagactagtgctcttccttaacgttgttatagaaacctacaaacgctggagagggagccaggtgtgaggccagtgggggcaggagtgtcaggttcaaggccatccttggatacctagtaagagtgtcttgaggttctactaagacctcatcttactaagtttagtcatattaataaaaaagctgggagaataaatacgccccccccctttaaatttttgttctctcctctgactgctagaagaaataagagccagaagtccaatgccagcccctgttgtcttatacgttaaaagttgaaactaatccaaacaaagagaacaaagcccctgtgctatttgtaaaactgggtctaataatctgattccttccacagatggaggtacacaaaaagaaaaaggcccatattatacacaccttggggcaggaccaagtgtggctgctgtcagggagctcatggagactaggtgaggaactctgcttcccgctaacccattcttcccggtgacctggctcaaggcagagaaaagggcttggagtggtcctgaggcgaatgaagacggtcaggagtgtgagttggatggttcttaaggctcaataggcccagtcctcctgagtcctcccaggagtggggccctggagacatgccctcactcggcaggcctatttgatcaatcaggaagagtgttttcctactactgtacagtgatagaaagagctgagatgactcccacccatgctttaaccctaactcgcccgtcttccgagacttgtgttgaggtcaggctatttttatttagagtgacccttatgtaaacagaattgggtaacaaaatcagactgccacgtaacagctggttttagccaatgtaaacgataactgtttcttcttttctttttaaaaaaaaaagaaaactgattcatgtgtatattcaatgcatttagatgtgaaaacatggagacttcgagttcggatggtcactaattagtcccaccctgtactgtgttctgtaccaggtttggccagaaggggaaggcaatccggattgagaagatagtgttcacggggaaggaagggaagagctctcagggctgcccggtcgccaagtgggtgagtgctgccagcagacttcgattttcttggtactttagaaaatggatttttccagggcattaaattagaaggttttgctttgcaaaaatggagaccagaaaacttttcatgcccacagggagatggtggagaagctgtgcgtctttcctgggtttttgatttcctaggtagggtatttaaacaaggtgcgttcaaacccactcagtaaaggtaaaaactccatccctccctcagggtctcccaaggatcacacacttcctcaggcacagcaagtgacattatagtcactgcgtggtttacttttcctcagtgtatttgctgtctaatgagtaagtatatgtcaacaggttttcttctcctcttcataagaccctacctatttggggaacaagagccttttttttttttttttttttttttttttttttttgagttttttgagaccgggtttctctgtgtcgccctggctgtcctggaactcactctgtagatcaggctggcctcaaactcagaaatccacctgcctctgcctcccaagtgctgggattaaaggc

SEQ ID NO: 18895 - DNA, 2880 bp, Mus musculus
ctgggattgcaggttgaactactatgcatcatttaaatgggggtaggggagcctgggcatgaggtccaggacttcacacgtgcttttttttgaattatgggattccagataggcgtagccgacctcactggtaatcccgggactgaaaccgagtctggagcattcctgcaaagtcctagtcatcttaggtgcatagtgggagcctagcaacaacaaccacagccacagcatctccttgtagacattcagcgggtggtggaagtaacttctgtgcttcctttacagacagactttaacaacaaaccagtaaatggccccaaatcagagtccatggactgcagtagacgtggtcatggggaagaagagcaaaggttggatttgatcacacatccccttgaaaatgtaaggaagaatgcaggcggcatgacgggaattgaggtggagaagtgggcgccaaacaagaaatcacacttagcagagggtcaagtcaaaggaagctgtgatgccaatttaactggggtggaaaacccccagccctctgaagatgacaagcagcaaaccaacccttctccgacatttgcccagaccataaggaacggcatgaaaaatgtacactgtttacccactgacacacaccttccgctcaacaaattgaatcatgaggaatttagcaaggcgttgggaaataattcctctaaattgctgactgatccctcaaactgcaaggatgccatgagtgtcaccacctccgggggggagtgtgatcatctcaaggggccaaggaacaccctgctcttccagaagcctggcttgaactgcaggtctggtgcagaacccaccatctttaataatcaccctaatacacacagcgctgggagtcgacctcaccctcctgagaaggtacccaacaaagaacccaaagatggctctccggttcagccaagtcttctatccctaatgaaggacaggagattaacgctggaacaagtggtagccatagaagccctgactcagctctcagaagcgccctcagagagctcctccccatccaagccggagaaggatgaagaagcgcatcagaaaacggctagtctgcttaacagttgcaaggctatccttcattcggtgagaaaagacctccaagacccaaacgttcaaggaaagggccttcaccatgacactgttgtctttaatggccagaacagaacattcaagtcacctgatagtttcgctactaaccaagcacttataaaatcacaaggatatccaagttcacctacagctgagaagaaaggcgctgctggtgggagagctccctttgatggttttgagaattcacatccattgcccatagaaagtcacaatcttgaaaactgcagtcaggtactaagctgcgatcagaatttgagttcccatgacccatcatgccaggatgcaccctacagtcaaattgaagaagatgtcgcagcacaattgacccaacttgcatccacgattaatcacatcaacgccgaggtcaggaatgctgaaagtacaccagaaagccttgttgcaaagaacacaaagcaaaaacacagtcaggagaaacgcatggtacatcagaagccaccctctagtacacaaactaaacccagtgtaccatcagcaaagccaaagaaggcccagaaaaaggcaagagcgaccccacacgcaaacaagcggaaaaagaaacccccagcccgaagctctcaagaaaatgatcagaagaagcaagagcagctagctatagagtatagtaaaatgcatgacatttggatgtcatctaagtttcaaaggtttggccagtctagtccacgtagttttcctgttctgttgagaaatattcctgtctttaaccaaatattaaagcccgtgactcagagtaaaacaccctcacaacataatgagttatttcctcctatcaatcagataaaattcacaagaaaccctgaattggcaaaggagaaagtgaaggttgaaccatcagattctctgccaacatgccaattcaagacagaatccggtgggcagacatttgcagagccggcagataattctcagggacagcccatggtgagtgtcaatcaggaagctcaccctctgccccagtccccaccatctaaccagtgtgctaatataatggctggtgctgcccaaacacagtttcatctaggcgctcaagagaacctggtgcatcagataccaccaccgacgttgcctggtacctcccctgacacactcttgccagacccagcatcaatcctcaggaaagggaaagtgttacatttcgatggaattacagttgttacggagaagcgtgaagctcaaacatcaagcaatggaccactgggtcccaccacagacagtgcacagtcagaatttaaagagagcatcatggacttacttagcaagcctgcaaaaaacctgatagctggattgaaggaacaggaagctgcaccctgtgactgtggtaagtactcacttgtgtgggtgttttcccgactcatcttttgggggttggggggttgtccttggctctttctagtcgacctgagatgtactaagtaattctgttcttgttttactttgaaatcttatttattctactcagactgggaaaagaggtaaactctttcaagtgggacaagtttgcagtggttcattttcaggactaagaaagaattgcctttgcttagccacatttacttctgttctatccatgtcaaatacagttcaacctagagggtgcatagacagaccgtaaaatcacgcacagccgcagtgatggtgagcgaatccacaccttctgcatcttgggctaggaaaggtgtgcccacatgaggagattctatagcctggctg

SEQ ID NO: 18896 - DNA, 1304 bp, Mus musculus
gtgacaagagagtcaagaccaatacgccatacattatattatttaataaaaacaaaaaaaaaacttttcaatttgtttttgagatttgtttactctgactttgttttgtcccttttagccctggctgtcctggactcatttttgtagagcaggctggcctcaaactcacagttccacctgccccagtctccctaatgctgggattaaaggcatatgcccagcttctttacttgggtctttgttctttgtgtttgaagacagggtctcacaatgtaaccctggctgtccttgaactcgtggtgtagattcatctgactctgcctcctgagtgctgggattcaaggcctgcaccattatgcctggcttgatgctaggtttaaatttatcaaggacaacataaacaaaactacaaatatgacacaggagatatgtggaggtcagaggtcaattcatggattcagttctctgcaacatttgtcacaggaatggaacttgggtcactagacttggatatagtcacctgcaggatgtatgtagttcgggttaaactagaacttcctgagcagtagggggtcatcttgaactgctttcctgcctctgactgcaggtgtgggccaccacgccctgtctatgtcttacattaaatactgaaagtttagcattgggtgtgagtgctctcaaggtataagttacactgtgaacctcacaggcttcaggtttcttggggtgaatgaagctcccgtcgtacgtagagtgcatgtctagcacccacaaggccctgtttgacccccagagttaacataaagtgacacatggtcacagtcccagtatttgaaggcgcgcacattctggaggtcaatgttggattgcagacctgggacaagcagccgaggagcctgtctaaccaaagagcacctggcctctaggttctcccagcatgcctcagcccctacctgttacagggtatggctggcatatcccgtcctttaccctgaattttccagcctaggtcctgggctttcccccatttgggaccggtgaacacatctgagagctgtccccagtaaagctgcctttatactttaatttgactttaattggcttattttgccctcaagaaaacttatcaggttagcagttcaccagagtcctcattcgtgcgcagagttaactgagtcgattctcagctaaaatctgatagtttttaaaaaattgattacatattgaaatcataattgaatgcactgatttagaatgtgatttaaattaattacaggtgtttctgtgggcctctgtaactctgt

SEQ ID NO: 18897 - DNA, 1237 bp, Mus musculus
agttcaatgtcaagggggtatcagatctgaggcttcccactattttcatgcctcagggtcaaggtgactttgtagaatgtgtaatgaggctatttcactacccccgcccctttgccattttgagaaaggtcctactgtgtagcataggttggccttgacctgcttctcctagttccacctctaaagtgctgggtttataaaattgcaccaaactgtttgtgtgtgtgtgtgtgtgtgtgtgtgtgtgtgtgtgtagttacaggcagttgtaagctgctagatgtggatgctgggaaccgaacccagatcttccacagagcaacaggctctcttagccagctctcgtgttgtttttataatcccaagtgcatacatacagtgtgatttgctgcttactgtcatttcaaatgcctttctcgcggttctttctctgaatgtcagccttgattgcccacagctactacaattatgtatcacccagttactgcaagtggttcattgagccagttcttgctttccttgtaatagttccatgggtttattatttgttttacattttattcacctgttctgtttatgtgtgagtgtgttagtttgtgtgagcgcccatgcatgcacacatgttgactgacctgtgttgacgtaccatatggagatccaaggacactttttactagtttcactgaggtattcatacttggtggcaatcatctttactcacagagccttccttccaaccccctagtagaactgtttttagtgtaaggttttcgctctgtattttattacatgtatgtgtaattgtgtactgtacttacacaagcttccttattttagggtgtataatgtcaaacttattcactagatcaataattgtttttgctatttgatactagggtttgtttggtttggtttggtttggttttggtttttcgagacagggtttctctgtatagtcttggctgtcttggaactcactttgtagtccaggctggccttgaactcagaaatctgcctgcctctgcctcccaagtgctgggattaaaggcgtgcaccaccacgcccagctgttttttgtttttcttaagacagggtttctctctgcatccctggctgtcctggacctcactaaaatccatatagagttaagggctgcattaagggctgagcaactctcctaggctggagtttagttttgaatctcgcttcagggctttgaatcccaggcctgaaagtt

SEQ ID NO: 18898 - DNA, 1170 bp, Mus musculus
atttatgtattttatgtatatgagtacactgtagctgtacagatggttgtgagccttcatgtggttgttgggaattgaatttttaggacctctgctcgctcagtccctgcttgctctggccaacatatttatttattattatacataagtacactgtagctgacttcagatgcacaagaaggggatggcagatctcattatgggtggttgtgaaccaccttgtggttgctgggaagagcagtcagtgctcttacccactgagccatcccgccagccctgtctttctttttctttttttttcttttttttttaaatatttatttatttattatatgtaagtatactgtagctgtcttcagacacttcaaaagagaacatcagattttgttatggatggttgtgagccaccatgtggttgctgggatttgaactcaggacctttagaagagcagtcggtgctcttaaccgctgagccatctcaccagcccctctttctttttcttaagatacttggattataagttgtttttcttgctgcctttattgcaatataatttacaacacacactctctctctcgtcacatacacacacacacacaatcctgtagcttttactatatttacaattgtatcatcatgctcaatttaaaaatatttttattactccagcaccttagctcttgctgcctacaagtcttccatctaccttaacccacagtggtcactaacctgtctgttttgtggggttttctctcagatatctcatataaatgaaatgatacaaatcttgtctgttgctgtatgtctataaatcaagcacttggaaggatgggacaggaggatgactgtgatttcaaatccagcttgcagtgtgtggcaatagtctttcttaaaaaagaaatcgggctggtcagatggctcagcaggtaagagcactgactgctcttccgaaggtcctgagttcaaatcccagcaaccacagtggctcacaaccatccatatgagatctgacgccctcttctggtgtgtctgaagatagtacagtgtgtacttacatataataataaataaatcttacccaaaaaaggagaaaaaagaaattactgcgagggagggagccgtctcagtggttgtgagcgcttcctgctgaattctctgtccctatctat

SEQ ID NO: 18899 - DNA, 2910 bp, Mus musculus
cagaagagggaatcagatcttgttacagatggttgtgagccaccatgtggttgctgggatttgaactaaggacctttggaagagcagtcgggggctcttacctgctgagccatctcaccagaccctgtggtttcctttttaaattttttttaaattaagatttttctctgagatggggtttctctgtgtagccctggttgtcctggaactctgtagaccaggctggccttgaattcagagatccacctgcctctgcctctaaatcgctgggatcaaaggaggagtgcgccatcaccaccatgcaaaaatttgtgtttttgtgtatgggtgtttgactgtatgtttgtctgtgcaccaagtgtgcatgcctggtgcctaaggagccaagaagagggcagcagatggcctggaactgaagttacagttgtgaatcgccatgtacatgctgggaattgagcccaggtctactgtaaaagcaggcaacagccttaatttcaagccacgggtctaggttcccttttatttgagacaggatctcgtgtagcccagactggcctcagattcactatgtagctatggatggcctcaaactccgatgatcctgcctctacctaaatatctgggcaatgttgtgactcatgcaactaactcagtctcccaaatgctgggaataaaaatttgagccactttaccaagctaaatactatctgcatatggtagctatacagagaaaccctgtctcgaaaaaccaaaaaaaaaaaaaaaaaaaaatctcagttttctagttattaagttattagcaaatctctttctagtagagtacaaaggactaataataatatttgctattgttattttagaccccaaactcaggtgaccaagcttggcaacacctccagattctcctcaaaaggaagattttgcaaaggaccaatgacactgtgccccgcatccttgcatctttacttactctgcagccatgtctcggtcccgccccgcaaagccttccaaatcagtcaaaacaaagctacagaaaaagaaagacatccagatgaagacgaagacatcaaagcaggctgtcagacatggggcatcagcgaaggcagtgaaccccggaaaaccgaagcaattaattaaaagaagagatggtaagaaggaaacggaagacaaaaccccgacaccggcgccgagttttctgacgcgagccggggccgcccgaatgaatcgggatcgaaaccaagttctttttcagaacccagactccttaacttgcaacgggtttacaatggctcttcgaagaacctctcttagctggcgactctcccagcgcccagtagtcacacccaaacctaagaaagtaccaccttcaaagaagcagtgtacacataatatccaggacgagccgggggtaaagcactctgaaaatgattcagtccccagccaacacgctaccgtgtccccaggcacagagaatggtgaacagaacaggtgtttagttgaaggggagagccaagagataacccagtcttgccctgtatttgaggaaagaatagaagatacccaaagctgtatttccgcatctgggaacctggaagcagaaatttcttggccactggaagggacacattgtgaagaactactttctcatcagacatctgataatgagtgcacttcccctcaagagtgtgctccattgccccaaagatcaacttccgaagttacctctcagaaaaacactagcaatcagttagcagacttgagctcacaagtagagtctatcaagctgtctgatccttctccgaatcctacgggaagcgaccataatggctttccagactccagttttaggatcgttcctgaattggacctgaaaacctgcatgcctcttgatgagtctgtgtatcccacagctctgataagattcatcttggcaggctcacagccggatgtctttgatactaagccccaagaaaaaacccttataacaaccccagaacaagtgggaagccacccaaatcaagttctggatgccacctctgtcctaggacaggcctttagtactcttccacttcagtggggattttctggtgctaacttagttcaagttgaggccctgggcaagggttcagactcaccagaggatcttggtgctattactatgctaaaccaacaagaaactgtggctatggatatggataggaatgctaccccggacctgcctatcttccttcctaagcctccaaacacagttgctacctacagtagccctcttttagggcctgagccccacagctctacctcctgtgggcttgaagtccaaggtgctaccccgattttaactttggactcaggacacactccccaactcccaccaaaccctgagtcaagttcagtacctctggtaatagctgcaaacggtacgcgagctgagaagcagtttggtaccagccttttcccagccgtcccacaagggtttacagtcgcagccgagaatgaagtccagcatgccccattagatcttacccagggttctcaggctgctcccagcaaactggaaggagagatttctcgggtcagcatcactggctcagctgatgtcaaagccacagcgatgtccatgccggttacacaggccagtacctcttctcccccatgtaattctacgccgccaatggtggagaggaggaagcgcaaggcctgtggggtctgtgagccgtgccagcagaaggccaactgtggggagtgcacctactgcaagaatcgaaagaacagccaccagatctgtaagaagaggaaatgcgaggtgctcaaaaagaagccagaggccacctcacaggcacaggtgagcgcagcccggggctgggatctcctgtgtttggcgcagcatcagtccccgcccctaagaatttg

SEQ ID NO: 18900 - DNA, 1182 bp, Mus musculus
atttctctcttactgtatttccatttcctataaagtgattatgatcactaatgagtccgcagtcaatggctaatcaaaataaagatgtagggaaaaaatcaaagctaatttgatttctctttggtcttgaagttggtttgacacctctaggatgtcacctggatgacccgactcgcttctggaaacattcgttttcgagatacctttactcccatctgattagagatactctgactcccatcactgaaagagatggtgacctgtagatttcaacactcctttgacctaagaaaaaaggggagggagcgcgggcggaatttcaggaaagcctaggaaggagtggacaggagaagggtcgagaggagtccggctccgatttgggaaaatccagctcgcattttgcctctcgctcagcggtacagggtccagcaaaggctgtgccccagctacactcctagaggtctgtactggggagacaccgctgctctgggggggggcgagggctgacctggctgggagtacccgcgcactccgctcgtggaacactgcactctgcaactggtttgtacaatcccggggtctgtattcgcccctggacgtcctctccctccctggtcatgtacctctacctgcctcttctacgggaacattcgcggagcagctccccaacccgggtgctcgggccctgaccgtgccggatggtaagtgtccatcctaggcccgcctgaactccttggcgcgtgccggagcctcaggctccaaagttgcacggaccaagacccgctggaaagtttgtccaaggattggtgcaggcttctagcaggggtgacccgcgctgccctgggatccagaggcagtttagggtgagctggggcggcagcaaagagccggggagttgggagagggtactactccgtggcgggacggagctggggggcggatctcgatcgggctaggactttgcacgccgcgatgcttggtgatgactcgtgcgagtcaactccgcgccacgaccccctatcccgggccgctccgggtctttcgtggcgggtgactaacaatgctcgcgggggaccttacagcgctccccagaaagtttagttagccctggctaggatcggttcgcatggggacctccagacttggcatcaactggagatcctgtaggggaaacgcatgtat

SEQ ID NO: 18901 - DNA, 1190 bp, Mus musculus
gaggtacaatgctatgaatctgctgagccttatcactatccttctgtcagctccccaaatcccacccaccaaggtttttttaaaaaaacaaaaaacaaacagataacccaggctaggttatgtttggctacaaacttgctatgtatgcaggaatagaactcagggtttaaggcatgccacacaaacacactaggaatggagtagcagacccagtcacattctcttggaatcagtttagaacctgaataagaaaatgtctttgggatcctgtagcggcaggagtttcctgagtatctttagttattctgaacaatcctgttaatcgctggggagtttatgttaaagagcttcagggtggaacatctgtagcctctggggaagggtagtctccaaaaggacagacagatttactggatttcaaccttcacacctttctaccaacttcctggaaagagggtggggggttcattgggatccctcaaaaaaaaaaaaaaaaaaaaaccggcaggcagatcttttctgagtcgctgaggctgagggaaggatgtaggtctggagagatcctggaagcctcttgctgaggctgagggaaggatgtaggtctggagagatcctggaagcctcttgcatcatcatgctctgcatctgtcctggctgagtgtcttcattctgccaactgtgagtaaagcatgtggacctgatgggtggtgagtgggtgggaactcctatactgcctttcaaaagcaggtataacaaactagcttatggcaatggtattttgtatttcaagtgtgtgtgtgtgtgtgtgtgtgtgtgtgtgtgtgtgtgtgtgagtgtgaatctggaggtgacacacttttaatcccaggattcagcggcaggctggtttctgagtttcaggacaactacggctttataaagaaactttgtcttggacccaccccctcaaccgccccacacacacacacataaaagagggagtgtgtgtttgatctgaagctatgaagttggttcaagccccacttgtctttttttttaatttttttcaagttttatttattatatctaagtacactgtagctgtctttagacaccccagaagagggtgtcagatcttattacagatggttgtgagccaccatgtgggttgctgggatttgaactcaggacctttggaagagcagtcagtg

SEQ ID NO: 18902 - DNA, 1160 bp, Mus musculus
cggatttctgagtttgaggccagcctggtctacacagtgagttccaggacagccagggctacacagagaaaccctgtctggaaaaaccaaaaaaaaaaaaaaaaaagatgagaaggggaaaaaacaaggaagaatcccaccccgcggtttgattgccttttctggagttaaggatgttagtgaatcaccatgtgaatgctgggagcaactcctgtgccaggaatgctgctctagccattgatccatctctccagctccttccctctgcagttcacactgaagtcctcttctccttcctattcttgtgtgtgtccctattcttcagtgaatgtacccttgtgtgttattgatattgctgttattttgaaacctctgtgcaggtctccctggttagcctcaaactccctctatagttagggatggtcttgaactcctgctccgtctgcttccatcttgtcaaatactgcatgcactcctaagaccagcaaactgcagtacagccaggactacatggtgagaccctgtctcaaaacaaaacaaaacaaaacaaaacaaaacaaaacaaaacaaaacaaaacaaaactcatcacactgccggatgtgggggatcaactggggctcagagtaaaagtaggttctttccatccaccatgggtgggttctgggaatcgaactcgggtcatcaggcttaatcacaatcaatttgacccatggaatcatcttactaactaacccttattgaattttgagacaagggcttgctttccacacaggactgagttcacatttaccgcagagctctgctagcctctaaccactgagattccaggtgtgacccactggatcttgctgccttattaacttttcttcctctctctgtctgtctgtctctctctttctctcaggtttttgttttttgtttttcctgagacagggtttctctgtgtagccctggctgtcctggaacacactctgtagaccaggctggcctcaaactcagaaatccgtctgcctctgcctcccaagtgctgggattaaaggcgtgcgccaccaccacccagctcgggaacagactgcctggtttctttttaacttttcatgtgtggcgagctgagtcaaaaatgtggttttctggatgccaggcacactctgagcgacat

SEQ ID NO: 18903 - DNA, 1166 bp, Mus musculus
gaagccctggatctggagttctagacaggtaagacctgccctgtgggcactgggatttgaacccggtactcttgaagaagaatggatgctcttgactgctgagtcacctctccatgtcccttagaaaggtcttttttcttttctttttttcttttttttcttttttgtgagatagggtttttctgtagccctggctgtcctggaattcactctatagggctttgaactcagaaattcgcctacctctgccttccaagtgctgggattaaaggcgtgtgccaccattgcccaggaaaggtttttctaagaaacaactttagccatttgaggtggtccacgcctttaatcccagcacttgggaggcagaggcaggcagacttctcagtttgaggccagcctggtctacagagtgagttccaggacagtcagggaaacacaaagaaaccttgtctcgaaaaaattaaaacaaaacaaaacaaaaaaaacctttaaacttcttttagaaaacaggcctttgtggtttaagcaatttgaaacttggaagcctgattgcctaagggacttgtgtctatgtgtccgtccttggcaggtgaatccactagaggttgtggattcctcccctccccgactcctctcctagctctgcagatcaaggacagtagccagccaagggtgtggtgactgtggaggtcacctgagaggaaacaaccctccccctgaagggtaaaaagagatattgactaaattatctttggaagtctaggctgctcacctacattaaaggactatgaatcaaaaaagaacccctcccccagcttctgtgcttccagctgctttgccctgtgcttctgccctgtgtctgagcctggctgggcagcaccttttgtctttactcatgactccctttatgcctggaccttgggatggtaatagacatccttctgtactggggactacatttatttatttttcttggaatttgaatcacttttttttaaaattaattaattaatttatttatttatttaatgtaagtacactgtagctgtcttcagacgcaccagaagagggcatcagatctcattacgggtggttgtgagccaccatgtggttgctgggatttgaactctggaccttcggaagagcagtcgggtgctcttacccac

SEQ ID NO: 18904 - DNA, 1902 bp, Mus musculus
gctgcagagcaccattctgtctgaaggaaccatccaaacaaacgaagctgttctgggctcttgagttgtcttgtcaccttgtggtggcttgtcccctttggatggttgctatatcattttccactgcctttcagtaccatgcgggagaccatgaagtacgtctatggacagcatgggattcggagaggattgtaccgtggcttatctctgaactacatccgctgtatcccctctcaagctgtggctttcacaacgtatgagctgatgaagcaattttttcaccttaactgaaagaaaaaaaaatcatgatttgtagttattttcctcagtaaattctcagaaggatgtgtgtgtgtgtgtgtgtgtgtgtgcgcatgcatatatatatgatgataccttaattgtgaaggaaacattacttgaaggggacgttcgccctgatacaggaaccactggtattttaatacttgatttctttgagttttaaaatcacagatcaaaaattcttagcataatttgtttttttctttttgatgggatctctgtatgttgccctggctggcttggacctcactgtggagagacctcctctttgtagagaggcaatcctcttgtctctgcctcccacatactgaaattccaggcatgggtcaccatgcctgctccaacatatttattaatggcaaacgttataccttagcaccttgaaaagccatcttgggtaaagtgttatttggaaggaaaagaaggttcgcatttgagttcaagagattgcccttagtcctaccatactttccaaactctgcattgtaattgtggttactgagggggaggggctggaatcgaacccagggcctttgcatgccaagcacatgtacccactaggccacatccccagcctgccagcgccatgccactgagctatgtcactggcctcttcctttcttaggatggtgctggggatcacattcatgcatgctgattgtgtaatcgcacactgccaatggtccacaccccagcccgctaaccccgctcgttatttcccctcccactctgtcccttctctacttgttctggggagtaaactcagggtctctctgcctatcttgctagataagcgctctacctctgaactacatctccagccttctaacattgtgtaatgttatttaaatcagctgacttccttttattgtagcagaatgagaactgaaaatgtaaggtctgtgaaacagagccagcaacaaagtagtgttcttattatgtttcttctcagaattctctccagtgggtaaaaagacacctttccgtctagtggtttgagaagcacttccttccttgcgctctttctttctaactctctttggggattgagtccaggacgttgtacatggcaggcatgatgagatcccatcagaaagtcagctgtacactgaggtatatccccagttgtccttccttctcaataaaattactgttgtatttgaaaggagattgtcaacaaatgaagaaagtcccaggtcttgttcaaatgctattaccatgaactttgattatcatgccactgcgtttcccagaggcagttatgataaagattaaatatctttgcccttaaaaggagagtagcattgtagatgcttgtctaaaataacttggtatgtactaggaaatgtaaatggaccatcaatttagatgaagcaatgtttctgaggtattatgtcaagatataagttcttccatgtaatgtaattttagtgtgtcatagtccgaagcgtaaatataaaccacattttgattgttacattttaaaaaggttgtttagaatataagaattctgatcattgtgtttagaacactttttgttgtaagcatgacccatggagtagaagcatcaagccttct

SEQ ID NO: 18905 - DNA, 1335 bp, Mus musculus
ttgaagttctgatctttcggcagccccgggattcaggcctgtgaccccactcctggcattattctcccctcttctcctcctctacctccctatagagtctcgtgtatcccaggtcatcctacaacttagtgtagagcagtggtctagaagtcatccccctgcctccgccttgttagggctgaggttgtggatacgccatagcgcaccggcacattccctgactgtgtcttccttaattcatcttacatcctggaccttccttccagagagcatgagagcctcagccacatcctgggcgattgtcagcgagactgagacactgcggagactgccgcggcataggcagagactgcgccacgagatgctccagctgaggttttctgtgaatgccacccttaaactgaaggtgacttttagcccaaaggaggtgaatgtactgttttcaaggtcccagatttttctcttctgttactacgtaaattctactttaaaagtcttgatgtacccaaaattgagaactctaaatttggaaattcttcaaatatatctgtgtctgaccaagggggaaaaaccataagattttccactttaagttgtgggttagccttggggtctgtactgcaatgcctaaggttccattatagctcaaggctgagagttcacaaaagaaactaccaacttcgggtctgattcccaaatcatacaagttacatttaaacagtcagacagactggcccatctcattgcttgaagccactctgtgccagggagatcagaggactattactctatgaattttgggatttcctggttgttttatatttaatattagatgaggatttgatataaatgtatttctgatatatttctgaggcgttttggttcctgaattgatgttagcatacaaggtacatcctatttcaccccggtttgcctcttttaggttattactcaactttttcacttacgtacagatgttttttaaaaaataaattgatcagcaagtaattagcatctctatataatatatatggtgacatttccacatcaggtcttaatctcctgggggggaaaaacttctacctcactgagtggaaatttaaatatgttaaaatagttggtgcttctgtcttttttattatttaatgtacagttgaataaatctttttgtcctgataaacttcactgagtcatttttcattttgtgacttttaggtgtgtgtgtgatgtaggctctcctgtgtctcgggtgaccttgagctgtggtcctcctgcttgtctggttgctgcagtggtagggattgagcctccagctttgtgcaccctctgtcccca

SEQ ID NO: 18906 - DNA, 1099 bp, Mus musculus
cagctgcaggtctgatgccttcttctagcctctgggcatcaagcatgcacatggagacacacgcatgcacgcaggcaagaacactcacacatgcacatcttttttacaagagagaaatggagggaggtagaaagtgtctgaaaattccttccttatccgagcttgacagaatactcctgtaatgccagcactcgggacataaaagcacaatcagaacaaagatatttacactttcctacttagtgatacatatgtaatttggagggcttttttctccttttaagttatattttctgttttctactgaaggagtttcttaacctccaggatgaaaatcagcagttgaaaaggatttatcaggaacaagaacaagctctgcaagaacttggcagcaaactctgcgagtaattcctctcttccttcagctaagtgctcacaaacgggtgaaaggcacacacatcagctgtgcagagggctacttgagtatggggataaaaaccaaggctagatactttggagggatttcagtagttctgtgcattccagtagacactggctctgaagggttccagtaagtgagagcaaaaactattgcttgagttcttcagtgataaagactccagaaacttaattttgtcgggacaacaaaagctgaattttgaaaatgtccagggctttcagactattgacagagcaggtttgttgggaagtaaatgtagtttctatcctacaggggtcagtgtgattctgtagtagaatgctattgggatccatagtgaaaaggaagccaggaaaggctgtaatctcagcacctggaagggagacaggaaggtccggaattcaagccatcctcagttacacaaagaatcagggccagccttgagagcatgcctttaaaaaaaaataaaataagaggctggagagatggctcagcagttatgagcactggctggttactcttccagtgatcctgagttcatttcccagcaaccacatggtgactcacaaccatatgagatctggtgccctcttttggcatgcaggtgttatgttagatagagcactcatatacataaataaacaaaccttaaaagaacgg

SEQ ID NO: 18907 - DNA, 1102 bp, Mus musculus
tgtcttcaactcaggccccctgcccacatctggacacgcttctgtccaggcatgtcccgagtttctgacgtaactctgagagctactgtctgagccttgtgccttctttccttcattttgaacataagtggtgaaaatgagtcacaggaattgtgcacaggagaatgcctttctattttcatacttctgaagtaagagcaggtgttattgatttgaacattaacattcatctttccatattagggactggtctggttaaaagacaaagatgcaacccactgtaagctttgtgagaaggaattttcactctccaaaagaaaggtaggtaagagaagtgaaaatgattccaaacgttgtggcaacaaaaatggcttctaatttggttttattttccccggatttttccatttaatagcaccactgtagaaactgcggagaaattttctgtaatgcctgctctgacaacgagctgcctttgccttcttcaccaaagccagtgcgagtctgtgattcctgccatgcaatgctcattcagagatgctcctctaacatgccatgacttggaactccattctcctgcacagcaccacctgcagcgagggagggctgtgtgcccagtcagtactgtaccttgcctccagctcacaaacaggtttctaagttatatgggttagtattccgtccctgtacttaatcagattttaagatagcatgttttagcactacttcaactatcaagtaacctttaacaaaaggtcagatagcagagctaatgcacatttgccttaccttatagaggcctttttgagaacaaggccacagcttatttgcttctgaactgatgagtaggcacttgaaggtgcctgtctcttaatgcactttagaaagcgtcacaattctcagagaaaaactggaaatgcattcactttatgttatatgccgatttaacggtttttaaaatggtggcccacgccttcaatcccagcacttagatgcagaggcaggtggatggatctgagttcagtaaggccaccctggtagaaagaggaagttccagtcaggacagccagactgtccaggaagacagactgaatcaaagttg

SEQ ID NO: 18908 - DNA, 1214 bp, Mus musculus
gtgtgcagtgccacccctgggcaggtgggtcctggtctgtataagaaagcaaattaaacaatcatggggcacaagccagtaagcagcggtactccaggacctctgcttcagctcctgccttgagttcctgccctggatgttgtaacctccaagacgacataaaccctttcctcccagagttgcttttggtcatagtgttcatcacagcaccagaaactctcatctaaggggccagagagacggctcagtggtcaagagtactgtaagtcctttcggaagacctgggctcaatgccaagcacctacatggtggctcataggcacgtccatgtcccacagacctgtgcaggcaaaacatcagacatataaagtgaaaataaatcttttttttaaaaaacaccctaagacaagaactgtctccagagagctgtctaggacattggcatgcacacacagtcccttatataattatattgaaaatggtgataaggtttattttacatagacgtttcaacatacctttcttctctgacaggaatataaaatttccagctttgagcagaggctgatgaacgagatagagttccgcctggagcggactcctgttgacgaatctgatgacgagatagaacacgacgaaatccccacgggcaagtgcatcgcgcccatctttgacaaaaggctcaagcacttccgggttaccgaaggctcaccagtcaccttcacctgcaaaattgttgggatacctgttccaaaggtagggaagatgacctgccagttgatcatcaatagcatgaaactatatacgggtcttcagaatgtctcacggggctggcccgtagctccgtggcagagttgtcgccttgcctccagtggacaggctctagcacgtgtaccctcacccctggaacaaaaactatctcagagggctagagagatggcttcacagccaaggcacttgctgcttttacagggtgggaatttagttcccagcacccacttatggtggttcacaaacccctgtaactccagcaccagggcattcgacgccccctaccggcctcttcctgaactacccacacacccactagagacacgttagaaaggaaagtccctggcttggtatgtagctcacaatgtagcaagcatgaagccctgggttcaatcccccaaaacatataaatcctggacatggcctgtaatctcaacacttag

SEQ ID NO: 18909 - DNA, 1187 bp, Mus musculus
gaaaactgaagttgattttgtacttgaacaaaaaatgcaaaagttctaaaccaaatgccaataaaccggatccagaaacatatcaaaaagataatagattgtgaccaggatatatttatctcttgtttgtttgtttgtttgtttgtttgtttttgagacagagtttctctgtatagccttggctgtcctggaactcactctgtagaccaggctggcctcgaactcagaaattcgcctgcctctgcctcccaagtgctgggattaaagatgtgtgtcaccacagcccggctaggatatgtttatctcaaaaaaaaaaaaaaacccaaaaactgagtttctcttaatattataaagcccgtattctttgctatgttaacaggaatgatgctggaagaaatcgatgatctccataggagaaaaaaacctttaaattctctcttactattttttttttaaacttaggcttggacaatgattcagcagatgaagtgctttctgtgtaagtaggagagacagagtctagctctccaacaatgatgtggtgggtggagagaacccactcctgctgttcgtcctctgaccttcctgtgcacactgagacacatactgaaaagatcagcatagggactttgggcaggtcatgaaacactcaccccttgggaagggagaggctaattagcatttctcagaccgctgggtgggagcagacctgcaggtgggggcacattccccagggctgatcattgctcactttcagacaatttccttgtcacctcattccctagagaccaatcagtttaaagggctcactgttctgccaatagtattgtgcctagttgctgatgctctgttctgcccctggaaaccatataaaaactcactgaacaggtgctgggggtcgccacctctcttttgggtctaggacgaccccagtgcactggaacaataaacacttcttgctttttgcatcgatcccggctcctgtggttcactcacctggtccctggtaagccaaggctccccgagtcttaaaataccacacatgtgtgtgcatgtatgtgtgcacacatatgagggaagaatacaagccagggtcaatgaagcacacctgcaaccccaaacactgtaggaggctggaagtcagaaggcagattcccagaggctctctggctagccagtttaggcaa

SEQ ID NO: 18910 - DNA, 1144 bp, Mus musculus
tcctgggggactagagaaatggctcagcagttactggccgctcttccagggaacccacccgagtcctgttcccagcatgtatgttgtctcacaaccatctatatctccagttgcaagggatccaacacccttttctggcttctgtggataccaggcatgtctgtgtaccgcaaagcacttgtatacataaaataaaaaggtaaacatttatttagctggcatgatggcatatccctttaatcccagtccttgggagacagaggcagggagatctctgagtttgaggccatcctgatctacaaagtgaatacaggacagccaaggctttattacacggagaaaccctgtctggaaaaaaaggaagagagaaataaatggggtcctgtaacgggatggggggtggggtggggtcagatacttgttagtaagttcttgccttgctagcactaggacctgaattcaattacgtcatcacatataaaatgccaggcatggtgacacatgcttgtaagtctgacattggtgggacagagacagtagaattcttaggatttgctgaccagccaatctagcctaattggtgagctccgggccagtgagagaccctgggtcagaggtggtccctgagcttgtcctcttgcttacacacacacacacataaggagagagcagctcactgtgttgccaaggttggccccaaaggccttgacataaatggtccccagccctctcggatttcctaatacctagggtgtgattaatggtatgaatctatctggctaatagtgtttttaggtagacatacacatttaaatttcatgaattctaatttgttgcctgtgactattataactgaggaaatattgcccaaatccaatgtgttttatcctttggtcttttttcttccaagaatttttataggtttagcgtttagatttggattttgacctgttttgatttttttttcccaatttggaggattgaaccagggcatcatgcatattagaaaagtgctttgccaacgaactgcatccccagcctttgtttttgcgacatttcattttgtagctgaggctggtttgggactcatcgtgtagccaacttggacttggaacaacagtcttcatgtgtcggtcttgaaagt

SEQ ID NO: 18911 - DNA, 1259 bp, Mus musculus
ggaatctatacaatatatatttctaagaaatagctattaagcattctttcaagatcatctttaagatgtttttgtttgcttgtttggtttggtttatttttaatgaaggaattagctatggtttagtgtagcttgggattggtttctttttacccattgaactctatactcatttttctgagtttagttgaaagtagcaagaaatgaaggagcaaaaatgtaatgataagcattgggtattctccataaatggtgcgtgtgacttgtgcatctatgcctggcttttatttctaggcaggagtttgttgatgcctatgtggattacatattcaataaatcagtggcatctttatttgatgctttccatgcgggctttcataaggtctgtggaggaaaagttcttctgctcttccagcctaatgaattacaagctatggttattgggaatacaaattatgattggaaagaactggagaaggtaaggaaaaaccaatctctacttgtcagtggaaaagcaaaactatgcgttattggaaatctagcccttgtgtgcttttgcccttcctatagctccttgctgtgcttattgtagacacttgcctgcccctcctgccctacagtgcactgtgtggcggcactggtgaggtgattgggaggcgtgctataggaaccctagcccaagactgagtgactttctacccatgcttaattaaggcttttgtttcctgtttttctaccaaatcccagtgttaagcttgaccatggtgggagaggactacaaaaggaaaagccttggtagcatttgaaatgtaaatgaagaaaatatctaataagaaaattgtttaaaaaaaaggaaagggaaaagccttggtgctcttaacacttttgttttaaagcggggaaaggggctggtgagatggctcagtgggtaagagcacctgactgctcttccgaaggtctgaagttcaaatcccagcaaccacatggtgtctcacaaccacccataatgagatctgatgccctcttctggtgcatctgaagacagctacagtgtacttacatgtaataaaaagggggaaaaaattagtagaaacattctgatttgtcttcctgaaaatagtacaagaaacatttacccagtcccatgtttgtgtttaataaacctctcactattttagtaaactcttacttacaaaggtgacgggtctgttcttccttcctggggagtcagtatcttcacattgtaaaatgccagggtt

SEQ ID NO: 18912 - DNA, 1136 bp, Mus musculus
tgtatctgtgccgagtataatgtatacaggtatcccggaaggccagaagggtatgccatgcgtcagaccccctggagcttttatagttgtgggctttatctatagagctcaagtgatgtctgcagttgcctgagatcctgtgtcaaagaaacagcgttggagaactagagagagctgggagcgcagcttagcaagggaagcctgacttggagttcagtccctgggacccacatggaaaaggagagaacttagaaagcttaactaaccagttttctaaatggctcttccaaaaaggatttctaaaagcttttgccattgttcatcaagtattgagtacttcctttaaaataatgaatgcaaaactagactgtgttgtctaaattgttttccttggcagtatttttgacaggtagtgatcggattcccattcttggtatgaagagtctgaaactagtcatccagtcaacaggaggtggtgagagctatctcccggtttcccatacctgttttaatcttctagatctcccaaaatatacagagaaagaaaccctccgatgtaaactgatccaagctattgatcacaatgaaggcttcagtttaatatgaccttggacttttctgtttagtacaaaaaccactcgtgtttctcttgtgaattcagcacagtgagagttacttctgtaattcttacttataaattgttcactactgtactgatgaaagcccaaaattaaaaactgtgcattaatactaaactgtacagaaccatgaattgtccatcctcatacaagtattgtgaatacattaaagttttactcacaggaattttaagagtttgcatatttcggaaattacctgatgtgtgggtgcatggaaatgttgcttactgtttcttcaatcactggggggaaagactacgatggcctgcccacagtcatttgattatttttccattttgtaaataaaaattttgtaataaaatagtgacattcagataccagtagtttctatggttgtaattgaacagagttttaagggttaaaatttatgattcagtctcacttgcagattctatctgtaaaaatcatggtggaaatgatctctagacagggtttctctgtatagccctggatgtc

SEQ ID NO: 18913 - DNA, 2178 bp, Mus musculus
atcaagaggttgttaatgaagctatagctacaagacaggaattgacagatgtaaactatccatcagacaaatcataacactattgaagctgtccggattcaggaattgctccaccagcattgggaactttagcatgtcaaaaaatgaatgtttacttgtgaacttgaacaaggaaatctgaaagatgtattatttatagactggaaaatagattgtcttcttggataatttctaaagttccatcatttctgtttgtacttgtacattcaacactgttggttgacttcatcttcctttcaaggttcatttgtatgatacattcgtatgtatgtataattttgttttttgcctaatgagtttcaaccttttaaagttttcaaaagccattggaatgttaatgtaaagggaacagcttatctagaccaaagaatggtatttcacacttttttgtttgtaacattgaatagtttaaagccctcaatttctgttctgctgaacttttatttttaggacagttaactttttaaacactggcattttccaaaacttgtggcagctaactttttaaaatcacagatgacttgtaatgtgaggagtcagcaccgtgtctggagcactcaaaacttggtgctcagtgtgtgaagcgtacttactgcatcgtttttgtacttgctgcagacgtggtaatgtccaaacaggcccctgagactaatctgataaatgatttggaaatgtgtttcagttgttctagaaacaatagtgcctgtctatataggtccccttagtttgaatatttgccattgtttaattaaatacctatcactgtggtagagcctgcatagatcttcaccacaaatactgccaagatgtgaatatgcaaagcctttctgaatctaataatggtacttctactggggagagtgtaatattttggactgctgtttttccattaatgaggaaagcaataggcctcttaattaaagtcccaaagtcataagataaattgtagctcaaccagaaagtacactgttgcctgttgaggatttggtgtaatgtatcccaaggtgttagccttgtattatggagatgaatacagatccaatagtcaaatgaaactagttcttagttatttaaaagcttagcttgccttaaaactagggatcaattttctcaactgcagaaacttttagcctttcaaacagttcacacctcagaaagtcagtatttattttacagacttctttggaacattgcccccaaatttaaatattcatgtgggtttagtatttattacaaaaaaatgatttgaaatatagctgttctttatgcataaaatacccagttaggaccattactgccagaggagaaaagtattaagtagctcatttccctacctaaaagataactgaatttatttggctacactaaagaatgcagtatatttagttttccatttgcatgatgtgtttgtgctatagacaatattttaaattgaaaaatttgttttaaattatttttacagtgaagactgttttcagctctttttatattgtacatagacttttatgtaatctggcatatgttttgtagaccgtttaatgactggattatcttcctccaacttttgaaatacaaaaacagtgttttatacttgtatcttgttttaaagtcttatattaaaattgtcatttgacttttttcccgttaacttccattgttcatagcatactagcccagtaagggttgctatcactaaatgcctcaagaaagtctatcttaacacatttgttacctgtgtttagtaagactgagggtgttggttttctagtgtcagaccagagtgaatccaaagctggccatgtaaaagacacctggcaaagaaagctaaatacaccaagtggagaaatggtttaatgtggtctgtggttccccctcctcctccaatttggaaagaatgccaaatgagatgacagtacaaatagccagagcctcacccagaacactgctgggtgtggtgggcatgcccacagtaggtgactcttgtacatacacagggactaacttactaacttaagatctcattttttgtagggaggagtgcgctttgaaggaaaaaggtgtgtgtcccaactaagcatttttagacaggagtccgttttagtgaatagcccaaatagc

SEQ ID NO: 18914 - DNA, 1099 bp, Mus musculus
ttagcttgtaagggaacagatagattttcattgcattctggagggagaatcaataggtcctaatgaccaattacaggtgtgaggatgcaatggatcactgcaggtacttggtttggatgactgaatagatggtggaaccagcaggaagacaatagcacactttggggaacctcccattttaaatggttaattctctcacagacagttattatgggtgagttgtaagattatttaatgatgtgttatggatgctgaaacagctttggaaagagtgcaataaagaattgggggatgattgcctaacaaagagtgaacaccccatatcctagattcaatgaatcatgtacagaaagaatattgaactacaaataaataaatactaagaagtgcatttatttaaatggaagaatttcaaggctttatcacagcttgtgaataggtaagttttttggcatgaaatgttctcaataagcttcagacattttggcttattaattgctgaataaggtagaacatagggtcctggacttaaatctagtcacagtcatttaataaaggttagagatgtgtcacaaacaaggaatggtgcatggtttgttggatagtaatgtgtgtcttccatttgattgtatttcaggtttacaagattgtggcttaagaataggcagactgatttggtcatagcatgaagcattcatgagtaggtagtaacatatgacaaaacactgctctttcaagtattcttcttaagcaaggtgaggaataagctctttgatgggcagatcttctctattcttagtcttggcgcagcatctaagtttagggaagcagttcatttctccatcagtattatattacagttaggtagctacattcactgctaacaggcagctgtgtacctggcttattctttattatcttttgcaatcaatcccttgatttactgatacaagctactaatactaaaaatccaggattgtgacctttcaggatgtgggtcactgctacatctatagttatcagtgctaatggaattgtatggaattactgcatctaacaataccattttagagtaaaagtttcaaatactattttaaga

SEQ ID NO: 18915 - DNA, 1204 bp, Mus musculus
ccatatcaagactcacaactttctgtaacttcagttccagaggagctgataccctcttcaggcctttctggatacttgcatgcatgtggtgcacacaaactcatgcaaggggcatggatacatatgcattaaaaagcaaaccaaccctgaaacaaaatggcataaggaacagggcctggagagatggctcagcagttaggagtgctcgcttctcttctagaggactagagcttggttctcagtacccacatcatgcagtcacagtagcccatgattctagctccagaagatctgataccctcttctggcttctccaggcacttatgtatatgtgcacacacatacatgcaggcacttacacatatgtgcacacacacatgcatatgcacacacacacatacacacacataaaaccagtattgtgtcatcaaaaaaacccatgaagttgaaacaccgaagatggatactctatctgggtcattcaacagctgatgttgacaagaccaaaaaaaaaggctacatccttatgtgtgtgtgtgtgtgggaggttctatacaaagcagttcaaaaagaaaccttgacgctttcaacatggctctggggtgggagccagaaatgaaaaccttccttgtattggaaccacagacacattcttgtggttgttgggacctgactctatccaatgactgaagggaaaaaaaaaaggccagggagagaatttaatccaaggtggcctccttatggttttgagccgtatttgaggcatgatctcagcttctctctagagaaacttgacttcagtccaaactaacagcagttgatgagactcagtggatactaaccacgtgttaatttcaatcatattaagctacaaaaaatatgtatcgcagaagcagtgagatacagttatctcctggggagaacagagcaacatgtctcagaatgaagcctttgaaagtatttatgtgtaggaagggaagacagggaggagatcaagaggaagtgaggccagttgcaagagggtcgaccacggctgctcttcacctcagcgttgcagaatagatgccacacactgttgcatacaccactagcatcaaagctagctcaggctctttagagtaagggcttaatgccggttgcccagtaacccagctcctggcatcacatatagtgtagagagtgggtataggctttggtgcggtat

SEQ ID NO: 18916 - DNA, 1266 bp, Mus musculus
gccatagctggagagatggctctgttttaagaatgcatactgctcttacagaggacctggattcagttcttagtgcctaagccaggtgtttagttcactgcagcctgcagtgccagctcctgggggtacaataccttcctctgatttccaagggcacctacgtgcatgtgaacattctttctcacggatacacatacacacatcatttgaaattaaaaaaaaaaaatcctgtgaaaaacaaaaaggaaccagaaataagctgattactacataaacaattgtctacggccacctcagttcctcataggtcccctccacacacactgtgtgtgttttctagggctaaaaaaatgagatcttgctatcgtttctagcaataaacactttagcacatagaggtctgggacagaactaactcctcatgtgttttcagggatcttattccatgtgtcaccaccaaagacttccacagtattataaaacatgtaactactctaaaatgacgtcagcccttggctacatcgtcttctttctcttttgtacatttggagaaatgcctgaaccttaatggtattactataatactgtcttatattaactgtagggttttttcattggaatattgtctgccattggaggggcgggggagacaacgaatgaagatctaaatacagaaatctgaacacaagttccaaagcgtgtcctctgacctctcccttttaggttgacttatttgtgaaacaggtaaaatttgagagggtcattgttttgtggtttgtactatttcttaagaaacataccctaagattaaattttttctgaaaagaaagtatctttttttcctaagtacttctcaagttagtcttttagtgggaattctgccgattaaccttgacttaacatttttttccttctaatatatattttttaactctgtgtactttaatactttaagtggaaataattttataaaatctctgttaaatctcaagccccaaatgtgggtggctctgcatgtgtgttttgggaaacttttacaataaagtaaactcattttattagtggcagctgagtatttttttttctttatgtgtctgaatatgtatgttgaagtctgtgaattgatgtcctttattgttcgttattagtaacagagaacatgtccatgtccttcagcttgcagcaagtcaggactgttgttactttctgtaaagcttcacttgggctgaggaaggagtcctgggttgtgaagtctggatgctaaga

SEQ ID NO: 18917 - DNA, 1127 bp, Mus musculus
acgtaacaggcttccagaaaaatgccatcttttattttattttattttattttatttttgggtttttttttttcgagacagggtttctctgtatagccctggctctcctggaactcactctggagaccaggctaaaggccttctttttaatctaacagatttagagggattgaactcagctccttttaggttgccctactaactggacattgtggacactaaatcatattggggtgatgaataatcaaattttcaatatcaaacaatgcttacatgggggtgcctgaatggcccacacacacaatgacctcttgatactacgaatattttctacacagaatcacattgttaatatttttaacacgaaataaaaattcaatctttttcctccccaatttaatcttgtatctccatctactttgctttgactaatagcctcttcctttcgaaaaggattctttaatttctattcaaacatctataaagtcccacaataaattattggacaggatgtattcatttctcatgaaccagacctgctctgaaccaatgctgtgcggcatgggtggttttccctgcagaggccgtgttacctgataaggtgatgtgataagtacagtaagttactttgtctccatggggacaaattggcaagattgtatcatattcaagtccagtatcagtattaaacttacccttaggagctaaggatagacaccatgcttgaggtacacaaggccttgagttcaatcccaaaaccaaaaaaaaaaaaaaaaaagatagttaaaacaaacttattattatttaatgagtttgtatactatttgtttcttcttttgacttttgtttgtttgggtggagggtgttttgttttgtgagacagagtctctctgtgtagccctggctgtcctggaattcactctgtaggtcaggctggcctcaaactcacaaagctccacctgccgctgcctcccagatgctgccattagaggtgtgtcccaccatgcccaagttgttttgagactaagcctcactctagccagcctgaaatgcactgtgtagcccaggcttacttccagtatatggtcactctggatgcctccgccgccttttttttttaaatattt

SEQ ID NO: 18918 - DNA, 1185 bp, Mus musculus
aattgattagcgcccccccccccttaaaacttgaggttttttttctctccaataataaatatctcctaggtagtttcttttcattactgaactctttcaaaacaagcatagttctcacaccacatttaattattaaaattctcttttaagaattacagtgaatgcaaaagggaaaaggtaattttgtcttttgtaattaaaattggttatgtaagcaggtggtattgtacaaatttgaattcccaaacttatttgtaaatagttgagtaaagaaattgtactaatgttatgctggtcagtttgttagatttaatgtttgttttatgtcatggattaggtactagaaccacagaatgtcgatccttctatggttcaaatgacctttctagatgatgtcgttcactctttgttaaaaggtgaaaatattggcattacatcacggcgaaggtctcgtgccagtcaaaatatcagcactgttcacgtatgtatgttattagtaatgcattttaataaaatacttttccttaggttattcaaaatcaaatagtaatataatcattgttgatttatttttagggtcattatacacgtgctcaagcaaatagtcccagaccagcaatgaactctcaagctgctgtaccaaaacagaacacacaccagcaacagcaacaaagaagtattcgtccaaataagaggaagggttcagatagcagcatacccgatgaagagaagatgaaggaagataaatatgattgtgtatcacgaggaggtaggcccactttttttttttttaaagatttatttatttattacatgtaagtacactgtagctgtcttcagacacaccagaagagggagtcagatcttgttacggatggttgtgagccaccatgtggttgctgggatttgaactaaggacctttggaagagcagtcgggggctctcaactgctgagccatcttaccagcccccttaggcccactttttaagagttgcttttgagagagagagacagagacagacagacagacagtgtctcactgaacactccttggctatcctggaattgactggctggctagtgtcagactcagagatctgtgtgttgagtgacaatggcattagttagaggcatgcctcatcctgcatagctagacctgctttttttttttaagggcatgtcta

SEQ ID NO: 18919 - DNA, 1122 bp, Mus musculus
ttcctcctgtgtgactcatcctaatgacagatttacaaagtacactcttgagttatattgggtcacagtatagaaaacagtttttaaacatgtaattagaggtacgggctttaacatgtatgccactgtcaccatataagtactagcttaccagacacagcacactcttatggaaaacataactttgtcaatgcttccacgcctccctctctagtggcctaacggggcctggcttacagagacagtcgaacacatttaggccttaaatgaagtgatctgggagttgtgcatatactcttacattacaaagttaattaccctatgggaaaaattgacagacaaacttgattataatttttgcttctagtggaataacatgttaggtctaacattctggttttgttgtaagcactaattctggttttaggatcatagggaatcataaaattaggtccgtgggcattgtttatacacttcatatctgcttttagtgaagaaatatttttagaagttactattttatgttgatttgttttaagttgaatgtaaaaagactgtatgattaatgttggttaaaagttgaatatttctcaccagattcatttaaaaataccaggttttataaatatactatggtcagaagtcttgctatgaaacttgagtgctaggattaagtacatgacagtctacccagctcaacaatttaggtttgtgtttttctgttgtgttggtaactaaaatgtaggtttttttggttttgtttctaatagaattctcccagtccttggctacatcaacccactcctgtgacctcagcggatggtattggattacttagtcacattcctgtcagaccttccagtgcagagcctcatcgacctcacaagattacagtgcattccagtcccccactgacaaagacattagcagatcaccacaaagagtaagcttaccagtgtttaacacttaacacatgcctttggctttcgtggtttttttttttttttttttggttttttttttttttttttttggtttttcgagacagggtttctctgtgtagccctggctgtcctggaactcactctgtagatcaggctggcctcaaactcagaaatccgc

SEQ ID NO: 18920 - DNA, 1133 bp, Mus musculus
agactgaacaaatacaaggaggaacatcgtcggattcttcaggagagtattgatgtggctccatttacaaccaaaatcaagggtcatgaggttgaaagagagaattactccagagtagtaccatcatcttctagtcctaaaagccatgctatcaaacaagataaagacgtagaccgctccgtgtcagagatttataagatgaagcactcagtgcctcagagtttgccccagagtaactacttcactactttatctaatagtgtggtcaatgagccaccaagatcctacccatccaaagaagtttccaacatttacactgagaaacaaaataataacctttctgcaacagccaatcctcaaactcattcttttatatcatctctttcgaagcctccacctttgattaaacaccaaccagaaagtgaaagtttagtgggcaagataccagaccatcttccccatcagagtgcatctcactcagtaacaacgttcagaagtgattgtcggagccctacccatctgactgtttcttctactaatgcactccgcagcatgcctgctctgcacagggcaccagtattccatccaccaatccaccacagtttggaaagaaaggaaagcagctacagtagcctttcccctccaacactgacaccggtgatgccagtaaatgctggtggcaaagttcaagaatctcagaagcctccaactctaattcctgagccaaaagactctcagtcaaattttaagaattcttctgatcagagtctaacggaaatgtggagatctaataacaacctcaacagagagaaagctgagtggcccgtggaaaagagtagtggaaagtcccaggctgctgtggcatctgtcattgttcgtccaccttctagtacaaaagttgatagtgtgccatctgtaccattagcttccaaagatcgagtttgtgaaagatcttcatctggggcaaataaaacagattacctcaaaccagaagccggagagactggaagaattattctaccaaatgtgaatttagaaagtgctcatgtgaaatctgaaaaaaactttgaagctgtctcccagggcaacgttcctgtttcagtcatgtctgctgtaaatgtagtctctactac

SEQ ID NO: 18921 - DNA, 1203 bp, Mus musculus
ttttcctcaataaagataaataaccaaaaagcctcatcaaggtggagacttgtactgaggaggtactgttagggcgttgtgtctgctataggcctccctctttctggatcttgtacctaatcggttgtgtttagggaagtgtaattgaaacattagtatttagcatgctgtatgcctccctcgtacagtacatcagtttacactctgaaggcgttctagaatagtgttgcctagtttaaggaaagggtattacagtgttcttcacaacttaagaattttgtaccagtcagtggtgttgcatgcctctaatcttagcccttgttaggcagaggcaagcagatctctgaattcaaggtcagcctggtctataggatgagttccaggacacccagtgctacatggagaaaccctgtctccaaaaaaaaaaaacactcaaaaactaaaaaagaagaaataattttgttcttccaaatttttatataatgcaagtctatatttttttttaaaaaactgtattgttacctttagatatgaagactttttaagatgtctgccattaccagaatattgcaacccagaagggaagttcaatttggcctcccatttgccagggttctttgtacgccctgatctaggacccaggctgtgcagtgcctatggtaagtatatgttttcgtttctctttaagttgagactctgtgggaggataacagactttagtccagaagccaatgtccagtggctttacctattactaaaacctgttctttaagtgatgttattgaaacccttcttaatatcaaataatgctatatgaattggcaggtagtatacttaagtaatacttcataattccttgtaacatttctatgtatttttactgaattgttttgtatgtggccttcccattgatagttttaggggctagtgtttatcacaaggcaaataaaccagacttgtcattagtttgttgtaatagactgttgtgtgggcataaatctgtgcattatcagatgcgcacagtgcactgcagtaaacgacctcacgtccacacaggtgttgctgctgctaaggatcatgatataggaaccacaaatcttcacattgaagcttctgatgttgtcaatgtcctagtctatgtcggcatagcaaaaggaaatggcgtcctctcaaaagcaggtaaagaaaactaaagagcagccg

SEQ ID NO: 18922 - DNA, 1099 bp, Mus musculus
aataactgcaaagtgctgttaaacagatttccattctgtaggtctgactgtcctggagcccactttgtagaacaagtaggcctttaactcagagacatccagctgcctctgcctctagagtgctgggataaaaccactacacagcccagccttccttactttcttaggattcagaacagtcattaacttttttgtttgctctgaggtttattttcatttttctgtgtatagatgttttgctagctttcttgtctgtgtccctgtgtagacagtgcccaaggatgcattacagatgttgtgagctgctgttgctgctgacagtcacacccagatcctctgcaagcatagccaggatgattgaccactgggctgtctctcagtccttagccattgttttataagagtatgagagcaaaaacccaatacaagtaatgaagatttttttccagttccttaagttggtatgcacaattttattttaacctatcccagatttcaaaagaacaaggccttgaagttctgccagagcatgatccaatccgggaccaaagctggtatgtgaatagaaagctccgccagagactgcttgaggaatatggggtgagagcctgcactctgattcagttccttggtgatgccattgttttgccagcaggaacacttcaccaggtacatatttatgtgattgtaacttctctgtactgaaaagaactgatttgaggggaaaattactctgtatatagattgaaaaaatcaaagaaaatgttacttaggaaaatgcacatcaccattgcatttccattagaatggtagtatttatagtatttgaaacctaaagcagttaaacactttgagagcttaagctgttgacttaagctagattgccagtttacacattctccccactgggctaggaagaagctggccactgcacatgctcaccagctctgtagagagcatggagagcggttgggctttgaatttgtgaacattttgcttctcagtggcatgctagtataattaattctaacatttgatgaaagatagtgtacaatttatatagctatctgcccacagaacttaaaaatgtacattaata

SEQ ID NO: 18923 - DNA, 1198 bp, Mus musculus
agagagagaaagagagaagatgttgtttttaatctagcagcagctcagtgacagtaaatatgtctcttttaggttaagaatatcttgtatcatgcagtcaaggaaatggtgagagctctgaagatgcatgaagatgaagtagaggatatggaagacacctaattgcggttggaactgggatgccccttgagtgacgctaggtctgacttaagctccattaaaccatcagtgccaagaaattctctttgtagtaattacttgctactgacaccataccagtatagcattatgccacagcccctgtgattcaatgctagctataaaccaagctaaatttaaaagcagtactatatagctgttcctgtatcatagtgtatatgatgtttgtgaagatgccagatttaaaatgatgtatttatttttggtaaaaaaaaaaatctatgctatattgttgatcaagtgtaaatgtgctgttgtacagtttaataaaataactgatatttttcactacattgagacagttactgtgagactaggacacaccagctgttgcctgcgtttgggaaattgctggattgcacagcagtcacgtcataatcagaaaattactgccaaataattgtaaaatgtgtaaaatacaaagtacataaagtagatactaaactcagacacttcaatattttgttgaagctattgactgtacaattaaacgttttcaaaaggtgtaatttatttaaaattgtctcattttggtaaaatttatgtgaagttttaaagctaaatattaaacttaatatgctatgtaaatatatacatatatacatttaaggatgtatttttttaaaacattggcttgcttttgttaaagtgcaagtgttacatatggctttgtacattacagttgaaaggggttttacattttccattaaaagactttatcaagaagctggatgttacagttctccctctctggtttgacactgctgggataaagtggagcttgcagccacaggctgtgactgggagccctgcctctcattggctctgccaagtttgttcagtttcagtagctgatcactgtccctcctggatagcctttgccactgaagtctgtggttctgtgtggacacctgctggtgttgagaaggagtaacccaagttagccactttgtacttgatgtatcacttagcttcactc

SEQ ID NO: 18924 - DNA, 3543 bp, Mus musculus
gggctcttctctccgccccctcgcctggacgatggatttactggagtgaccagcgccacatcttgaggaaccttggggaacacggcccactggagtacagccaccaccgggcacggttatgggggcgggtgggcggaaggctaggttgattcctggtatcctcagtgccaccaaggctttgatttaagggaaccgggcagggaccctaaagcgcttccatcctaaagccataatgaaaccatttttgtttctcattctctacaaaatacactaagtagttttgaatccctcttcccttcggtgactcagatttgttttctctcctgcccacgattgctccttaatagtttaatttattactgattgtgcatgaccttgaattgttcttgttttcttttttttttttttttttttttttttagttattcgtttggttaaaacacacacacaaactactcagcatctaaagtgaggagttctgaaaagacatctttctagcactggggttcaccctcataactgtgcgtgttgaggacgatgtctttcctcccctggcttggtagccacttctggtgtactcaggtaacctttagtaagaaggtcacatacgcgaattctcttgtcaggcccttaaagctcgtctttcccttgggtctcaagatctgtcgtttaaacaaatttttttgttgctattggggatttgcctttaaagcaaagacgattattatcctcagctgactttttccttgacgtgcttcaaagatgatacaataattatgtgttttctaaccagacgattccgaggagcggaatctgctatgcttccaaataactgaatgtaaaggccctggccacctgttgaattccatactcgtatttacttccagcttcttcctaggaaagaagagaaagatactcttgactgtttgttgttgttgttgttgttgttgttgttggttttgttctgttttggttttttgtttttgtttttttgcgttctctgtggagggagcctgcagaggagctgtgtggttccagctgtgctgccgggagatagcctcccagcactcccttaaacaagagccagtgctgcctactactgccttctcttgcaggaagaggtagagagcatgtagtaccctgggaggggctctggaagtaggctgctggctaagcaggcaagaagccctgggctcaatcctcagtaccacataaaccaagtgtagcacacagcatttaggaaatataggcaggaggatcagaagtcaaggtcagacttggctacatagtgaatttgagcggaaccgtggatgcataagacaccatcatataaatgtgtgtgtatacataacatatgaatatgtatatatacacatatacatatgtatgtacacacacacatatgaaatggatacatggaatagatgcttgagaatttagccatttagggcaccaagattggagactaaaccctatgccaacactgcagcaaaccctagcgctgctgcagtattatggctggcggaggctcagcccctttaccatgtttacagacgtgtctatcgattctgaccatggaccaccagtttcccctgtttactatgtgtagggttcctttttatcacaggccttttcataaagacaaactgtagaaatcagatgtgcccagctgtcttctaagctctcttgatggctcatgtggcaatagaatatactaatatcggcaataaatggagacttactgtcatgagtgacaaatgtttgttgacctggcagggaaacaaactgcttttggctccatgtatccaggatacacatccaggctgaaggggtgtccttcccggtgcagtcattaaagtggtacgagacagcaaattattgctggcttggcttgtggctttttgtttgtttgtttgtttgtttcattttaataaaaatgagaacaacaggccagtggaaacctgctttaaacctgacaaaccatgagcaacacccaaacacttccaccatggctgctagagttcaagttctttctgatcatggtctttaaaatgcctttggagcctctcgaagcagctctttgagccactcgtatgaacatctagataggaagtgatggttttaaatttgactattttcatagaatattaataatgaatatggtttttcagccacatacagattttgaattgcagcaaaggttgattcctttacaaggattgttgagagtcatgtgtactttacagcatactctggaggtcctttcatggagcctgtagaagtctagcctggaattgggctagtaataacaattattatgaaggccttcattgcaaaagaaggaggagaaatattaaaggtttgttataagcagtttggaaggaaaaaaaccctaaggtgcttttcaaaagagtaacgaaattgttctgagctaaaacagcaatactgtgttcctcattagttcaataggaacagtgaaactgtcatttcactaataaactgagtaaacttacggtgaaaacagtgtaatatgttttaatgagccacttgagaaagaatatgctcgttactaagataaaatgtgcagaaaaatccttgcacgtctatgcataaactattagctataacttctgccgttgtgtttccctgtaggtctacaatatagattgtggtctagaaattaggataaaagttaccttctccttttcttagaaaagaccaatgagcacaatggtgttaagtcacttaactgttctgatgaataataaatgcaataactagatcctgagtgagacgctgtctgtctgtctgtctaaatacactgaaccttttcaaccttgtagttctatcagtgaccagttatatcgatgtaagattttcataccttcctactcctttgagaattgatgggtttactaccacatgctgctgattacattaaaaaacaacaacaacaaaaaaaaaaccctgccttttaggtaatgtgttttctatgttaataggagtgagttctcttgagtttttaacatgactgtcaaaatgtacacctttccttccccactcgatccttgcattgtcttgtaggttccttgaacttgacatctggggagaacctacctgctctgatggcaaatgagtcaactgctttagctctcctgtcctgcccagcagagagacagttacccccacttcgtcactctgccactctcctgacagcgtttgctcctctaccgcaggcctgaattcagagtgtagggttatacagaacccagattggtccattgtgctgaggtttctgctgtcaaaggagatcatttcttaacaatacccagtcttacagtgcaggggtgtttacgtttctgagtaagatgtgtgtacttatgggaaataaaagcatgtttaaaattacgtagaaataatgttgcttattgcaaagtggagaagggaaacataactattactattttaattattgttgaaaactcacagtttattccataaggttgtattgtatcaaaagccagtgacctacagatcccccaa

SEQ ID NO: 18925 - DNA, 1198 bp, Mus musculus
ggagtggacaggtgtccacagaagactctgggtcctctcctgtgtacataacactgtagtcaaacaaaacttcactaaaatgtagtccctcagattttgtaaaaaaaaaaatgtcgatatcaatatttaatagtatagctatatctcctttcttggatcataagaaacatggaagacatctaccacaagagactgacaaaggatgcctgaaggtttcacttgatgtagaagaaggacacttttaaaatacatcagaagctagaatgccaagcacctctgaggatgactgatcgttttaatgacactggtgatcatcagtgagcctgtgacttggatttgggaggagaggagaggaatgtacatggacaatttctgccaggtcttccaaagagcccattctgatttcaatccattattaaacgtaatgggtatccagggggtctggcacatgctgtcctttaagtttactgttgtgggtcagtttacaaggagtgaccgcacgggcctgtatcccttcctatgttcatgtctctaacttgggtgtggtgccagctgacattctctggaaccccactgagtactgatgggaccagaggcttgttctctgtagaacatgtcttcagacggtggcttgcccactcccatcttctctgaaaatgcctgagcagtcgattgcccttgatctgccattttccatcacatacttatataatttagcagtagttcccagaacaacatgctctgaacaggatccccgctcacattgccctctcctgtcggtccaactatgtcgggttttcatagacttctgtcatgagctgggtttttactccagactcctggaatctttcttctcagcaggttaagaagacaagttgggtataccatctctctgccttaagccctccatttgtcttccagcacaaatggacactcacacacttcaccatgcctgttttccacaatgttctcaccttaggtcatcacaccatgtcctccaatgctcgttaactctcccttgaatgctgcctatctctttgattcctttgttggaggtaaagcttgctctgacctcactttgccttgtcttcagagggcagtttaccatgtccaggggtgatgttaatcgctccttatctaggtgtggattccctttctcacctcctgaatgctatgctttgacagtaaggacttcact

SEQ ID NO: 18926 - DNA, 1099 bp, Mus musculus
ttacatttatatattacatattacatgttacatttacatatatattatacacacacacatataatatataccataggcctgtctcttccaacaaggggttattacttttatcatttgaatttccctctgtttgtaaaattatgcactatgttttaatatcttagaaattactcataaattgtttttttaagttttattattatacataagtacactgtagctgtcttcagacacaccagatgagggcatcagatctcattacagatggatgtgagccaccatgtggttgctgggatttgaactcaggaccttcagaagagcagtcagtgctcttacccactgagccatctctccaacccctactcttaaattgtaatcacctaaataaacaataagagatcatttttactttttctaagacagcatgaaagctttagaaggatagcatgtgtttccctaatctgtgcattcttgctatagaacataattctgtttgtttctgagtgtcacggggtacattgagcttgacctagcttaaccccatgctctgactgttcataggggacaacttgacttctatatcttgaacttgggatttcccccacacacactttctttttctcaaaacaatctttagagtttcttttagaaaaactttgggcagggggtgtcctgggacttttgacttcactcttgaaaggcatttttacgggatatgcttggtactttcatttctgtccatcttgtccccttggttcagaaggaatgattaagtactttgagatgtgttgggtacagggttgagagtggccatgaaacatggacagagtgactggggcagtgagactgccctggggatgtgagcagagagggagctggcaggtgccaggtgcatggacgataccatacatggaccgtgggcataggaaccctgcctaaggcaggtggtgttttataagtgtagagattgatactcaggttaattgagtctcctagacgtcctctttcttgagggaagcacagagaagctgtggttgttttattcctcagtagtctgagactgtaagaaagcccaggtaagaggtggcaggtggaggca

SEQ ID NO: 18927 - DNA, 1150 bp, Mus musculus
aaacttgaagaataggtggccgtggttttgtttttgttttaatctaacagggtctcaaaagttttggtggtaattgccatttctttctttttaatacttactttatgtatttaagtacaccatagctgtcttcagacacaccagaagagggcatcagatcccattacagatggtcatgagccaccatgtggttgttgggaactgaactcagcacctctggaagagcaagtcctgagccatctctccagccccagtaaagttgtattttttgcttgaaaatgcctctgttagccctcaccgatatcttcaacaatgcccatgaacttttgatgcaacctctttttttttttttttttttttaattaaaagatgctgctggcaaaattgcttctgattcctggcacccaagtgcccccgtccctccccgctgtgcccctcacttactgtgttcctctattgcaggccgggatttaaattcaccagccacttctgatttcgtgtgcaagttgccgctggaagaatttagggtgtgtgtgtgtgtgtgtgtgtgtgtgtgtgtgtgtgtgtgtatgtatgtatgtgttcctggagacactctggaggagttgtgttctcagagggcagctttgcaccaggtctgaaaccagcctccttcccagagcctcatggtgagtgaagctctgcccaacccccaccagttcctggaggttcctctctgtatcactctgctcatcaaatgctaggtcacgcccaccccgcacaacaaaagaagttaggacaggcttgtccttctctctcttactcccctccttctaaccctttccaccttccttccctcttgtctcacgttccttcacaacttaaaaatatccggagatactgacttaaaagcttccaaggaatttttaagaagttttccctcatttgctgaactagaacgcagagcggagggatgcgtgataggaaaggtgaggcagctttgtgtgagcaggtcgtcctccagtgtccttccgaatcatttcttcgctaacagatcttgataacatttaaaattggagaaacttaatagaaaaaaatcccagatatttcatattaaggtgctttccatgacggagagataacgtctctggcagttgcacttacacctcta

SEQ ID NO: 18928 - DNA, 3732 bp, Mus musculus
atcaaactcaccaagttcaatcaatgcaatgtatagtaaaacttaaagagacctttcattctgacactattaaacaatccagagaaggaaacactgttaaactgtatatattcgcttcttaaagctacccgtatcactgttggctcacctaatttatatacaggtagttgtgtttccctcccggttccttcttgttcctgccctagggttttttttgttttgtttttgtttttttttgttttttttggtttgtgtatctgtttgtttgtttgtttgttttttaattaaacagcatcccttctgtttgtaggtcttttgatttgttttgttctgtttgtaaggctgactgattcttctagttgtcaatgtgtattctatcaaccccaccccaggccccgtccccgtccccaccacatcttcttttgagcagctttgggtggtcaagttattgtttacaaattgaagcaactgattttagtggaacagactgtaaagaaccccccccccccccggagaacacaagctagcttaaagcctgtgcctttgtgggtctgcgcctggaggatgctgcccctcttaagtgggatggctatctgaaagagtttagatactgcttcccccggccaaatgctttgctttgaagtattggattatgtgaaaatgttaagcattgcactcaccttatctaggctgtgaacccgtcctacataccagagaattcagaaaacaaaaaacttgttggtgaaaagccactgagtggaccccacttcatgggctgaggagaggtttcaggaatttcaaaacttaggacaagagccagggtaactcatgccagtgctggaacagcacctttcaaatggtctgcagaaaggggacttgggaaagggtagtgtgtaactcccaaggtctgaccactgggctacccagccaggccttggcccatcaagggacagagtgattgccatcatcagatggcttcttgggtttcctagtaagattctcccaaggagacatctttgaggaataattggatgacctgtttgtgaaagaaagccatcttcttgggtgtctagggcctgggtttgatgagtatttgtccccgtaaagtggtttgtatcaagtttttcaccacgtggccatgctatctgctttggaggtcttttgactggcactctttgccaacgattccatttgctcccaaagcacaaaatttgctccgtgtagcacgtgcatccttagaatggattctcgttcccatccgcacccaaccctgatgaaagcttctttgatgaagtccgcagccctctgccctcttctccactaacgccagtagactataggaccatagttaactctctctctcttttttttacctctgacatatttaagtctatgaaacttgatgacggttttcaacatctctgaataggtaactgaactacaaaaataatcaaaaccagtgaccgtgaatctacggctcttaacgcaaagccatgcatgccattcgttcttattgaaatgtcctcatgatatgaagccaaatagtccatgtagtaacatgctatccaaaggtggaaacaaaagaatgtagcgacccagtgttaagagttccattcgcttcaattaattatttaccttcctgtggaataatatatataaatatatattatatatttaataggaccatagatagattagtataacttagctcataaatgtgcacatgcagaatattctgctgttgttgcacaagaaaaagggtgtgtgtgttgggggtgggtctcaattccagccagcatgatactggccaggacacagtatgaaaaagtgacgctagattgaatagccacagaatcagaagaggagaaaaggaaccagggattctgtagcagacatgggctggatccatacacggtccctgtgagttcatttctcaatgcaaaacggcgatgtctgtccccacacaaaaaaacccaccaccaccacaagctcacccatttgtaagatggggcgactgatttcctcagtgcggtgatttgtgatgtgttcgccaagtaggaattcaatcacgccattttcaaacaatgtcaacatatccagctattttttttttctcatctcttctgagaggagactcactatttctgttgtagggagctcggaccctccgtgaaacatcaggaccaatgcaaagacctgggggccggggagggggggttactctcccagtagaagtagtgtgttatttgttttcaaactccaaacggagatcttggagatctttcaaaaagaccattgaatttctcattggctgagaaggacattttttaaaagtcttaaatctggctttgtttgcattgtttgagttcaaggggccttattattgaatggcattgcacaagcctttcttttttgcaagcaaaccattgttattagttgttctgtaaaggaaattgtggaatccaattggcactggagtcctaaatccatttaccaagtgtggcttccgagaaatgttgtaattcaaaatgtatcaagcccgtgaatttgttggggatttggagattctaaataatatttaaaaagatgtcatctctaggcaacttcgggggtctcacttttggaaattcaacttaaaaataaagtagaaagtaaaaataaaaataccacaacagcccaaccaagtgttaagcttaaagtatttttttcttagtaactgattcaaacatgtagcgtttgccacaggtcagactggttcatttcctagctagaagctcccggctttacttgttcaacaggacatcgacagaagggtttgtctcagtgttgagctcacacagctttgccctctggtgcatgactccttgggtcctgtatttcactgtgtcggtgtgtctgatggaagtttcaaggtggtcccacgaaatatattttatgtagtgtgccttcaaagagaaccatttatctctcttctcgtgttgtcccactaagtcacatttggtggtggccagccaagtcccgtgtggtctagtctgacttattatcccgggctgagaaaggaacgggaatggttttgccccagtgagacccacaccgctggagcagggactttgagcatctccgctccggtgttgactgttgatgtatttgatattctgcttatctcccaatggcggaaagaactctgaaaaaaaaatagcagcgtaatctcttggctgtttatacttttttaaacttccctgtgttgtaaatattgtacactctgagtaaccccagctatgtaaccttgatgctctgtaaggtgatatttgtatatagcaacctggcccagtgatgttatataatttcccaatggagaggttattgagtagccttggcctctagttttaaacactaccagaagaatgctgagccaactataaacactcaatttttgtatgttttccaaattgtacttattaccgcttttgatactgtattctgtctgtgccaatggtttcccaatcacatagcaggcaagagatattttgtactttttgatccactgtaatatttaataaaaaatgttactatctgtttcctttgggagtgtctgtctcttattcctggggagctttgtggccagagcaaaggacttccagtctctgctttccaaattggagatggtaatgttgataatgagcgtagcttattggggacctactagaagcttccttcgcctatgaatggtta

SEQ ID NO: 18929 - DNA, 1285 bp, Mus musculus
catcggatcccattacagatggttgtgagccaccatgtggttgctgggagttgaactcaggacttctggaagagtagtcatcgctcttaattgctgagccatctctccacctccttaatctattttctctgaagataatatgcatgatcagatttaagatctggagtatttaaattagtttacaataattagtccatctattataactgtgtttataaaaatgctatggggtttttcctttgttggcttgacgaaggggttgtgtggacactatcatgaaacactataactgattgctactttttcagttgtgaataacagatggacatttaatttctagggtagatataattagctagataatgtgaagatttatgttttggttttaagctgtctgggtgcttatcttataatttataacaggttaccaaggtgtctgtgtgtgatttaagtatcttggagaggtaaatagagggcaggcttctaaatttatttccctttttctctctagaaaatgctagtctatgatcctgccaaacgaatctctggcaaaatggccctgaagcacccgtactttgatgacttggacaatcagattaagaagatgtagccctctggatggatgtccctgtctgctggtcgtaggggaagatcgtgttgtttaccgttggctctcttcctgtcttgtatagttttctttgtttgtaaactgtcatctggacttttcttaatttcctacgtataacttaattaacatgtaaatattattccatatgaatttaaatataattctgtatatgtgcagatgtcactgtggtggctgttaattactataacacaagtgttaattactacaacataagacttgagtctccctagacttcccagcagccattcctgcagctcggagcacagttgaaggagctgagctcaggcctcgtgatgctttcaagtgcctccgtgttctggatatatatgattcctggtcagtttcttgccatttggaaactacaacccacctacggacagtgtttttctacttgtgcttaagcagttgggatgagaaggccaaagacccgaggatgtctagagtaatgacccccagatggaagtgcaccaaagctggctgggtttcacagctagagatcaggggctgtccagagcaggacagcttagaacatttatgaagactccctatttttaggtttgttgtaaagctgttgtctagttggattcctgtgctctgcatggtcagaggtaggttagaggatttgccttggcttct

SEQ ID NO: 18930 - DNA, 1177 bp, Mus musculus
tttttcacagtttatgatatgactcgtctttaatggctgtaactgctgctgacctcattgcattgttcattgaggtcattcactattttgataaataaactgtagttctaaatcactaatcatttgaatcccctcctaccgctttggcttagatttcttttcatttttcttttttttctttttttttggtttttttgagacagggtttctctgtgtagctctggctgtcctggaactcactttgtagaccaggctggcctcaaactctgcctccagagtgctggtattaaagttgtatgccagccaggtatatgccacccaggtatatgccagccaggatatggctgctttggtcctttgactttagagatctgaaaagcaagaggtctatggtacttacccactaatgagcagaaatcagaaataaaataggttcaacttagtaatttgcatatagctaattgtctgaagttcttggtgacacctgcacagcttcctaaaagacaaccgtgtgtggtctgtcctgtgccaggtagtgacgctgtggtaccgatctccagaagtgttgctgggctcggctcgttactccactccggttgacatctggagtatagggaccatatttgcagaactggccaccaagaagccgcttttccacggcgactcagagattgaccagctcttcaggatcttcaggtaattgtgttttatacctaagctgttaaaagcctgtatggttaaaataataaaggcaccgtgtatgtgataggacttttgcttcctttcagagctctgggcactcctaacaacgaagtgtggccagaagtcgagtccctgcaggactacaagaacacctttcccaagtggaagccggggagcctcgcatcccacgtcaagaacctggacgagaacggcttggatttgctctcagtaagtgagctgttctttatggttcgagcgtggtgcccttgggtgtcagtagtgacaggtaagggtgactggatgtactcagtcctggacttgtcagcacgaagacacagcagctgagtcggatgcccggtaatcctgtagtgacagcgagctgcctttgaggtgtgaagtgcctggtggtctgaggagcctctggtgttggactttgtcatttacttctcatccggtaggagaggctggactcaca

SEQ ID NO: 18931 - DNA, 1243 bp, Mus musculus
cctcgccagtgacatccactgccactcaccggtccagttgggccattccccctttttgatgaccttagataggactttctgaagccatcccctcctgggctcactctttaacttgttctagagcagtggttctcagccttcctaacaccacaaccctttaatacagttcctcctgtcgtggttactccccagccattaaattagttttgttgcttcttcataacaattttactactcttatgagtcataacataagtatctgatatgcagaatatctgataatgtgtgcctctccaaagagctatcgacccacaggttgagaaccaatgttgtagttgaaggatttattcattttcttccaggcagcctcggtattcccagtttgctctgggcctcgggcacctctcacagcttttcagctgtgacctttgacctgcttttctgaattctctggcctagaggcttgtctgctacattgtgcctggctgttctggattctctggggggggatcctgaatagcggcttgttgaaataatttgaaaattacatactgctgtcgacgttttcttctgccaattccaagtactcagtgaaacctgcgaatatgtgtttgtcccgtgttagcattttcttacgtagtcacctgtgtattgttggtcgccatgcccagcaggacagagaagactgtctcgtcttcaggttacacagctgcctggctccatgtggttggtggggccttccttggcattcagtaagcacgctagaaacatttgtttttgatgaggtttaatggcttttaccaggcagtgttatcaagactttacccaggataactgggatcttactcttgctttcacttgtatgacatttgctaaaattcagagtgtgtgtgtgtgtatgtatgtatgtatgtatgtgtatgtttgtgcgcgctcattcacacaggtgtgcatagcccatggaggccagaagtgttacctcctctggcattgcatttacaggaggctgagccctggtgtgggtcctggtcctctgcaaggacagtgtggtctaaaccccgagcctccccagccttacctgatactttcccctcctcaattattacttaaaatacttcaggatctaaaacaaatgtttaatttcagaacatctactgtttagcttatgaatagtgccctgttgcagttaactgagaagagccaggagttgagatactcagaacaagcagttctgtgttgtctc

SEQ ID NO: 18932 - DNA, 1234 bp, Mus musculus
cctgactcagtttgaccctgaaacccacgtaatggaaggcaagaactgactcgaacggttgtcctctgacctccacaggtgccctttggcacgtgcacactaacacacacaagccaataactaaataaagccgttcccttccctcactttaaggacagtattggtgacatattaggcctcattgtgcaggctgtgtccattcaaacaagatgccatcatcatcatgggtggtaaagtgggggggggggggcgtgactcacctgatagataagcttcatcgcttaatgcactgaacctgggaggcagggagtgggtaggggtcatgcttacatcgatcatcaacactaattgagcttgcttctttggtcagcccctgcaatggggaactaacctctccctccactgtttctttcttctgtatggcagttaaaaaaataaaataaaataaaacctacaggggtgcctgggaaggagattacaccatgagagtctcttttctccctgatggccacatagtcaagagggagggcttctgactggcttgttctccacctgcaggtgaagatgccatcacaggggacactgacaagtatctcgggccacaggaccttaaggagctaggtgatgactccctgccagcagaaggttacgtaggcttcagtcttggagcccgttctgccaggtactgtattatcgctgggggattttcttttttttttttttttcttattcggtgtttgcttacaacaaccatgatctgtcatgagccagcatcattcccatctccctcacggctccagaatgcactctttggatgccatgtgaatcctgtggcatgttcttgatgtgaacacacacttgtgcatgtgcacacaagcacacacactggtttgtttgttttttgttttttttttcctcatcatttgcagtgtgtagtctctctcgtgtgctagaacaggtcaatctttgctcttcccatctccctctttgcagttggcttccagcagagtaccacatgagctccccgataaatgggcaaaaaccaacccgagtctcatgtttcaaaagtagcttgctctgtattggaagacctttcttgttacgctgtgtaagaaatttgcatacggaccatttgctgtattggttggtgaagaattaaattcgtggttcccttgatgataaaaacaaactgtaaactgtcttccatgcattggcaatttaggttgtgccatca

SEQ ID NO: 18933 - DNA, 1126 bp, Mus musculus
gtcgagttcaagggcagccaaagttatacagagaaaccctgtttgggggtggagggtggaggtctccacatctaagttaaattggaattccatacacctttttatgtaagcatagacacaattaggagtccaatcacacaggctttctagaagttaaatgcttattaagtacgctgtttacatgtgtgtggactcttgctcttgtttttctggatttcacattagtgcctttttgatacagatatgatcagaaagctaatctggggtgaggacacagctttgggaagttgtatcttcagggcctctcctctctgtcctttcagtctctgggtcaaagtgacagagagtaggaattctagtctcattttctcacctgtcctccctgccaccaaaaactccctgatcctccattacagggataaggggttgagaaataacctcattttaggtacctacggcttaggttttatttcattgttttgaaacgtgacctgcgggagcccaggctggacttcggcttcctttgtgcctgaggatgtccccgaactcttgatccacttgcccttcccccgtgctagcattccaggtcagtaccacaccatgcacagttatgcagtctcgaggatcaaatgcagtcttggagaccaaaccgggggcttcatgaatctttaccgtctgagctgcatctccaccctcccaggaagatccttagttatccctgacagataacctttcctttgcatcctgtgaggcttgctttccgtagaaacagcaatcgcaggatgcctgctgcactagactcatgtttgtgttcaccacagatgccctggaaacagaatttaccatgtggactccagagtctttctttgtggctaattctcttggattggcacccttagtgtccccggctaacttaagcagcgggtcctaaaaggttaagaaaattacccacagtctcataaaagcagcagaactaggaaataagtcctaactgactccctcccgaatgctcctcctcagactcactgcagacctgacctggcgggtcgccccaagtcaacaggaagcaaatagagaaagaccatcatctcggtctccgaggttggggtggatgggttcagtcact

SEQ ID NO: 18934 - DNA, 1122 bp, Mus musculus
cccggcgctgcagtactgcccgagtccgggcggggtctctgttccctggcggagcagctcgcgcggccgcgggaagcgccctctctttctccgccgccgccgccgcgcgtctgcgccctgccgcccgcccgcgccgcgctctgagctcccccgctccccagctcccccgccgccgccgcgcgcccggccccgcgcccactcgccgcgcgcccactcgccgcgcgcccggccctcggcgcccggctccccgcgcccactcgcccagccatggcggacagcgcgagcgagagcgacacggacgcggcgggcggcggcccggcagccatgcagtcgtcctgctcggcgacctcgggcggcagcggcgggggcggcggcgggaagtcggggggcattgtcatctcgccgttccgcctggaggagctcaccaaccgcctggcctcgctgcagcaggagaacaaggtgctcaagatagagctggagacctacaaactcaagtgcaaggcgctgcaggaggagaaccgcgacctgcgcaaagccagcgtgaccatcgtgagtgcaccccgcggaccaggggggacccccgagtgcgcgcccccgtgcggggttgcgggcctgcgggcacagagagcgggccttggggccacgagcgccctccctcccttgaggtgttggaggtgcctagggagactccccaacgtcccctcgtcgcctagggtggaggtccctccgagccagggctagaggctggcggcgtggctggggggggggcggggtgggactttctcaaccctagggtgcctgaaggctccgaatagagggacaccctctccggagcccccgtgagtggacgaagctggggtctgtccaggggttagttggggagacggggtgtgccactgggctgggtccccagttggcaggaggacggcgctttgctggatcgccggcgctgggggagggagagagtggcccggaatccgggaagtggagttttctggccaggatggaaagggaagggcgggcactgaggctacaccagcaccccgttcggaatcactgtccttttgggcccggagggtgggcgggtacagagtagtggggagtgtaacgtctggcgctggc

SEQ ID NO: 18935 - DNA, 1145 bp, Mus musculus
ccaacaacaataataaacaataatatataacataagataaagacaaacacactggaataggacaaagcaaaccaaagaaaaagtacaagaaacacatagagacatacacctttgcacatacagaaattccataaaaacacaacactagaaaccatactacatatgcagatggcctgtatgggacaaaaagaaggaggaggaaaaaagaaaccttaaagtgttatgtgacaagaaacctccaaagttgccactaagttcattttgcatttggccatctgctgctgggcatgggtgtctgtccataagagtggcttctacacctcgtgagccaccactgtagagaactaagttgtcttctgtgagtggttatcacttggagagagcttttgggttagccatggggggttgtgtgtccacttcccctcttagtgctgagatcctgtccgacttagatctgtgcatagactgtgtgtgctcccatagtgtgtgtgtgtgtgtgtgtgtgtgtgtgtgtgtgtgtgtgtgtgtgtgtgtgtgttcttaacgtgcatctctcggtcctgctgtttccctggtgtcctccatcccctctggctcttaaaatccttctgcctcctcttcttcagggttccctgagctctgaagggagtgatttgatggagacatcccttttagaaccgcatggtccaaggtctctcactttctgcacattgtccagttgtaggtctctgtatttatttaacctactgcaggagggagcttctctgatgatgggtgagcaaggcagtgccctatgagaatgtcagaatgccaacaggaatcattttgttgctacattgctttagtatttggatttccacaggaccctggcctatcgatactgtcttaggttcttgggtgcctgagcagtattggagataagctccctctcatggagggggccttaagtccaatcagacagtggttggttgctccacgagctctgtgccaccattgcaccccccgtgtcttgtaggcaggtcactgttgtaggtggaaggcttcgtagctgggctgctgtttatggttctcctgatggcctgccgtgagcactggtccataggggtgaagtctgtctgtaggcatcggctcagcttctctgttgt

SEQ ID NO: 18936 - DNA, 4767 bp, Mus musculus
tggtagggataatgtgacatcactatcatcatcattggctgtgaaggatgcattttcattttgtgttccgtcctcacaggcttgggtgtgaacacaacctcctttcccctgctagttcaggaaccaccgatgacagagaaggagcccatggctctctttcccgactcggggtgggttccgccctctgattcatgccttgtcagaactgaccccgtgtccccatcttccccgcagaggccatcgccacggagaagcagcagccctgacaagtttaaacggcccacgccgcctccgtctcccaacacacagagcccggtccaaccgcctccgccgccgccaccacctcccatgcagcccgcggtcccctcggcagcccccacgcaacccgcccccacgcagcctcagcatccggtgcacccctcctcccagccttaatgcatgagcttagtcagaatctccagttgggactcgtctgatggagccaccttctcaacgccaaaggcttctcctctcccggcgtacttggatctgacgcgtttgcattgaggttacctatctacctttccctcctcgtcgtgtcgtgaatgttcgtcggaaacgcagccgaggttgcgggtccgcaacactaaccagacgactttctccaccagtgttttacttgaatctccgcgtctgtcattccctggctggaacgtcgctgtctggtatctggtaatgagcagcggtgtgcaaaccctaccccaccccctccaacccttcccccccaggggggccccagggctgctttttttcttggcttttaggtttgtaaaataagaagggagatcttttttataacacttctctgtggatttgcaggaaaattaccgagctgtttagaaaccttccttctccaggtcagtgacgtttaccgaacataaccaagaattcagcactacagttcagaccttttgcagacctaactcactgtaggattggaagttagatgaaccagtgcccacaacatgtagtctagagctttctacagacacacctttttacagattgttttctgatgtaaattgaccaccatgtcctttgtaaaacagcctatagaaacaaatcacacagccgtatctcccccacgtgcgtgggacgggaactattgcctattaagatgtgatttttattttcctttctcaatgttaatccacctaagccggcgccctctagcgtgagaggagagacgctttcccaccaagggtctcgatggctgactggaatgtaggcttagatccctgctgcgggtgggccgtgagattgtaacagccaatgcggctaaacccatccattcttttgtgttgtcctgagacagagggtgcaaacaggtactttccaggtgcaaaatgctgttaggaaataatgtctgaggggtaggcgacagacaccctagcatgatggcgcttggcagatcatagcatagcaagcagtgctctctggccttgacgggcgctcacttagccaggagagcaccaagaaggttctgaactcaatccgccattccttcagcacaaatccttctgtttggccgggggtgggtgtgggtggggacaccaagtggctcttttgtagaccttcgtctctgtctgtccgaggttactttgtgctttagtagtcaagtgcttcccctgcccgtgtttgcatatttatatatgccgtggatggaaataacttactagagaatgtatattttatgatgagaagcgtgactctgttagctgtaatcagagaactgaaaaattaatttatcagtaatttttaagagttcatgtttgtgacaaaccatctcttaacagcacgtcctcatggaacacactcccgaggacaaggaacataccttggtgatattgtagataattaatattgtacagtctagaaacctccattttttgccttcgaatgcatatttaagagttaacagaatggaaaagtgttatcagataatagtgtttgacagcgttttaagaacttgagagtaagaacaaccataggacctttcactcttctttctcgtccacccctaaactgagaatgctgtatctccagcgaccgggaagaaactgtcagcctataaaagttttattttcaaggtgtgtgatgtataggccatagtgtggttagcagacatgggatggagtctgatatctcctgtcaaggcattaggttttttcagtgtctgactaaaccccgggcattttccaccagctccccaaccctcttggtacatgaccattccagggaaattctgaggatagacagaggaattcttccttcatggtacagtcttgattttttttttttttttttttttgtcctttcgagagaagtacggtatgtgtttacaaaatcttttctgggattgtagatttcagtactgctggctagcagctttatcctccagcacacaggtccgttctggaaagttcttccctccactgtctttatcagttaagttacctcctagaagcacaagtgtaaaagcaccggcgtatggcgagcggagcctttgagacgtaggttcttgacattgatgcataaagtgtacctgggattcctgtagacccatcagttcacctcaaacccagctcttcccacaagcgctttgcagtccgagtcagtccccggtccctgcaggggttaagaaccaagagaacaaacactagaggatctgaatgtagggtgtattgtgtcacttttgaagcacatagtgataggtaagagaaccagatgttgagcccctagggacggtagccccttgactgtgggctgggcgtggcttctacaggttcagtcagtagccaccctcagcagttgagagcaacagtaccttcagtggcttcatttcctgtcttgttgacagagaccctcgggtaccactgtgctgctaatagggccagggctctgctccccgacgaccttgcctttgtacagaaccaagtccacgcacccagcaccccaccagcacctctgggctctaaactgctttctctcatcaagcatgctggcattcaagacagatttctcgacctttggcagacatggaagtgttttaagattttatttaaatgtctttgttgacccagaaggacttttagattctgagatcctaaggacccccccgccccccatgaccatggggtgaccggaatgtggctttgatggctcaggctgctgtgccttttatcattggcttctgattcaaaccagaaataattgataatgtgaatttgtgttgatccttcagttgtaggaaaactgtatatctatcccccgttgttaagtagacatgagcctgtcccctgcttgtagagattgaccaggaaaacgggaggaagcatggccgttgcgtgtttcagaaagtttattgtttaaaatacagaaggaagttttctttgtgacttgatcttctgtctagtacttgtctaatcagttaacccacgctgagagcttgtagcgatgcctaccaaagacatgcatagtaaacctcctgtttccaaattattaaagagccagccattgatgctgctcctggttctttctgggagccattgtgagagactaaaagattcttagggtgtttgtttgtttgtttgttcgttcgtttgtttaagttttaatttctctctttctaaatttttgattacaaatgtgttagcctaatgtgttggggagcatttcccagaatgctcagcagttgtgattactggtcacacccaggtcacctcttctggagtgatcaacgggatcctctgtgcgtgctagcatgggtgctgtgtgtgtgcacgtgtgcgtgtgtgcattcatgccttaacttgggttactgctcagctttgccgtctgacttggtcctcaccagcatcagattgtattgtgcatcctgatctgaacttcattctggtaaaaaaaaacaacaacaacaacaaaaccacaaggttgcaggtagcacaggctggaacgcattcctttggaagaacgtctgctcagatggaccctgagatgtctccacggactttatttgggactttgtttggaaagaaagccgactgtaacttgggcagatgtcgacaaggaagaggggagagccagatgccaccatgccctctgcctctgcatatccgtgtgctctgtgtgttgtgtaggctcatctacagcttacctggcttggagttcaggtaatggtggccatcctgacattctctgttggagtttagagagatgtaagacgtccagttaatgtcttatttactttatgttgatcagtctttaatacatgtgctgaatcagaaaaacctaaataaagataattttttaaaatgtactcctggaactgtcaaatttgtttcgtcctttctgttctttgagttgggaatgatggttggttagtgttggcaccaacagacaaaaccagattctattacaaactcttaacggcatccggaggaagtacttgtaggtagcatcagtagggccagtgtgggtttctattttttcctttttctaatttttttaaaatatacttaggagaaaaaagctacacgtatggatgttttttgcctgcatgtatgtctatgcaccacacgtgcatgcggtagccagaagagggcattgggtctctcacacctgcaattacacgtggttgtgagttatcatgtggatgctgggaattgaacccgggtccactggctacccaccctgatgttgaacttgtaattgaactgtgttttcaaa

SEQ ID NO: 18937 - DNA, 3412 bp, Mus musculus
cacggcttggctcatagtgtcagcccagcagcagtgatggtggcattcaggactgccttcatggctagcaccagcatggccttacactcggtgtaaataaacatggcttgtcccacctgtccctcactcctctctcccaagtcctgaaactaacagcccatcagtccttggagaatactttctgtcaaccttgtctcacctaacatataaaaatgatttctgtattcccctgggtgcatggagaatgacactaatcatgtccctgtagattccattccagagatggattgctgttttctaagtaaagcattgtcatgttctttctcaggcatatattcagcttgctaaagatgataggattcgttacgacaatgaaatgaagtcttgggaagagcagatggctgaagttggacgaagtgatctcatccgtcgaagtgtgaaacgatccggagacatctctgagcattaagatggaagacggagttgtcattgggattaggcccaagaaaccagttaggtctcaaagccttaaagtgtcaaactagaacggataaaggtggttaacctttgacattcagatcatttttctgtagccatggactttctgttaatactttgagccttgacagaagatgatgctgagttctgccttttgcttaagaactggaacggagactgtccatgcatctgcatgcagtggtgaatcattctgcatttgatgggctagatagactgtgaagtgactttcacactggtgacagttgtgtggtggttttgtgatgtttttacactgatgaccgttacatatgggtgtggcccttgggtcccaggccggacctgctctcccagctgtggcagagctgtggataactgcattttcaaagaagctgccaggctttcctagatgaaatgattcctagacataaatcatgtgtaagttgatgtttgtatataataagcgattgctgatgtcctgatagcattttatagtagtaacagagagatttacacatctttctcaaattaagaaattatgtaccaagtctatgcataggtttttcttgcatagaataaaaactctaattttccaaacatgtttctgaaattatgtattttaagatgaaccatttggttaacagattttttttttttcaattttaggtagggactttagaaattacttttcatttgagagtattcatagagcttgtgtggtataaatttttaaatgagaaaatgtgaaaaacaagtctgcaaagtcagaaatctgaaagcttatccatgacagctaaaggcctatgcaggagaaagccaactgtggtgagccagccaggtccagctcactaactgctcttcagggcctactcatcaagaaatggatttatgttctaaataggtttttaaaaaggaaagtatcagtgtgaaaattaatatgatctttagtgtttgtgaatagaatttcttggaacacagccacatgctttcttgggtttgttgtgtgtgggtgctctgtgctccagagactacactgggaaaccacagcatacagggatggcccttcgcagacagtttgccaccatggtgtctcacggccactggccatgcaaggcttttcctcagatgtccttgatgtttctgtgatattgtcaccctatcttggggtcatcactgggtccctataagcctaactgttctctgtgttagcaaggaaaatattctttaacctggaatcctggtgtagcacagtacagaagaccactgtgtggagcgagaccctcctaatctttactgttgcacaggaaaaagtgtcttccccactttgagctggcaaatcccataagcccttagagaactcatggcttcaaccaccacaccactgagcagatctctgagacacaggacaacagagttcatactcatgtatgttttgtattgaggaggcttagagattgtacattttgggaaagtaagtttgcagtcactgaacttgacaaggtaggaacagaagaacgcatggaggagagatgtaagagttatatatgtaaaacagggtatttgagctgggtagaaaacttgcctagaatgtacaaggccttggatccaaatcccagaactgcaactctccccagaagagataatcagaattttagagatgaatttaagaaaatataatttttcccgtggattggaattctgggttgttggatggcatgggtttaagccatagtttgaaggtggtggaaggaggccagtgtgaaccagtgcagtctgtctttccaaagtgcaaatccaggagagacgtgagctctacacgcccctggtttctggaaaggaactaactccaagctgtccttagaatggagaaaatggtgactcagagaattgaccatgtgcttcagagcaactcaggagcagcaggcactacagcgatacagggatgcccggacctctaagatgtaactacttagctcctagctttccaggcaccctgcagagtgttcaaggactcggagctcagtctgggaagggaatgggaaaggtagaggcctgggcggaagccttctcatggtacttggttcagtttggttttccttgtttgtaaaacaagcttactgataacattgtaatctgctttccatgtcctgttttctaacgacagagtctcttttaagcaaaagcagttgccagaggatcggggaggtgttgggaggagctgaaggcatgcggtgaagctgcacaagctgacaagggctcagtgctgtttctacttattgtcatgtaactgcaattgggctgccctgttttccagtatccttaaaaacaacaaaccctagttggtctaagtgtgaacctctgaatttaaagctggtgttagcatacggatgtacagtagctagaaagccttcctgggttcacccgcacgcactggaccaccagggggcgctgaaaccacagctttaatgcagacggagccatagtgcccatcagttctgtttggccatattataagaattttcttcctctgatagcaaccctcctttctcccaggttttgtttatttgtttttgtttgtttgtttgtttgtttgtttgtttttcgagacagggtttctctgcgttgccctgcctgtcctgtaactcactttgtagaccagctggctgtagactcggagacctacctcagattaagtgctgagattaagagcttgcctcaccaccaccatcaggcttcctccctcctcttccgaatttgccaccagcctgtcactgacaagtttgcaaatgctaaaacagtgcctgtatgttttgaagtgtaaagaacatatttctttttttgtaattgagcttaagagataaaatgaatgtattactcatttgtaaaacttcctaagcaaaaggtaaaattatgcaca

SEQ ID NO: 18938 - DNA, 1561 bp, Mus musculus
gttcgggtttttaaaatgtcttttttttttttaaagaaaaacatgatttagatatatttttatgtagattgatcaagaatttaagaacttaaaagtcgtctgtttttgcttttatgtttgcatgcatttgtgctacccaccccacccccacccccacccctgcaccccattgccggacaacccaaatggcaggtgtatgcgtgatggtccccatgaagaggcagaagacacaattctgagcagaattgcagaggtctctgcaggttaaatgtctgtgtttctaatctctctctttttgtatgtctacagatacaacaggcacgcaagagaatggactcagaaatatgcaatgtaaagtttcaaacactttcacttacgccagagtactgtaaaatctatgtcttttccagcgttagcattaagccgggcgccgtttgccgtgtccttcgttccacgagccctttggtttttactcattttaagtgtgtttctgaagcaagacaaaacaaacttccaagaataccctggaaactctgctgagagcatttagtattctgtgctcattgaagaggacctttctttcggtttccgagacacttggaccccctgcatctccagcaagatctgtgacgtgactgagaaagcaaccagacgcttttctttctctgaaacgagacgtttttcacccgagaaacattgtatgtgccgtccaagatgtcgtcacttttatacatctggattcagatctcattcttcgttagctcactttataatttgtatttttttactgtatagactaaatatattctatgtcaactcctgactcctcctccccacccccatcccccgtgaacagtattgaagctcccaacagctgatgatgaattaactgcccccgccccttgtcttagcatattctgtgggttgaatgcgtatttcttaaaccggaactgatctgcacactgtatttctcagtatactgattagaatggagaaacacttgtttgggttttattgtacttgacttaactttattgcaatgtgaattaattgcactgttaggtaggaaggtgtgtgacttttttttgttgttgctcttcacctttgacctttttttttttctgtataggcaatattatattgacaccttttacagatctgactgtagccttttccatataaataaaatgctttttctactattcgtcttgactacttaatgcaaaaaaatcaaaactgcttgatctattcttcaggattgaaactccaaataacttggcatgaaaactgtctggaagatgtgggctcatttttgttgttttgttttgttttccattaaaaagaaatgttttcacttatttagttggtggtgaagatcagaggacaacttgtaggagccagtagtctctttccaccagctggttccttgagatccaactcagggctcgtcagccttggcagcaagcaacccctgaccacctcacctctgaccttggcgtttctcctaagcactaattgcctttcatatagatgtcacagcagcaggtcagcatcctcttta

SEQ ID NO: 18939 - DNA, 1122 bp, Mus musculus
ttaactcaaatgcatagagaggacctgtgtcaggagacactttgttctgacatctctctgttgaaagggctctagtctgccaggtgaggacatcgccgcgtggactataagctcataaaatgtttatttatagacaaaccaaatgtagctcctatatcccttgagaggcaacaccaaattagggggcggcgagatgcagaccagtaagggtcattgactcatttggggttttgaggtagaagtgttttaccctgtcaattaattgctggtgaagccaggggaggttaaaataacgctctcctgtgcttggtcctggataatttaaatttgcagccataaatcagtccctgtgcctggccgtgtgctgtctgccagctgcatgcagccatcacaggctatatattgtctcacaggcaggttcagaccttctgcctgttacagctagacaaccacaacagcatttttcagtgtgcccagcatcagttctgcacaaatatttactgcacagcatcatattaagccttagggaaaataaggccactctggcttgcccttcccctctgctgatgctgatgttggagccaagagatggacacaggctccttctctccagtcccggctctccttccctgtatttgtttgctttctttgaattaggcgggcctcgtcgacttttagatgttaagtccctagaggcaggggctgtgtcctggttggtttgggggagaacacttggcatattgtgggggtgtgttataaacacgccatctgtgcccatttaaattcagtagaggcctcccaatgcttctctttgtatcttgctgattatagaagtctgctctggaatagacatgcttagcctcagaaggctctagaaatcccttaagttcactttttttttttcagccttgcaaggttttttgttctttgttgttggtttcttggctggttgatttagttggttgggtttttttgtttgctttggtttggtttttgttgttattggtttggttcttgtcaagctataaggacactggcttgtaacctattaatagcttgtactctgaaacttagataccccctactgtacatccatcacaagaacttagaaaattgcttctt

SEQ ID NO: 18940 - DNA, 1322 bp, Mus musculus
cacgtgggttctgaacaactggaatggaggctgacccaaacactgtggcctttaatgcttgagtctcctgcctctgcctctcaggtgttggcattgcaggtgtgtgccaccacacctgactacaaattgattttaatatgataaacttgaactcttgcaactagagccatgggcataattataggtagagtgcctgcctggtatgcacataacctgggattcaatcctcaccatacttctattattactattattattattgttgttatcattatcattttcattattattattattattattaggcagtaggcatagataactagaactatagccactgagtggtcagaccaaagccttagcctgcatcaccggacgtcagaagtttgaatagcagtgggtattttcctgtttcttcctcctgctcagtgaagttcatgtgctaaccaagagaaatacaggctctgatgtgtgggaatcaggtgtcactacctgtctgccaagcacagatcgatgtggggatcagacatttcatggtgtctctctctctcttcctagttccccttctgcgatggggctcacataaagcacaacgaagagactggcgacaacgtaggacctctgatcatcaagaaaaaggaaacctaatggacagttgcgaggctgcacccagcgtgttgtgatgtcacctgctgatttacgtagaatggcacccaacccaccgtctgattggcctccccggttctagatgtggttggtccctgcaaatcacagctctcatatccatggcatcggccttgctactgaaacatgtggtgcacgtttgttgaaagaagaagaaaggctaaaccaacctcgtgctatatgggttattttggtcttgtaaggatccgttcctttaaaataatggtcttagaatatagttgtatcttgaggttaaagtattaaattattccaaaatcatgtacatgtacattgtacttgtcagtttaagggagaatcttttcttatcggttcgttaacttggaaagtaacggggtgtgatgaaattgcgttgatttcttacaccatgggagaaccctgccgtgaccctcactcctcctggttgagctggtgacatggatacactttgtgtgctttaatgttgttctccttaaacttgcccgggtcaccaataaaggggcagcaacttccctctgtgttcatctctgtggctctgtaacggatccactatagacaccgctagcagaaatccaggccacggggatgtgggttaggtagtcaggaagaatgttggggcgatggctctggattgagtgccc

SEQ ID NO: 18941 - DNA, 1113 bp, Mus musculus
gtgttgggaacagtctctaggaggccattttggctgcgtctgcagtgctttctcctccccggccccaacccttcccctgaagattcaatccagggaagcatgcatgcagaggaaccctgtcatcagcccctgcccccctgggtctgtttcttcccgtgtcagttttagtaccatgtgtttaagagaatttgtttcatagctgttgtggcatttgctgaggggaacctcatgtctcttcttttgaatgttcatctattcccaataatgatcttttctttttccttatctgtttaatggatgctcaccggttttcttgatcagtcacttttgacttgattgatttttttttttttttttgtctgttgctctttgacaggattatttactgagacactttcttgctgtatccctcaggctgccctttaactctggaccctgctccctcacctagccagtgcagggattgccatgcccagcatccagtttctatcgaactgacttttggttcatatcacgtatttaaagttaacacatctttcttggacataagtgtggctccttttcctgaatgataggaatattgaatgttgtcttcttacatttattgattttgatttggtggtgggaggggatagataggcagggtgcccatggaggggagcaaataacttggagaaggctctcccttcccaccgttcggtttacagggcttgaactcaggtccttaggtttagcagtagtcacccttacccgctgagccctccaccagcagccgctgttagacatattgaaagctacacatttcacagcaagctgcgccatgccaactttgtctttgcttagcacgtggagcacgttctcacttctgtggtttcgatccacatgtaattacagtggtgttggttaccttcctatcattcggcatttctccacttgtcttgcttttctgctgtggtttgagggcatctctgcaggattccaatcctcagagatttggggcttggtaaacagagcgcttttacccttgaagggctttcgtgttctgctggacagttttgcctcctgtcccctcctccagacgattctgaactgtgcagggctttctacctcaac

SEQ ID NO: 18942 - DNA, 1145 bp, Mus musculus
tagtttcattgagaatttggacaggattgctttccgtaggaacagggagaactatttcttttcttccttttctcctcatacccaaacccatgctttcaaggtaatgtgtgagaaggagcttttgttgagagacagcaagttttctgtggcagatgtgtgcaggcgctgagatgggcggtgacagagcaacagtgcgtgtgagagtagcaagagagaagtaggtggggtcacttggattcagtccccagtttactgatgtcaaacttcacaaaatccttaagatcctaagaaatctcattctgagccagacagtgttgtgttggtggggaggtgcccacagctttgtaatgctgggcctccccttcgctccaatgatgtctggtcacacggagcagacatttgtctgttgatgctgttaccatgtccattggctctagatctacctaagtctctcacctccagcatctcctctttttgtttttctctgggggttgtttgaatggtacggttgcctgtcattaattaaggtttttctccaatagcagatgtgtacctaaaactggaagatgtgactcataagtttaacaaaccctgtataatggacgtgaagattgggcggaagagctacgacccctttgcgtcatcagagaagattcagcagcaggtcagcaagtaccctctgatggaggagatcgggttcctggtgctcggcatgagggtaagaacggtttccgtgacgctttccttacgcaacactccatgtagtgtgagctaaaaggacaggcattttatccgttgctctatggtctgtagtcagcaacattagttctgacacatagtaggcaattaatgcataatggccagaccctaagatgcatttgttttagggttgagaaggttgaagtttgagtgtataataaagattaaaagtgaacatgttctttgtacttttcctataagaagagccatttataacttttggctttttgaaacaggatctcactgtgtggccctgactgttctagaaattgctttgtagaccaggctggtcttgaactcagagactcacctgtctgcctccccatgctggggaaaagaactgtttgtgtttttgtttaaagatttatttattattataaataagt

SEQ ID NO: 18943 - DNA, 3562 bp, Mus musculus
tctatattaaaggcagagtgcagcgcagcgaatgaaagaaaggtgcttaagccagcagggctccctcccggtcctgtctgctctgtgctgagcatcatgggaaggggagtgtcaggtggccggcagcagctaacagcacaaattttcctccctagggtcaagagaagagagatatttgtaaagaacatattacccttttctttcttttgttttaaagaatttcatttatggaaaagtcttcatttactatgttgtgaaagctgtcataaaacaccctctttttattaccagtgaggctcccgagaggtgaatggtggaaactttgttttatctcttctttaatttttgagagtcttccattttagaaaatccattctttaaaatgtatccccattgactttttaagccttagcataaacattatctctcagaatttggttaagcatccacagaacgctgtgcccagtgcactggaggaaccctgcttaggtctcacaacagaacgctgtgcccagtgcactggaggaaccctgcttaggtctcacaacagaacgttgtgcccagtgcactggaggaaccctgcttaggtctcactcccgtggtgtctaacagagaggtcctagttaatttcactcggagcaacaggcaggcaacttttccttgaaaaaaaagatatttataagtgtcatgtttattttaccactaccacctttttcaaagctgtcgttaaagtgttttcaaaactgaaattaaatttgcaaatctttttgctgtgcttgcttgccctttgacccgctgatgtgataaaataactgaacagcttgtcctttttagacaagctttgagtcacgacctgacctttttttccttttcacctcttttttccttgaggtttacaaatcaaactgcaaaatccaagaaccattttctgtaatgtggaggaacttttacagtccaaatgtagtttgcaaatgcccacgctcaaatgtgagccggaaaggaatgggtcattaaccagagtgggtctggttaacgtgccttttaggggttttctctgggaggctgcaggtgttctcagacctgcaagaacgacacattctctgcccaggtgtggactggctatacctatttttgtttctctcattttgtgggagtgaattttaagtgataattattagaaaactttcagtttgactgtttttcttacaatattgacttgttatctgggtgtgattcaggaactctcaagcccatctgctgaacactattttggctcttaagaggcagtttgagatggtatcagcctatatatgaggaattgggaaacttgagtattcgaagctttgggcacacttcagcttagtaaagtctctgatctacagctgtttcaaacatttcggaagccagcatcctgccttttcgacaagtaggttttgtctgaataaaacaggaagtgattcttccccctgcttctcagggaaggggtgagcatccagttcttctcgtttacagtttcccaactgctggccactttgtgttactttgtgctccttgatgccatgatcaacatgttcgtgatgtaagcaacctgtggtgggtgtttcccggtctgtcctgtctttaaaaatgatgctgagatttgccactttggggaagaggcatctgtcactaaccatgcatatgtgaacacacggatatttaagaaatgagcaaatgaggaggtggtttgaactggtggtgatgctagccgccccctcttagcccccccaacatgatttgagtgtgttccttatgggatgcactcatggaaaggacttgtgggtgtgaatacatttctcaaataaaagtttaaattgtaaaatagttttataataaagtatttacattaattattttaatatggatggaagttgcataaattataattgtgaactatttagtctttcaagagagttttgaaaaatgtatgtaagtggctctgatggctgtggtgttaaattagtatgcgatgctttgttctgtgtgtttggagggggctgggcactctacctgtccacactacagacagacagttactgcgggccgagtgagaaccgattcctgaatgcctgccggcgtcctgtgatgcagttgcccgagatctccacagtgttgccctcgctgtcaggcctctgaactgtcgaatttataacatttggggggaaatgaatttctataattacctctgttgcaatctttttattgctgttaggatttggaatgtgtaggcaggaggaagggctgaactgggaactgactggctctgactgttaataccactccccttgaggtctgatgtccagacgtgcttggttgaaccagccgtttacacagctgtccttctcttgcagaccctcaaccgaccgtggcttttgtgtatccatagcttccgttgccctttgtcttgccccctacaatggttcagttacccagaaacatcaagtcccttttaagaatagtccatttggttactctcagggtagtgtctgggggccttggcctctcagttcactcagactcaagtctgcacctcaccaagtattttcaacccctctccctgacgtgtgcgttggtgaagcagtcaggactgatcgtctccagcaccctgtctaggtggagaggctcacgaggacgactttaaaacagagacacaccaacacctgtatttcaagctgttaaagctagtgtttgggtaaagatgaagtgctaagtattgagctacaacagaggcagatgattgggggctgagatcaagggaaccgctgactctccagctggggcagttacagacagcctaaaacagcctgaaaaagagcgctcttaagacatgcttgtaaaggtacattcagccgtcgcctttggaataataaatagcacagtgtgactatggttgctcctcgctggtgcaaaccttttaaatctcaagttttcagattgctgggatttcagacttgtcagcggacatgaaggtatttcttgacttcagagcaactctgttgttataacatccaatactgatatctggagacagattcagcctcttggctgtcgatagtgtgtcttcccacttgcttcgatagcttctatcaaaaaccaccatgattcgtgccagtaaatcagacagtcaaattaaaaaaaaacaaaaacaaaaccaaaaacagtagaaacgtgtggtgtggtgaaactttggcctggtgtccacttaaaagattaaaaggttagttattgaagatagggtttctggtcccctgtagcgaaaggcacacatagacacttggctgtgggatctgtggtggaagatgggaaatcacacccagttgtgtccttagtaacatccaggcagcagtgccagtccccgccccctgttacttgatgaatgaatgtatccctgtactttggtggaaatgtctctagctttctttttctcagtgtttgtaatttgtactattgatgggatagtcttggagtgcaaggctcatcactgtgtttgtagaatcatctaatgtgatataccaatttttat

SEQ ID NO: 18944 - DNA, 2316 bp, Mus musculus
gccagggactgcagctaagtcatatgacttgcacctgacttcctcatataagacacaaacatcttgagtgctgcgcaggtgtaccaggatacaggtgaatccaatttggtggagatttgcccctgctgccctgattagctgaagctgcgtgcctggtgaggcggcgtggcctgctgtgcgtggatgggaactgagagtataaaagagtgagaggcccagggttcgggggagatataaaaacaagggagatataaacaagggagatataaaaacaagggagatataaacaagggagatatatggagaaagaagaaacaggactgaataaatgtgtgcagaaggatcctgtagcagcgtcgttcttcctggccagttgagcgcgcgcaacagttttggtatttaaagcaaaaacaaacaaaaaacaaacccccttttggtacctgcactgcatccctcgggtggggtggtgcctactttggaagatgctgcagcctgcgaggggatctgctggggcttccccttcgccacacagaagcctgcttagtgctttctgcaccagacaacctgttgaggcgtataacctgatctgtacatttttttaagtgtgcagggcagcctggacacagcttagtattctatgtgtatagttctccatgctcactaactctccttctctgggaagcagatgtacatactacatacatgtcacatactacatacatgtcatgtactacacacatgtcatatagtacatacatgtcatgtccatttaacgactggtcacctgctggggacccaggcatctgccttgttttcctttttctttcagttttggactttggaccctgcacagccgttccccggggtctgaaacttacctgtcacgcacaggtagagcagtgctagctagcattactggcttcctgctactttttcgttttttaaaaattttttattctgattgctgtattatatcggggatgttctaaacaaccaaactaaagctgtgtacagattgggtttggagtggtgaggacgtcagcaggaaacggcagtgctttgctgcctgactcctggttgacaggagtttgctgtccttgacactccacacgtgcgggacgggacacagagctgactgagcgtgggacactccacagccttctcatgacttgtgaagaaggtttataggaacgaggggtatgttttagagctatgagaatctagtcagcccacagaggcgtcaaacctgaagcttgggccttaattagcattgtactctgatgaaaggactctttcataagcatatttatagctttctaatctatacacagtctatccatagatgcatattttaccccaactggctagagatttatttgttgtaaatgccgtatagattttggggtttttttttgttcttcctctcttcacttatactggtgtggggtttgttttagttttctttagtgaatttatgctgttttggggggcggattgagaagaatcttccgtagcctgagctgtccctcctgttttgacggcacatgtgccagtcaagggacacgggacagtcacaccactttgcattcccaccggactcatgtacctcccgcagagccgtccccgtcaaggtgtggggctcctttcatgcatttgcttcttttccagagtgtggatttgaactacttccccctgcacagggccgcgtgcaccctgccgagctgcgtatattctgtactgtgtacaataaagaagattgctttccttacgcaaaaaaaaaaaaaaacaaaaataaaaaacaaaaacaaaaataaatatactcgaggtaagatctgttttaaagaagaaaatagagaagttgtaataaagatggttctgagacaaattgttcctgatgaccagtgtagggtgcagaaatgggcatgacttgctccatgtttctctgtgaactcacaaaggtcaagtgtggtgatgatgctttgctgatagacctttccagctaccatgaaacctcactgcaaatttggacaatgctggcttagcatacatctgaaccttgggaacatttagcaaacttgtagcatcatgttgttactccatctacatttcccatgacagtatgagaaagagggaagtctccactgcattttcaaggtcatgtcttggtcagggtttgtattcctgcacaaaacatcatgatacagatgcaagttgaggaggaaagtgttattcagcttacacttccacgttgctgttcatcaccaaaggaagtcaggacagggacacatgcagggcaggaacctggaggcaggagct

SEQ ID NO: 18945 - DNA, 1141 bp, Mus musculus
gcatgctgatctctgtattcaaggtcaatctacagagcaagaacaaggatagccaagattaggcagtgaaggatttagaaaacataaagctagtgataatgtaatagtacaaggggatcatgttctagttcctgtaagcagcagaactcagcagcttcagccatgtggctctggctctagagttaagaatggaaggaactactggggaaattgatgctggttagctggaactaaggaattagcagtgattaagaagagtccagcatcactgaggtgaaatcttctggaaattgttttctgggagcacaaagaagctgtgttccagagatactcaaggttgtacctcatgctgcggctggacgtggtaatctgtaagagtcactcaggtggtactgcttgtgaagaaatgaagggatcatggagagaaactgaggcttagcactgtgagaggccagggaattccattggagaaggtgaagcctcagctgtagttgatggcccaggactgaaggggtcacgcaaaggatttgaggcttggcaccctgaagatagcctatgagaggctattggtgaagcctagttggagtggaacaccccagtgtattggagatgtcagtaccatgggatggccaccaagaacagcagccgtagtggagtggatcaacctgagcttagagtgctacagagggcagagctggaaaagttatgccagcccttaggaggagtccaaaagatcaagtggaatcccagacactgaaacaagaagctgtaacattgaaattgccttggagactcaaagatgttaaagatgccagagccatggtttacatgctgaggaaagctgctaacagggagtggaaccagcccaggagaaagcagtttgttgcagtcaacaaagatgaaaaaggagtggagatctgaagacccctttgacatcagccatggagatgcagagttttaagtttgcccagctggtttcctaccttgctttgtggattacagttaattaaattgaacgaatctcagaagagaccttgaactttggacttttaacattgttgcgactgctatagactatgaggactttgaaagttggactaaatgcattttgcattatgctatgtttaagtatggtccccat

SEQ ID NO: 18946 - DNA, 1260 bp, Mus musculus
aaggagagagaacctttgtctcaaaagcaaaggaaagagaaaaaaggaaggaagggggaagaaggaaggaaggaaggaaggaaggaaggaaggaagcagggaaagagggagggagggaggaagggagggaggggaggagagagggaggaaaggaaggaaggaaaagaaattagtttcaaatggtataagcctttgtcttcagtcaccattcctttgagtgaccagcaaagtgtattctcaggatatgatggtggggttctacttacattgtggtaatgctttggaaggctattcaaatgcagagggatttattgttcataaactgccaagacactgcagtctgtggtttccttctgccttctctgctcaatgaatacatcttctaaagaaattagcttccggcagaggcctggcggaagacaagatggcgcggcagaggtgttccgcccgcggtctgcgcctcgtcggtttctgagccgagtttttctggaagggacggcggcaggcgccgtctgtgcgcgatggcccggcatcggaacgtccggggatataactacgatgaagattttgaagatgatgatctgtatgggcagtctgtggaggatgactactgtatctcaccatcaacagccgctcagttcatttactcacgccgtgacaaccctgaagaagaatatggctatgaagatctgagagagtcttctaattctcttttgaatcaccaattaagtgaaattgaccaagctcgcctgtattcatgccttgatcacatgagagaggtactgggggacgctgtgcctgatgacatactgactgaggcaattctgaaacacaaatttgatgtgcagaaggctttgtccgtggttctggaacaagatggtgtgcagccttggaaggagaagagtgagcgagcagtgtgtgcaggacagccttcaaaaggagtcttattttcttcctttggagtttcaccccaaaatgttcaccattcttatcttcaatcagaaaatcatttggatagcagtagcaaaccttttgattgttgtagctcaatagcagaatatggatcccatagttcttcacttgagccacgtcactatttacttcatagaaaagagaaacatgacagaccccaaagtgaaaaggaactagaatcatgtaagttaacaaaagagctggctctagctcacctgattcatgatacgccaagagattcttgtgcacgccagctgtcagccagactgccaccctcagacagcgggc

SEQ ID NO: 18947 - DNA, 1099 bp, Mus musculus
tggctaagaacacaaaagtatggtaacaactagagataggctgacacggtcagcttcaacacctgttatattatgcatgtttgtattttgaaagggacaaagaagaacactggtttggcctggaacaccttttctactgagaatgagaagtggcctgatatacttatagcttgacaagtgagatggtttgatgatgtcttcaagagctaaggagaagggactgaaagaaatttagttaagattgaaagctggttgtgaagcctgttagcagatcttcaggatggacgtagtgagatgcagcaaacctgttctttgcctgaagaacctgcaacaagactttgtggcctggattgttgacccattgcatggatatggactttctgggaaaccttagattgttggaaacatttatgggaataggaatctttcattaaatacctcaattttctttgttgttgatgttgttgttatagcacaatctaccgtattctgcctgatttaagataaagagcataaaaatagtgctagcttgtgagagttagcctgccaaggactgtgagggctagatagtgagaggttggaattgagccaagacacactgatgataaaataggtggaggagtagtgaagatagttgctgaagtatgccaggctttagttttatttagaaaaaaccataagcctttattacatttctgtttgataattatctgagcccccaaacttctcctcaaatagtctgttttaaaagtacaatttatttacttccatttatctgaagatatgtgccttccatttctaatttgaaagtgctcagagtaaatcttaggataggttagttaacatcagctgatgtctttgtctacttttgagtctgaggacaccagtgatacttaattgggtcttactctgtgctttcatttttacttgactattgttttaaagcctcatttccaaacaaagtcacaaagagccactgaaggctagatttttgtaactattaaacagtaaaaagtatgctacatgtataagatgtataaatacttatttaagaattatataagagtattctgaaacttacgtgtttagttgctatttt

SEQ ID NO: 18948 - DNA, 1749 bp, Mus musculus
aaaaaagcaatgcagaagacaataaaatataaagattataattggaaaccttggcaaaggaggatgggtggaaagttaccagtgatggaattctatacagcaggagacctttggattaatattgactgcaaagtatatatagtgcctctataagcactagaactaaactgctatgcagaagaaagttaaaacagcccaactttttctttctgtttttaattgagatctcttccaatgtaaggttaccactagcaaattactaggctaaaatgatggtgatggtgctgtgttactgttcctggtattttctaaacacatgataaatgataaaatatgtcatgatcagaatcctttactaatacattttaagatattcttctgaaattactacaatttgaaatattagattgaaaatgttggctagaagataatagttcacagagctcattgttaatttcacctttatttcctcagatgaaaggatgagaagagagccgtattcataccctgcttgggctgagaccagattggttccttcactgttgtatctctaggcctaagcctggaagtttgttgcctctgtacaatctaattctccaagctgattcaatctggcatctcttggcttttcagtgaactgttgtgttttgtctcatgctaactttgacagtatattctggcttgttctgtcttcacctgtgtctaacttgctgtccttgcaacctgtctctgtaaaagtgtaccagtgaaactcacacgcatgcatgcacgcacacaggcacgcatgccacaaccacccttttctctcgctgatcttcagtagtctctcctcttgtcctctctttttctttgtcttctctccctaccagatgtgaaagcaactttatgcgcctgctgtaattgttgtctgaggattactgcgagtaagctcaccctttgtagttactaaactggccggctggctgggtcagctccgctgtactggttcataacccggcttcaagttgactgattcaaaggggcctctcttggcttctgactgaactgctctgcttggaaagtctgatggacttcaggaacagaactgtactgactgccctgactcagctgaactcaactacaccaaattcattggttctctctgctgtactgctcttaggtagcctctctcctgtgctgtcctcctgagtcgtgctgtcaaatctctctctgattcatcactttgcccctcaattagactggcagtttcaaacacggcacttaacatttcagttgtagtcacttgatactgcattccgaacttgagtctattgaatccagaatgtgaatccatgcctttgtgactgtgacctcactctcttcagtattgtgtaaaagttttaggaactctccaagtaaatacttggtaattgctcattgatagaacagaaaaatgctgtgtagataataaataaacatataactataagattatccagtgtccttgttgcattttgtattctttaaagtatttagccaggagtggtggctcacgcctttaatcccagcactcgggaggcagaagcaggcggatttctgagttggaggccagcctggtctacagagtgagttccaggacagccagggctacacagagaaaccctgtctcgaaaaaccaaaaaaaaaaaaaaaaaaaaaaaaaaagtatttagaatactggactcaaccaatgacctctaccaaaagggctcagtgtgcagcatgtttact

SEQ ID NO: 18949 - DNA, 1128 bp, Mus musculus
agggagggggaagggaagggaattgggaagggaaggcaattgggaagggaagggggaagggaaggcaattgggaagggaagggggaagggaagggaagggaagggggaagggaagggaagggggaagggaagggaagggagaaggaaagggaagggagaagggaagggaagggagaagggaagggaagggagaagggaagggagaagggaagggagggggggagggaagggaattgggaagggaagggaattgggaagggaagggggaaaggaagagggaagggaagggaagggaagggaagggaatggaagggaagggagaggggaagggaagggggaagggaagggaagggagaagggaagggaagggggaagggaagggaagggagaagggaagggaagggagaagggaagggaagggagaaaggaagggaagggagaagggaagggagggggaagggaagggagggggaagggaagggaattgggaagggaaggcaattgggaagggaagggggaagggaagggaagtgggaagggaagtgggaagggaagggaattgggaagggaaggcaattgggaagggaagggggaagggaagggaagggaattgggaagggaagggggaaaggaagagggaagggaagggaagggagggggaagggggaagaggggaagggaagggaggtgagagagtaagataaaatcaagtttgccagacttgtatgacttgaaagctgggttacttcctggatagtcacactatgaattgaaaattgttctccagtaattggctctccctcatgtccaagatgtagtttatggagtctccatatgtagactttagaaaaaggtgggaatacaaacattttactagggcaaatttgtcttttatccatgagagcttcccacagtcctgtacctgaatcaaatataggctcagagaatgtcactccagtcttcagagtttctgctggactgagagtaaactggagattctttctagttaggatgccagtgagtgggaagttaggagaaactaaagaccggggctcatttgtttgtttgatatatagctaaaactataggctaggaagaagaaataacctaagagcaaagccaggactt

SEQ ID NO: 18950 - DNA, 1866 bp, Mus musculus
ggcccatgatgttgaatacttagctctgggaatggatgcctatgtttaattaaaagtgtatcactgtcgagtagcagcggtgctggtcccatgtgcaggagctccttgcagtccagtttcttggccatcgcctgctccccccagagcatcaggatgagtcccgtgcctgtctgtccaaggagatctttctcatctcactcaactgcgggaaaccgggctaaagtgactgaatccgcgatggagaaaactttagaaactgttcctttggagaggaaaaagagagaaaaggaaaacttcagcaagctctttcttggtggcttaagctttgaaaccacagaaaaaagtttgagaaactactatgaacagtggggaaagctcacagactgtgtagttacgcgcgatcctgcaagcaaaagatcaagacgatttggctttgtaactttctcatccatggccgaggttgacgctgccatggctgcaaggtctcattccattgatggcagggaagttgagccaaaacgtgctgtagcaccagaggagtctggaaaaccaggagcccatgtgactgtgaagaagctgtttgttggtggaatgaaagaagatactgaggaacaccaccttagagattcctttgaagagtatggaaaaattgatactattgaaataattaccgataggcagcctgggaagaaaagaggctttggctttgttacttttgatgaccatgatcctgtggataaaattgtcatgccaaatatcacaccataaatcacacaatgaagaagttagaaaggcactgtctagacaagaaatgcaggaagtccaaagttctaggagtggaagaggaagaaactttggtttgggggattcttgtggtggcggtggcaattttggaccaggaccaggaccaggaaacaactttacggggggcggggggatctgatggatacagaagtggacgtggatttggaaatggctataatgggtatggaggaggacctggaggttgcaattttggaggtggccctggttatggaggaagaagaggacaatatggtagtggaggacctggatatggcaaccagagtgggggctatggaggtggttatgacaactatggagcagtaaattatgaaagtggacgttacaatgattttggaaattatagccagcaaccttctaactatggtccaatgaagagtggaaactttggtggtagcaggaacatgggaggaccatatggtggagagaactatggtcctggaggaagtggaggaagtgcgggtctggtggaaggagcagatattaagcttcttcctacttaccatgggcttcactgtataaacaggagaggatgagagcccagaggtaacagaacagcttcagtttatcgaaatagcaatgttaaggaaactcttatctcagtcaggcattaatttgcagtggtatggcaggagacaccagagcagatgcagagagccattttgtgaatggattggattatttaatatcattaccttactgtggaggaagtattgtaaaaaaaaaaaaaatcctttgagacagtttcttagctttttaattgtttctttctagtggtctttgtaagagtgtagaagcattccttctttgataatgttaaatttgtaagttttagatgacacgtgaaacctttttacagatttttctcaaaagttttgaaaagctattagccaggatcatggtgtaataagttataatgtttttcctttaaaaatttaagtgcgtgtgtagagttaagaagctgttgtacatttatgatttaataaaaataattctaaaggaaaaaaaagaaatatcaatgtcatctgggcactgtatacctgg

SEQ ID NO: 18951 - DNA, 1206 bp, Mus musculus
ttaacaggttaagcctgctgtggtgaaagcaccttattcaagtaaccccttgctatcatctgtaataaatcccagtgaagtaatagcttcttccagagagacctttggagcaactatgccttagtgttcaattggagggcttaggaggaggggtagcccctgtttatgtctgacccagagaatgaattttaacaacaccatatttctgagctctgggtttgattgagagtgactgtctctgtaagcatttccagggagagtagccgttctctgagctctcaatttgattgagagaccctgtcttgataaataaaacggaagagtggccaaaatgattcttgatatcaacagtgggtttcagcatacatgcacaaatgtgtccataccaatgcaaacacccatacacacacacacacacacacacacacacacacacacacacacacatgaaggtgggaacagccactgaacagaaacaaagagccacatctgaatactatataaaattaagggttatgacttgagtgagaacagtaatgtatatgtacatataaatgtgtatatgtatgtacacacacacacacacacacacacacacaaactcttagaaactgaattaaaagttacatatctaagtattttctttctgtcagttacttaacttatgcctatcactgaccatgttagccagtggacattgaggtaccagaaaaccttggtaatgttgtacatacatatacagtcatgtgttggttgatcaagctgtttctatgtggactaaatcatgccatgtaatgaaggtagcctccattatcacagatgtagccatgtagttttgcgttactctggtgtcctgtgaaatcactgataagctgtgactgtctctctgagaaccacgtggctgacctttacaaagctgctctttattgaagagaagcattatatgttcagaactagaacttagcagacaagagaaacgcaaccatataatgagcttgaggccactgcactattttgagaatcagaacatgtattcagaatgggaaaattcctttgaaattactgagtaaattttgtagatgaattaaacagagatcgcccatatctatatatttagtttttgtgaatatgtgtggctatatagagtaaatagactgatttacgcatgtatgtagcattaagtaataatattggtttctatagcag

SEQ ID NO: 18952 - DNA, 1150 bp, Mus musculus
gggcttcttttttgagtgggatgaggtggctctggagggcgtaggccacttccgcgaattggccaaggagaagcaagaggatgcctagtgtctccttgagttgcagaacgatcacgggggccgtgcactcttccaggatgtgcagaagccatttcaagatgaatagggtaaaacccaggaggccatggaagctgccttggccatggagaagaacctgaaccaggccctcttggatctgcatgtccttgggtttgcctgtacagaccctcatctctgtaacttctttgaaagccacttcctggatcaggcggtgaagctcaccaagaagatggacaaccacctgaccaacctccataggatagcagggccacaaccagcacagactggcgtgccccagggatctctgggcaagtatctcttttggcgcttcactctcgagcaagactaggaggcctctgtgccttccaaggggctccacctctgctctgcaccagcctgccttgggacctccacctgaatgaacctctcaagccactaggcagctttgtaaccgctctggagcctctgtcaagtattggaccaagtaaaaataaagcttttttgagacaaaaaaaaaaaaaaaaaaaaggaatgaaaaccacccactctccagaaaactgtgaggtttctatcaccacattcagactgctaaggaatcaggtgttgtggacaggagagctgcgaggttttcaatttctctgtctaccctgcatgcctggttgtactacctagccactaacataacaatctcctgttagtacacacacacacacacacacacacacacacacacacacacacactctttctcctgtctctttgtgtctctatctctctttctcactctctcacactcattctcttgctatttctttctttctttttctttttttttaactatatttttattcaggacatagggtaggaggagtgtagaaataatatcacatctatttgagtgattctcaatttttaaaaagatgtcctagaaggcttccaaagggagtttccttactttatccttagatcctgattcagttaaatttttttttacattttttaagatattttctttatttacatttcaaatactatctatcccttttcctgg

SEQ ID NO: 18953 - DNA, 5441 bp, Mus musculus
ttagaagctgtcttgagagttaacaattaccaggtattccttgtgactcttgtaactttacacttccttgtgactcttaactggtatctttggtatcttccaacaacgccctccccacttccttgagtttcggtttcttcctttaaatacccccttacccagctactcggggcgccacagtcctctacccctgcgtggtgtatgaccatgggcccgagagcgctcttgaataaaaatcctcttgcaatttgcagcaagacccgtttcttgtgggtgattttggggtgtcgcctctcctgagtcagaacgtgggggagccctcacattgtgggtctttcatttggtgcattggccgggaaacgcaaccacccctcacacccgagaaccgacttggaggtatggggatcccctcttgcttgcgtgtgtgccggccggtgtctctgttttgagtgtctgttttctgaaacgaacattggaacatgtgcttgttgtgttgggttgtttgtgtcttgtcctatgtttctgaagtacggcgaagtctgagtttggatccgtctgagtttattgaacttgtgccttggttttccggtttcgagatcgtgggttcgagtcccacctcgtgctttggttttacacctggcagagttagaaacaagtgagattctctggttttggttgtctaggtaaaagtggacgacggtgtttgtagacgatggggtgatggggttttctgaaatgcgcgcgtctgtatttgcagctgtccttttgggccgtaaggaccggaggactgtggtcggcagacatgctaagaggaccacaggctgtggccctgggggacgccctgggaggtagggagagtcagggacgcctggctgtctccggagatcagtcagagggaccgagttctgttgaagcggaagcttccccctccaacatcgtctaattcttttgcctgcttgtggaagacaagaaagggtcgagtgtgtctggatctgttggtttctgttttgtgtgtttttgtgtatgtgtttagagctatgtgaaaatctaaaaaaaaaaaaaaaaaaacaaaagcaaaggtaattctcataggtgctttataccctgactagagatagtttacacctgagatgtgagagaatgggttttaagaaaagtagtactctccgactatctgggggtaatttggtaataaaataaaataaacagtattaattggtctttggagccctgcatctgtagttaggaatctagtttggctggaaaagccctgctaggcgctgattataaacgctgctcttatagggacgagcagcttctcaagttctatggtaaggaaacagatggctgcttttcctacaaaaatctctgtgcttgtgattattggattcatcaggtaacaaggtgctcctctcttgaaattacagctagaaaaattaattttgtttggtttaaatgagcaaatgtatacggccatttcatttttgtttctaaatagtttcaaaagtataaatatgttttatatgtcttggttatagattagtggctcataagttattggttatgattaaaaatttgtaacattggtaacaaaaagttgacttaaaactggtaactctgagttagagtaattcagaacatgtggcatgagccaacccatgggaacaggtctctaaagatacgcctgaattgggtaatattctgtgtaattcttatcctaaaaacccgattataatagatatattggcggctacaccttgtgtttgtgtgcaggaacggacagccaaaactttgtagcaagtaatgtttttggagttcagttttaaagaaaatagattgttttcactgttaaaattgggttttgcttctcaaaattgtggttgtactctgatgttacaagaaaaattaaaggcttctcccgaatcggagccaccagctaaatcggctcctctaaaatctataaagcctcctgagtggcctagtccacaaccttccccttatccacagcctcgaccccagccaccgaggaaaccccaaaccccttggggcgtcaagaggcggaccgctgtgagtacatggagccacagggagcctcagagcacagcgtctgggcggactctggtggacctgcccaaactttaaacccttcagtactggtcattttcctctgctggtatttataactgaaaaattaaccaccccctttctcaggatccccaacacctcacagggttggtggagttccttatgttctctcatcagcctacttgagacgactgtcaacagcggttgcagatgctcttaacaacggaagagcgagagagaattctgttagaagctagaaaaatagcccgaaagccaacggcggtctacacagctacaaaatgagatcgacatgggattccctttgactcgccccagttgaaactgcaacatggctaaaggtagggagagcttaaaaatctatcgccaggctccgatctccaaggtgtctcaaaacaggcccactaatttggctaaggtaagaggtaatgcaggggccaattgaacctccctcaatgttccttaaaaggcttataaaagccttcaggcggttcactccctttgatcttacccagaagatcagtggccatggcttttcataaggcagtcagctcccgatatcagaaagaaacttcagagattagaaggtatattattacaagaaggagacagttatgcgatctagtaaaagaggcagagaaagtgtgtgtgtgtgtaaaagagaggcaggaggcaaaagaaagagaaaacaggaaggatcgtagacaagaaaaaaatttgccacagtggtaagaaaaaaagaaaagacaggatctagacaggaaacctgggcaactgaagaccgagcctcagctaaagaggctcagctgtgtcagactgaagttacttatttgagatacacccttcgaggtgaaaagcagtggctaaaaaagccagaaaaagactgtaactcagatccccaccccaactataccaaggcaagtaagagaattcttgggtactgctggcttctacagactctagatacctaggttggcgaccttagctgcccagttgtaccccctaaccaaagaaggggaggtgtctgtgtggaccccagatcaccagaaagcctttaaagtgattaaaaaggccctactgatggccagcctatgcctgacctaaccaagcctttcactctttatgtgaaagagagagcaggggtcaccagaggagtccttactcagactttgggactttaaaaaaggccagtgacttacctatccaaaaagttacaccctgttgccagtaggtggttttcttgcctgaaagctattgctgccataatctgcttgtcaaggatgctgataagctcactctgggacagcaaataactgtagtggcatcccacactcttgaaagcattaccaacgctcctgtgacacatcagagctttttgttgtctaaatgagtgaccttcgcttcattccacctgctgtcccactgtgtgagactgcacctactcatcactgcactgacattctggcaaaagaaatgatctgaattatcagatcagccttggcctgagggtacgagctggtacactgatgacagtagcctcgaggttaaaggtaagcaaaaggcggggacagcagtatggtggtgaacagaaagcaagtgatctaggccagcagccttcctgagggacgtcggcccagaaagctgaacttgcgactttaagacaagctctataaatgacaaaagaaaagtctacactgacaacaggtatgcttttgccactgtacgggacaatatacaaagagggctgttgacatctgcagaaaaagacctaagatgctgtggctaaagaaaatcagatggcagatctaaccgtcaagcaggtggctcaaggaacaatgatcctgacagtcaaggagtctaaagattattatgacatcagagagaccagctttagatacaccgctgaacactatcaagctatggacagtatttggcttggcctgggggccaagaaattcaaaggtgtggttaggtcctttgactactatgttacaggactctctgacttggcaaaagaaatagtcaaaagcttcaaggcctgtgctataatgaggtagaatttctaaaagaaatcttcccaaggtaatggacctgcctttgttgcccaggtaaaccagagactggccaagatattagagatcggttaaaagttacattgtgcacgcaggccccaaagctcaggacaggtaaaaaaaattaataggaccattaagggatccttaccaaattgacagcggagactggcgctatgattagatagctctcctaccctttatgctcttcagggatagaaacacccctggacagtttagactgacccccctataaattactctagagggggcccccctccactggtaaaaatagcctctgtacatagtgctgacatgctgctttcccagcctttgttctctaggctcaaggtgctccagtgagtgagacagcgagcaaaaagcagctccagaaggcctactcaagagaagaagacctgctacattagacgtctccaccagaaaaccttgagactccggtggaaaggcccttatcttgtactcttgacagccctactttctacctttatgggaccccttttgattttgcttctgcttttaattataggtccatgtgtgttaaataggcaagtcacctttattaaaacagaaattagtgcaatgtggcttttagttttaagacaacagtaccatgccctaaagtaaaggatcgagtatgtcagaaaaaaaatagtgtctagttctaagattagaactactaacaagtagaaggggggaatgaaagtataacaacgtaaaaacagaattctaggcctttaggcccaggcttgggaatgtggcctttgtaaaggtatgctaatcataaaagagatagcgacattcctctacccacccgcttcctgggttcaaagagtgctcattcaaaaaaagtcaccctggccattaccagaacctgcaatgcaaatgtgctattgttagaggctcttagaagctgtcttgagagttaacaattaccaggtattccttgtgactcttgtaactttacacttccttgtgactcttaactggtatctttggtatcttccaacaacgccctccccacttccttgagtttcggtttcttcctttaaatacccccttacccagctactcggggcgccacagtcctctacccctgcgtggtgtatgaccatgggcccgagagcgctcttgaataaaaatcctcttgcaatttgcagcaagacccgtttcttgtgggtgattttggggtgtcgcctctcctgagtcagaacgtgggggagccctcacattgtgggtctttcataa

SEQ ID NO: 18954 - DNA, 1104 bp, Mus musculus
accttgttgcctcaggaggctgactcttaatgcagttgaaggtggcatgcaataaactgagatgtgaaacaaggggcttttcataaagtgtgtgccaaggcctgatggatttggggtactttacaccattagtgtataggtcagtccctgtacagaacacattttcgtctgtgtatgcatacttctgagatgcacagtggctagaaggatgggagtttattggagttccttagaggagcatgagtgagcagaagtgtaataaaaaacaaaaaaaacaaaaaaaaaccccactctcatgtagactattcaccaaagccaaatctctgcagctctttacacaatctgcaggcagataggagagtcctcagtgttgctggtgtttgtcagagtcttacaatggctgtatgtcttacaagctggctttgaactcacagtctgcctgaataccaggattacaagtgtgggccacttgcctagcttgaagaccttttaaatgctttactaaacaagaagactctcactggttgtcgttcacatctggcagtctgtattgttaccacagcaggccttggagaggccttccatgtgtggagcagcttatagattatgtctcagggccaggctttgccaggcaggaacacagttctacaactggtaggtaagtgggtaggatgagggatccataaagacctagtcatggtcacagggtaagtgctggacatggcccatagcacgctctggttcctccagagtgaggtcacgtgatggggttatgggtggggttctgtgtcctgccttcttgagaaccgagcgatcatacttgagatctgaaagatcacactgcatccctctttttcttttccctcagaatattgacatcacaaacttcagcagcagctggaacgacgggctggctttctgcgcattgcttcatacctatctcccagcccacataccatatcaagaactgaacagtcaagataaggtgagccaaaaccagggatggtgcctcactggttagtgggccactcattccagcctcgcttcacaatagcctgtcctggctcattcccctggactcattgtttacacttcagctagcca

SEQ ID NO: 18955 - DNA, 1620 bp, Mus musculus
aggtggcacactcagtgggtgctcagccacttgcctgtaacaccagggaaaagactggtcacaaggagttctcctcattgaagttgttgttttattataagcaatattggtgaaatagctcctgttagtaccaaagttaatcgtttcagtaagcatagaactaaaacacagactgggcattagcatgtgagagggagggttcgtgcagtagggaaaggggggtgctttagggagccagagattcaagttgtactggtggctgcccctccagggcaggagttaagacagtgccttagccctgcaccaggacagctgagcctacacccacatgaggatcctgtgtgctgattgggactccaggagaagtggctctacgctgtgcctgggctgtggggcctatatcacgagccaaggccttacccggtttgttgatttctggctggaatttagcagcctcttttcgagaataggaagcccttatttcatgtgcctgacacagaagctgttgtttgaacaatgtcaagacctgttgctccgggatacacttgtttgtcacctgcaaggcaccatgtggaagactggccatcaataaaaatggggccacagcttcagtaacaagatggatggtgggaatgtctcccaggaggcatgccaggccaaacatggactgagtgaggttctgtattcaagcataatgctacagactaggaatctgttgtatctatggaacgtagagaaggaagcaatttgaaagtagttattgggaagtgggccgtgtctgtttgtgttgccatcagatggccagtcccacccctccaccctgcttaaatgtcccaatctggcagcttatgctgcagagtgtaccaggagaccctattattctgtctgcccagtgcctctctggccctccttggcccagttctgttcttgttcttgttctgctgatgaactccgttggggtgaccattgtgtgaaaatgactgtttccaaatgagtctccactgaactcctctgagcttccagcctctgctgtatttgccttcactgaggccttccactgtgcaccaaggtggtggatctgaggccaggttttatttattatcatgaaaaggggttgtcttgttagagactttcctgggcttgcagttcacaccttctgtcccctgctggctatgtgatcctcatggcagtgtggaagttgcccgagttttctgaaaggatttggagtaagtcagctgctgctgaacgagtatgtccatgtagaggtaacattctgttttggaatctgtgggcctgggctaggcctggagccagtgcagggacagacagatggtgggctagaccctctcacatgcacacacagactgggtgtctcacagccagggccaggctgcccacatttgtgtgagggtccacagtcaagtgctgtcttcagaccactgctttttgccttctctaataggccactaaagagcactgttgaccctctgggcatgcttgtagatggccatgtgctattaaaagtagtatttgggagttcttagagtgcctgtctacaatgcacgaagccctgggttgatccctaccaccacatacactgagtgtggtgcatacctgtca

SEQ ID NO: 18956 - DNA, 1124 bp, Mus musculus
agcccagctggccccatgattagggctgaggagttgggacctggacatacagaagggtgggcagctgtaaccttcagggactgccttgaggctatactgacaaaccaaaacccagagctagaaaccaggcttctgggggctacatgtactgtcaaggggcagggcggttcctgtttggtctcaacacatataactggggagggagtcaggccaagaccaatgtgaacttttattggcttggaaagcctgagccatcttcttgtggctctacacagtgtcatgacatggagctgaagccaagcaggctttgactgtcacggccataggacacagtttctgtggtgagatggtacccatcagaacctaagggtgaactggccactggctttgttttcctgaggaccagtattggaaaggaggccttactccgtgggccaggcatcaccctctggccccgtgcttctcaaacttcctaatgctgcaaacatttaatagagttcctcgtgttgtagtgacacccaaccacaaaattctcttctctctctctctctctctctctctctctctctccctccctccctctccctctctcccttttcctctctccctctctccctctctctctttcttccctgctttgtaacagtaatttcctgctagtataaatcataatataagtatttttggagatacaggtttgccaaagggattgtgactcacaggttgagaaccactgctctaggagggtccccctggagaaaggtgctgggccctggaattggaatggttgagagagaggagggatccccagaactggccaagagttggtctctacttcatgagtccccatatccccttcaatggggcatttttaagatagtcatcccaggacacgagtcttgacaggaatgggcaggatagtattgctcccccaagagaactcaggaacaaacacgcagagtccagtttgagaatagaccctagcttgatcgtgtctcatccttacccctgcaaggcacatggcgacgcacgccagtgtcagggcagcccttggcactggtcctgcttggtgatggttttaggcttcttaactgaagctgagatggcagtgctccagtcttctg

SEQ ID NO: 18957 - DNA, 1400 bp, Mus musculus
ccttttgaggatgggtgctagagggcccgtgcccctaaaacagcaggcagcttcccccccaccctggtgtgcacaccaggagtgtttgcacagaatactgggtgtcttctgtcttgaagaaaggcagtgtccccgagtcacacagcacagcaggtagcatcaactagagctagttaatgtgtgttgttttgctcttgggatcgagacttcagtttccaatgtgtggggagtcagaccagaatagatacaggtactttgaaaccactaacccttctttacacggggcacataggccagtccgagttctttcttaacaagatggctgttctggcctggccagcagtctgcatgctgaagctgcaccaaagacaagcgaatgggtcatttctaaagagaccagggagcccactcctcatgggctctccgtggtgaagaacaaagggtaccccaatggcctctcaccatcactgtcctccaggggcctcggacttttagtactcaaggcatgatgtggcagtagctgcttcccctaccactagctgccccctcatggtcgtctgggggacagaggtggtctgtgtttacaagggcagtcaagtccagtcacccatattactcatcaatgttagacgaagccttgagctgaaggaggtgctgtcggctaggcctctactctgggtttcagagagtagtattggtttcagtctggtctcatttccattgccttaacgctgggtggtcagggccccaaggaactctggatctaagctcaggagtacacatagcagctatgggtatgggtgtcctcctctggtgtaactgtgagactaagtgataggaagaagtaaagccttcatagcgagtggatgggatgaggtgtggcacacatccccgggagtgctcgtgggaagtggcctccacagaaggtagtcatcttcatcctctaggacatttaaaacatgctcagtccctggacccagatgatggcttctcagggcaagtcataagttatcaggtccacttgtctggaagaataacaagaaagctgctgctttcgagatcacccgccagaggcggggcacgaggcacactgtgttatactgcatgagccatgaattgggctagaggaagccttgtcatcagatactgaccatagcatgtgacactcagacttctcagctcctgtgcatcccagtgtaggctctgaggccacatggaaactctagatggttctgatcactctagccaccggaggatgaaagggatcttttgcatagcagaggattttatacacaaatatattttgtttgtaatgagccattctcaataaatattctcaccgtacagtggtagcaccctttgtcttgtcgtcatgaaagccctattagcctgcagagttc

SEQ ID NO: 18958 - DNA, 1192 bp, Mus musculus
gggttccaagctgagaatggcagcaggcttatagcttagctacttaggaggctgaaacaggaggattgctttaacctgtaagtatggggctaacctattccccacggtgaggcccttgtctcgaaaaaaaaaaaaaaaaaaagacaggttagtcagggtcatttcagttaaaggtctttctggggagcggcaaagatgcgggggtgggggtagaggggggtgacttacgatgactttcttgcatccagcagcatccagacttcatcgtgaaggcacggcctcttttgacctgaagttgctcccactacaacccagggtgtgccctagacttgtctgtccctgcacctcccatctaaaggacgaaaaatgggttctctggctgagagcctggccccaaacagctaccatcttcagtgccaaggacaggctggactgggaagccccataacctgatggggattttcctaagagtccagagaagccaggtacggctcccaccagtgtgaaggtggaagataccagagcaagcgaagaccctcagagacatgaaagggccttagccttagagaggcatctctaatggcgagtttgcaggaggcaatgccggcaatttgtgaacccttggttggagtgatggaatatccaaatatccgaacctagtgtcctgcccttgggtccttgtacaagggataggcagtaatgcatgggcttggaaacaggggttgggagacccaagagaggaaataggggcccgtaaagcactcgcagggtcctaccatcaactctagacagacagacagacagaaaggagatatgcactcttggattgatgggggcccaggaacccacagaaaccagaacggtgaggtcatgtaggtatacccagtccgagagtcacagaagtaactgtgtgacagcagagtctggctactgaagcagaggaaagtacctgcttttcttctcacagacctgggaacttgacaaatcagggcttctcgctggctaagttctgggaacaaacagaccaggagagtgtgggatccttcctcagctatcaaatggttcccccccccgccgcccccccccccccgccttgaaaagctccattagtggccatcatcagtgggtggggagtggcaggcttctacggggcttgcttaagaggcccacgtactggactacatttcccagc

SEQ ID NO: 18959 - DNA, 1160 bp, Mus musculus
agttggcgggactccggtgccatgttaaacctatctctgttgtaggaccatgtggagctcacagccctgagaccagagcacacttggctgacagcatcgggccacgtgctcaccaagacccagtctccccgggagaagcgcaaagaacatgtaccctagtcctatgaatgccacatctagtatctgtgccttgaacactatggacccaatacctgtcctagcctgtccttctgactgagacatgataccggatagtcttaactccagaaccccacccccaacacttctccatcagtaacctgcacttcctttgtctattggttatgactctaactcctcagacttaagggatggccttcttgtcccgtcctagaactggagtacctatgtcccaagccctgcgttggaagctcccatttcagttcctcactccccagagcctgataaactgagacctggtgcctgccttcctgtgaggtcccccagagctaaactgccttgattcctgccccatggaacaacttgagagctcgggttggctcagtcccacaatgaagagtggccccggagcctgagcagtgagaaagagaactgtccagcagagaagagacctcttttgtaccccaggcttctactcttacctcttctctagcatactcaggaacgcccttccatccccatacaagaacacaagctcatgttacatctttcctggttcccgtctgtttgtgtttccccacggttccataactgtccgtgaggtcacccactaatagcatcagagtttgagccctgcctgcttcctctgctcctgcttcccatggcgtacgtagtctctcccgagcttttccacagatagggtgggatttagaagaatggtgatgccggggcggtggtggcgcacacctttaatcccagcacttgggaggcagagacaggcggacttctgagttcgaggccagcctggtctacagagtgagttccaggacagccagggctacacagagaaaccctgtcttgaaaaaaaaaaaaaaaaagaataagaataagaatggtgggtggtacccagtgggaaggccagtgcctgcaaaaggctcaactgggctgtcatagtcatgagatgaaagagtcaggtgccctctggctaatcccacctcctc

SEQ ID NO: 18960 - DNA, 1567 bp, Mus musculus
agaagccaacttgaaggagaggaacttagcccacttctgactgacctgtacttcagagggctcacggcagccactgggaccaagtcagagacttactgatgatgaagtatatgatccaaagagcactttaggggaacagacttaaatagatgggcacagtcacaagtgttcctggggtggaagtaaggtgctgactcatcaattaactgtactatatggcttctgacactgtcccactatttctgtccctctgtatgaccgcaggaaatatctgcgagatgctgaccgccaggtcctggcacagcgcgccttcatcctcactgtgaaagtgttggaggacacactgagtgagcttgcagaggtacgtcagcctatcacagctcaccccaggcctgtgcataagggccagggtaacaagtctctgcagcagccacagttagtggccaacacaagtcctctcttgatgtcagctccccgtaaggctcacatcgcaaagctcctggaaagccaggccatcccagaagcagcctgcccccacacctgcttatgtgtaagggggtggaactacccgaggaacagaggagaatgggtctctgggagagtcttgacggctggcacacatagccagaatggcattgggtagagggacccatggaggatctgatccaggcagagcacccgtaacttgtctggcttccttgtaggggtcagaacacccaggatccaaggcctgcggcctctctggagccaggatgaccactgatgtctcgcacaaagccagtcccgaggatggccaggaaagcccccaacaccccaagaagctacctctagctgatggctcaggaccagggcctgagccagggggcaggatgggccctcttaaccaattgccagtggtcacagacataagggacaacacagaccagggtggggagcagaaagacaaagagagtccccaggtggggcccactgaacccatggataccagtgaggctgctggtcgccactcagacttggaacagacatcacgtctgttgccgggccgccccccaagggaccggggccctgagagccggtctgctgagctttccttagaggagctgagtatcagcacccggcaacagcccgctccactggccccatccccagcagcccccaccacaactgctgctcccactaccatggcggccaggggagcggggcactctgaggaggcacctccaaggcctaatcggaaaaggaaactcctggaggacacggagtctggcaagactctcctactggatgcctaccgtgtgtggcagcagggccagaagggcatggcctatgacctgagccgcatcgagaagatcatgtcggagacttacatgctcatcaagcaggtaggcagcctgtgcactgaccctggggctgcaggccccttcattgcctgggccttttgttccctggaggttccttcttgaggccacatgtatcagggcccaccctgagatggtgttagggattgtgccccctgcttgaacactctgtactttgtgaggtttttttttggggggttgtattttta

SEQ ID NO: 18961 - DNA, 1234 bp, Mus musculus
gttatttatctttctagactgtacaaggaaacaaagcctttttacacacaagtggtgtgtacatttagaaaagtctaggaggatttgcctgttggacttttcctttcatcctggatgccagtgtactaaatgcagtgtctggcttcccttttccctcagcctgtgctgtagatctctactcgggtcactttctacggctccaatacaatccttttaaatgtgaactcaactttgttatagccgaccatacagaaaccccttattgcttcattgggtggccttataacagtagggacacaattatcctccaggtagacacactgaggtgaggtagtccctccccgtgagggaagacttgttccgagaaccgagaggaccttttgcagagctttatttgtccagctcctgcaggtagagggcaaacttgacatctcctgacctggaggaagggagaggtttggcctcagtatctggggtgcatactgccctgcagggctgccctgtgttccctgggctccttccacccctggggaggcagatttctaggatacagtccccgggttgcttaagctgtgtttttttttactatgtctgagaactaggctgttgcacctgtttgccatatctgaactgctgtggtctttagcttttgcctgcaaacttgccagagatggtatggggaagtggaaatattcctatgatgttggatttaaggcatggagaaagaattggggaccagaacttcctaaccaagtgactcggagggggtgacttgacattgtttctgtgtttcatgctacatatgaaaacgacccattccttctcccaagcagcactgggagatgtcagccaggatgccagcacaggcactcaatacacagggaggctgaaaggctgtgagtaagggtatccattctgtcagagggtgacaagccagaatggagtcaaatggcatagcttctgaccactgtccctcttcctcctgagtgggatattgttcccgctgaacttagcaaaactagggacagtgacagagccacacagctattaagcagtgcaagcagaagaactacatttaagcagctgcctttcccttaaatagactggctgtagggcctcgttttcgaggcagtatgacagaatccctctgcttgcatgtcccactgagcgtgtgggagcaaggtgctcattccctgcactggggctttacgctgtaaaggatgcctggtttttt

SEQ ID NO: 18962 - DNA, 1205 bp, Mus musculus
tttagttgctctactaggaggcgttgggatgctctgtcacagggagcgggatggctgtcgtgattttagcatgtttcatgtaggttaagaaaactggaccctgaggaggaagatgatccatttaataactatgaagttcaggcagaagccaaactggagagcttctccaatgtgggacctcatcgcctgtccttcgactcagccacattcatggaatctggtaggagtgggcagtgtgctctgtcactgctgggcagtcttccttccatcagcctgggacctgcctggcttctgctctgcagagtggttctagggtttcataagagttggaaaaagggctggagagatggctcagtggttaagagctctgactgctctaccagaggtcctgagttcgattcccagcaaccacatggtggcttacaaccatctgtaatgggatctgatgccctcttctggtgtgtctgaagacagctacagtgtactcacatacataacataaataaataaatctttttttaaaattggtggaggagctgcctgtggtcagctgagggatccaggtgcatacttgctgtgctcctgaggctgtagacttaacactggattgagaggcttgcctttgaaagtttaatgtgtgttatcacgtctattctgtgtgtaccatgtcccacacactgttttgtgtgtatgatctcattcactgcacatgcagcactggccagcccttttggtgttcatcttagacatgtgaactttgagaggcttgtttaccactgacaagggttggagccagcattgaaccctggtagcctggcatcaatacttcagtgtgaccttagcttcatgtagattgagtgggggaagcagaacacaaactgtcctcttccaaagagaagagaaactgaacccaggagggcctgttgattttggtgaggtggttttccttgtgtggacagagaagcaggatgtgcatgcgttcctgatggagaacctgaccaacgggggcctcctggagcttatgatgcgttatctgaagagcatgggccacaagttcctgctcaagtggcccccagggctggcggatgtcgtccttagcgtttaccacagctggaggaggcatagcaccagcctgcccaacccattgctgagggactgcagcaacaagcacatcaaggtgagtgcctcttaaggctagtgtctgg

SEQ ID NO: 18963 - DNA, 1148 bp, Mus musculus
acccggccagattggtttgttttaagtagttctaccactctctaatggacaatgatttatccctgacagaagagtttacaaactcaggtatcttagggaccagagagagatgcccttgtcctagggtcttgcctaagcacacctcacgtgctatttggtctcaagattgttcaaaagaagtgcggttcccgtactgagtttgaaatgatcacaatcatttaagaaactttaagcctttaagtctcctatagaaatgtatgccttgtgggcaactagctgggacgctcagagggaaaaacagagccacctgccgactgggagggccaaaggtagtgaacctgggaccagtaatttggagccggcacacgtgacagcggaagaggcgtatctctgatagccaatctagaagggccgagtctgcctggccaatgagaaacagagctgtgctctccctccccggccccgcctccctggccccgcctcctccccgcccctccccgcgctccttttctggaacctctactggctcccacagctcacccggtgcagttaccgtttggcgatcccactcttctcccgctaacatgccattcgttgagttggaaacaaacttgccggctagccgcatacccgcggggctggagaaccggctgtgtgcggccacagccaccatcctggacaaacccgaagacgtgagtgagggtcggcgagaacttgtgggctagggtcggacctcccaatgacccgttcccatccccagggaccccactcccctggtaacctctgaccttccgtgtcctatcctcccttcctagatcccttcctggttgtctttcccaggcgtgaccctgacgtgactgactcccaaggatcctgggcagtgtcccagacccggagccctcggacccccacgttaagaatttggcgcgcccccttctgaacaccagccatgccctgcccaagcttcaggatttaacttttgtgttccttgcagcgcgtgagcgttacgatacgacctggcatgaccctgttgatgaacaaatccacagagccttgtgctcaccttctggtctcttccatcggggttgtgggcaccgcggagcagaaccgcactcacagcgccagcttcttcaagttcctcaccgagg

SEQ ID NO: 18964 - DNA, 1297 bp, Mus musculus
acagtggagattgccatccgaaataccggagatgctgaccagtggtgccccctgctggagacactgactgatgccgagatggagaaaaagatccgggatcaagataggaacacaaggtatatacacagtacaggcacctatctttcctggcagaggcaggagtatcttcttcccaggaacctagtttcaagaggcagtttcagtggagatgaggccccagggtacattttctcaaagagaacaaagacaagtcctcaggccatgtctgccttttctcctagcaggtttcagggtttctagaaagataagtagtgtccatgcaaccaactggcagggtcaagaaaggctggagactattcctgctagattggccccacacctagctcctctaggaaaaaaacatagccaagaggaagacaagacaccccgagctatgaccagccccaactgacaacctgttcccctacttcaggcgaatgaggcgtcttgccaacactgccccagcctggtgatgaagacatccatgctcgacctctacggagcatctcagactgcctttccttcctctgtggaaagagaaaggcaaagggacagctggtgccatcctgaggactggggtaggagcctcctaggtgcctcccttcagcacacattccatttgctaaaccccaacactgtcccccagagtctagagtcggaagcagcctcattttgggttgtgttttgtttttgtataggagcccaggcagggctggtaacactttttaaataaaaagtaccatgttcaatttctgtgcagtagcataaaactgagagccaggagtccagcctgagctagaaccggtgtggatggaagggtatgtggccaggtggctgtgtcagtccttgcccttctgccctctggttctgagtctgcatagccaggccacagggcccctagagcagagcccagtcactgttctttcttgtgccttccagcttcccaggggctctctgtgctcagcaagtccttgtagaggttgacagtgtgtcagctcctctgctggccttagtcctgatgcatccagacaggctgctgccacctggagggactgtgctgctctagaatgaatcccttctagaggacttagtcatgtgtgggcagcacctggacaagacataatgaatatgcaagcagaagtctgtgccaaagttctagcagcccccaaagcgttaactgagtctatctcaactgtggctgggccaacttctccttccccaggctgttgtggggaatggaaatagcatgcctgccatg

SEQ ID NO: 18965 - DNA, 1787 bp, Mus musculus
agatacccctcactctggcggcgactagccactgtggaagaaaggaagaaaatagtggcatcgtcacatggtaaaaaaacaaaacctaacactaagggtgcgtcttcacgagggtttgtaaacctgtttcaaaaccactcgcttatgtcatgaagataaaacgttttcactccagtgtcttcattgcagcctgaccttagttcgggagggagcatcctggggcgggccaccctgccagagcacacacacctcaggtgagagtggctcaggaatagagtctcccgtactccactgttgtatgttcctggctggggcagtgggtgcgtgagggactggggccagggcagttgcaggtgctgtgaagacatgttggtctcaaaacgttttaggaatgctgagatttgcttcatttgctgtgagtgtgttgctgtagtcatccttgtagatggtggcactctctttcctctgggccttttaccacttccctccctcagcacatccatcctgtaaatacttcatcttgacaaccagtgtgctaagctcacatgcatgtacccattccgtgtggcaggccctgtgcctggggcttgccaggtgagcagtctgatgctggtgaaactagtgcgagctctgggctgtggcaactctgtgcagcgtgacgctgctcttcgtatattttggcgcctccagcatatgggtttgggtatgggtgcagtatgacatctggctggtggcaaaactgctttccactcagcaaagacaccctgtagagagctgccccaggcctgcatgcatgtgtgcatgcatgcatgcttgctcgctagcactctgtcgtctgtcttgtctgtaggtgctaatgtagttttgtctattatggtaaactgggggttcttttaatgcaggagccagagctgcttttattcactactaaaacatacccactgttgcctaaaacagtttttctttgtatcctttgtgccacaagtggaggacagtcactagtatggtgactgactagctctgcctacccttccttgagttcccatgaagtcctactggtctttctgctgtgttccttcctgccctgtaaccacgagagtcctccagtgacgctaagcaggtcctgtcaataactcgcagctcttgacaaaggtgctctagaaaagctggggctcacggcgtatgaagtctgtcttattttccagacagcacatctggactggctcggggacggtaacttctgcttaagtgaaacacttctttccaactctctgggctcttgttttaaaagaaaagtagtcctctttcatcccgtctcatacttgcattgtgttttagattgtggtagtgtcagacctcttcccactggggtgttactcagaagccttcctggcagccactaagctgcagctactccaaacatctctgcctctgagctaatgctcgaaggaggcgaattcctccagatccatcccaccggaggctttctccactagaatgtctaggcaaagcctcaggccagttgcccttttggaagacgctagcactcagcagtagtgagtttacaccttgctttcccagcctcctgcatgtgaggacctcctgtgctgtatccgtggttggcagcttgttcacactgctgcaggatgaccgcagtggggtctctctgcttacagatcatggatataccaccctggccaccagcgtgacactcctgaaagcctcagaggtagaagagatcctggatggcaatgacgagaagtacaaggctgtgtccatcagcacag

SEQ ID NO: 18966 - DNA, 1115 bp, Mus musculus
acacctgaatgggcaatgcatggtcctgaatagttttgacccctgttgctgaggcatttgaattgtttgtgccaagtgatctctgttgtcacagtaaaataaacactgaaagaagaggagaaagaactcaaggccccctgtgccctttctactctggccaaaggttattattatttgttttattttgttttgttttgtgggagacagttctgtgtagccctggaactcagtctgtagaccaggctggcctcgaacacacaagatgcacctacctatacctgccccccccccaagttctggggttacaggtgtgtgctcttttaaccttttttttttttttctctctccagaggttatggcatgatcccagccaaggtctctgaggaaaagtctgtgaaaaccgagttccagaggacagggaagggcctttggtgatcctgggatggttattttcaaactctgtcttgtgatgggtctcagagaacacaacctggcctgcagtctccattcgcttctccgctggcggtctatgtgtctctttctttcctcctgggctcgtggcaaacccctattgcattgcttgagttctgacagaaagacctgccctcgctgccccgtgcctaactaagccttgggctttccaaagctgaccggtgtccccaggactcgcgtagctccgccctgcactgggatagctccggagccctaaatccaggaggttaatggaagggcgagctttggcccctcccatttggagggcgtggatcagaggccccgccccagatcccgcccatttcacctgactctaaggacgctgccgtgttagttgcccggcactgagcgagcggctgctacggtccacgcttcttactcagctccaacttgatcccaccgcagtcatgcctcggggaagccgcagtgcggctgccaggccggtcaggtgagagagagagcgacagggaccccgtggggtcgggtgagggaaacgtgggtgctctcccaagggcgtccgcagaatgaccttggagtctgctgcgccatgttggctggggggtggggtgggaggacggggacgcagaagcgtgagtctaaacgagggtcccactggaccctgg

SEQ ID NO: 18967 - DNA, 2099 bp, Mus musculus
aggaccttcagagcagtcggtgctcttaaccactgagccatctcgccagcccccactagatcttttaagagggagacctctcaagatgggtacaaagacttgtccaaggacgcctaaccctagcggagcggggaagagatgcagtatttcccaaagccctcattctcaccaaagcccagcctgtcttcatagtatctgttccctggtgacctgtgccccacaagggtgctgccactccccaccaatcttgagcccaatccaaatgctagttagcagtgtttgagtcctaggtcaggagaatccgtgtggcacgagccaggaaagtgttgtaacttggggtagtctagccctgggtcactcaacctgccttaaactatacttgaaacatccctagctagggctagggagtcgggagagacaggaagcctccagctttggcacttacttgtgggtaccacttttgagctgacagttgcctcttgtgctcttccccaggcccctgcccggcctgcctctcaccccctgcagatggggccctgctcctatgagatcaagcagttcctggactgctccaccactcagagcgacctaaccctgtgtgagggcttcagcgaggccctcaaacagtgcaaatacaatcacggtgagcagtcattttggtgcatgtgggggtggaggggtggacccttcggtacctgcgcgggctggcaggctggcgagctgatcggctgatcagcgctttgtgctgtggttccctccacaggtctgagctccctgccctgaagaggctgtgggcctgctcatcgcctaacccctcaccgacagcttgatggaaaggagaggttccatgtgactgggagtaaggaaggatcgttctcaccccgcagactaacaggagacataattattcaattaaaaagtttactttagaccacagcctgctgtgtgcccatttactgccctgttggctggcgggggggggggggggggggcaggatcaggggagataggggaacagctatcttgttaatgtgctatgcctcatctttgcggaggtgggagagaggatgtgggagttggggatcttgttatagaaccctgagctgtccttgaacctctgggatgggaggaactcctatctgtctgcattgtggatagtcaaggacactcctaagcagggagactggagaggtatttgcaagtggtcccctgggacctaaaacctcaagaggagcctattgtctctgcccacaggaacatctgtgtcttttctcttcttattttgtccttgagttcttttttctgcactcaaatggggtggggtggggatctcaagcgctcggggagtggggggggggcaactctcacatcctgtctgtgacctttcccttcttgctgatgtaacttcttagtaaccgccagatcctggaagaggagtcctgctggattgctgtctgtttgcagttgatcataaagcagaggtcagggccagtccccttggattcaagtccagcttggctgtggtgtaccggctcatagaacctgctggaatggaagcaggcccttaagaccacagctcagaaaaaaaaaaaaaaaagacacagctcagattgcttcatcgtacagtcgctacgttcactgagttcagtcaacaacatgcattgaacacctactgtgtgctaggctggagaaacgtgggccagcttcctaaacgcagagtatgtgtgcctttaggatgctgatagtccagcaatactgtggggttttatctctggttacagtcctgggtgtgtctctgtgtgaaagtcagtaaagatcccttttggattttcctgggttcccctacctttttctttttctctttctttctttctttctttctttctttctttctttctttctttctttctttctttctttctttttttttttttggtttttcgagacagggtttctctgtgtagccctgctgtcctggaactcactttgtagaccaggctggcctcgaactcagaaattcgtctgcctctgtctcccaagtgctgggattaaaggcatgtaccaccaccgcctggcaaaatctttatttatctatctat

SEQ ID NO: 18968 - DNA, 3236 bp, Mus musculus
taatgcagggttttgtctgtttattttttgagggtttcttttgttctcatttagtgctggcgctggatcggaggcttcacaaataataagcaagtgctcacccctccccctccccggctaaggcattttctgaatgaactgtgagtgccatttgaaatccatctggttttcatattaagtatttggcttgacaggaggaaggtgtctgtgtccctgtgaatggaaaacaagttaaacctatttattagtatttcatctaaccctaaagtttgagagttctttaaaggtttgacgtttggtgggcaggctcacaaggccccacctctccctgaagatctgcgggcagttaatacttgcgaagggagggagagagacattgtttttgtttcttttttgagagacatcatcttaagtggtatagcatgggtaagtgggcaggcatacgtccttttcagtcttgaagccaaagaaggaatcctgcctgaatgcctttacctaaaagagtatccaaggaggccaagccattcctgtaaaacgcccgtgtctgtgaaagacccctgcaaacattcaaagcacagctctgtattctcagcgccacatgaagcagcagcaacggtagttagaaaactggggcggagcccacgaccatggactttgtttcgcttgatgcgtagggtagccagagttatccacgctggtccgttttggctcgctctgtttgaagaactggtcatatcctcatggaccacatcagtaaagcaagttgacctttcctgaggaaagaagccccggcatttgcggtttgaagtatattgaacttgagttataactgaaaaggtttgggaaaatggcatctgtccagtttatgacttgggctgaacttagttctactctcaagctgtaataagaacttgcccaataatactggacatagcgtggaaaccagagcagggtggctagaatttaaaccctctctgtggtctttgtttttcagtccacgtgtgtggttgagtgtgtgaagcttgcaatttgatgccctggtgcttttcccccacttggtgctagggattaaacccgagcgagggctctgccattgaaccagatccctagtcacactttgtgtcttgtctcctatttaagtggttctaatgtctgtataagttccctttgttggatgtgtaatttcctagttgatcacactaatactgcttgggtcttacttgaagcacttttgtgtgcaagatatgtcctaaatgaagacttgccttctcctgcctatcatactacttagctggtcaccagcctctggaggaacaacttctcctagaaccgtagagcatcctctgaggattggtcttcaacagcttcaggagcgctagctctttctgtacatctctagggctgtgtccttgagcctggccggggctacctgttgtcctccagcccaggtgaccagctgccgctgcccatccctccaggcgtctgggtatatgctggttagagacactggtcctgttcctttctttaaaggtatcttgttgggtgtggtagcacacactggtaataagagctcttgggaggctggggcaggaagatttaaagttcagagtcagcctgggctcttcagtgagttccaaattacacaggaaacaaaagaggcagtgtggataagttccttagataatgtccctgttccatttttcccttcctcggtttagtgaaatttccctagattccatgaacaaatgggaagaggttatccccaggccttggtctctccagactgagggagggacagaggttgtgagtatcttttgtttgctccgtgcttgaccattgattgactgtgatctgcctttttactattttgatgggtcttttcagtgtttttttttttggccacatcacactttttagcctgtaccattcctttaggtatggaaagggtatttgtcccacttgttctggtgaaaaatcccgtttatgaaataagtctgcagactcatataaacattactgtctatagtaaacttaagaactgtcttagacctgtgtcgagtgtctccagccctgcctgtcgcagtagttttctgtgtcactaaagcatgctcctaaagaggacagaattgtttactgctaagggaggccccagggctctggctcctgcctaccgcttctgtcccctgcgctgcccgacccaacctgacctgtccactgctgctgcactgttttgaccccccactgatcttgctattcctcagtaaattcccattttcccctggtgcagaggctgcctgggctgctgtcacagcgctttccctaagcctgcatggctgctacctcactcgtggttatgaagcttactaagatttttagagtgactagaaatgtcccctgcttctgaagcctcgtttactccttctcttggaaggcgacttacctctccccgacttaccccgcctctgcagtctagctacatttcctagtcacagactctgaggaagaaatcgttagcaagagctttggctctgtcttagaagtgagctagcttaagtgcatttttgtgcctcttaatacaaagacgtagagtgagctgagtctctggacgctttgttttataccgacagctccatctattttgaaagcagtgtcactttgttctgtttacacgtgtattaaatatttgtcaagattactattttgttactctgtgaagttggctgcttgatttaccaaatgaaagttattttgatgttgccaaagttatttataagaactagcaattagaggaataaaaaagcattttgtggaaaccttttctgtcttttttttttttttttactttgtgcactgtgtattttaggttaatttttgttttgtgtcttctgcagttgagtttattttactggttataacttctagtgatatgttcaataaagctaattaggcttctttaatttcatttttaaatcttatttattattgtgtgtatgacttgtgtgtgggtgtatctgtgccaccacacatgtatacaggtcagatacattttggggttggttctcttactctgggatccaaagatcgaactctggctggtaaacccccccccccccccgcttttaaaaattttctgttgattgttaatttcacactgtatgaactccattcctactcatctcccacccctccattccatatccatcctccaacctctcccacccagcccaaagaaaaca

SEQ ID NO: 18969 - DNA, 1613 bp, Mus musculus
ccattctccatgcccacagcccaggctccatgcagccgcacagcctcctttgtccagtgtgattactgaagcaggtgtgcctgctcgtctgtgtgtgtcgtcactaatgctcagcaagtgccattttggactgtttagttagatcctgtttcagaaagataaaccagcatttgatttaaaatcacttttgtagcctgtaacatagtgacgttaaactgcaagttctcatgagatcacagtattcatcctctcacgaagcacactgagttatttttatgagcagatctggacacatgagtggcagcctacagtcttctcattgtgctagccaggcctcttacacagctgagccgccatgggagtttgtctgtctagggtggacatagctgcagcctcttggctttgcatttgagttatgtgcctataaaacttggccaaaccatttttagttcattttatccaaacttgaaatccgagtgatctaatattgtacttacgtcagaaaagagaatgtaaaatcttttagatacttataagagtttgaagtcaagcatgaatctaagattatttttatataactaatcaaagattaatgttatcaagttggcggggtttagggacttggaaggatggagacatttatgaatcatatctacttcacagagacagctagattttttttctagagttagcctggacacgtgcttcagcgagttcagctgactggttctactctcatgtctcacgtcaggaaacaggacgtggcagagccctgttgctcctggtatcaaactgtggggtagtatgttaaaacatactggaattgtaataatcctgttataactatgtacagactccatgtaacttattggcctcagagtctagtggcagactggtagggttcgaggtagatggctgtgaagggacccgaactacctacccactgtctcaacgttgtcattttatatcagacagcacctgtaaacttttgtactgaaaactcagtggcagtaagaacgtatctggtaagttaagattttaagaatcatattaaaatgttttaaggttactctctgggaattctgtatatcacactaatttttttatatcatgttaataaaagctattgactttgtaattctgcattttgaaatgtgtgaaagggtttttaaaagtttcccaaaacaggatgtattttattacgcattatttctttcagaagtataaacacaattatgcttatcgtatgaaatctagatgacacacttatgtgttggaaaggaaacttaaaatctcctacagtccgacttacaagtaatagcagtcttagggttgctaagaactcaggaatttttagcctttaaaattttttaaaacaaaattaggaccatatacttcttttataatctgcttttgtacttaataaattacacaaatgtttgcatccgttacatacattctttacatgtcttaatgatgacattgtaagttgtgcagggctgcatgcagcccttcctgggctgctgggccagcaccgcctccctgcggtgagtcacctccctggtacctactttgatttccacagtggcatgtctgcctagcctcagctctgc

SEQ ID NO: 18970 - DNA, 1228 bp, Mus musculus
ttgagcaccattctgtggggcttcaggccatgtgctcacagtagaggacatctcctcagcatcttacagaattgcctcagctccggtcatgtatgcattgtgcttataatttaaagatagtgtgtgcttacaaatatctaagttttaagtaactattttaataatagaattaaaagcagcgtcccatgtcttgggaagggttctatcaggccatctgctgtggggaggtggtgttataaaggtaacatgggcctgagcgccctctgcacatggatggtatcacagcccattgcagcccagaggcctcctaatagttagtctgcccacctgagtaccctaggactctgtgctaaggtcccaaggtaaccagatagaaattgagtcacctctgataatagtattgaagccatactgtagagaggcacatggctttagagtacactgtcttgaccaggccacacacagagcaggtgctttagtgagggactgagcgtcagtcgagttccttgtttcttggagtgagggccctcgtcagcaggcctgctggtgttcttgttgcctaggcctccagatctgggaggacctcctccaagaaaagctgtcctgtcaatgaacggcctgagctacggtgtgatccgagttgacactgaggagaagctgtcggttctcactgttcaggatgtcggccaggtgatgcccggaggtaagaatcggccagagtgcatctgcatcctgccctgattgacaacagaaagagcattagtgcaccagcagtgctagctcactcgctgtacaccaggcctagtccttaacctcgtgcctcttgggggatttaacaccctgcagtttctatagggtacctcagaaaaaactgatgctgtaaatgcctggatgatgaggtcacccgagtagattgtcagaatcacctgtggtgacagatgtggaacctcccccaccccacccaaaaaaaaaagggaaggaaggaagaaaatcacatctgcaccctcctgcagatgctggcccgggcatttccctgctgctttgaggaaggacagggagaaggggtgttggagtggtcctctaagtgtcactgaggaatggggccagagtctggctcaggagcccttggaagcagggatgctgtcaaactgctctaagtttactactcttacagctactggttgctgccctggcaccccattcctgccacaggcagtattccactctt

SEQ ID NO: 18971 - DNA, 1228 bp, Mus musculus
ctgtgttcacacagtcattagcatgagtgtgaggaataacaaatgctcaggaatctcaaaagtaaaatctgcaaataagaccaatacatctccagggacggtgatcctgagagaacaaactctgggttcgttaagctatgtgactgacattgctgagggacatgtagagagaggatctgagaggggggcaagcgcttctgtgcacagtggcgcagtgacgaggccagacctccagagtcatgagtaggttccagacaggactcagtgtaaacgattatgtctagagtccattaaaatgtattcaagtttcatttgtaagaataaagtgcaataaattagtccactctccagacctttatatttcactgtgaataaagaagccaaacaaagtgccctctaaatttcaaatacttgtcttattttcatgaaaatagaatatcctgccaataataagactgagttgttttagaaggtttatgaagggtgaaagaattttacacagcctgtgctccaggggctggggtgtggctattgctccccttccacagcgctctgtctctacctccattgctttgtcttctgcaggatgcaggcagccagcaggttgggtttctcctgggcagctgtggggtgaccctggccctgaccacagatgcttgtcagaagggtctgcccaaggcaccgacaggcgaggtggccactttcaaaggtgaggctcctgggtcacagttctggctccgccttttacctggctttgccttctaggcatgctgtgccagacactatacccacagaggctgctgggtccacagcagaggacatacttgtcagggcttttgtctgattcggtctacctcttgtgctccatgcttctctgtctaaggaaaaagataagaaaatagcgcttgcctcccacggctcctggggctgctgggtgactgctgtgcacaggttccacacacgtggagcacagccttctgagcgcctttcatgacttatcccacgtgctgtcacaggttggccccccctcgcctggctggtgattgatgggaagcatctgacgaggcctccaaaggactggtacccgctggcccaggacacagggtccaggactgcctacattgaagtaagggcatcctcaatactgcacagacacatccctcacaggctcgggcctggtttttataaaaagataactacttaataccttttaggctaagtgctctcc

SEQ ID NO: 18972 - DNA, 1140 bp, Mus musculus
gtcctatgccagtcccccaggtggtgggcctactacttttgctgtagtgaaaacccatgaccaaaaaccaagctggggaggaaagggcttattcaccttacatttccacattgctggtcatcatttaaggaagtcagggcaggaactcacacagggcaggaacctggaggcaggagctgaggcagaggccatggagaagtgctgcttactggcttgctcagcctgctttcacatagatcaaaggaccatcatgcagggaagataccacttgtagtgggctgagttctcccccattgaccctgaattgagacaatgctttacagcctgataagaattaaaacggtagacagcacgttatccctgagtcagggaggcatttcctcaactgaggctccttcctctgatgactgtagactgtgtcaagtcgatacaaaaccaaccaatacagttaatctttgctttattctttgtgccttaattatatatgatacaaaacactgagggagaggtctttaatgttttctgtctaagcacagcctaatagtaaagtaagttttaattttcagtgaaagagctgaggtggcagtagttgggtgtgtggatgatggtttcaggctgggatgcctcctgcttcctgatgtttttttccttctgtaggctttgctgcagatggtgtttgatgagagccaccagatactggccttgtcagaaagccaggacccctctagtgcactgaacaaaggtgaaccacgtgaccccctggatggcttcccgagagacagtcaggccctttcggaggtgacaactgacaaaggagagaaggtaggagactgctggctcagtacacgagaaggaaccatttgacctgcccataacatggtcacaccactgcgatggctttgaacagccagcctgctcctgaccatagccccaggaagcacagagtacccagcagggtagctccatatagctttgcgcctttgcagcccagggctagctggtgcagcagcagcagaaggagagaaaggttgcccattctatttgtggtttttctgttgctgtgatcaagcaccatgaccgaggcagctcacagaaggaagggtttgtttcagaggaatagagtccatcatgatggagagc

SEQ ID NO: 18973 - DNA, 1172 bp, Mus musculus
catactataatgttttgtatttggagagtatcactgaaaagtagaatttgttcatttcttagaacaggtaattggaaaagatactaaatagaaacatggtgatggagaaagcagcacatgactcttcttttcttttcttttcttttctttctttctttctttctttctttctttctttctttctttctttctttcttccttccttccttccttccttccttccttccttcctttctttctttctttcttttcctgaggttagcagttcatacagtaggcgtttctgtgtgaagcaatgctgggcccggatgccttgtcgtctgctggggttgggggcagtggggggaggcggcagtggggtgtaggtgtttcgtgttttgaggcccatttagcccttaagtgacctcgaagccccagttgaacccagatgtggggaggggatgtcagaggctatggaggaactgttagccttgtagatgtagaggttgctctgttgccgcagccctgccacccagcactagtggcagtgacactgatatttttctagatgaaatgggtgatcttaaaaaaattaattatttttttacacttcatattttatcccatcccccatccatcctccaactgttccacatcccattcctcctctccacccacctatctccatgtggatgcccccaccccccaccccacctgacctctaaactccccggagcctccagtatcttgagggttagatgcatcatcgctgaatgaacacagaccactcagtcctctactgtgtgtgggttggggaaatggatgattttattttattttactttattatattttattattatttttttaatgtttgagtgctctgctgcatatacacccacatgccagaagagggcatcagattccctcttcaacatcagatggttgtgagctaccatgaggttgctgggaattgaactcagggcctctggaagagcagtcagtgctcttaaccactgagccatctcaccagcccagtgactcagatattaacaagttccccacccccaccccactcctctttctctcccttcctcctcttcttcataccctctgtatcttcctgtatgtagctgtgattttcaaatgtatctcaacagctggaggaagctcgccagctccatcgctgtgtc

SEQ ID NO: 18974 - DNA, 1177 bp, Mus musculus
ctggctttgaactcttgtccttacacctagggcgagtactctacctctacttgctgagccatctcccctgtctccaagcagggtttaataagtgcctgctcacaacaacagacacagtgggcgtcaggcgaacctgctgattccacgtgggaagatgcccttggagtaacttctccatgacccccactgcgtggcacagcaacaggtcacccttcatctcatcccgtttccagctcacacttctgcctctttctggctgtggttgtgtgagttagggtctgcacagggagggcctagtgtgcactgagtgttttaactctcattcctgtaccggtcagccttttaccctttgccctgggttcaagtgggcagttctgtaagcatggccactcttgtcagacttgccttggctttgagacatttcatttcctccagtgtcttctcagagtgttccccaggatgccagggctggcgtcccaaaatagcagggacgcgctgtccttgccgcctcccagattctgccgagccacaaatatcttgcacctgtctgcagagccaagctgcttctcagcaggctcatttaatggaacactcacggtcgggcggggccttttcaggatgaccgccctttggagtttggttgcacaaaacattctctgacttcgtaagctgggtcattttttcccctatagaagggcgtgacccatgaagaagtctccctggctattgaccctgatcaagaagtgtggtccagaagtagctacagagtgaccagtgctgattgtccagggctgttccgtatgttcttatataaaacccaaacctgttcacaggctaacccttgaaagtggtaagagactgtagttcgctttctgtagtgtgaacgtttgtactttactactgacaatgctcatcttcactcttacgcggtggtctttgtgcactgtctccccagacatggttggtctgttttctgaaaacatttgcaatagttttcgtgtatttttgttggatgtttagagaaaactaagtatagttttaaaaaatttcttgaaatatgtatttttattttttacttatgtgtgcacacactcgagtgtgtgtgtgtgtttgtgtatgtttgtgttaccagaagagggttttggatcctcaggaactggagttagttgcttgatgg

SEQ ID NO: 18975 - DNA, 1203 bp, Mus musculus
tctcggtaattgtgtgagctctttgcaatggggtgttctgatgtatcaaaaggttagaaggagcccacttcagtaacgtgaaatgagggaggttctttattttgtgaatggtagttagtgtggtttatgctgtttctgagagtcctccagataaacatggagtggacctgttgtaaggtttgacctggagttgcatgagtagtgtcagagtgaccgagtcctattctacgtggggacccatggtttcacagtgagcacacacggggcagatggtatagagacatatagctatagttcaggtctcaggcagggaggaggcatgcggctcgcaggcatggctgcacggttgaagctgcactgtgaacaaagtcacttcagttttttttattattttaatgcttatttttgagagagtaattgctgtgttgtccagtctggcctcatagggctgagctcaagagatttttctgcctcagactctagtagctaggacgactgttgatttttgaaggccccttggccttgcttggtggaggctgttcacactgctttgtttgggttgttgtttcgctgcccttcgtgctgcaggccgaggagctgagctcttactctgtgggcttcatgcctccttttgagatgtgactccctgaggcggcttacagtacagagccacacatgggccaccgcctcccggctcctgtggttctaatggaaacattttcttcttcttcgcagttagagacccttcaggcatcctatgaagacctaaaggcacagtcccaagaagagatcagactcctttggtcccagcttgagtctatgaaaaccaacagagaggaactgaatggtgaggacttctgtgggatgtttgatccttcagggctaagctgtgcagactggtgtgtttgtgtgtttgtgtgtttgtttgtggattttgaggtggcatattggaacctgttggccttgtacattctttttttttttaactttttaattgattagttttgacttttatatcatgtacctcagttctactcatctccccaacctctcctatccaccattcacccttgcaacctgctccccaaaataaaacacacacacacacacacacacacacacacacacacacacacactagaagacatctcattgtggaagctgtagtgtgtcacagtgtgtcccacagtatatccctctgtc

SEQ ID NO: 18976 - DNA, 1130 bp, Mus musculus
tgtggattggccgctcacacacttgagccatctttaaaatctctggggcgtactgtgcatcttctcagagtaaagttgtgcacagtggtgcagtccctgtcaccactgttaaggggcatggccaggagaagcttttccctgagtcactggggaccccctaagcccactacagggcctgctcagactctttagtctcccacaggtggtcctcagacagcaggcttgaaagggacggggaagactgtgtgtgagggtgggtccatgtacactcccatagcttccagaggctgatggtgctcccagagccaggatgctcccaggctacttcctccttgttagcccagcattgccaggccatctgagacaaaacatctgccaaatatcttccttctatcagatcaataatcatatgagaggaaaatcgtgttagaaacatcatctaggaaggaaattatgtgagctctttaactggtgcttttaacaaaaccaagtttctctggaaccacaccccaaggcgcactgaaagacaggtctgtctttatggattcttctctacctgatgggctggggtggagatggaggagagagagcaaccatccaaccctcccggagtgaacagtgctttgtaaacagcgtgtgtaaatacccatacttacacagcctgcagtgcccacgtgcatgcatgtggacctcacatgtacctgggccttgttatgattataaaatgttataagtatgagtatcttgcctgtgtgtatttatgtgtgcactcctgatgcccttggaggtcagaagaggacattgactatcctggaactggagtcacagagagttgtggattgccatgtggtgctattgaaagaaaataaaacttgagtcctgtgattcatgtaatagcccaaagagttgtttgtgagctttgaagcctgggactgagaacatagcagaacaggccaggacatgcctgggcaggcccatcattaagacattcctgaggctgcttggccataaagataaagagaatgcaaagacatgtccagactggcctggcgcctccctatctcccacccttctgacatgggttaaatgttaaccagatgctctgctgttacctccatctgcacatacac

SEQ ID NO: 18977 - DNA, 1515 bp, Mus musculus
agcctctgcttgcctgtctttgggtcattagcttttcccaagcagtcttgtcctagggctgggaaattcagtagttaggaccaccatccagggacaagtgccttattgctcattttttccatgtctttccaggagaacatctctggggtcttcaacaagtcctgtgccatcagctacacaagttacagaaacatcttccccatctgggccctgggccgcttctccaacctgtatcctgacaataccctcgccggccacatttgaacacgtgtgtgtctgctgcacctggccagcatcatcaccatccaggtcctggagagccccgtgtcttggctgggtgataagagccttcttagccctgcttaggcctcgttctctatttctgtagacaggaggctggggatagggtcagtgttggtgtctttagacacttgtcagtgtgcgcttaaagttcttggactagcttcagtgagaaagggaagaagatgagccttgagatccagagaggcgcagtggatggactcggaagctcctgggtattcgttctccccgagggagagaggctatagagcttctgtgatcaatgacttccctgtgagggagcagctggcttcttcactgcttcccttgttgattgtggagtgggcacttgagcatcttgtgtttgctgtgctgagggagttagagcagccatatggtgcaggggtgctcagagaaaggctcaatggcaggtgaggcaggtcccttactcattgtgccctgagcagtgtctggtgtccctagaaacttgctacccatgactacatcactatatgaaatgccagttattcagaaaggaaatacaaactggctttgtaccagaaatgctactaaaagtcatttgaatgatcaccgactcccttactaaacagaccctgggcgtagtaaagaacagcggctgctctctcagaggacctgggtttgattcctggcacccacctggtggctaacagcatgtaactccagttctcagggaacccaatgtcatcttctggcctctgtgggcactgcacacatggtacatagacatacatacactcataacatctatacacataaaataaatcctgaaaataaaatattaaaaacaaccacctgccttcctgagacatttcatcctggagtgtctatgctgagtctgtgtggcaaggagccagttgtagcatccaattctgcccccagattatatgcttatacaattgcattggtttcttacaagatcagcatcctgatgtccaggcttctcagtccttgttgagatagagacgcacacgtgggggagccattagggtagacagtggttgtaacggttcctgccatgggacagtgctggagcaaggacagctaatcatatccagctcaccacttagacacaccaaggcagccaggaaaatgcccatgacacccaaagatcgttatcagcccatatgccagctgtgctttgtgagtccaagtgagggccagatgtctgaggca

SEQ ID NO: 18978 - DNA, 3417 bp, Mus musculus
tcttaagttcctgattgtaactgtgtgtctggccagagcaggcagagttcagggtggaaactatgtgtctccttgaagttactgcctttctctctggccatggtgagcggggtccagctggatgcccctttagttaactaactctcggcatctgtagtgctttctgcactggtatctccaatcgctccctgacccatagtcttccctccgacaagcagaaagctgtgtctgatccccattcccctgtgcaggaccctctagggcagcctttggccatggtgcactttgtgccctctgcctgttgcccagctgccaccatcgacaccttgtgctgtgactcagggctttcctgccttagtggcccgtgctgttcacagcactgacttctaacctctgccaggagtagaactggtgaactcagctagatctgctcctagcagcagcaaccatcccttggaattcccggttacgaaccagatcactgtacattcccttaacaaacagactgctggcgagacgtgctttaggctgtagcaggtcatgctgtggagttctccggacatgctggtttaccagccccagtttagggagttctccgggctccgcggggggtgggggttggtggggggacactcaccagataactgtccagaagaagttcttaaggatgcttaaaatgaaagttggagcctgtcaggaataattcggaatgctgatggcttttcctgtggagtcacagcacatttccttggttaactatgatgtgaacctcaacacggttttgagggattctttagtaagaaatgttgacatttctgcccccccctcccccacgctgaagcagttttcctgtgtggtactcactatgacatgatcttcactacgtagtccaggatggcctcaagcttgagggtagtcctgcctccaccttcagagcgctgggatacaggcgtgtgccaccatcccctgctgaagggcttgatggttaagtctctctgacaaagtattttttccttttaaaatatgacttactgctaagtagaattgaatttactaagatgtttttatttaaataaatttttgctgaatgctgttttctcatgatctgttttaacaaatacaactgtatggtgatatatagttaatcagattgatttatttttaattagttaatttattaattggtttgagacagggtctcactgtatagctctggccatcctgggactcaatatgtatatagagcaggctagcttccagttcacagaagtccacctgcctcttcctccaagtgctgggattaaaggcatgcactacaatatatgactttcaacttgacttatttccatcttaactttattttatctctgtattttatgcagatactactactatctgtttttctaaagcttcagatgtttttattcaaaggtttacaaaaggaataaaacagaaaaagctaacaatgtgatcaaatgtacagttccaaaatggcctttggggctttaacagtgagtcctaggaaggaaactgcagtcatcctgacctcgtagataagtctcctggcaagggggtagtacccgtagaatgctaaaaattagctcttgatcatgtacttcactatgaaaatcttttttaaaaaatctgtataaaaggtctttataaatcaatttttaaataatggacatccactatgtgatatgtaactgacttttgttttatgtatagaggttatatttcccaaatctgacccagatgagtatggtactcagttcagacatagctagcagctgattttccccttctctcctgactgaattatcaacttcttgtctgaactaatgcaaaaacaatccagcagtgagagacctggaatgataaatgtgctaggtacacgatggagaggcgttcagtgtggactcccacaaagcagagtgtctaggatgtgtgggcccagtcacatcaacgcttcttaaaaggaaacaagaacaaaaccacatttctcttatgagtataattttcattaggatctacacttcccagtgcagcaaggatgcttgaaacgatgaaatgccaatgatacccatcatcaaagacaagcaatcaaggccaggcttaatggcacatgcctttaatcccagcacttgagaggcagcggcaacagcagacgaatttctgagttcagggccagcctggtctactgcagagtgagttccaggacagccaggaatacatagagaaaccctgtctcaaaaaaaaacccaaagccaaccaaccaaacaaaaagacaagtaatcaaatttaagaactaaagtcctcgaaagaaagaactgcttagccctagctctggagctagggggacttgcttgacagaaagagggccagcaacctgtcctagcacaaaagaaaaacagcctttgaggtagatagctgatcatacacagccaatcacgcgcacagttttggaaaacaacattgcttttaagaaattgttttgggtttggattcatggctcagtacttaagagcactagcttaattcccagcacccacagggcagctcacaatctactgtaactcaaattctaggagatctgacatcctcacaccaatgcacattaaataaaacagttaaaaagtattaaaaattgccttaataaaaaagtaacagtgaagtatctcatgttctgaagtagaaataattaggaatgagcaatgtttcaaaattgttttctttttcttttcacttgaacactacaaacattatgcagcaatgacaaataaagtgtggcactgcttggattcaagtcttccttttgcattttttgtctctgtgtgttattacatcaataaaattataaaacctaacgtaaaagtatggaaaaggcacatacattctcctaactgcaaaccggcctggcaaaaataagagtggagaagatgcaatgccgagaccaggtggacctgctggtgactttaaaaatgccaagtagagagagcggaagctcatgagtcagcaagcaacccttaatggttcttgccacacttcgactgtagggttgcttggtcagaggcaatactatgtggaataaacagaccaacctttccgccattgctttcgagttcctgccttccctcaaggacagtgacaggaaattataagcggaataacatctttcctctcttgctcctggtcaaaagtgtttttaatcacatccacagaaatcaacttgggacagcctgttaagaacaggttcttgtatcaaccgacaaagctcattggcatttgtgaatggatgcttcttctgaagctgtggagacttaacacactcaagcgcttcatcatcgttcatcatgctgggatgtgggactcttcaggaaccgaaaagtatgttcttgggccataatggagttcaat

SEQ ID NO: 18979 - DNA, 1231 bp, Mus musculus
gtggatcctgcagctcatggccactaagtaatagctcatcccctggacatggagaattgccctccccctactgcctcacacccatctcatcgcagaagaagtctgtgacgtgtctcccatgcctttttctgttccaggctgacgtctgaggtcaccgggatgggtgcactctaacctacccaaggtcctccactgcacacatcggatggctccagcccgcagcctcaccagctggcacactgtacagactgcctgtccttccttgcagatatgaatagagcgttttctttacaaacagatgatagtgcgtgtctgcccactcaggccctgtgcgctccgtgttagtgtagccctccacgcattggcatgcagctctttactttactgctcaacgtattcccaaatgtgatgtttcagagatttattcctcagtatccatgtgactgtctgtttaaaagttggtttgatgctttaacagcacttcctatgtcctgctgtcccttgttctcagagaccctcctctctcacccagtctactgactcatttccgccctaggttgtatgcagggatcagaggtacttttattgcaacctgcagggagtgtctggaagaggagggacttgggggtgtatctaaggagcagggtagagtgccagagggtggggtgggaccctgacttcactgggatatctcggggagggggcacttgtgccctccaggtgtcttccaagatggctaagaacaaggacttgccagaaagttcatctgcacccatcagagtttaataaatgtcgtgttcctcccccatggctctgacttctctctgctaccctgtcctcagtgcccatacccccctgtgagatgcactggtacccagcctgagaataagaagatctgggttctgttcttgcccaggtcctagagcaccaggtcccaacctgtaaagctgcccagcatggagactgcctgtgtctgacagggcaccatccatacagccttacaccacccaagggaccattcttcactgtcacccctcggcactgaagttccattcctcccttctcttagtggttaactcagagggccggggcagaggtgcagttgctcagggcacaactttgttgtagcccgtggcccagctgcaagggccctggtacctacccccaacctctgattggggggagggaggttcaggcaagaacggtatggcaggctaggagcagctcgtgc

SEQ ID NO: 18980 - DNA, 1176 bp, Mus musculus
catgggaaatttggctaagagcaaccaatgctacccatgtctttctctctccctccccctctccctttctgcatgtgcatgtgcatgtgtgtgtgctgtgttgtctttaaatctcatgctctctattcctcccagtggagtcctcatttccactgcaacctcatcagtgcccctcaccctccccaccctcgtccacactgctgcttcataagaatcatgtccaagctccacctgaatagtccatgccatttctagattggctctccaaactgctctcttaagccgttctaaagcctcatagcactcttgacggtaatatctagcaatgtccccactcctcagaaccatggtctctggtgagtttcccattaacagtgacctaagacgcatgggcttctaaaggaaaggcttattttggcccagagttctccagagttagcatcacatagttctccagagttagcatcacagttaactgtagctgcagcttctttgttcttaggactcaggtttttgtcatatggtggcagaaatgtgtgatatagccaaaccatttaccccataaccaagaagcaaataaaaggaagaaggatgagactgaactccgacactccccttcaaggacacgccccagtgatatcaaggcctccctctaagccccacctcttaaaactcccatcacctcctatattagagttacttttcttgctgctgtggtaaaatacccgacgaagagcaactaaagggaggggggcttattttggattacaggtcacgagtaccatccatcacggcgggggaggcatggcagcaggagcacgaggcacctgcttgcgttccatctgtagtcaagaagagatgagtgctgctattgtattcacgttctcttttttattcagtctgagaccctaggctgtgctatggtgatgctcatcttaaggcaatggtgtggtgagtgttcttataagagtatgtcttctcacctcagttgagccatctagacacctcctcacagacacacccaaagattggtctcctaggtgattctagatcctgtcaagttgacagacaaaattaaatatcccatctcctcaaagcaacacaggctagaagccaagcctttaacacacgcacccttggaggacattccaggtggaaactatcacagtgaattgg

SEQ ID NO: 18981 - DNA, 1240 bp, Mus musculus
acaaatgccaaaacactcaacaatcctatgcatttgggtgtgtccttatgatctagtgcatgcatccttagatatcacctatgtgaatgatgctcttgtcatgagttcactttggggtacagaatgtctatctgccctgttctagggacatggagttactttacatgtcaggagcccttggctgtttagagtcacaagctacccatcctgttctgtagcagagacctaggctcagcatctgctgatatggtctatctagatcagtctttcctgcaatgcttgtctgtgctgttggttcactatgcggaccactatgccttcccttcttccctgtttgcttatctggtattatcgggtttgctttgtgaaatccctccccccttttttatttatttatttttttttgagacagggtttctctgtgtagccctggctgtcctggaactcactctgtagaccaggctggcctcgaactcagaaatccgcctgcctctgactcccaagtgctgggattaatggcatgtgccaccactgcccggctcccgttttctaattcattactttctggatgtatgttgttcatgtgcctctgtggtttgggatttcaaatgtccagaccaggacagagatgagggtggaaggactattacttctctcggctttcttttccacaccttaaaaaacaaaactcaagaacatttcattattttcttatttgatgttttaagcttctcttgtacctagtctgcccaggccccaccaggatttccttcaaagtccttggttctttgtagtatggaaatatttaaagactgagttctggcataggggtactttttataatttactagtgcatttctgcttcgaggtctatagaagtcagcactaggaagtcactatgtatgcatacacacacacacacacacacacacacacacgagtcactatgtttatatacacatttaagacactgtgtacatatacccatgtaagacactatgcgtatacacacatgtgcttacatgttaagcatccaaatgtatatatacaaacatgcatgcatagatacagaaattaaaaaaaaacaacaactcaatgctacaatattctttctcttcctacaactccaacccctcaggtgacaatgatattctgagaccatcttttacttgttagtccctgtgaatctcttcctggttctgcttggtagttttcctgggtcaggagggtatgtgctcag

SEQ ID NO: 18982 - DNA, 1234 bp, Mus musculus
gagctttctgtgtattatctttgttgtttctctcactgagtttcaccggtgacacttttaattttagcattttacccagaagccttaggaccttatttttgaaaagcttatacaagaagagcttggttggttttaagatctaccttttcaaagcataaagtagtaacacttgtagaattctgtcctcattttccatccatactgtaattcaaatgtccttgtttacatttcccctgcagttctttaagtcttattatctcaccttagggcctctgccttcccagtatctcactttaggtccagagtgaagattgcctaagtagtctcaattacgggggtggggggggtggggggcatttatagacctagtttttcacccctggagttcctgttccttgtcatttcctgttcattattgaaccagttgctaagtgcaatttgctgtattatcccaccagacaactcttccaggcttgccaaagacatgcttgacttgttaatccatttgcctctccatagcatctggatccagccatagcttcctaactgaaaagcaaaaacaacttttaaaaaagatttatgttattttatgtgtctgagtgtgtggccttcttgtacatatgtgcaccatatgcatgtggaggtccgaaaagaccgtctgattcccagcaggtgtaaataaagtgtttgcatgaagatctgagtttagatgccagagcccatgtatgtctggacaaagtagccagcctttatctgcttttctatgcctgttatctgctgtaagagccagtgttcttgattatttaaggtgtcctgtggaacattcagccaagatcaaaagtatttaacaatatccatattatagtgttagaaaggaaatggacaatgactcttagcttcccatttcccaatgactcttagcttcccatttcccttcctgttaagactaaagaataataatatttggttgtgcctaccaggcctctaaaaataataatttctgacaagtctgaccctttgtttctatggctattgttaacaatatttggtacatggaaaaaagaaaattctggttaaaaggaattcacactaacactatattgacatctgattccttctataatataaatataactgattgacatctgattccttctataatataaatataactgcctgtttacttcctcacactgttctggtataatatgaagagaatagaagatatcaattt

SEQ ID NO: 18983 - DNA, 1489 bp, Mus musculus
gacataggcttgggtactctgggggatctttggggaattgataagtagcccttttatgttgaccatgctgtgagagaagagaaccagccatcttgagatctaccccagggcaaagcctgtgactcctcagtgtcctctggccacctggaggctgggtgatggagaacctcagtggaattccctaagtagggcaggggttgggacaagggtgggcacaaagcctgcagttacccagactctctttctttcagttccgtatctacttcatatacttcctgatgctgtctatcacctgctttgcctgggcggggctggatggcttaaggtactgccagcgtggtcgccaccagcccctggcccaggcccaggagctgaggagtcccttggagacttctgtgcaagcgataagcctacaggatggagacctaaggggaccgcagccctcagcgccacagctgctctcagaggatggcatggaggacgacaggggagacttaagagtcgaagccaaggcttgaccttcctagcttcatcccagttcagcggcgggattcctgactcagaggcagcccctcctgtttgcactccacctgaaccagcctgggcctgatgctacacacagtgctcccagtcgatgttgccttgagtccaagacatacagggggcccccgctgttgccttttaggagcctttaggttaggccacagaaccctccttaaggggccacctgttagcttatccttctgaggaccctaaacccagcctacttcatgctttagcaatggctgtagcctgctaccgacactcaagggcagctccctggctttgtgaaccacgtgccaggccactgcgagtctgggttgtctattgcttgccaagaagaacctgtgtcgggctcaactatgcccaccaggccattctgccttttttgctctgggaagctctgggcaaatcatgtctgccccttagggctagtgaggtagcccagatgccagccaaggtccgctgagcctgcagggtgccagttgcctgccctaggctcctggctatgctgccatacatccttccactatcggaggtgcttgtttaaatggttttctgatttcttttttaacttgacattaaaatggagaactaccttgggcttttctgttgtgagacactagagtcagaggagcactaggcatattcccatctgatgaggtagcggcagacttcagcccagcgtcctcccttgtccctcctgtcatccctaaatgacttgtcacacagcccagaggactgcaggtgtgccagccttgatcagaaccaaagtcttcctagaggggagtgcctgtaggggcttgcactgcggaagtgggtttcctggcttagctcttgaaagccatagctgtgaggttagactctgtggcaagcacacttttcccgatactttaaacggactccaggatgctgcggcttctcattccgtgctggcctagcctagcac

SEQ ID NO: 18984 - DNA, 2341 bp, Mus musculus
gactactcagctatactgctcagccatgtaaatgccaccgaaaagtactgatcctggaaggcagctctccagcatagcccttggtcacagaaggcacctgaactgttgaccaacagctggactgtcatcagaatggtgttgtacccacgtctctgcacctggcagccaagacacctgcttcaatgaccctgctctctgaagggtgacttggggagctagacacatgtgtctagtgcagtatttgagtcctgtccatctgcttttcccaggaggcacccgcgagggccctcctggcccctacacgagctgaatggctaagtcccagtagcagagctcactcttagcatgtatcaaggaaggcttccggaaagccagccctgaggtcctttggcccaggctgcacccctaacaccctcttcctctgcaaggctacacatctgagaggtggacctaagtcctgtaggtcacaggggccttttcctgtctcattgccctgctgtttccaaagacagcggctggcctccgtcttctcggccttagtggtgtccaggtagctgacagtctgtataccttgcaggccgcagaagagcgtatggcacggctcggaccccagtgggcggaggctgatggagagttactgtgagacatggcgaactgaaactactggggctacaggtcaggcctcctccctgctgtcaggcaggctcctggaacagaaagctgcgagctgccacaacagctacatcgtcctgtgcattgagaatagcttcatgacctctttctccaaatagggcctctgccagctagggtggcagacagaggccatgcagaactttgacacagcgcagggagcattcagtcagcacccagggctctggctgggatacaatcctgtatagttcccatttttatgtaatcctcaagaaataaaaggaagccaaagagtatatttttctaaaacatttacaacagacttcctgcccttcctctcccacttgaactggccagtctgtgtcacagtcccttcttcctccgtgcttggtagagcttcctggcgaagtcggaccacagctaggtctccaccggaggcgatgccctacagttgctgcctcagacctgcagactctatctagcctgggatctttctgtgcagatcgttcatacaacagtcacatgccatgtgctggggacagcacagggcaggcagtccaaggctcccttctcaccgcccagtggctgtgccaggcatataggcgggcacctgctcatccaggtggtaactgggtctactcatccttgagcagtgggaaccagctctcctgactgccccactctcctgcagccacactccctgccaggggaggttcccaagctcagtaactcactgtgaccccagatctgaccccccctcccgtcaccatgggcataggccaggaatgtggccagacttagcctgcgtgctcatttttccgagggccagacgtgacatggggcccatcctcaggtttgtctctcagactggcctctctggcgacccctgagatcctgttcagagaacccaaccccaaccaagcccaagctggacatcagcttgaagtccagaaatctcacagcagccacatgaagcacttgtcctatgaagggacttgtgtgcccagggtcacaagtggccaatcaaagccactgtgcctgcctcaggctctgctgtccaaggattgggacaatccagtgggtctggttctgtgacaatgtgtgctatgatgccatttcaaagaggcaccaaataaaaatgacattttataccaacgcttggtttataagctgccttccctgttacaaaaaggacgaatcacctgtgatgagacctgggagcctccgttcctgtacttgctaagggagctcagatgagcatggatatagtcgtgtgtacatggataccggcctgtgtgcacacacatgaacaggcagatacacgtgtatgagtacactgatgtacatggtcaggtgggtatatccactgttttggatggatacagactgcacatgggaccattcatgtgtgtgtgcacaggtgtacagtggcatgcatgaatgtgtggtatacagaagcatgcatatataggcaggtatgtttgtatacaaaggtaagcaggcatatgaatgcacacaatgtactgtacacacatgcacagatgctaacagtaccctccacctggtatccagcagtgcacatgtggtgacttcagaatcatgtagagggggctaggagaaatggctcatcaattaagactactcggtgatcttgcaggggaccagcgctcagttctcagcatcagcttgg

SEQ ID NO: 18985 - DNA, 1231 bp, Mus musculus
tataggtaagtttctgactgataaaggttgctcatcatttaggccttatctctggtgacttagtggttatcaatgaaattaagcacgcaggagccagtctctgctagtctgtaatacagcagataagtgggcagtgggctgtgtacctgctgtgcctctgtcctacggagggtggggcagccagggatggagagtacctactctacagccagggtggaacagcctgagctggcccctgtctctgctcacaggaaaagggatatcaggggctatcttgggggtctgctgggatcaccgtgcctgagactcttctttgatgctctaggctaagagagcccaggacagggttgcttgaaggttgtcactaaagtgactggtctcatccctccgtggactctgcctatgtgcgctttgctgtgggtgtgtaggccacagactagaggttttcttgcgacgctgcttatgatgtgaccattcatgacctttccggcagctccacctggtggcactgaacacccccctgtctggaggcatgcgtggtatccgtggagcagatttccagtgcttccagcaagcccgagccgtggggctgtcgggcaccttccgggctttcctgtcctctaggctgcaggatctctatagcatcgtgcgccgtgctgaccgggggtctgtgcccatcgtcaacctgaaggtaggtgaaacctgtcctgaaggttctggaaggccaaaagtctgtctccatttgtacccaggccttggtctccaatgtgaattcacagcagggctaaccattcccctaatattccttacaaagcccctcggatccctgcccctcccagggccctggctcctctccatgggcctttctaatggttcctgtgctactgaccatatagcccaaagtggcatggagtcatttatttgtgccacctagcctggcccttccgccatgggacccatcacgtgactctattcttggatctttcctataaagagagctgggattctcagggcttacagaccccacagtctcaggcttgtaagggtacctgtgggtttcactcactgtgataggccctaccttggagaagggactctctatgcttcagccccatgtgttccttggtgtcttgtaatctccctgacggtcattcctctgacctgatgtgatgagtgactgatgcccctgctgtgtttcttgtaggacgaggtgctatctcccagctgggac

SEQ ID NO: 18986 - DNA, 1191 bp, Mus musculus
atacatacatctgattggttaattaagctttaagagttttgatttacttggttactggaatgtgggactgccggttataggggattacagtggagagggaactagtggctctcgggacaagcgagccagatgctgcgggggctagcctcagagagttggcaggtccatttttttttaatatttcccgaaacactgcacagacctgctataggcaagatattctatcttatctacccagatgacggccctgggggcaggctgggccctgagggtactgggatatgccatttctattactctatcgcagagcactctggtcaaactccccatagtagaccaagacccccttgctgcttcttttgtgtgggtatctgaagaccagtggctgagccctgacctgtccttcctgccttgccattccagggtgagaagggagagccaggcactatctttagtcctgatggcagagctctgggccatccccagaagggagccaaggtgagaatgagtttggggttccctaatactatgaagacagcatgagtaattgcattatcccttgttactgttagctgatatcacctataggaaggttagtgatactgaccatggcccagtgtgctccgtcttctgctgggcctttttctatggaagttagaggggaccaaggcctgtggcctgcccgccatgggcaggcatccaactaccctgggtaacagatatctagacctcccccttcctgtggacctgaatctgtaggaagctgagcacaagaccgtggttggctcgctaggacttgctcctcatactgtctttggggttcccacccctgcaggccttccaagaaggcactgggggaagggccttggaaagctttggtgcctctgaggaatagattcttcctggtttacagtgttgttagaaggtgatctaataacactagattccccaggcccagagaaccttctgctctccaaggctctagagctgaataacacctgagtggctttagctatatgctttggatattgaacccactctcagggacttaaggaccattcatgtgccttaagttagacctagtccctaatgctagtgtccacctgtcctgctggcatggttatccgccttggttgtcagcctagcacatccacgtgggtgcagcaaggactctggcagtcggtaaggtga

SEQ ID NO: 18987 - DNA, 1214 bp, Mus musculus
caactgtggagaaccagagcgagggtttgatatcagcattgaaaccataacgatcgaatgaaaccagaaaaagctaacttgggagcctggctatttgagtctcctgagtttgatgtatcacctagctggctcccagagtgggagtagcgtgtgctgcctcctctctctttgtagtagagagaggtcttactccacatctgtgcttttcctacagagtctaggtctggagagtgggagactccacaccctgcttcctcacacccatcgcccatcttgagattgctttggcctgtgagcccatgggggtggtttcatggtctgtgtctcccagaatgccactgtgttctggtctgatcctgtgtagccacctcactggatgtctttctctttgcagagaatgttgctgaggaggtggggctgctgcagctccttggagaccccctacctgagaagatctcacaaatcgatgaccctcacgtcgggccggcctacatctttggaccagactccaacagtggccaggtggcccagtatcatttcccaaaactcttcttccgggacttttcgctgctgtttcatgtccggccagccacagaggcagcaggggtgctatttgccatcacagatgctgcccaggtggtagtctcactgggcgtgaagctctcagaggtccgagatggacagcaaaacatctcattgctctacacggagcctggggccagccagacccagacgggagccagcttccgcctacctgcatttgttgggcagtggacacacttcgcgctcagcgtcgacggaggctctgtggctctctacgtagactgtgaagaattccagagggtgccatttgctcgggcctcgcagggactggagctagagcgtggcgctggcctctttgtgggtcaggctggaacagcagaccctgacaagttccaggtaacctgtgctgccctactgcatgctgatccaggggaggagggggcagtggggactagagaaaacaggttcccccagttgatgctgaagcctgtgggcaacagcccagacttcccagtttgtgggtggagtggcatctgctccccaacttctgttgtttgatgacttgaaacatcacagtgggcttgtgtgaattctctgagaccccaggttgtataagagagctgctagaggctgtttctacccaggctcccattctgagttgatccagacca

SEQ ID NO: 18988 - DNA, 1192 bp, Mus musculus
tatgacatcactttagggtctttcctcgaccccccctcctccctgccatggagctgagcccccactactcaaacatgcaggagtagggggcagggttctggacttcggccctgggattttccagagatactctgaggcatgaaatcacattaggaaatcttcaagcacactgttcactgggcatttctcaagcagacgcaatcattgtggggactaacttggagatgtagagctcacaggcacagatgtgggcctatggctgcctcactcttagagagggacttggtatccagctgtttgcagctggactctgagccaaacggcacagccctgccctttagacaggcattgattgatgttgatgtgggacagttggggacatgcctttgtggctgtttcatcacacagaagcattgccactgcagccttgggggagggtggcagtaactctgtccacaccacagcttggagaaagtggagccaggagggacagctggctgaggctgtagcctggtacatgctacatccatgtgtacaagctggttacatgagtgtgtgtgtatgagtgagtatggtttttgtgcatgcgcaggctgctagcttctgtttcttctgcctctttgtctgtggaatgggcgctcacagggcctcacctagcatgtgcctgcctggctggtgttggggactctgctgggcttcatggctttgggctgtgtgttcctgtctatcctggttcttttgtcactggggaaactgagggaggaagccacagagggctgctggagtggagcccagtcctgctctgagttatgaatggaactgagggtagccagccttggcagcagcttccccatagttgatctcagtgtttccaccttcctgcctggtggccattggacacttcttttattgtcttgtcttttccctccctctctccctctctccctccctcccctccctctctccctccctctctccctctctccctccctcccctccctctctccctccctcccttcctctcttcctatgtgcattgatgtttcgtatgagggcgttgggtcctggagttacagatggttgtgagccaccgtgtggttgctgggaattgaactcaggacctctggaagaccagtcggtaaccttaaccactgagccaccctggacacttgttttcattgagatgttttgg

SEQ ID NO: 18989 - DNA, 1143 bp, Mus musculus
gtgtaacacggcctgtgcccacttctgcttcctcccacacctaaggggacctttaaacatagccgatgcctcgagctgaacctgttactagtgatcacacgggctgaatattaatctgatctcagcctgcgaggctgtggtttggcctgatttttctgttaggcagaaccaggccacttccctgaggtacctacctgccccagagctctctcccaaacctgctcactttttcttagtagcaccccccccccaagcctttttcctgtaagtcttggtgacctccatgtggttggtgagtcctgttccagaaccagtgacatccagttgtgtcattgcctgcacttgcccacacaggccaagaacctcaaatgacttggacttccacttgaatacttgtatcactatcaaacaaagcctgcagctacataataaacccgtggaagaaacacatgtaccagggatgggagactgcccactcgccccagacttgccagggacatttctgcatgtcatctttcttatgaaaaaggaaataaatgacccaggactatctgtagttatatgacgtgtgtgtgtgtgtgtgtgtgtgtgcgcgcgcgcgcgtgcagttatgggacttgtgtgtctggccatttggagacctcttgtctcagtctttcctggcattggctatgaccacaagaattagtgaccatgcattcccctcagggttttgtcttctgcaagcgaatgtgaactttaggatggcaaatgcttgcttgaataattccccttctctacaatcacagggacccctaagtctttaacggggcccctctggaaggtggagccaccatgtgctacccagagtccaagctagaggattcggttcctgagacatttgtatgcacagttgatattaaatagttttatttacttatttatttatttgtcttggtttttcaagacagggtttctctgtgtagccctggctgttctggagctcactctgtagagcaagtctggcctcgaactcagagatctgcctgcctctgcctccagaatgttggaattaaagatgtgcacccccaccaatagttaatattttaaaagttgtacttttgccaggattccagatgtggcccagatgtccacagcagtcca

SEQ ID NO: 18990 - DNA, 1166 bp, Mus musculus
tgaattctacaaacacaactgtgtggtctgtcctcctctgggaaggaagaccatcacttgtagctcttctagctctctagtagaaccccatcctgactgtaccaagcctttagtgaatctctgcagagtcggggcaacaatatccacccacaaggttgagtgctggaaggccacagtcctcaccgatccatttattattccttgtaggggatggcctgtcaatccctagaaggggccatccctcagatggcaaaaaaaaaaaaaaaacccaaaaaacccaaaaccctaggtcttctatcactgaattctgggaggccaagttagccatgcacaggggatactgtgaatcccctgaagtaggaacagggtagctcaggatgacagctagctacctggtgaaatctgagacactctagactctctgagccttgagctttgtccccaaggttccggcaactttgagacagtgtcacattcaggaggccctcaggggctagtggagcacttagttatgttgtttaggattttccctgtgacccctgtcctgcccttgctagataaggactcctgcaggggttgtcaccagagacaatccatgggaggatcctggctgtgatgggattcagcccctgggcactataagctaagatgaccatggtggcccattaaacagcgaggcaggctgtgtgcagccagatggccaagatcccacacgatgtgggagaggcaagaacctccgacagccatccatcccaggggtgttcagctctcctgtcctgatgaaatacacatctcccttggagctcagggaggtcaggttgatataggatgaaaagtcaggaatattagggggcatgggataggggaaggaaccgtcactgtggagtctgtctgaagcctcttaccaaatgagaattctagaataattagcatcattctccgggaaggctgataactagggataatgttccttatgtagaatgagctttcatgttaaaatggcagcatgttagaatagcgatctaggactaagtccctaatgtccttgggaaggacccccttcagccacagacactttgtgggaacctcacaaacaagcctgttaaccttgtttacattggagctctcctggcttcctgcattcctgagatctagagttttaacct

SEQ ID NO: 18991 - DNA, 1491 bp, Mus musculus
taggtgtggcgagcctcaggccccagagtttcaggagagtcacatgacatagcatgccagcgttcctcttgaatcagttggccacttaagtgccatcagagggccgggatataggagtcagggctggctgcattgctgtcaccccaggaatctgaaggaccttggaaaagggggctcccttagctatggcagcatgcgtgtggatggtccctgctgttgtcagggtgccgaggtggacacaagtccttggtgttagttgaacagccaggtgaaggtctgcaaggcacagtggccactgaggtagggactgacccatgcaggtgccagtgctgagggccccagagcctctggtgggtgggtgtgaccgatgcctccactgctggtcccgggtaacgtctccgtctcgttgctctgcaggttttttattggcacctctgtttccacattttcctttcggattcatgaagagagagagatcctggggttggaccccaagacaacatacaaccggttttgtggagaccaggagaaagcatgtgagcagcccacacactggaagattgcgtactgagggccacctatccaccgcctgccaatcactcggtcacagggtcccagaggaggcccccacatgggaggcaacacatctagagcccatgctcccacgtgtccgtgggccgacatctacctgtgtctaggctctgccaccttcaggattcacaactgtgtcttctctcaggacctgagaacccacgtccccatcacagatgtcacatgtgtgctagtccagaaatagaagaacatttgtcagctccgacacaggcctctcagccaccttcctgaacaagttgagcatggccagcctgtggcaatgccctcaggtgtggatgcgggctcctgaggtgttggggtgactgacgactgaggtcacttcacacatggccagcgtgagccgacaccaagccttgcctcagcctccacctgtggggctcccactaatttcctcctggatggaacgactcgggcactgttgtcatcagagtgacagccctggagccttgccagtgacttcctcgcctcacatggacccccaggttcactgcacacgctgagaaatagaattgagaagtaaaggaaatggccttcaaaaggccacacctgagacccgcccctgctttatgacacccttccctgggcctcatgctgtaccacaggaggcagagtcagcacagccgtggccagggcacccccaggtccctgacctggtacttagcagtgcacccctccccccagtgctgtgcactgagcagcccccactcagctactgccaggtctccgtcccaagcaccaaggtagactctgagcacagacagggccccgtggcccagtcagctgaccagctagaatcacatatttattttccatttgtacatccaagcgtattaataaaatactttttcaagaaagctgcagtcctagaaatggtgtctt

SEQ ID NO: 18992 - DNA, 1175 bp, Mus musculus
aactgtttgccttcagccaagccgcagcttcttgtggctctgacctctctcagcccaggttactcactgcctttccctgccctgctgtgaccagagaagcagatggtcccgcctggaggcagaacagcccagcccaggagcctcttggttgggtggcaagaaagacctgtgttagacactagtgagttctcagagtagcacccacaggccccacagctcatatggacccatgctccaccttatatctgggcgtgcctgtggcactactcaccctcccacccccttaccctctgacagtgctcccaagccttttacaagggtggtccacatactcatggctccttggccctgtgagtggagagcaggcagaacaggtgagccccctaggcctgtatggacacccagggcacttggtgaatggaagtgggtaagactgaataggcctaaactgggtgagacagaggcaggcagatctccaagtacaaggtcagcctggtctacagatggagttctaggacagccagagctacacagagaaaccttgtctttaattaatttaattaattaattaaaatagtgaattggcctggacacagactcaagttcccttcgtcagaggccatttcagcagactgctgagacactgcagctaccttgcttggggggcaggacaggctctcattaagagagcctaaacctacctgtggtgcaagcgccgtccagtgtgcctggcacagcttaggaagtttccaccttccttgtgttgtgtgtattaagatttctatgatgtggcttcaagcaactctggtctggccatggcgagcaccttttcagtatgcctctgctggggaacgtaggcccacccttcagggtcctacttgggagagcattccacaggccagcttcatgtacgggtcagttacagcaggtcagggggtcacaccaaccgaggacactaacgtgcagtgagcaggagaggagccaagcagacatcactgggactacctcagaatctgtgcaaaatgtggtccgacgtaagttatgtgtctaaggcttggcagagctgcacagctggccagaggctagacactgggcaggcagggctcgccccttctcacctgagacaaagcgtgtgttctcatgtggacggacacaggaagcagatcccaagaaag

SEQ ID NO: 18993 - DNA, 2021 bp, Mus musculus
ctgggaatgcactccccagcagagcctgcagagacctcaccaccatggccacccttgacctgggtgatccctccagcctctactggcaccagtgtggccttaagaggacaatcctactcttgttccctctgtgtctgtatgtaatcacctgagaccttaatctcgttgatgtcctttttggggggaggaagtatacttggtccccacactctgcaagccgattacgaagctggcagcctgaggtgctgactagctgctgagtggccttgctggaagattcacattgcaacaagcaagagtcatgtttactttgttaaggcaagaactgaccaccacccttgcttcctgaaggctgtgttttgtctgtaggcccactgctgtgatgggcccttgttgttgtaattttggtggcctcttggaaggcactgtccctaagtctggtaaggattgccttcctaacccagctccatccaatagcacaaaagcttataaagtcacctgaagtctttaataatccctcaggaagcagtcctaccaaaacctgccatgagacgtccaggcctcttggatgacatttttcattttcagtctttactagactgagaatttcctgctgtgggaaacctgagctctgaatttagtttgatcctcttgtgagtgctgaatgtccagcatgctggtgcatggactccagtgtccttagaagggctttgtggagggtcttggacatctccctccacagatcaggcagctgttgagttggtcctgtatgtatcatggaggatgaacagcatctccactggccatcccattgtgggagctgagtgtgtaggaagataggaggaccccacaccattctgccttccaggaaaactgcctgagctggcatagacacccacctcacttccaccctgcttccagccatgcctcctcacctatcgtgcctgacacatccgcacgggccctgggaaggttgtcaggagacactcgggtccctgagattccgtccacgctgtacatttctttgaaatccagatgtgtcctagtaagcagatcacaaccctgatggcagggtaaggagtaaagatattccctctgggaaagcagccaccagcagatgaggtggtcttactgtaggctccctcatgcctaagacctcacctagcatctcggtaaccttttcacctgtcagtctgtccagggattaatattttcctctcttcagatttccacaaagtaagggaataacctttaccacaatctggagtcttaccatttttctgctttgctaggcatttgatggaacttaaagccttgtcaaacatttcttaagtattatagcaggcattgagagttatctttctcctgtctattgaaagggaaccctccttacaggccctgatgaacttcgtattaatatgtcgcctgtataaattgtacctgttaggttgctgagctgatgttagagtatttaattctccagcctaaggagtgcagcaggtgctcgtgggagtggtctgtgcctacctttgagcagcatgaagccacagaaccaagcctgacaccatcacaccccgtgccttagtttttaaccactgtccaataaaatggttgaatatgactttgatttctttgttttgtcccaagggtggactggggctgtggctttccaggtaaggtggatttgccctgtcatctgtgtaccatgttccacagggactgactaggccagtcctgaagtggtcaccaccgtctaccctccatgtagaaaggttcttattgtcatctgccctgtccaatcccaccccaccaagctcagcattccatttttatactggtacaaaggtggccgggccgaggaagtggctctgcatggctgtcagctgacactggcccctgggtgcccaccatcggcatggtaggtgtagcatagataaaagtgtaggtgttgccgagtctgcctgtgacctgctgttggctgttgactcccagggtcctttgtcttagctcagcctggctgc

SEQ ID NO: 18994 - DNA, 1185 bp, Mus musculus
agccctccttcttctgtatttacttgctaattagagaactccaggccagagcccagccaggcatccttccgttggagggaagcaagcctgaggcctttcacctctgtctctgtttttgaacacacacatcctttcgggaaccgggttagaagtcagcatcttgggacctggagtgattcatgcttctcactagcggactttactttttctcatattggatgccaccctttggagaagggggcaagctctgtggacagtgctgctgtgtcactggtgtcctgggagtgagtgggcaggggaaggggaagggatgatgcctcaaggtgtgccttcaggttcttgatggagcctctctcctgccgaaccatttctcagactagaaggagccatgctcctacctaaagctgttaggacccagtgcagggcaggttgctttctgcaccctgcacccgagcttcctgacactagtctacctctctctccgggaataaaaatgttgctgaggacacccctgggaagcagggtgcttccatggagcatgctctgtggaaccgtgggggaaaagaaggctggcgtgaggacagggaaaaagcttgatctgcaagtagagcaagggatctgtttcctagaaataaatggttctcgagagctggagagacagcttagcggttaagagcactggctgctctccagaggaccagggttcaattcccagcacccacatggcagctcacaactgtctgtaaccccaagatctgacaccctcacattgacatacatgcgggcaaaacaccagtacatataagatattaattagctaattaattaatgattcccaaggctggaaagacagcagttaggatcatgggccattctttaagaggacctggttcaagtcccagcacccatgttactgctgacaaacatctgtaactccactcctagaggctctggcaccttctctggcctccttgggcactgcctacatgtgattcacagacatacatgcaggcaaaatactgatacacattaaaataataataatgaaggttaagaagttgccatgaattctttcatccactgtggctaaaataagcatcccacgggccgaacaacaagaggagttccttttcgaactgaacaatccaaattggcccagaacaaactttttgttcaaaatgtgtt

SEQ ID NO: 18995 - DNA, 2033 bp, Mus musculus
atcttgtcagaagtcgggtggataaatagttactgtgactctacagtaaccctttttctcgcatgctgcactccagccaaggtgactgggctgtgtctagtgtaggggaagctgtttgggagtgtggtatcagtgtgaactcacttctaacatttcctgtctcctctccgggccctccttgtcaacttgactagctggagatggaggatgaggacaccattgatgtattccagcagcagacaggaggatcagcctcccgagggagcgtccccacacccaaccgttgtcctgacctgtgctattgagcagtgaccatgcagccacacccaatcacacaagagtcagcagaagccagagtcaccgaaggattctccttttccgacgcgcttggagtgaactacacatagaccacactgcggggcgagagcattacataacatggccactaggagggtttggtttgggggaaatgaggtgtgaggctttggggtttgtttttgttttcatttttgttccctcccatccctaacatttttttccccaaacttgggtctggatgtagattctcaccctatggcctgagtccaatccctagaactgtggtttcctccagtgtgacttgtcctgatcaggtagagagagcttgtggtcatattccccaatgggcatgcctgtgggatgtggggaggggcagagaggcagaattccacctgttcgttgtaggcatagaatattaaaaaatgtgagatactgtaaatttgagctttgtcaaacatatggtaagttaaaggggaagaccagtgcttcttaagacagtgaggggtcttcctcctgtggccaggcgctcctgcacgtgcccacttcctgctcggtactggtactgggtacatgggtaagggtggtacagtgaaacccactctctcccctttttataatgtagaagaaagtaattgtcctgtctcatttgggaattgaatgtggcctcagatttcttctagtacttgttttcgatacataattatggtttctgtataagaaggtattggttaagtatcacgttttcagccatgttgtgtaagagacctgctttcaagtgtggttgtaaaagcaagcccaggaaaggtgacctcattctcacggactgtgctgtgcagctttccaagtgtgtattaaagtgacgcatcagtgggtagcttgggttccgcattgtggggtcagttcaatgtccatagttcctgcctgccatccttctgtgagggtccattgctgcttgatggccatctctgccttttatagtcacctgacactgacctacatctctcgcttgcttaaagtcttgaggaaaatgttcctgtttgctgcgtgggcctgggtgggatgtctgttggctctgttgtgtttactcaccggtttgtacattatctgttgtcctttactactgtaaacagtaaatatagtttggtattctgtctcttggcctatgttaaacactgtatttggagacgggtcatatgtcacagcccactgttgacagtctgtccagtgaggccacttagatggacagacaaggcagttgcttagcttgctctgtaccatgtgccccacactggtccagctgcctgcctgctggtcctgactttgcacataccacttggctctcctcccctaggtgtgtgaagataaggtgggctttagaggcagggtgtagtgtgaagtatcagtcagttcatgacctacttactaatctgctttgacatgaattgatgctaatttggctgtgaggggtttcagtacttaggttagataaaacccagggttgtcattgcctgagccatgttagtctatcagtcgagcacaagctccaagcacctaattcatccagcaggaatgtgtgcattaaaatagaggacagagctctagccattttctaggtctctcagaagtattagttactttctcagtgctgtcacagaatatgtggcaagcagcctagaggagcaggagtttatgttggcttatggtttgagggtgct

SEQ ID NO: 18996 - DNA, 1616 bp, Mus musculus
tctacaagatcgccaagcagattgtccagaagtctctggggctctgaggctacccctgtgcacactgagcactctgctcgagaacctgtggcgacagcgctgccatgccaacaccaacacaggcagtgcagagccacagcccccgttgtttcttcctttccacccaagccaggcagctccctagatcatgactgggataatgacagctgctgcgctgctaaagactcctcctgctgtgttgtgtgcgcacctcagggagggcccaggctgtcctcactacctctctcagccatggggtcctcacctctgctccttcctgcagtgccgagggcctgtcctgttgtctgccagggactggatactaatgctgctccctcttgggacatggggccttggaaaagcagtgcaggcctgttgtccctgcctctcagttcccaggtgtcccaggaagcattttgagcttcttttgacactttgcacttagaagcctaggttgcctttggcatggtgacagaagcttgctatatgagtcacagatgtcaccatagccccttccaggggatgctttgtaaatgggttcatgagaagaggggacatgggtcagcaagactgctgctttttctggttgcatccatgtctgagttagtggtgcacactcgaccgacaggcgggactgtcagagctttagtgtgggtctcctgggggccctgcatacacactgcaccagggttagctcttggattagattgttgttcgctgtcagggttggagggaatctgccactgggtgctcagcagaggagctccttctgaactggatgggctggggagctgctatggtgcaggccagggtggagggggtctgacagcaggacctgctgagccacagggcccgagccgaccccacaagcaataacagatgtggagtgcggtggatgcttggccttttctaaacaggttacatttaaacacgagtttctatttttaagatacagcttatcagggggtgtgtggccgatctcactgcgcattgtctgcttctgtcccatgcccacatgtcagtggccagcactgtgcatgtttcatggtgttcatagttcccagccctggggctccagggggcacctgtgggcaccttgtgctttccttctcgggggagcccagtctgtttgaaacgcaacagagtctggtgttgggaggtgcaggaagggggttgtaccgaaatagtattgcaggccactgagatgaaggcctctctgtaaggaagtggtctgtgtggggtgatgtccacacacagagtggtcacagggcatgtcgctgtcctcaggcctccctggcaagtgcgggaggaagagaggcagtctctttgcaaaacaaagtatttttattcatttgtatttattaaatgaaaaaaaattctctgttgtccctcttctgagatggactttaattgctgttaaataaaattgtgtacctgtcctcacagtgttgtgtggtgctcacttggaatctctgggaacctgagtgagccgaggttgccttccggggctggttggaggtagcccgtgctctcttgctccagctcatgtttccttctctctcctatgttctttcccg

SEQ ID NO: 18997 - DNA, 1166 bp, Mus musculus
acatgcttcagagtgtctggagatgtgtcaccccctcttctggttttcaggagaggtcctgaggttgggtgtgggttcttcttggtctgttcccactggggtgtatattttcctcccttgtacatcagctctgctccggtacctgacccaaggcctttctcagcacaggtgcccacagctgtgagtctctcccactgcagagcttgtgcgcctacgcactgtgatggtggagggttagtgtcacctgacagggtttggcatcacccagggaactcgcttctggacatgtcagtgagggtgtttccatggaggactgactggggagagaggagccaccataaatgtgggtggctccattccatgggctgaattcttggaatgagtcaaacaagaatgagcgagctgagcactggtgagcatctctctgcttcctcactgaggatatgatatggcagctgttccaggtttaccatgcctcccctgccatgaaggacgatggcttcttctgttgtggatatctcctgattacttctgggctgttgacttctcctgtggattcaatcaccttcaggtggatagaataaattaaaataaatacaaataatccagaataggagaaaacaaacaaacaaaagaatgccctccaaaaaatcccataagaaacatatacagatgcagaaatatatttctgatatatatcagaaagaaaaatgccaagacaaagcattgtctgagtagtgttcatggtactgtcatgtgtgttcatatgtttacacgtgtattgaccagctactgctaggcacggggcctgctcattaagtttggtttgtatatccagtgagatcctattggataaaactattttttttcctttttaagtggttatcagttggagttggggggggggggggaaggtcacgtctactttccctgtcagccctggcaccccgtgtagcttggacttgtgcaggctctgtggatgccaccttactctcagggagttcatgtgtgcatctttcctgttgtatatagaagaccttgcttccttggtgtcctccatcccttctggctcttacactcttcctccttcctcttctgtagttccctgagccctgaaggggaggggttagatggagacatccatttagggttgagtgtgccaaggt

SEQ ID NO: 18998 - DNA, 2105 bp, Mus musculus
catggagaaaggactgaggcccatcttttgagttctcacctcaggaggatggggctgagacccaaacctggcacttcaactctggactgagacctcctcttctgggaggtggtccaagcctctgtcattctgtgactatctcctcctgtctagtgtctagaccctgttgtcacatggtggctctcaggaggcctgggggtggggccattccctatgggtccatttctgacccctgggatggcttctaggcagcgctctgaggccctcaggtggccatgctgcttgcaaggatacacggagacatggttcatgtggcctaggatcctcccccccccccccccccccccgccattgtgtctagtctttggtcagctccagggacatggttttgactgtttccagggtggtgctccaacccctttcgaccggaactatgggaccaaactgggggtgaaggccatgttgtgggtgtctgagaagctacgtgatgtctaccgtaaaggtaggtgggtggactggccggacctggcgctctcggggtctctagaggcttggacttgctaacatgtacctgttcccataacagggcgggtgtttgccaatgctccagactcagcctgtgtgatcggcctgcggaagaaggtagtggccttcagtccggtcacagaactcaagaaagagactgattttgagtaagtccttgtggacctgagtggagaagggaggaccctgggaggcccagaactttccaggacagggcccctagcaggctttgaagaacaggagtcttgtccatgcgttcaatggccagcacagggtggtctggggagggtttgtgactcttgcatctgagtctacctcagaagtacttcccctcactcccagccagaggaatggggcacccagatgtaccctgtataccctggtcatgatggcgactaggtattcggggtttaagggatctcgggattcagttctgtaactaactatccaaccttgacctgcgcaggcaccgcatgccccgggagcagtggtggctgaatctgcggctgatgctgaagatgctggcacactaccgcatcagcatggcagactatgtgtctggggagctggagcacgtcacacgccgcaccttgagcatagacaagggtttctgagcttactgtcactactgttcctgcgttcccggactctcaccctcccagtgctagccacagatcccagcaccgaggggaactcaaggggaactcggagcccgtggctggctgagggatgtgggggtctactgtgctgctctggggctcttcccttagccctccccccacccccaggacagagagcctgtggggcccctaccttccagtcagacccacattgcctctccctcactggccagctggctgcctcaccacacggctgaaaagagcctcacttttttagaaataaagtcacctgtctagagcatggtcactgggacaacatgaccagaggagtccagggagagggttgtcaggactcaggtgcaaaccttacccaaggctatagtttgtttaatttatataagtacactgtagctgtcttcagacacaccattagaggtcatcagatcccattgcagaccgttgtgagccaccatgtggttgctgggatttgaactcaggacctctggaagggcagttggtgatcttaaccgctgagccatctctccagtcctgcccacagctattctacaagactggaatttagggaaccctcccgggaagagactagggagacctgagcccttagagagctactgaggctcgtgtgagccccatacctgccctggaatggctggggtatcggcctgtgggcaatgtgccccggtctggagaggagactgtcattgtcagtatagtgttcttggctgattgctgcccttcaggaggttcttgaggtcgggacgttggctcctcagagaagtttatgaagggctgagccctggccagccccacctcagatccctctctaagccccttatcagggtttcttacgtgagctgctgctgggtccatcctctacagtgcctggatttttacaatatttacaataggtggaggctgttt

SEQ ID NO: 18999 - DNA, 1208 bp, Mus musculus
gaggtagttccaggacagccagggctacacaaaaaacctgtctccaacccctccttcctcccccccaaactgtatttacatcagccacactaccatctaatttgtgactaggctaagtgttcacttaccttgctggaagccctgggttcattcccagtatcctataaactgggtgtggtgacacagcctgtaatctctgcattctggaggtagaagtgaaagaatcagaccatcctaagtgaagttgaagccatcttgagatacacgtgcctttgtgagaaagagaaagaggaaaatacgtgcatcctttagtgggcactccggagctccctggccaatgatctatttctctggattggccgatttgggcatccttggctttccgtggggattttagcctcaccatgccaagtctgcaaaaagccatctgggatttggtctacatttcatttggggcatcttgtttccccactaaatcttctggtctatgaccctgacacatccttgctgggtcttcccacatctccctcaggatcttcgggttgctttggctaagcctcctcccagctttcccctctgttctctctagacatctgcctctgctgtggaactctccaggtgtacactcggcaccccttgtttgagggagggttatgtgccccatgtaaggtaagtagggaggtactgggactgtcgtgacatggcactgtagaagggacatcacacactcagcctttgctccccgctcaggataagttcctggagtccctcttcctgtatgatgatgatggacaccagagttactgcaccatctgctgttccgggggtaccctgttcatctgtgagagccccgactgtaccaggtgaggcagggcctaactccctattgctcctcccagaagctcccaaaagaaccacacacacccccaatatgggaggcgggtgctgaaggatgcgcatctgggatgcctttcttcacaagcactgcagccaccattcagccattccctctgttcttaagcaatatggtgggtccagggaataggcagctcattcacccttagttgttaagcctccatcctgagctccatccacggtggtcccccgctctgtccatttggatatcttcctctttacagccctgacttctatctgcctcctttccagccaactgctcttgtacatcttttttatcctcagagacctta

SEQ ID NO: 19000 - DNA, 1146 bp, Mus musculus
atgggatcagatgccctcttctggcacatctgaagacagctacagtgtacttacatataataactaaatctttaaaaaagagaaggaaaaaagaaaaaagaaatctcttgaagcctatgaagacgttgtctttttgttgttcttgttgttttttcaaggcaggatttctctgtgtagccctggctgttctggaacttactctgtagaccaggctggtctcagacttagagatctgcctgcctctgccttccaagagcttagattaaaggcgtgcaccaccattggctagcaattttctgtcttttcagagttttggaaagttatgttaccctagaatatgactcatttcaatggcatttgaaaagagttgatcaaagtggtctccagattttacttatttgtagttatttaaggaaaaacctaggcctgtggatgatgttcgccccatgggaggagattgcatttgtgtcatgctgacccacggccccctcttctcccacagacagaggctgtgaccctccaggatgtccgtggcagagactaccagaatgctatgcgggtgtggagcaacattccagggctgaagaggtattcctcaggcaggggacgtggaggattcagagacaggaaactgtgctttctaatagagccatgttctacctatctgagaaaccccttgtctaccacaatactgaacacagtggtgctcagggtgtccctgtggactgagggacactcattatgatgatcactcacttcttcctgatcatgcctctgaactggtcaagagttccctcgtcctcaggagaaagtccagactcctagccatgggcctaagggctctttttcaaattgtgtaagccagttaccccccagccttctgaagcccctgccctatgcacatgcaggctcataaccattcatacatggtgattcaagtctgtaacacattcacacacccgcacacagacacccacttgcttacagacgtgcacaggtggactgagccagtttgaactatatcttctgaaaaatgctaagtcgtgtcctttcctgtcctacattgagtttctggaaacttcccacccacctcttccatcccagcattctcctggctcctagccactcttcccagtcaggtaccac

SEQ ID NO: 19001 - DNA, 1228 bp, Mus musculus
gtagggaacgatattagaggttttagtctttggaaactctgcctgcctgttcccaatccatccagagtcaggtaggaggcagggccatttattcttctgttttaagatgtggagacaccattaggtcctcctgagggtccccagagaccacaggcatcccctttaccttgtgagggcctcaagcctctgtgccccccccaaccatcacccccgctcccgagcacccaatccaatgctgcatttctaacaggtgactctttccttggtagcaagcatgcgcccctgaccccaaaggaagaagagtatctgcaagcccaagtcagaagcaggagcaagctggacgccccgaaagttgacctcctggtgaagaactgccttctcccgctgagagagtacttcaagtatttttctcaaaactcacttcctctttagaaatgaatcaccataagatgaaagtctttcctagaaccagggcagatttcttcctaaggtctcttccctccacagttttctctggtttgctttcaggccttcgggtttctctcctgtttgattgccaggatgcctctgtgcagctcactttgcggggtgggaggtgcctacggctctgcacaagttcccggtgggataacctgccatgtttctctgaaactgtgtgtacctgttgtgaagtttttcaaatatatcataggattgttactggtagtgttctggtgtggtgtgtgagactgagacctttcttctgtatgtcacagtggtgacgttgccgttagaccttgaattcctgctgccctgccatgggcatatagccttcgtcacctgctattcgctttgatgattgaaccctccctgttgctacacaaaacaccccaaaccattgccagaagtgtatacctagggaacagaatgtgtgcctgctgggttgtcctaacataatgggagcttgcagaagtgggttcccaacagcccttatcagttgatcttccattgaagctaaatccattgggaagtgtggactggtcagttttgaactatatagtgaatcctgattaaccataacctctccactccccaacacatgtgcggacacacacacacacacacacacacacacacaaacacacacacacacccctcagatctagaccccagccattaaagagactcaagctgcctgggtatcacagctggggctcgggatccactggggtcatgttggctctgggct

SEQ ID NO: 19002 - DNA, 1187 bp, Mus musculus
gggagagcggaggcggagctccccgcctccaacccccgctcggaggtggccggagggatgggccgagggcgggatcccgcctgtgcccaattagccaggcgcgcagcgctagcgagcgcagttacagcgggtctcctgccgccaaagcctcaagaaccccagatttcagcgccccaagcctggaagctccccagttcttcgtggcccccaacagctccggaaccccagccgctgcaactctccgcgtccgaaatccagcaccccgcagtctgcgctcgcaccatgcagctaaagtgagtccgttcgctgttgtgtcccgtgagtggggtgggggagccggggacccacccgaactaggactgagattgcccgacgctagcgcagcggctctgtaccggcgcagatgtgcccagttccggacggctagcggccacacctggacctgccggcttggacggcagggggcggcgcagggctaacccgctgcacccgcggaccagaccccggcgcgtgggcggctgtaggcggaggaagggcaagagccggtactgaaggtgaaaactcatagcagccatgggcactggcttagccgccgccgcccttctccctgttgatttcccagaagggaggatgtgtgttacctcaaaggccagctgatacccagtgcatggggacaggacacctccttgtacacttgacttccctcacagatccagactgggcaggggaagtgggaggtgtgtaggaggggtgtgtgtgtgtgtgtgagagagagacagttttgcgctccggcgttttgcaaatatttccctcaggcacttgtaccgtagacactccatctccactggctacttgctgaggtcctcagtccacaagtgtcctaaccacagagtctccagggatagaaaaggggagaccttgcaggctaccgagtgcctgctggccagtggctggcttgagtttgtggtttgcccactaatcattcctggggacacccccccccccccgtgtgtgcgtgtgtgtgtgtgtccatccatccctccctgtggcttcccaagggtttcttttgagacaatcttctgagaatttcagggctgctgttgaaagagagggagaatttttggttggttggttggttggttggttggttggttggttggttggtgtttttttgagacagggtttct

SEQ ID NO: 19003 - DNA, 1118 bp, Mus musculus
ttttttttgagacagggtttctctgtgtagccctggctgtcctggaaccaggctagcctcgaactcagaaatctgcctgcctctgcctcccaagtgctgggattaagccaccactaccgcctggcgcagcaaatgttcttaacagctgtctcagggtttgtattcctgcacaaaacatcatgaccaagaagcaagttggggaggaaagcatttattcagcttacatttccacattgctgttcatcgccaaaggaagtcaggacaggaactcacacagggcaggaacttggaggcaggagctgatacagaggctatggaggggggctgcttactggcttgcttcccctggcttgctcatcttgctttcttttagaacccaggaccatcagctcagagatggcaccacccacaaggggccctcccacccttgatcactaattgagacaatgccttacagctggaattcatgaaggcatttcctcaagagaggctcctttctttgataactccagcttgtgtcaggttgacacacaacaccagccaggacaactgctgaacccactctccatccctaacaccaagtatcttaaatgttccctgcacacttacaccttcaactccaccttctcttaaaagcaaggctttctggggagcccctgtgggaggttggggaagatggtggacagaagggatgatgctactgggagcccaccttcccacaaagcctgaacctctctgctttgacccacaggacccaagactgtacagcttgaacttacaggtgagtctgcctgcagggagaagctggttgactgagctgtcatgacctttcacaccttcggctggtagttttccatacctgagaattcccaagatgcagaaaccctgtcctgtggtggaaacttctgggccctgtacagcagacagcttgtcataggtctctgtgcccctcctgcctctgctctgcaggaccccatagactctgtgactctggcagcccagagtcccttggtggaggtgtatactccagttgcaggtggattcggtaatctccagaggtgtggattcttatctcaattatccacagaggtatcagttgaccactgggagatatccct

SEQ ID NO: 19004 - DNA, 1687 bp, Mus musculus
agggccagcaaggagagcaggccagatgctgcactacaccgggtagagctggaactgaattaaggagggaataagttttggggacagctgcacctgatcctgctggtggcagccgagcaggatgctggtgctgacctaacgccttctgtccccagctgtgactggaaccgcttcaacatccagtacgtgctggcagtttccaagcagcggggcatgaaacgcaccctggaacctgtggacacagaagaggactcagatgcatctgatgaggacagtctgcacctactcagagctgcaggtgaagaagaggaagaggagatgctgatatagaaccatatatttcacggcctgattggctggagatgaaaccactgtgctcctgggcccaggaagtgggaggtgccagagaccccgagaccctccagcccggactcttcctgtgagactgctcatgctgccatgagacagcaagccaacctttcagggccgggaccaggatacagcgggcacacttatgctttgggcccagaatgcttgcgttgtggatggccctgcacagacttcctagggaaggtttagaagtgtggacttgcaaactttctgtcagagttatttatatttttaatacgatgctctaaggatgaatttcgggttgggaagagcttttttgtaaatgtgaggactttgcttctcaactttgagtttccggtgtttctaatgtgtcctgggtgagacattgtcttcaagtaagcagggagatcggtgactgctcgggcctgtggccctgatatctgtaagtagtgaagaaatggtgtgtgctgggctgaccccagcgggtggctgtgacagcccaaggctggccagggaagcttggactgatctttgccagtatgtacaggttatgtgggagaagggacatgcctgagtggtgctttaccgatacttcctgttcatggggttgaccaggcccagcatgtcactcgccagtgaagagacccacaggtgccaactcatgctgataactattcactggcctctgtccaggccacaggaatggatctgtgtggcacctggtgcactgagagccattagctgtcgcacccttgtcatactcaggatacactgatactatactgtcttggtcacctggaacccgctcaggcttgaacaccgttatggggagaagccagagcttagcctggtgtcgccaggtttcctgttctgcagagcatttctctgtgtagcttggggtagaaaaggaaactgcttcttatgtgcccagggacagccaggcccctggccgcccagacaaggacccgcttgttttggtgccatcttgggatccccatctgcagtacaaatacagttttatgaagctttactggttttgtctgtgtgtggtatgaatgtggaactgagggcccagggaagggcaggcaagtagtgctgaaccatgcttcagccatcaccatacatctcatacatctcatccagtttaattctcataccagaaactgggctcagtttggagtattttacaagtctgctccgtggtaaccatgcccactccacccctgtggacagccagatgcaaattgcctgacactgctccacccctccccccaactactgtcccctgaaactgaataatccctgactcgctgtaatggtgttgggccaccaaacc

SEQ ID NO: 19005 - DNA, 1171 bp, Mus musculus
gagggaagtgtggtgtggagatggcttaggctaaaagttctggatccccgactcccctaatgttgattgaataacatatgcacttggaattaaatctatatttattataattgttggatgtgggggtaaaatgttttctctcactttaaagtctgctcatgtattgtagctgtataatcgacatcttttgcaccttaagtcttggaactgaagatgctccatctggagtgaagatgagaggggcctctcttgtgctctgatcagtcgtaaaggactcagggcctggaggacctcagctgggccactgggttgcagtcataccgcaccaacgggttcatttacttttggttgtaaatttgattgtacatattgttgatttattatttttaagagtacagactaactgatgtaatgtttgtgtataagttgcaccaaaaatcaaggacaaaataaatgtgtgtttgtttttactggtgtggaagtcatagattgtaaatagatgctgtatgtattaaacgttctcagtcctccaaagtgatgtatttttgtatataggagatagagtgctctgggcttattggcgtggtgtctgtgagtgggacctgaggtagaaagctgggagaggagggagccctcttcaggagtcgctgccccctggggaccatgtttgggcccagagtcaggggcacagagagaaccaggagaaccaagccaacactttcagtattcagtgtatttgcttttttttttttttaagatttgtttatttattatatgtaagtacactgtcgctgtcttcagacactccagaagagggcatcagatcccattacggatggttgtgagccaccatgtggttgctgggatttgaactcaggaccttcagaagagtactcagtgctcttaactgctaagccatctctccagccccagggtatttgcttttaactcagccagtaaataaaggatagtacgacgcccacaacacaccaccaccaagtggttttcatttgcaggaattggaggaatgcttaaagaaaataaacactggggctggagagatggctcagtggttaagagcattggctgctctaccagaggtcctgagttcaaatcccagcaaccacatggtggctcataaccatatgtaatgggatctgatgccctcttc

SEQ ID NO: 19006 - DNA, 1486 bp, Mus musculus
aagctcttcctgatgctgtgacgctccacagtcttcagtgaagtgcagcatcctcggagagtgtttgcctgataggttcccgatcaagcacagtcctggctcactaagcacagctctgttatcacagtgcattccagcaagcactctgcagcagcctggggactcagggccactgatgcatctgcccggctgtgtagggtgcagagtccaaccatcaccctaaagctagcatcatgctcccaacagctgatgcctctgaccacactctgtcctctcctactcttcacaggccctgcagttcccaaaataggactaaatatgactgatgaaccaaatattttttatatttaaaacaacagtggggccagcaggatggcacagtgggagaaagctcctaccacgaaacacctgcttggtggcctacacttgaccctggatcccacagtggaaagagaggaccagtccccaaacatcctatgacttccacatgcagaccatggcatgcatacacctgcacacattaatactaatttaaagaggcttttttaacagaacaccagtggactaggtgtgtcggcacatgcctgtaacaccaggacttgggaagtagatacagaggaatcaggagtttaaggccagcctcagttacaaagtgaattctaggtcaggctggactacttgagattctctttcaagaacagagttggagaagtggcttggtcagtaagtgcaggcatgaggacctgagttcagtttccagaccctatgttaaaagctgagtgtagccaggcagtgctggaacaaatctttaatcccagcactcagaggcagttctctggtctacagagtgagttcgagggcaaccagaactactacacagagaaaccctatcttaaaaacaaacaaactggatgtcgtgactcctcccgtaaccctaatgctgtaaggcaaaggcaggaggatcgatccctggtgcttgcttgccagccaggctagtctgtttagcaagatctgtgcctgtgagagaccatgtctcagagcagggtaggtggtgcctgaggaatgagggccagagctgacctctgacctccacgtctgcatacatacatgcacacatgaagtaaaacagggctgcagatggctcagcaggtaaaagcaagtttgttgcataaagcctaactgccaagtccagccctgacaccctctggacggagagagctgacgtgtgcatgactcacatggtacatcattatgcatggtgtcttaggtaggatttactgctgtgaacagacactgtgaccaaggcaactcttataagacaacatttaattgggctgacttacagattcagagattcagtccagtatcatcaaggtgggaacatggcactgtccaggcaggtatggtgcaggaggagctacgagttctacattttcatctgaaggctgctagcacaacaatgacttttaggcagctaggagtaggg

SEQ ID NO: 19007 - DNA, 1142 bp, Mus musculus
cccaggatgtactgctgtgattgtggcatggggttagtgtgggattgatgtcaggtgagctaccgagtgctggaggaaagagaaagtatggctgctcagtggcccagactggagcatgaggggtggaagctggtcctgcggctaggcctgggcctcccatgtcaagctgagatagcttggcttcattctgtcagcataaggagcctgtgaggatgggggttgggagctgagggtgttgtgactcctgtatcacaaccggccctgcaggtccaccccttttcagtcccactctgattcctgtccgttctgcggcagactttactagaaacctttgcaatgcctattagctgtgaactgcctgggcccctccctgacgattttcactgattgaagacagaaaacagggcaggcagttgggggtttggaaaagaggctcagccaagcaggtgttttatgccccaagaattttccagaatgcctttcatgtctctgcaggtgtgttgtgctctctgaccctttgaaggactcttctcgaactcaggaatcctggaatgccttcctgaccaaactcaggactctgctgctcatgtctttcaccaaaaacctcggcaagtttgaggatgacatgcggactttgagggaaaagaggacagagccaggctggagcttctgcgaatacttcatggttcaggtactggcctcctgactggatgaggcagctctcaggctgggtcctactagcttttggagccaaccatgtagctgatagagtgggtgttaccatttctcagctgtatgcagaagatgatcgtgatttctgaaggtcccctgctgcctcagcactcaccactgccccaccctgttctgatcatcgggctcgtcttggttttatttggacacagtgacttctgaagtctgctgtgagttaggtagaggtgcccaggaatgggcgtgctggttcaccactgtccagacactggggttgaaggatgggtatctgggaacatcctatggctctcaggaaaggattgtgttaagctggttctttgctagaatttgccagattatttaggcttttgaaattgttatttacaatcagcctttggtttttgaaaggaaaacttttgagtgtacagaaggcg

SEQ ID NO: 19008 - DNA, 1164 bp, Mus musculus
tcctgggagagagaagtggagctgttttgagttgagcagcttcctgtcagctcctgtgagctgggacagcgtgagggagctgggtgatcttctctctggctcttatgtggagaattcaaggggcattgaagttggatcaggattccagggcttcctgagagctgagggttactgtgtgtgtggacagctggcaagaagctagggtcctggctgactaatgacaatgacagccttacggggcttgggcacagagccctgactaaagctcttcctcggctcttgggcaatagcaccctgggtgacctcctcagctcttcagcccttggtgctgtatcttatgtctttgggtgccagaatatgccagtgctgagacacccactcggtttaccctctggctaccacagtgtgttaaaatgctgtgactagtggctctttgttactgacaccctccctgttcctagagacaaaggggcattgggaagctcgccttcacagtgacttatttatttttaggatactgaagtgtacaaagctacggtaaaagacgacctcaccaagtggcagaatgttctgaaagctcatagctctgtggactggctaatagtggtagttgaaaatgatgccaagaaaaaaaacaaaaccaacatccttccccgaacttctattgtggacaaaataagaaatgacttttgtaataaacagagtgacaggtaagtatgtcttgcattttatccactttgatgttagtgatagccgttgactcaggcagtctagaaaactacagaggggtgcaggatcccttccctaaacccctcctctgtaattcctggcctagcagttcatctccaggtggacagcctagggggagaggcttctgggccagtggccctggggaagatcagtccttgaatagggtagaattccccaagtagtttcttaaccgtgagacacgcatttctgtttatagtccactttttaaaagttcctggaaggaagttgcaaagcagcagcttcatcccttccttgtagtgtcttactgctcctctgcgcctgctgggacttcctctccttagcactgcagacacagttgaccaggtggctgtgtgctgactcgtctcggagatgccctggtgagacatgctctcattcccatggtcattgcca

SEQ ID NO: 19009 - DNA, 4796 bp, Mus musculus
acagaacacacaagcgcgagggaaagagacacttagagactatttttcttattaactggtgactaatattaacaaaacttgagccaagagcaaagaactcggcctgccagctgaagatggtcggccagcaccggcagggtcccatcagccctctgcggggacagaggcgggtttgggggaggtggtggggccacggcgctcccccagaactccacctccaagaggcagccttggctgctctcccttcttaaacttagaatgaggcttttgtttattatcagttatttgggggacgtaacctggccccaaccctgtgccctgtgccccagaacactggctctccctgggtgccgctgcctactgggggcaggtcagctagccccctgtcctgcagcattcatcccgccctgcttggcaccttagcttccagccccgggagagggaggaagtcttcttagagataagcacacactgaatgtggatctggcccttttgtccttcccttgccctccctccccgcccccccccctggggtggggtggggctgaagaccacacctccgtcctctgcagcttctgttggcaccgccttgctgggggctgtgtctaagcaccttaagtctcttttaaaagtgaacgcccgcccgagaactctgcagaatgtggaacccttgagttcatacagcacctccatactgttccctctctctctctcttcctctgtagccagcaggctgccatcctgcacagggccagatgggaagaccgcatgcgagccccacacctcagagctgtggtgcctggggggctgcagcctatggaactcccctgggacactcttcagagggccgtgtcaccatcaggcctcccgttctcagtcagacccctttagtgcttgttagcattagaatctctttttacaggcattggtctgtggctggctcgcagcttctccctgacctcctcctattctgcctctattcaggcaggtgtcatggctgctgaccatacccaccattgccccttaccacctcagtgacatacactgtcctggcaaagaacaggggacctcagcctgcacttggtgccttgccagggtccctttgctggccctggaggcccatttccttctcgctcagcacaggaaggacctgcctggtttctgggagacctaggtcctcaggaaacaccatcataagcttttaccttctgtctggaactggctcttttaatgtcattcatgttttctaacaagaaaaaaactgggtaatttttcccccctgtggcatactgcaaccagaactcatagtaaaggcagagaagatttatagtgtacactggaggaaggaggcctagagaagcctgagggcagccctgggcctgactgtatggctccaagtgctggggaccgagtcacagaagatgctaatagcctcacggtccatgcacaatagtggtttctcccactcttgggtaacagcaacacacaaggctgcttgtaagggtgaaaggttgagtcaggctaactgagacaatgaatctcttcccctccagctgaagacttgagcgccctggcctctgccaactacgagccatcttgggcattcctgagggtcttctccctccttggtgggttttttctttctgtctttgtctgcttggggtctctgtctttccccacacaccgtctcctcacaaatcggaaggtaacaggccaatgggccctgccctgcatgcacctgcctcccccctcccccgctggggaaagcaacctcagagcctttaccacttcactaatgcctctggcttcccacagaagccctgagcctttggggtcagctgaccgttgagtctatgaatgacagaggattccgggctgcaggctctgccctcctaggcctgctcatcatccaatgcagcgcttctgagagcaataaaaactacactagtaatgtgggtgtgggcttatttgagggtggggtggggtcagattttgcttttcatctgcttcagaaagaaaagggggaggagagccccttcaatttttctattaaattaataaatctcagaataatgctttttctctttttccttcacaccctactactgataggcatggcagatgtcatgcccagattcgggcagaagttgtgaagcaaacttctgaagcagtttgctagtcttcagggagcccgtgctagaagcagcaggcttaggagccagaggcattctggaactggaatggttggtggcctggggggtgggggggctggcctgctaggctggctctgcttcaggctccccaggagagggacccccacaaggtcagcccagactgggatatggcctcctccccactcagggtcaagagccagataagtgaggctcccatcatctccccgagagacccttccactgtccaggtggtctcccacccctggtccctggccacacccacatacctcatgcaggcctctctgaagctgtgttgaacttcagcaatggctgccattctcctgactgcttgttgagcatctagggactgtgcttctctctctgagggctttgtggtagcatcctgattggtgaccatccttggagaagcaggagcatcacactaggaaggctgaatggtcagaatgtgggcagttcagagatcagggacactctccttttgacaagactttttaacccaaaggttaaacaaacaaaacaaatgcatgctgtttatgggtctttggtgagactgcatctatgaggcacatctctgagatgctgtaagccctgtcctggggggaggggagtgaagggggagaggcggaaccagtctgattaaagagatgagctctgaacactcaggctgcttgataacaaatggcaacaatgtaacaacactttctagtaggaacagtgcaggtgtctccacagatgccttggctgcccctccctccccttttgtgtaccttgccctgagaatcttttctacctagtccagccttcataccatccaaggaaaaaagtctgggtgagccccaatttgtgtcaggttcaggatggaagaattaagtggctcttcctgcatgttgccctgtctctgcctgagactgtataggacaagccaaaagtagcctttccagtcctgatgacctgcacctaaactgtttgtcccacacataaacccaaaccactagctagatgcatgcgacgcttaatgctagccattttggtgtggcttctagccctctacagtgtcatgaagctcagggttagaatggcgcacctgagatgcctgctgccttctttctagaaacatctctggcctatgggccagccccaaaccaaaggcaactgggcctgggttcgggcacccctgacctgcctcaggccttgtcccagagtcttgccgtggggctgtcaggtgggtactgacattcacgccccagatccctgcatacaggggccaggattttacaatgcaagttcaggctttgggcgatctgcttggctgacagggtggacacatgaatcgaatttatcacaggcttttgaaatcggttaatccaggggaaaggtggtattctcccaaatcactccagaaatcaaccaaggagagcacttcgcagaggtaccagggatggtggcatcctctcttcacagacagcgacctgtgaaactgtgaactttgtgctgacaggtcacctggaggtttctttttctccgtagcttttttgggtttctttctgttgcaaaagtgttcggacagaagcggaactgtgaatgagactctgaaatgcactaaattgtattctattaaactggagttacttgattcaatgaagagctgtagtgctctacttgtatttattgtctcagagtagaaacattgtgacaatcaaacatgacttgcctcaaggcctgtacctcctggcttctggaccgagtaccagcaagtactataactacaggaaatggctctttctggaagccgcacaaaccatggactttaatgatcaagtgctgcggtgggtggggcgcaaatatctgggttgcttttccattactgagaaattgccatatcggactgtgggcagtctccaagggatgctttgtctccagggtgcaactgtgttaatatggacgtttccttttgtactcttctttttacaagtttgctactcacaaagctttctgtagtaagaatggaggtctgtgctctaggaagatgtccagggctgggagctacagtggactccccaggcctgggtctacggcctggctgtgttgactgctatgcaaagctctctctgtccacagcacgtagaaggtcactccagcggtgtggcactcctgcttggtggtactttctaggtaaaatgcataagtatcatacttgtttattacaaacactgttgtgaaacaagggatcataaaatatccacaatatatgagaaagtgactctctgcctctttttctttctatctttctggtctgcatagaattccaagagggacagcccttcaagtgctttctgtcccttggggccaccctcctctaaccccttggtctctgcctcttctctgaggcccttcagttggcagcgctgccccagggccccggagtctccactctgagtgagcagcagagagagggaattcagctagcctatgctagggactcaagtccccatattgggttttaaaagccattgaggagactggagagatgactccacagtcaaaggctcctgatgctctcccaaaggacccagacttgatgcccagcatccacaaccatct

SEQ ID NO: 19010 - DNA, 1211 bp, Mus musculus
cagaacagtaactgtacccatgggccagagcagaaccatcacaatgctttggggggtggggtggctcattgtttagccacactggactcactgcttagagcctgggctcgcaagactgagtgctgtcagcaattggaacaaggttggggacaaagctagcaagtggctatggcctctgggagtagaggagaccaaaggacaccacgctccctctgtcctggtgctgatgaaaggcctcagatgctgaagaaggcagagggagcacctgtggacttccatgggggataagccaacctgggcatgcaggccactggagtcaggttctgtccacctgagagtgatttcatgaagtccacagagcctgaggtgtgcaggctcaggtgccagagaacaaggtaccgacgtgaagtctgctggagctggagccaggaggtggaagtaaggagttgtagactggggcttcctaagactcctggcttccctcccacctttgcacgagcggtgagagaggtgcagtgccaggtctcagaggttagaggtcagaggtctcagtatttgctcctgacgtgggaagataggattcatgtgtccggcaagatggcttcctggagaaagcagactgccagcccacagggtgagctcatctgtgggctggctgcttaggcaggaggctcacaggctgagctctgcaggccagcccctcctgtgtccttggtctgcctgctttctgtaggctgagaggacagtgagggtaggcaggagcccacagagactgaaggaccagtgtgcaccctcaagtgtgaccctttccccgtcttcagaaaacgcagtgtacaaagtcatggggaaatgttgccgccctcccctagattatcaagcacctgaagataaggggaggggccttgggagtgcacctgcacggctgcgggagtaggtggtgacgctggtcacctgctacagcatgggcctgtacagacttggttttaagcagatgagtcagggctccagagaggggttcctgctgtctactgtcctgggaaagtgggagctgccaaagcctattgcttcagagacagcgcttaatactgacagatgatgtatattacttctggggttggggacaggcctgggactgctctgattgacatgtgactcttggaaccctttatctacctgtatttgatctactcaggatgccatccatcttgggg

SEQ ID NO: 19011 - DNA, 1141 bp, Mus musculus
cgaatgttgacatttatagtaacacattcttcctacagctggcatctcttggaagcttgcaagggccagcaagtcgtgtcagtgattcttatcacttccttaggagctggacaactgagtctgaccacaggaaacatggcagaagggaagaactgacctgtgtgttgtcctttgaccaccgcatgcatgctatggcatgcaacaccccaaaataaatataaatataaaaaataataaatgaggctggagagatagcttagcagttaagagcactgagtgctcttccagaggtcctgaatttaattcccagcaaccacatggtggctcacaaccatctgtaatgggatccgatgccctcttctggtgtgtctgaagacagctgcagtggactcatatacataaataaatcttcagaaaaaaataataaatgcaaccattcaaatagctagtaaacatctggaaaggtgcatgcttcggggtcacagcacagtgtggggtgctggaagaccggacattcggagagccctgcagtaggaggaagtactgtgaagttctggaccttgctgagactctctagggtatgcaggagaccttacctaacagcataaaataattggccaaaagggatttgccagccaaattaggagtcgggagggggtgggggataggaggcagtgtgtgtgtgtgtgtgtgtgtgtgtgtgtgtgtgtgtgtggtcacccagggacacagaggactccagaagtgtggccagccctgaggggagcccatctgagtctatatcaagcagagctatttcccagcaaggcctaaatgtcaagctcaggttgttttcagccaggatgagaattcttcagaggctgggctctcaattgtgtctctcagaacaataggggacaatcctctctctggtcatgtgagtcctgtagcccaggtgtgttgtcctggtgacaaaggtcgcagacaaagtctgagattgcaggaagtaagcaggtgctgggtggatgctggaggcccagggtgacctgcaggaacagagaaggggagataggtgaaggctacagaagggttcactgtgtttcgctgtgctgggtggagattatctttgtcttctgaaggggttgtgtgaggggagagcaaa

SEQ ID NO: 19012 - DNA, 1153 bp, Mus musculus
gagtgacatcagtttaccatcaggagaggccggtcctatctattcctcctcaagtcctgttgaagttggaggcgtaccgagagaacagccagctcatagaactgtctgtccacccaggccagtcacaggtgggagggaaagatgaggtacaacagggacagccaaggacacaggctttctatctatggtgatgacactattcataaaattgtttctttgtataggccaggtgactttgggactcttgggacacatcacaaacatagatgatggggtgtcatgtgactcatgtcttgacatgaagctagttgtaaagtgaggttacattttagtaattgtagctgtctggtcaatccagggcttgtacatactctgagaacagtccatctctccctcaacctgcatccttggccaaggaatcaggctcccagcctggactcactgctctggattccaagagacacttgaggtgaccattgtctgcaaacctctcctgaatttcactcaggtcagcctagaaatgaacagaacccttccacagctgttataagccagaatatcctgctttactggatagggtagagttagggcatcagatatcaaagacacaggggagggggcacttctgagatgttccccaaattactgtgtgattgaggaaaacctgactagtttagcatgcttctccagtccctcagagaaaactgggtccatttaaatacaaggtttttgcccttatctagagagatcagctgcgaagaatgcctacccctcacagtaactgggagggagtctgacccctggccagcacacaggctgcagcagagatgggatgttgtcccagtatgaggagctttcattggctttatattcattgactttttttagtttacatcactaaaatgggggttggagagatggctcagcggttaaaagcattgactgctcttccagcagtcctgagtttaaatctcagcaaccacatggtggctcacaaccatctgtaatgagatctgacgccctcttctggtgtgtctgaagacagctacagtgtacttgtatataataaataaataaatcttttttaaaaatcactaaaatgtacccctgccttaaagttagcttcattttgagatgtaattgttgaacttcc

SEQ ID NO: 19013 - DNA, 1552 bp, Mus musculus
cgggtgagggctgtggcgtacggtgcatgtgtccggcatttaaacacacttcccatctcttggtttccccacagctcaccgcagaccagaatctgcagttcatcgaccccttctgccagatagcagcccgcactaaggagtaagtggtgggcggttccccttcctctcaggctgcagtggccactggcctccctcccatgctgtgagggtagtgtggtatctgagagcccatactaatgaggtctctggcctctgcttcaccctcagttcccaggttttgcataagatcattcagagcatctttcagacgattgtggagcaggctcccttggccatagaagacatcatgaatgaactggacacacagagtggagagggtgaagcatcagatggtgatgatggtgaagcatcagatggtgatgatggagaagcatcagacgatgatgatggtgaagcgtcagatggtggtgatggtgatgtggcagacagtgatgatagtgatggggcagacgatgatgatggtgacgtgtcagacggtgacggtggtgacaatgatgaaggtgacagtaacaagtcctcagagggtgagcaggatctgcaagacacaccacccaagaagctgcctgcaggtgagggccccagcctgtcctatcctaggctcttgctggattgttgcagctgtctctgggctgttctctggagagcaccgtgttgcatgcatgaaggacatttggtttgctctcctaagtcggtctcagcacttgattcctggctcccagcttccagctcggtccctagaatgctcctacctaaggttctagtgctccctgggtcctgtgtggtaccctgacctccctgttcacagaggagcctgcatcctggtttgcttgtggttttggtggtgttggggacggaactctggccgtaggcactaggaactgctctaaccttgcgtcacacccaagcctttccctaccccttctcctggaccctccacttccatcagtcacctttcctctgtgcccctcagccctgccctgccatgcccctgcccgccagacagtcggcatctgcccacagtgtagcaagggcaaatgaatgtgctgcacgctctccttgtaaatggcctctcactggctctgggtttgggccaggtgtctggttgcagtgggcctagcttggctttctttgtcttgatgctgtggtcatggagtctcagtgagggtcttctttcagctttggtgccagctttagtggcccccttcttgtgggtcagcaggcacactgcctggcatcctgtgtgtcttgcctgtctttctcttaacttctctttcttggtagcccagacatcctaagagtttctcagaggagaccccttgatgcctgctcatggctcatcagccactctgcacagcaaaccatcctgcagccgttgtccttgccaaagtgtcccacagcactgttgtccacaagccttcacttacaactatgctgagtggcctgtgggggcacacacctataccgtagcacttgggaggctgaggcaggagga

SEQ ID NO: 19014 - DNA, 1724 bp, Mus musculus
ttgtgcaacacctgacagtaagtgggagtcagtgtgtccccaggtcagcctgacatcccaggaagccattgtgtcgtcagcatggccagaactgacagtttgtgtttccttgctgactctggtttattcttgtggcaggcaccctagaggctgaggcagcaggagagctatggagtaagacacccacactcacaccgcccacccacccacctacccactcttgcctccttccttacatcctccctccctcccttcttccttctcttcctttcttttttaatttctagtggaataaacacaattttaagattccccactattgaagcaggcagaggatatcctcagagcaggcgtctccatctcccttggattacctccctgcttgtggctgagctcccctgggccagcatctcctcattccttcccctgtttcaccatcaggcagtttctggtctttgtgcaataggatacacattccaggtggaaaaggtctccctgatgccgtgggaaccccactctgtccccgtgggaaccccaccctgtccccgtcagctcttgaatagccagttagggctgcctctgccctgaagctacagatgggtgggaacagacatccatggctggaagctcccagaaggccttgggtataaccttggccatacctcactgcccatcctatagagccagcaggtcccatgagacgttgggtaaagccatgactgcacctcatggcctgccttgcagggctaggcagtgccccatgcaggcaggtgtaggtgacttggactgggggctctggaagcctctgagctgccagtttcatgcctgacatggaggatatgtccgggggggggggggcggtgacagaacacaatagaggacatgggcttagcatatccttctcatatcccacagagcaggaagatcccctcaaagctcaggcctgagtgagtcccaaaaaaacatcctgaaaccattttctgaatgatgggggaggggtcagtgttttgtgaatggaggatgagacacaggctcctcaaatgctcctagcttcatagctgcccattcctgacacacagcctgtcagaacttcagccgtgtgttgagaacctggaccaattggaggatgggctgcacctgtggggctggcccgaccctgctagtcctccccagagaccacccctctgtggagtcccctggccttcagagcaaagcacagttggcccctcagtccctgctgcgcaggaggggtgtgctccgggctcaggtggtctcctgcccaagtccccaagccctgtgtactgtgtcccctgtcaatgtgtttgtggacatgagcacctgtcagcactgtgtagctgtgtctgttttgtgctggtctgttgtcttctatgactatccacaaataaatattttcattgcagttgtcttagtgtggtcatttctcccctgctggtccctggtggttactgctcagaaagagcacctggattccccaaaacagtcctcaaaggaaagcgtgtgcttgtggtggccggcagctcacccttcactctcttctgtctcagggaactattgggtgctttagggccagccctaaggcttcccgaataattctctggtgggcactgagagatggagtatgcccaggtgatccacctgcaaggagctgaagaccagccattggctaacgatccaacagttcagttgctcctgagttctcgtgc

SEQ ID NO: 19015 - DNA, 2355 bp, Mus musculus
gaattcagaactatgggagagggaagggtgtcttaggttccatcctgcctgctctgatcttccctgtgctctgcagctgaagcaggagaaggacagaagcccagccccgctcagctggagctgaggatggtccagagcaaaagggacatcgaggaccccgagatcgtcgtgcaggccacagtgctgtgaggaccacacccactcgccccgacacacagccagctgaggtgtccgtctccatccctgtgaaaagctgtaacgtctgccttagagccatgactgaaactcgacatccgtgttccttcccgagagtcgggtctcagccagtctctagcgtgaaaaatgtgccattgtgctatttttttaaaaaatgacaaagccgtcgtagaaatgtgtgattcacaaccatggtcccttccccaaaggccctgggcctctgactgcctcatgttgcctcataggtatgtggaaggtaggtggaggagaccagcctgctgcctctggacctttctgttggtcactggctgccattgccccctgtgtatgtatacacagtcctgattgtgtatagactctgcctgtgtcggcgctgtctttaaaatggggttaggtcttaaccgttggcattggaagaattatgccaaatatcttctttgccattctggtctttcccttgttcctgcattagagtttctgtgtctctgctgctctttgggtggtgtcccagaatgtcagacgaatgcagctgctggtctgcgagggaaggtttcatatccccgtgcttgcacaagcatgcggtcactgtgacagggaccttttaaggaacgggaacattccaggacatctgcaagccgtctgggtgtctgcagggtctcctgtaactctggagctgagtgcagggcagcttgggaattcagggaagtttgcctcactgggcttttttttttttttggttttggttttggttttgatttttcaagacaaggtttctctgtgtagccctggctgtcctggaactcactttgtagaccaggctgaccacaaactcagaaatccgcctgcctctgcctcccgagtgctggtattaaaggcgtggaccaccatgcccggctctcactgggctcttgtgggcactcacacagcccctgcaggactgtcaggtggcagttcacctgccacatgctgctggggacagtgcattgctgcacagggggttggacagacagggaaggagagacagaggtggctcctgccccctggtggcagactgaagtgcgggttttctccactcccctcaccctcatttctggattctgtgcccacctcatgctgaggggccaggggccctgatgtgaagccagggcctctgcctccttggaaggtcttctcctctacagagcacattggcattgtgtatgcaggggcagctcttagaccccagctggggactgtgacgtgtcccattgtctactgctcgggggtgaacttcctggctctgctttccagagtttagggtccctaatcatggctgcgagccgcacccatatccctgctcctcagtccttaagatatctatcttctgagaagccacagcctaaggagaccagggagactgggagaggtgaagagtgcattatgcctacctcttccccagaagcatagggtctccatggagctctgagagcgacaccctttccccattatgatgccccagatggaggagatagatgctggtccacatggacctgaaccagcccgtattctgaggtgtccgttaataagccttttacagctttgaaggaagcagagaactgggctctctctctctctctctctctctctctctctctctctctctctctctctctctctctctctctctgtcacacacacacaatgtaattttaaaaagtactttggtcatcagtaccccaggacaagattagcaagctctctgttaaggccatgaagcctgacatgtgtccaaacctggtgccaatgtggcacctctgagccccaagaaaaaagaaagcaaagacagcaggcccctagtatccaaatcagaattggcttttacttttactttattttagtaaggaagtaatgtgcttgggaaggaagctgcattagcccagggttagccgcttcctattggggacattgattctgtctcaaagtatctccttccacctcctgaatactaggaaggaatcaccacaccacatatgaccagtgctcccttttattgctgctatctggggtgcctctcttccagacatccacgcagctacctgcactgagaggtcctggaaagccatgtctgtccatgtgacagatggatgctgaccacaaaag

SEQ ID NO: 19016 - DNA, 1188 bp, Mus musculus
ccacctgcttcctgggttcaaagagtgttcattcaaagaaagtcaccctgacccaccctgaccattgctggatggaacccactatgcaaaggtgctattgctaggggctcttagattgttaggggctcttagaaactgttttgagagataacctgacacttgtgactttgtacttccttgtgactcttaactggtatttttggtattttccaacaacgcccttcccacctccttaagttgtggtttcttcctttaaataccccctaatccagctacttggcgcgccatggtcctctacccctgcgtggtgtatgaccgtgggcccgagagcattcttgaataaaaatcctcttgcaatttgcagcaagaccatttctcgttggtgattttggggtgtcgcctctcctgagtcagaacgtgggggagtcctcacgttgtggctctttcagtagaaggttgaagtcaaagaggacctaggacctccacacaaaacaagatacactgaatctaatagaagaggaagtggggaagagcctcaaactcatgggcataggggaaattttcctgaacagaataccaatggcttatgctctaaggtcaataattcataaatgggaccttataaaactgaaaagcttctgtaaggcaaaggacatggccaataggacaaaatggcaacccacagatttggaaaagatcttaaccaaccctaaacctgtttgagggctaatatccaatatatacaaagaactcaagaagttagactccagacaaccaaataaccctattaaaaatggggtacagaactaaacaaagaattctcaactgaggaatattgaatggctgagaaacacctaaggaaatgtttaatatccttagtcatcaaggaaatggaaatcaaaatgacaatgggatttcaccttacaaaagtcagaatggctaagatcaataattcaggtgacagcagatgttggtgaggatgtggagaaagaggaacactctctgttgctggtggaattgcaagctgatacaaccattctggaaatcagtctgtcagttcctcagaaaattaggcatagtactacctgaggacccagctataccactcctgagcatatacccaaaagatgcttcaacgtataacaaggacacatgctccactatgtttttgtttttgtttttgtttgt

SEQ ID NO: 19017 - DNA, 1496 bp, Mus musculus
ctgcagggagccctggtggcctgcctcacggtgagtcctacttgcctgacccacaggctctgctttggctgactccaatgttctatgacctctgcctgctgttctgcctccaagagcttgcccctcacccccggccccacccatccacatggcaaccctcctcagcttctcccttagggttcccagatgtttttcttcttccagccctactcactgccttcccctccccaggtccgctatgtttcagatttcttcaaatcccggccaccccagccctgccaggaggatgaagtgccggagcgcaagcccagtctgtcactgacgctgacccttggtgaccgaccctagctgctatgaacaccctgtctcttcctgctttggaagctgggaagtcacctgtgggccagtcatgtgttgaccctttgcccctgatcaggcactactgacgttggagctatcccagagtcctggctggtgactgtggaccaggatcttgggtgcctgtctggccctgagtgttggcagggcccatcctcttcatttcttgctatcacatgacttcaaaagatgtggtcgtgctctgagggctgtctcccatctccagtgggttttcaaggagggccatcccagcatggccccggaagtggtttgtctgagactgttcatgaagacagcaccctccttgacggccctgaaggtgatgaacatcttgtttgcctgggtggggaagttgaccttgggcaaggatcacaagtgtgaagacagctgccaacccttggggctgcctaggagtccaggttgcccagaaagtcacacatagttttggtctgaatccttttctcaagcctgtggaagattaccactcgaggcccccaagcctctccctcaggcttgatgttctgtcctgtccccactctgtccatatggaccaaatgtgtagccaagcattggaagtaggtcccggatctgccattcccatctgtttcaaaacacttcaagttactgtttcatgggagggtgtgttataaactttgtaccaaatgtctctgccatgcatgttgatttttcaagctcttctggtgaggaagatggtcctcttgcaccttactcctcagtgcattgtgctggacctgccagtcttagcagagacttaggggacatctggcctgggtgtcttttatgttggccaagacaaaggccttatagccattgtggccttcctacatgtgtgatggatgcttatcctaggtcaccttagaacacagagaccctgcatggtcagtgctagataggtgtgtgaccatgctcccaggatgccttcatggtcagtgctagatcggtgcgtgaccatgctcccaggatgcctggccagtctcccaggggcagcaggaggggtgacaggtcttgttgtatctcaggacaaggtgtgtgtctttctgggaatgggcaggctccttatattctcgtcaggtctttgggtctgggagcatggggga

SEQ ID NO: 19018 - DNA, 1222 bp, Mus musculus
tctttactggttagtgggaaaactgaaccctggagcaaggccaaggcttaaagggaaactgaggcctggaagtgaagcaagtgcccaggacaccgcgggtggcgctgcgtctggagaagtctaaaggtgaccatgggtcgcttctgctggctcctggcctgtttcctaggctgtaagcaaaggacatccatcggttctttgggttcatattggaacccgagggtcagaactctcaggcctgccaacagccccagcccaggctcaagagacctcggagacaccgattcagaccccaaggggattccttctgtgagggaaggggttgtcatcatcaccctgcctctgtcccccgccctttccaggacagtactgccgggaaacaaagagaagagtgctgggcggggcagggtgcggaggaggggcaaggccggccagatcgatgcgagagaaactagatcactgcctgtggagggggcggaggcgcgcgcgcctggctctcagccacttccacacaggcactctcaggagcccagccaggtcgcctttggtgttgtctgctggaagaggagcgccactgggctgaagtctgaaaaatggctgtagaatctagctgattaagtgtggaccaaggcgttcccggtctgggtgcacaaacatcactgaatggggaggttatagggctggctctactctttaatctgcggcaacaaatgacgtaaataatactctaataaactcctacacatccctcaaagcccagcttcacagtaccccttcccaagaacctaactggtcccatgatccaaacccaggctctgtctctggtctcctgctgccaggggcccccatttgccccatctgaaccgaatgaggtttgcaaagttgtttagtgctttctttgcggcgtggttagaagtgctaaataaaccaatgtgcacaatgctaaccgctgttgacggaggaatgatttattggcaagcaactctaaagggtggggtgagaagggcagagactgcagggccacctccaggagagttctccggcctcatctgcagaaacccaagcggcctggacactgaattctaggacacacggctccatgtccagccagggaaagggacacttctccctggcctggtctgacctgggaaggaggctcaacctcaccctctatggagacttgggtcacaggccccagggacagaaagatcaggtggcctca

SEQ ID NO: 19019 - DNA, 1328 bp, Mus musculus
gtctggtgactattcttggcctgggcccctgagcttggatagtgttagttttaggcctgaggctgtccaggagatctgctgactcattcctctagctagcccacaccaagtgatacttactgcctggcctttcctaacctgcatgtcaggtcacagaggtgctttgtgtgtcccagtgtacagagactggggttggcttcaggacctgaacaccaggggcagccactgctttttgtccccgttgggcataacccctaattccagtgctcaaggggctgccattgagccaccccattttctaccatctgtaggctcgcctcaagttccccatcgactacccgtattccccaccagccttccggttcctcaccaagatgtggcacccaaacatctatgaggtaagacactaaatacctgcctcaggcacactccaccacacacacctcctgcctcccttgcacgtgcccgcccctcgtctaaccctcgtcactcttacagacaggggacgtgtgcatctccattctccatcccccagttgacgacccacagagtggggagctgccctcagagcggtggaaccccacacagaatgtcaggtgagaactgccatggtgttgtaccatgggcaccccccggcaccctgtatcctaaggtcccttcttcctcgctccagtctggagcccccagaatctatggggagctgagcttgcacccacggccccacagaaccatcctcctgagtgtaatttcgctgctgaatgagcccaacaccttctcgcctgccaacgtggacgcctcggtgatgtacagaaaatggaaggagagcaaggggaaggaccgcgagtacacggacatcatccggtgagcgctgctctcagcctgaacagtgcagctgggtctctacaatagatgctgcctgctctgaagagtgacctgtgtctcctgggtggggtggggactgttgtgtttctgttcttgcatccccagctggatgtgtggagggctctgtagcccccagagcaccgagttgaccacctagtatggccaagatcctctttgccttgtgtttggcttaactccatgagtgactgggcactctaggccacatcctcaccatctgacatcactcgaatttgtgcttctgaaacttagagcagttttgcaaagtggggaggtcgctgagcccactgtgagcctgtcctgagacagggacccaggctgcagcctgtgcagtccgtgagtggtaatgtctgtcatcacttctcagcgcctgtctgcggtcaggcagtctctgcactccccaagctaggtatgacgtttcacttgag

SEQ ID NO: 19020 - DNA, 1521 bp, Mus musculus
tctgggactgcccttcatcagagtgcccctcaggtcaggctgcagtttgggggagtttgatgttggtgtggaatgtgggtaggtgtgtgctctttaacctggaactagtgtcgtggcccccacagtactgggattacagcatggatcctggtgtgcccagctgtttctgtggtgctgggagctggccttgggtccttgtgcttacacaacaaacactctgactgcatcacctccacttttttttttttttttaatgactgttgtcataagacagatcctattacagctgaagccaccctgagactcagcaggcctcctgcctcagcctccaagtactaagtgacaaacctgtttcccacagccagctgtggttaccttcctgctgggaactggccactccttgtccccacgccctttattccctcccacctgctccctgccctccattcagtgtctattcttggaatcccattgtcctgggccttggcctcacctgccctgtctccccaggaagcaggtcctggggaccaaggtggacgcggagcgcgatggtgtgaaggtgcccactacgctggccgagtactgcgtgaagaccaaggcgccggcgcccgacgagggctcggacctcttctacgacgactactatgaggacggcgaagtggaggaggccgacagctgctttggggatgaagaggatgactctggcaccgaagagtcctgacccacgtccctgaaataaacttacaaattttacctcagcaggacccgtgtgggcctcaggcgacagactacctcaccgaggttccatgtgggctcccatcccatgatccttaggtcctcttaccccgtattccccatgggttttcctcggctttggagaagagctgtggtgcagggcaaacaccccactcagctttcagatgatgacaagcctgggaggctggggaccgactgcctggtggggagccagagactccagcccagcccaaggaaggccagcaccacagtctcctctctgcttttggtgtgtgtgaaataaaataaaatagctttctgagaagctgagagaatcacctaggacgccggtggcactcggtactgagggccacctgggtagcccggccaaggccgtgggatgggcaggaagagatagtgactgttaaggctcaggattgtacaggggccccaggcccagaagcaacttgctgcctgcagatcccaccttcctgcatctggcactgtggctgtctgtgtccgcctccatcctgcagtcagaaggcctgggtcctgaggcgtgcagaggactagtatcccagcagtccttgtgtcctgggcacttcttcagccctgggaactccagtgcctgcctgaggagtccctgtggcaggcagcctggtgactccccacaggaaggacaggctgagtgatgctctgaccacatcatgctgtgcagggtggctacagtgacccagtgctgaaatagcattgggtgccatgtaaagaaaggaaaagaaagtgtca

SEQ ID NO: 19021 - DNA, 3382 bp, Mus musculus
ggcacacgggtgagctgaacactcatcagtgtccttgctgggtgcaggttggccctgccctcttccaggtggctcctcggttcgcaccccaggcctttggtctgctgtgcaccgccctgacctcccgtcctgctctgctccatgcacctgctctcctgcctcccctgcctcccctgtgattgtctggcaggggtggggtctgctgcccaagtgttcgctctgactgtctactgcaaacctgaaaattccagccagactttgcagagccctctgggggtttagtgtccagttctgagtgacggtcagataacagtgaggggaccacatggctgtgggagcagcaggcggggcttgggcagctgcgtctcttatcttgaagtggtttgtagtgcagcatcagcttgctttagccgtctggggctgtagactgtcagccgctgtgattccaacagcagacctcacagagtggggctgactactatgctgagcttatactctttctccctgtggcttcagcgggcaccatccaaacctctgtccaggaagtcaactccaaaacacagcttacctgctctttgaacagcagtggcgttgacatcgttggccaccgctggatgagaggtggcaaggtactgcaggaggacactctgcccgacctgcatacgaagtacatgtgagtccacagtgctcaaaggaccctgtcctgatgctgtccatggggacctgcctccatcctgacgtgtagcagtgccaggctccacacagctctggattggctgggtggccttacctgtatagcgtgagagagcccaaggccctatgatctgcacagagagccctggtggggaggtggccaccatgccttgggagttccttacctcaccgaggctctgtcccctgcagagtggacgcagatgaccgctctggggaatattcctgcatcttccttcctgagcctgtgggcagaagcgagatcaatgtggaaggtaatctgtgggagtggtgggggcgggccaggaggtggctggcgtgaaggccagggactggtgttggggctgagagcagtctacaacgtgcttgggcatcagggttctcatcctcacagggccacccaggatcaaggtcggaaagaaatcagagcattccagtgagggagagcttgcgaaactggtctgcaagtccgatgcatcctaccctcctattacagattggttctggtttaagacctctgacactggggaagaagaggtaagggctgtgaggctaaggacatggagcttgagtggtgccaaggaccaggctgcagtgggagcatgaggttctggacatgggggtaggggaggcggcagaaggggcaccgggtgctaggaatgggagtggggataagagcatcagaggggacacaggagaggacgctttggtgtggggatctgggacagtgtaggacagactctagcatgacatgacaagcccttctccctaggcaatcaccaatagcactgaagccaatggcaagtatgtggtggtatccacgcctgagaagtcacagctgaccatcagcaaccttgacgtaaatgttgaccctggcacctacgtgtgtaatgccaccaacgcccagggcactactcgggaaaccatctcactgcgtgtgcggagccgcatggcagccctctggcccttcctaggcatcgtggctgaggtcctggtgttggttaccatcatctttatctatgagaagaggcggaagccagaccagaccctggacggtgagcagtcctgggtctgggtgagtgggtgggatgccctcagtgtgtccacctggaggagagtggggtctgcttgtagctcaccctcctccttcctccatcacttggccacaagctgctgtcctctggggagctcgctgtgaggacttggggctgtgggtgcctctagctgtacactgcatggcgagctggggtaggatgtgttggcctcaccatgtgttgatcatctgatgtacgacacttctgcagcaccatgagggtggcagtgtggggccaagttcacacgagccctgacacatgtcctttctctttcatgtggctgctcctggctgcagaggatgaccctggcgccgccccactgtaagtccagccactgtgggctctggggagctagctgtgtgtcctatagaaatgggggatgctctgggactcaatgtgtgtgtccatctttcataggcctcagtaagttcagggaaggtggatggctgctgttgaaataatggccagatttcagtggggttgaggccagccctgtgcctgttaagagtaatgagccctgttttgtatccccaggaagggcagtggaactcacatgaatgacaaggacaagaatgtacgccagaggaacgccacctgagtggtggggcaggcgggggaggggaggtgcccagggtgcctgaccccaggccagcgtctacctccactccagtatcccatcctgtcccgatttgaacctacccaacccaacctatcccaacccaagtgaagacagagccttaccttacagaaaacccacctggaagaagcaagccacttgcagcccctgtttctaatttaaactaaatgaggtttctatgcagacaatccattccttaggggtttatgtttttatttttccttcccttctgaagtgttgtcactacagccctgtggagtgggggaatggggccttgtccttggtcaggagggaaggccagtgcatgctctgacttactgttggagggggctgggcctgctggaacccccccaaataaagacctaccccaccatgtgtgtgtcactacttgaaacttcaggaccccatcttaaagggagaatgagtgttgaggtcatatacaggaggggttgttgatcagcacggcctggggcacaggtaagtgcatggtccctagaccagtggttctcaaccttcctaatgttctgaacctttaatataggatatctggtgtgacccctttgaaaaggttcttcaacagcaccccctaggggtccttagaagttgaacctgcaggtacagccttagtcctcatgggtgtccaagaaaagctgtcttcataagaacactgctgaccaccactgatgtcctgtacaagcctagtactgatctggctggtgggcaccagtgggaaatgggcagtcaagggacttgctggctggttttaactcttaaattttgggcaggggtcaggacaggtgtatgtggtggtatagtctgactccagagagacagctttgatcccagcagagtacatcccagagtggtggtggttaagggagagaagtcggggggggggggggggggggaggcggggcgatagcagacctttctgaagact

SEQ ID NO: 19022 - DNA, 2316 bp, Mus musculus
atgaccaactaggccatcctctgctacatatgcagctagatccatgagtcccaccatatgttttctttgatggcttagtctcagggagctctggggatactggttagtgagtgcatattgtcctcctatgggctgcaaaccccttcagccccttgggtcctttctctagctccttcattggggaccctgtgctctgtccagtggataactgtgggcatccgcttctgtgtttgccaggcactggcagagcctctcaggagacagctatatcaggctcctgtcagcaagctcttgttggcatctgcaatagtgtctggggttggtggtttatggggtggatccccaggtggggcagtctctggatggtcattccttcagtctttgctccaaactttgtctctgtagctccttccatgggtattttgtgtccctccctcctttttttaagatttgtttattttatgtatatgggtacactgtagctgtacagatggtggtgagcttatatgtggttgttgggaattgaatttaggacctctgcttgttctcccatctaaaacaatcagaaactctttcttttctttcctttttttcttttttcttttttggttttttttttttttttttttttttttttttttttttttttttttttgggggggacagggtttctctctgtagccctggctgtcctggaactcaatctgtagactaggctggcctcgaattcagaaatctgcctgcctctgcctcccaagtgctgggactaaaggcgtacgccaccattgcctgcaatcagaaactcttaactgaaaacctaacactagccacagctcttttaactggacgttcttccccttagctctgagcctacctttaccatgcctgtctccagctatggcctctgacgtacacctgaacctccttcactgtggccctccctggcttttctctgaccttgcccttgctgatgtgcctgtctgcaccttgagccgcagccatacagccatcttacttggatcctcaacctggacccagactgccccaactctaagaaaccataatcatggctgagccagactgcctgtgaccttgattttagtctagaccctgacccttgcttgaaccattaccccgactccaaacctaattgtatccttggccctgctctctgcctccccctaactcctcctctctcctctccagcatgacagctgcccggtctgccgtaagagcctcactggacagaacacagccaccaatcccccaggcttgaccggtgtaggtttctcctcgtcctcgtcctcatcctcctccagctcgcccagcaatgagaacgccacaagcaactcctgagtcccacctggccatcccccccggggtttggtcatcccacccaccccaggtgccccagcaccgcccgcctgcccgcccgccatggctgtggactagaggtgctgcccgtggcggccggcagtacctggcgggccccaggctgcgggcaggcttggacttggccatggccgctcctgtttggaggtgtgcacgtgggtcccatgtccccagcaggcaggcaccttcagtccgtcttaacctcaccctccaaatgttcaacggcagaagggtttttatgattttaaattattactgctttgaaataaatggacgtttgagccacgtgcggccatgcatggtctgtggagagtcagcagaactgtcgccaggcccagcccgccacacgccctgggaggccgggcccagcacccaaccagcgccggcctcgggaccacaagggtgaccagcagacccaggaacaaactgctccagcagacaattttttttttttaagggaaatgtgtgttatctggaaagctatttaaaatacacctactcaaaaaagcagagcccatggcttggcgtcttccttcagccagggtgtccatgactgcatggtggggcagtgcacagggtgggttggagcttctggcaaaggcctgatggaacccagccctctgcagtggttggtaggaggcaagaccggaagacttcatccagagctgctggggtgggaagctgcctggtgcagccctgcagcgggtgaccaggcagtgggcctgtagtctcatcccacacacttgtctttggttcaagtgatggacttgcagcatgtatgacggcaggcctacatacgccacgccagtattaccatggctgagcaagtccctagccctcctgttcccaagcttcatggagaagacccagaacacccctacggcctaaagtggtcactgctttcagcaatgctatgacctgccc

SEQ ID NO: 19023 - DNA, 1181 bp, Mus musculus
gtagacagctgttcccgtcggtgaggagacattgtccttatttagatcctcataactcagaaagtgacagccaggcctgatagtgcatacctgttgtcccagcacccaggaagctggggcaggagagcgtggtaatcctcctacctcagtctccttgagcgctggaatgacagatgtttaccaccagagctggctgtcaaggctggtatttgcctcagcctccgggctctgccccagcgccggcctgctaacactctctctgtgtccccacgcagtggtccatgccgtggacggcatcgctgagaacgggatccagcctctaagttcctccgaggtggacgaactcattcacaaggccgatgaggtcacactgagcgaggcagggtccacagctgggccagcggagcctcggggactcgcagaggatgtcaccaggaccacgccgtccagaagggagatcacaggagttgaggctcaaccaggagaggccacatcaggcccaccaggcatccagcccggtcaggagcccccggtcaccatggtcttcatgggttatcagaacgtggaagatgaagcagaaaccaagaaggtactgggcctgcaggacaccatcaaggctgaactggtggtgattgaagacgcggccacgcccagggagcccgcacctctcaatggcagcgctgctgagctcccggccaccaaggaggagaaccagacggggcccacgaccacgcccagcgacacccaggatcttgacatgaagaagcctcgctgtagatgttgttctgtcatgtgagccgtcggggcaccctagtccccggtccccgtcctatgctccacactcaaacccagcagcccggccctccccggcgcctgcccaccctcaccctccgcctcacaggccccagacacgtgtgtgatccctatgcacctcgagtctcgggtggggggtgctctgcccgtcaccacactccacactcaccccgaacctctgagccgtgggtcaccccttggtgagagacaggccagcccatatcagcccctctaagaatggggacccctcagtccaggtcacagcaggtttacacaggcggcttatgcccaccgtggtcccagcctggtgtccccttgccgccccaggccagcctgtctgtgccttatcgttacttttggggagtctt

SEQ ID NO: 19024 - DNA, 1149 bp, Mus musculus
taattttgggagctttggggtcacctctgccctcttctctagttggtttggaccagggtcctgggtttcccacatacccccataccctagaagtcagtgggtatgtctgccagcgccacaaaacctagcatatccaggcaggtttaggctgctccacacacactttgggtgggagtaagggacccccccccatctgccacctggcctgacgggagcctggcagagggtcaccaaccttcgggcaggcagcagtagccactttggtccccagaggcacaaccctgcacacaggagctgactcaacttcaaaggaccacgcctggtctaggtccctttccttgggaccccagcctggtgtgcagcagggtgcagggcctcctgcgggccccgtcactacccgcagctacagtaggggctcaagcagaggccacggggtctgtgtcctgtccttcccgtggcctggaggagaggcgcactttcctgagggtgagctatggccgtggtcatggcacccccgtcttcctcctcctttgagtctgcctgagttcctcaagccctgagcctcggctgaagtgcccttgctgcccccttctgcttttgacgtgtggcaaggccccgcccttcacccccatgttcttgactttcccagagaaacaaattaaaaaaaaaaaaaaaaaaagtgtgtagagccaggttgctgaagttcttgggtttcacctgggcgggaaggggtgcggcctcctagtggtggagccataaaaaggctgggtcctgtagagcacaggagaaacttctcccctgcggctgctgcagccctcactgggcattttcgccaggactctgcggcacctggtcaggtaagcgacagctgtggccagccacccccacgggcctcggtctccacatcttccacacccatgtccttgggctgtgatgttgagagtagagaggtcctcacagatagcccacaagttctgagccaggttctgcatagtagaggagtaccccccttttttttcatgttttttttttttggagaattttttttcctttggcctcagttgccctatctgtataaaatagatgtctaggagtcctgtgttcccaacacactgggtattccagacttgagtaaaaggcctataacca

SEQ ID NO: 19025 - DNA, 1149 bp, Mus musculus; identical to SEQ ID NO: 19024

SEQ ID NO: 19026 - DNA, 1154 bp, Mus musculus
ttcctccacagcgtgcccaggcagccctgcaggctgtaaactccgtccagtctggaaacctggccttggcagcgtccgctgctgccgtggatgcaggaatggcaatggcagggcagagcccagtgctcaggatcattgtggaaaaccttttctacccagtgaccctggacgtgctgcaccaggtgagtgcgtgccctgcacctggtgcctggattcccacttggtcggccccagctagagttcacacatcctctcttgcagatcttctctaagtttggcaccgtcctgaagatcatcacgttcaccaagaacaaccagttccaggcgctgctgcagtatgctgaccctgtgagcgcccagcatgccaagctggtgagtaggacttgcttgggtgggcaatcctatgactggcccacgcactcacctatggctccccacagtccctggatggccagaacatctacaacgcctgctgcacgctgcgcatcgacttctccaagctcaccagtctcaatgtcaagtacaacaatgataagagcagagactacactcgacctgacctgccctctggagacagccagccttcactagaccagaccatggcagcagcctttggtaagatgctgtactgagacacaccaaatgaacaggggtgggacaggccacctagctgtcagggcaccctggcactgcacagcccagccactcagcagtcctgcccgtgcctggcccagccgtgaggtgaggtgcagtgattagtgtctgtttgtttctaggtgcgcccggcataatgtcagcctctccgtatgcaggagccgggttccctcccacctttgccatccctcaggccgcaggtattcacgctcatcctgaccccagcgcctgcatgcccacacagccccataactgtccatagaccgggatgccactggccccaagtgttaggccccaggcccccttccttctggggagaggggaaggggcctccagaagcatccacaggcagctagggcagggtagtctcaggcagggctgggccaggtgccctgtgctggcattaccaacaagcctctaatcactcagtctttggtctggttcccttcaagcacctctggcgaggacgaggacgcagtgtccctagtagattgaattta

SEQ ID NO: 19027 - DNA, 2785 bp, Mus musculus
tgtcccctgctgccttcctctgctgtctctaaagagagtcacaccccaaagcctctttattctcttcggtatgttattctcccttttattaccttggtttcgttttaattggttattttacaccctgctatgtactattgagtttgtgtttggccttctgcctcggtccgtggtttgcttccggtttgcggattgtactgagtagacacgcatggttaccaccctgcatgcttccagagctaagcgtgtcagtagcatgtgatcgtggctgttctgacagctgtctggagtctgagactgccggagcgcagcgtgtgttagcaggccttgggctgtgagacacaggctcccagtgcccactaaacagacctggcccactgggagctggggactcgacgggtgggtaatgagtgggtgggagaggttaggagaccagacagcttaaagactcttaccctgggtttccaaggcgtctacggtgatgtgcagcgggtgaagatcctgttcaataagaaggagaacgcacttgtgcagatggcagacggcagccaggcccagctgggtaaggaccaccacagggcacaggcttgtgcttgaagctttggttgcacctgggggtagggcaccagtgggcagagtgtcctgctgctcatggtttccaccctttgtccagccatgagccacctgaacgggcacaagctgcacgggaagtcagtgcgcattacactgtccaagcatcagagtgtgcagctgcctcgggagggtcaggaggaccagggcctgaccaaggactatggcagctccccgctgcaccgcttcaagaaaccaggctccaagaacttccagaacatctttccaccctcagctaccctgcacctctccaacatcccgtaagtcagccagaggtcttgtttgtgggtgggccacgaagggctcctgatctcccccaccccatccccgtgtgagcccaggccgatggctcccgtctgtctctgcaggccctctgtgtcagaggacgacctcaagagcctcttctccagcaacggtggtgtggtcaaaggcttcaagttcttccagtgagtaaagccctgcctttcgtcctccacccttaaccctaccccaaacctgcaggtttagctgactaccccccactccacccctgcaggaaggaccgcaagatggcactgatccagatgggctctgtggaggaggctgtgcaggcgctgattgaactgcacaaccatgacctgggcgagaaccaccacctgcgagtgtccttttccaagtccaccatctaggtgcctgtgggcctgcatcagcttccaccattccagaaaagccactttaaaaagcagctgaagtgaccttacagaccagagattttatttttttaaagagagatcagtttacctgtttttaaaaaaattaaatctagcccactctgcagtggcaggaaatggcttggaccacagaggcccagtcaatcccagcaccatgccttgaggggctcaggcgtgaggccacagcggtgccccaaacatagccgctttctgtgccttacaaaccagcgtgcctcatggccgtacacccaccctctaaggccaccagttgtctctagacctgcaggtgagccaggtggcctatacataggctccccaatgctgtgcaagagctggggccactcccctacacccttataatcaagtgacatgattctcccatgtccctggccagcccggagggtccaggccatcctcagctgccgagcctcattgtgacctttgtattctattccgtgtggtcacagacacctgtgcctagcaatatttccacttgaccaaatacccgaatcttttccatttatatgcaagagatatagttttaagtaactttttatagcaatgatacaattgtatgtgtgtattctgagcttctatgtcccctgagctccttccagtgaccaacttgcaggtgggcccaggccagggctggagaaaaagctctgagacttgtgggtttctaccttcaaaattttggaccaaagtttagctttctgcccgcctctgactgtgcccagttgaggggctgacctctaggccttaatgtcctcctgcacagccacctctatcctagcctgttcctgtgggaggggttccctgcaccctggttctgtggaaggcgtggaagagtgtaaatatttatgattttatacctgtggggctgaggcggtgcagcagttttttatggtgacagatgtatattttggtaacgactacaggctcagtattgtcctggggccagccctggccacatctaccccatcccagatggtgtattggggaagggggggggggctttccattaaagcagttttataacctctgtcttccctgagcccttcattctgagctgtaggccaggctgggcctggattcaataaacacctgtgtcttacactcctgcctgtcattgggcggtggggggggggggggggtggtaccacggagcacaaaggatgacaagggtgagatggctcagagggtagtaccgactgctcttccaaaggtcttgagttcaagtccaaaccacatggtggctcacagccaaccataataagatctgatgccctcttctgatgtgtctgaggtcagctacagtgtacttatgtatagtaagtctttgtgcctgagtgagcagaggtcctaaattccattcccaacaaccacaggcaggctcacaaccatctatcagtacagctatggtgtactcacattaaatcttaaaa

SEQ ID NO: 19028 - DNA, 1215 bp, Mus musculus
gagacctctccattttactacaataaaagcagcctttgttttgtacactgggtctgatgtctgctgcttcaggatgtagaacacagccaatgcctcgtatacggttcacctcctggagacgctgcagccaagctggggcaaaggtgtggcaggagtcacgtcccccactttgtacaaaagaatgtccgtcagacaggtcttttggtttctgttcctaaatcccatgttcagctaggtctcagcatttaggaggttgaaaaaggaggattaccaagagtctgaggacagcttggcctacagagtgagaaaaatagagggttggagagatgcttagcagttaggagtgtctgctgctctcataggggacctggactcccatatggtggctcactattgcctataggcccagttccaggggactggatgccctcctttggactctgtgggcaccaggcacatatatacaccttctacacataattaagaaaagtgagcttttctgcgctctcgctggaccagtgagcagggacggcctcaggatgcagaacgacgccggcgagtttgtggacctgtccgtgcctcggaaatgctccgcatgcaacctcatcattgctgccaaggaccacgcgtccatccagatgaacgtggccgaggttgataggaccacaggccggtttaatggccagtttaaaacttacggcatctgcggggggtcatttgcaggatgggcgagtcagatgattctattctctgattggctaaggctgatagaattgtctcaaagaacttttgagcagaagaaatcgggaatttgttacaaataaaagttttaagtacctgtgggggggggggaagaaaagtgaagataacctgataaataagctaggactggtgaagtggcttaccaggtgagcatgctagccatgaaggtgaaggagacaatggatttcagcgagccctctgcacacttacccacacagtacataaataaaataaatacagcatatagataaataataaaaataataaataataaaatagccaagcagtggtgatgcacacctttaatcccagcacttgggaggcagaggcaggcagatctctgagttcgaggccagcctggcctacaaagtgagttccatgacagccagggctacacagagaaaccctgtctcaaacaaacgtgatgatgatgatggtgatgatatccacttt

SEQ ID NO: 19029 - DNA, 1873 bp, Mus musculus
atggcaacccttggacttgattcttctgttccctctgtgggaggatgcagcctccactgtattctcacacacctgagaattgggagaggatgtgtgggggaggtttctctctgaattcagctctggtctgaatcgagtgggaagcctctagacagactcacagctcatggctagccagaccaccctcatctggtttctttaattgtttaggcagggtcactggtgtagtccaggctggcctccattgcattatatgtatagtcaaggtcggtcttgaattcctgatccctccaacctccagggctcttgcatgctagggagccctccacacactggacctctggcccagctcctccagtccgcgatggtttgtccgcaggtgctgacctggagggccggaggcagatgaaagtcagcaaccgccacctggatttcctgcctccagagcttctgttgtctgcctacctggaccagcaatgatggcagaacccctgccagctgcctcgcccggcccagacctctgtctgctaataagatcttccacgctttcagaatttgaatgccaccccttcccttcaggaatccccttgcccttgccccttcatgtcccagatcacacagggaggccttgtagctccccaccctggtacttgtatttgggtagggagacctaatggggccctatagctgtccaccctggtacttgtatttgggtggggagacctgcccggggcgtttccctgtgttttgtctgtttagctttctttgagacagaagctcaggcaaggagtagcagactgttaccttttttcctctcctaatcagttttaatgaacttggcatgttttggggtagatttcttttaatttctcttttgaagtggggaggcacaaccaaaacacctagcgccagccggtagtgggctctgttgtgacccctgcctgaccctccatgtttcagctctgatgagggtggctggtcctctctctaggactctgcagacctccccaggacactttcttgtgtgtgtgtgtgtgtgtgtgtgtgtgtctgtctgtctgtctgtctgtctgtctgtgtgtgtgtgtgtggcgcacatgtatgcacgccatgtgccatgaacctggacaagcattgtctcaagggctcattttatgcttttttttttttttttttttggtgatgtgtgtatcttgtccccagctccctaggccctgcctgcctttcagactgtcctctcctcctccttctcccctctccttatgccaggggtccaggacttccagccagaagcctctgaccttgtgttccctgtcccctcccctgtcccctctgctgctcagcatagctgtggtcactgcagaggtcttatatgttcagcaggcctggccctccttcccttccccttctgtgtgattctttgagcttgggggaaagggacgattttaataaagccttggtgctcgagtcctgtccccgtgtttgtctttaggtttggtgggggtgggtgagactgggagatcactgagggcacgagctagcaagctggacacgggggaacctcaaagtctctataacattagttcattttacaacatgtaaaatgcttaaagatgaggtgccaggttggggttcgatggggaaagcaattggttagcatgctcaaagccctgggttccatccccagcaccatttaaaccacatggtgaccagtgacaagtgattttgaggccagcctgggccatgtggtagacaggtctcattgttggacacctctgaatcctagcactcaggagccagaggctgatggatctctgtgagttcaaggccagctagtctacatagccagggccatacagtgagaccctgcctc

SEQ ID NO: 19030 - DNA, 1277 bp, Mus musculus
ttagctgccctccccccacccacgttagctgcctgtggtgccaggcaggtgcactgggctgtcatcctgaggcccaatggttcttcaggtttaacacacgcgtggggcagagggtctgcttcccgggtttggcgtccaatccctggagtgcatagaggtcggaccttggtgtcttagggcttaaatctggaagattgagggtgaccagagaagttaccattcttctgtgtgactggttcccgtgccttcctttctccgagcctcagtttacccttcttgcatcaaaacttgtatcctggggtggggctgggtgggggggatgaagccccttgttgccagggaaaccaagcagacccctcacctctgatggcctcctcacctggtacacaggtccctccctggctgtctccccccactcagcggctcacaggtgaagagggtctcagcgtccagacgcaagcagcattttatcaaccaggctgtgaggaattcggacctggtgcccagagctaagggacggaagagtctgcagcgtttggagaatagtaagcagggagtagggtgtgtttcccttgctgtgaaacaccccgtactggccaggcgttagaatagggcttcagagggtgcataggagttcagcaatgcagggagagatagatggggctctagagactgggtgggtgaaaaaaaaaaaaagaaaaaaaattggggacagtaggaacccagggctgcatgaccccaatctttccttccagcccagtacctgctaacactgctggagaccgctgggggccctccaggggtggaagatggggacctgactcctgctgcacctggcatcttcgcagaggcctgcagcaatgccacctatgtggaggtgagaccctaaggcctgctgcaacccctgagaggtgccccacccctcccctatatgctgccagatcctgggctcatctgcacttcgtgttaaaggacccatttgagccaggtgtggtgacacacgcctttaatcccagcacttgggaggcagaggcaggcggatttctgagttcgaggccagcctggtctacagagtgagttctaggacagccagggctatacagagaaaccctgtctcgaaaaaccaaaaaaaaaaggacccatttggagactactttatacacatgatagcatatcactggggcttccatggcgtgggagtgggtcgtgcctgctgagctcctatgcaccctttgaaaccccagctccagcatccagctcgtgctgcacacatgtga

SEQ ID NO: 19031 - DNA, 1150 bp, Mus musculus
ggaggccgaggggttttctcctagggagatggcgccaacgcacgcgtgctcagatgaagatcgatggcgaatccgcttttgcacgcttgtagtgttagggacgccaattttgatgcagaagggaaaatggggtccgttagaggtcatgcttttggacagcatggcagatcagagatcttgaggagccgcaggaagacagagaccgacggcccgtccttttgttaccctcgtaaagagtcgcagatcttcatagtcaggactgactgaggcctggggttactggttctgatgtttctggaacacagagcttccttcttgtccgctgggatccctactgctgagccctgaccctgcccttcactgggaggttctaggcagtggttctaaccctgagccgcaccgacaacccctcacttgagcagtctgtctccccaacccccttactcttgctctctgtactaaaaactttaaccttccattgcctccgttctgatactcacatagtttgtcttgtatcctgtgtccctaggatcagctccaacagaaaatcatgtgtcctgggcctgtcacctgtctgaccacagcacctaatggcttgtatgtcctggcaggaattgcagagagcatctacctgtgggaggtgagaacagcttgtcacacgtatgtgtcacttgggaatgctagagagtaaaactggttggtgtccagttttacctgaggtaggcaggtggtcttggagatcttacccatgacttctgaaaacaaaaatgtggccatgtctatagggtcctcatttgtgactgagatacaggacagtgttcaacctgctggtggctctagtgctgtcgtgagcaaccaggaaagaaacttagaaaagggcagtgaccagaattagtacagaggaggaggaggcaggaaccagaagcagtgcagaggaggaggaaagcatttatttacacttgtggtttatatgagggaagtcagcgcaggaagcagaaagtcagttaacatccatagtcagcagcaaagagaaatgctcccgtgattgactacacttgttgctcttgcagaggacctgggttcaattcccagcacccacagaatggctcacagccatccataacttcagttctagagaacttgacacctc

SEQ ID NO: 19032 - DNA, 1335 bp, Mus musculus
tgggtccccacctgctgtggctggactgagagaccatctgcctgtacttcccccatccaagccagaacctcactagcccaggctggcttggaaggcagggtccccctgcagatctgcttcatctgtcccagcctccttactaagccttgctgtattccctcatttgtctgcctcagcttccccgcactgactggagaattcagcctttgtaaatactaggctgggtgaatgccaagcaagatctaagtccccagtctcctgagcagtggggcagcctgcaccaagcccccataaacttcctcgggcaacaggagtggggcagtgtagaccagtacagccccattccccatgggagggaagtggacgctgtgtggtccagccatcaagtacggaggaaccttgaggacaaaggccactgaagggttccatggcaggaaatgtctggaacagtattcggggggataattcacatttgtgagatgtgctttcccactccccaaaaaggccttgcatgaatttcctgtcattcagctggagtggaaggtcccacttggcccttctgttaggagtgatagtgaatcctgacaggcctgcagtccagctgtctcatgttcagtgagtggaatagagccggcacccaggactgtgtggtgacctactgaaagagtgccaggtgacagtatagacaaaaaggagatgtcagaggaaggggagctaaggctggcaacatctcagcttcaggaagagcaccctgaggatctctgaagtggttggtgacaatggcaactaggacagactagccccagactggaaccctaaaggaccccaagcctgatgtcctttggatccctggccaggtgcctagacagcctgccatcttgagccaagccatctcattaaaaaccagctcaaagtgcagtcatcttgctggcttttttatttgcttgatggatgtttttttggtttggttttttgctttgcagggagagtgaggttttggggggggagggggagctgaccaagtgtagattcattcatcagggctgagtgttccctgcaggcagctgcagtgcaggattttgggggaatgccacatcttccagagcgtctgtgaggacagacctcagaattcccagcaggagcctcctggctggggcagcctctgttccctgatcctacaggccacgtttgggataacaagtgaaccgggttctgagtcagttgagttgggggacctggacaactgggagctgtagaaggttccagaacaattatagagtgcctattgtaatgcaagtcctgagacccaggagggcagcgtctgcccttgtgctc

SEQ ID NO: 19033 - DNA, 1390 bp, Mus musculus
ggatagggaggggcctgtctggcagggtagcttctcccgcccccacaggttcttctacctctaccacttcgccttctatgcctaccactaccgctttaacgggcagtacagcagcctggccctggtcacctcctggctcttcatccaggtgaggcccgtgcccctttagaggacagcccctaccgtgctgtcccccggtgtctggtcagcctttctgctggtgggcgggtgctcatcctgacacctgacctccacagcattccatgatctacttcttccaccactatgagttgcccgccatcctgcagcagatccgaatccaggagatgctgcttcagacgccaccgctgggccccgggacccccacggcgctgcctgacgacctcaacaacaactctggctcccctgccactccggatcccagccctcccctcgcgctgggccccagctccagccccgcgcccactggcggggcatctgggcctggctcactgggcgctggggcctcagtatccggcagtgacctaggttgggtggccgagaccgccgccatcatctctgacgcatccttcctgtcggggctgagcgcctctctcctggagcggcggccaacagcccctagtaccccggacagctcacgacctgaccctggggtccctctggaggacgcacccgcccctgccgggtcctgagaccggtgtcgtgcccggctcccagtggagccgcggcccgagcccaagagagctgtggtctgcagggagaggggctggtggcgaaggttctggaagcggccgggacagggcggcgatgggcacgaggccatcggccgcctggtgctccccagtgccttccacacggcgcccgcacggggccgagcgcccgggcccggactagcaggtggtggctcacgatgcggggcacacgttccacgctatttaattgcagtgtacagagtcgtgtttgtatatagaataaactgtcgtggacagtgtggccgtgtagttcctcagctctcggcgggcgccgcatgcagcaggcgcagtggcctgagccgggtgccatccccaagctgggcccgcagttcccctcgccgcagcagcgcactacgcagccgctcccgtgcagcctcaatgcgcagctccagctcccgcagttctgcttgcaccccgggcccattggagcagagccacggatggtccccgccagcctccccaggttccagcaggaaacgcacgcgccgttcccgttccaccacggcccggcgcacccgcctccagcgccccgcaccgtcggctgcaggttgctcctccttggggccgctaggacggagaggaggaggcagtactgcctgtctgctcgctaagcctgggaccccgctctgccccgcccc

SEQ ID NO: 19034 - DNA, 1103 bp, Mus musculus
ggaccctcagccagctagttcccaaggaggcacaggcagccattgcttctcctgcctgggaggggtgtgtcccccgccctgctgactgctcaccccacccccctcacccctaggccctgtttgtgcttttcgtcctcgcctacatacacatcgtcttctcccggtcccccatcaactgcttagagcatgttcgagatcgatggccgcgggagggtgtcctgcgggtggaggtgcgccacaactcgagccgggcaccggtgatcctgcagttctgtgatgggggcctcggtggcctggagctggaacccgggggcctggagctggaggaggaggagctcacagtggagatgttcaccaacagctccatcaaggtgagcgcgttctgggcatgtgggcttgaggtcatccacccagtggaacatcatcaggctgcctcctgcaggctccactgacaccgtgctcccctgtgcctgcagtttgagctggacattgagcccaaggtgttcaagccacagagcggtgcagatgccctgaacgacagccaggacttcccttttcctgagacgccagcaaaaggtgtgcagcccaggcagggagggttctgaggccatgctgagcatgggaccagcccagctgaccactctgtccctgtctgcagtgtggccacaggatgagtacattgtggagtactcactggaatatggcttcctgcggctatcccaagccacacgccagcgtctgagcattcctgtcatggtggtcaccctaggtaaggcaggctgggcgctctggcaggctggggctgggccaaggatggctcagctgccgagggcttcctggcctctctgaccaatactgacccccattcactcgcagaccccacgcgggaccagtgctttggggaccgcttcagccgcctattgctggatgagttcctgggctatgatgacatcctcatgtccagtgtaaagggtctggcagagaacgaggagaacaaaggtgggcctggggagaaggggggtgaggaggggggtgggaagggcccccggctgctcacagtccccctcccctaggcttcttgaggaatgtggtctctggggagc

SEQ ID NO: 19035 - DNA, 1201 bp, Mus musculus
cagggcaaaaccctttcacagcagcagaggtcaccgggagggattggtctggtctgttacaagctggataatgcagcagggtcccagcaagggtagcgtggccacgggagggtgtcctgaagctgaaggtgaactgtgcaaggggcagtgtttgaaggagcagtgatgggactttgggcagagtgcaggggctgggtgttagttttttcaaagttgaagggtgtggcttagtagatgggttggggcaacaggcaaagtgccacgagacggtccttgtctagtgtgaactctatgggagtagagggtttgggcagcagacaggaggagggtctggtgggtgctatacaatgggtgtggtttgggatggagtgctataggggctggactgtgggagggacttgatgtgggcgtggctgtgggcgtggtctagcccttgacgagcacatctcctccaggccaccatctcctactaccagctgatgcacatgcagacagcaccgctgcccgtgaacttccagatgctgtgcgagagcagcaaactatatgacccgggccaacagtacgcatctcacgtgcgtcagctgcagagaggcgaggagccggacgtgcgctacgactttgagccttatgtctctaacaactcctggtaccttcaccctgtgcagccacatgcatctagtgggagtgtgggtggtagacctggggaggcctcttactgacccccaccactaggtccccaatcatgcgtacacggaagggcagcttcaaccctggtgatgcttcaggacccgaagctgctggtagtccccccgaggaaggtggcacctctgaggcagcacccaacaaggaccacaggggtgagcatatgcaagcacacagagtggatgctgcattctgatggccgttgctgttggggggcgggggcacactttcttcatctctctctcaccctgcagggggacgaggtcaccaggttcataagtcctggcccatctccatctcagacaccgaagttggtctggacaccagctcaggtgaagtggcacctgggtgcgtgtcacacaggggagccccaggcagggccagcctggctccagtgtttcacaactgttttctatttaggggacttgaagaagttcgatcgaacatcttccagtgggacgatgtcatccagtgaggagctgggggatcaggaagctgg

SEQ ID NO: 19036 - DNA, 1347 bp, Mus musculus
ggttgttcccctcctaggccctttgggaattattggatctccctggttcctccatctcctccctgtctctgaggccaagaccaccattgccataggccagtggtcccaaggccctgccaccaccactccctcgcctgcctgctcccacaggtcgtgaagatcatccgccccagtgagacggctggccgctacatcacctaccgcctggtgcagtagccgcaggtgagcccagcactgcccagatgagcctgctacttgtccttgacccggtagagggtcagagctgcacccacaaaaataaaatgtaacgggagggtaggcttgaatcctaatgcccaggggcaaaggcaggcagatgtctgtgagttccagaccagccagggctacatagtaagcctcagaaagcaagcaaacaaacaaacccaaaacaacccatactcttgccaggggaaacctagtgctcagagactgaagcaggaggattgctgcacatctgtggactccttctcggtgtgagtgtctccaggaaaacaatgaagaggaacccacagctgcaccgcatgcagggaaacccagagcccactgctctgcacagcaccctgacagctgtgggccacagcctgtgggtcataactggattgccttttgactgacgggttccgtcctggccattgtcgcaggatgagtgactccagagctgcagccacacccccactccttactccagggtcactgttctgttcagagttctccattctcgaaggactctcctgagaattaaaggatactttgataagttactgtggtgcaatcctagagagccttggctcagggtgcgttctgtccctcctggagctcccagttgctcctgcctgagcggccagggccttgccactcttgctctgtggagtggtttccgaagacacacttgagttaccacacagcagactccctgttgtggaactgtggagggacttgtaccatgcaattgccaggctcctgggccacacccagcccttcctatccactttgaggtttgagagagggcagtacaggggcttcctgagtgactggggtgacccttcagtccatgctctcctgcccatctctgtgctgaggtggtagagtcccatcctgtgctcagattggcctagaagctgagcctcctgcctccggctcacctatgctctaccccaaggtaccagctaacggcccaagtcccctcccttccttacacagctcagtagtgctggctatgttcatgaggtcctgcagcaatcaggacagcaattccaggacagtatgtcagccatgttagtgccgtcagccagccagccaaccctgcct

SEQ ID NO: 19037 - DNA, 1174 bp, Mus musculus
cagcagtaaaatcagtccagttctgccctatgcctcggctgcctgtcactcgagctccagcgaaccagaggccctctgctgcatgcatatgtgcagatgacactgcagagatacacatacgggtttagaaatgtagttttaaaaagacagactggggctggtgagatggctcagcagttaagagaagtggctgctcttctagaggttctgagttcaagtcccagcaaccacattgtagctcataactatcttaatgggatctaatgccctcttctagtgtgcagatagatcactcatacataaaataaataaataaatctttaaaaaacaaatccacaatccctgggtagctatgcacagcaggacacaaagtaccccagaccagagggttacctgacatccacccacaggacatctgacctccaggcttttggttcctctgctcagtgatagggtagtcacctcgtatggggtgtatcagagaagagactccctctgtgtagcccctgacctcctcctctgtcctcagacctggcccctggcatcaacgagatacatgaagaaagccagcaggtgttcctggcacctgggcacccacaggatgggcaagtggtcttctacaaggtgagcagggattcaccgagcaccagccctagctccagcccccaaacctgctaatacccccacttgccacagcagattagcgtggaccgcggtatgaagtgggaagaggcattaactaggtcgctggagctcaaaggtccctatgatggcttctacctctcctacaaggtgagttgtcccactcctggtggcggttccctgccagccacctaccgggagatcccgatggcccttgacctcaccactctggctcctaggtacgaggcagcaaaatgagctgcctcctggcagaacagaatcgcggcgagtatttcaccgtgtacaagccaaacatcggcagacagagccagctggagaccctggacagcctgtgccggaagtttcaccgggtagggaaggccccaccctctcatggcgtctggggatgcacagggagcttctgagcctcttccctgctaacttactgtgtccccaggtcactgtggaagaggcccgggaaccctgggagagcagctatgccctgtccttggagcactgcagtcacaccacc

SEQ ID NO: 19038 - DNA, 1178 bp, Mus musculus
agagggtccatgtcgtgttacaaatgaatggttgggagcaaccagaatgttctgggttgggccagtgagggctctgcgtgtatcccaagtacagtgaattgtggtatctgagtccctgtgtactggtcaggggtgttcatgtctaagcctggctagaggccagctaaagaaacctgttgctgtcacctgggcacaggcatcctggagtccagggagatggccttttggattctgaagcttggccttctgagccccaggtagaggttgggtactcagggatgccactaggggtgttccggagttgacatttttactctggctctgtgggaacctggtagcactcagcattgggggctgggtgtgatgtcctgttttgctcactttagatagtcaggggctgccacccccaaaccccagtcctgggcttctcctgaaaaaccagcctgtctggatacccagagccacattcctttctcctgccccctcctgccatgcctgggcctctccaatgtgccccgcccacctgcttcctccccccccccgccccccgcccccgaagggcggggctggggaaagtgccgcagagaagctgtgggactccagacactccagcatctgacactgtgtccttggacccctgctgatcattcaagagtctcctttggggaccagtggctggcctgtagtgtcgggggtctgaggtgtggcctagagagtcattagaataattggccctgtggacatgctgacttccatggtcaagactgactgtctctctcaggttttggtaagagtcccaggtgaggggctatagctctagggacagagcacttgccaggcgtgcatgtagaaagccctgggttccattccacagccatataaaccttgtgttgtggggtggttcacactgtcaccccagcactctggagttctgctacagaatgaatgagtccagagtcaaaaccacagtgggtgtgtctgagtggccatagtgtccctgaggtcttctctctctttcacttacaggcagaccccaatttaggccacactgtctgccctgcaggctgtggaaatgggtatagcaggagtcagtcctctggagtcaaggtctatccattgacagcattgctgaggtgaggcttccaccaaccaccagcctagagcctcccctataggcc

SEQ ID NO: 19039 - DNA, 1130 bp, Mus musculus
tcgtgtccgcgacttgcgggtgtcccggtgtcccgcgtccgggtggagtctgcgccccgagaagtcgtagaactaaggggccgcgcgcggcttcggcgcgggccggacatggacggcgcggaccggcctcgacgcggccgcctgggcccctgagcgcggggcccaagtggcgaacatgacctagcggcccgcgcgccgcgacggcggaccgtcgcctccgtcggaagcagcgtccccggggacccgaattggggggacgcgagggttgggggggctcattgcttttttttttttcattcttattttcattttttttctccctgagcacctagaagaaaaggggaaaatcaaaagtgaagaattggcgcccaggaagcggacgtggacccggttgtggggaccgggagagttgtggaggtcgttcctgtttttccccgttccttttttccccttcttggaacatttggaagaagcgggtgggggggggggaattcgaacttgaaaagaattggcgctcccgaaggggacgaggacaaagagtgggccaggatggacgtggcggaccccgagccgttgggccttttctccgagggcgagctgatgtcggtgggcatggacaccttcatccaccgcatcgactccaccgaggtaatctaccagccgcgccgcaaacgcgccaagctcatcggcaagtacctgatgggggacctgctcggggagggctcgtacggcaaggtgaaggaggtgctggactccgagaccttatgccgcagggcggtcaagatcctcaagaagaaaaagctgcgcaggatccccaatggagaggccaacgtcaagaagtaggtgccaagggcctggggccgacgcgggcgctgccttgagctccttgggcagcccttcctcctactttctggctcttctctttcctctaaccgttttctcttctcatttccttcctcctttttcatctctttccttttactgccttatctaccccatctatccctgagcgtcacctcgtggggtctgtatgttagggcagcctgcaggactgtcctagcaggaggtcgtgcagccaactgcgcctccagcccccctctttgggccaggtcctggcgcaagtcgcgcct

SEQ ID NO: 19040 - DNA, 1104 bp, Mus musculus
ctgggcactgctttgagtggtacgtacaggaaaggaaggtggacagatatccaggatcagatgtgtggacccaggggtggagcagggcaggctggtggcctaggctcctctcaggacctccttggccttttttgtaggagtggtcttaggtcagtcttgcactggggaacctgggcacccagcatcaggtgttccttcagaggcctgagcttggaaattcctggcttgaaatcattgtctcaaggtggaggtgccagaggttgctcacctccaggtggtgtctgctggtctccaaggcaagtggcttcctttggcttcagggtaatggttcttggaagcccaccatgtctgggaggctgcccaggcctgcatcctggcttgggtcagctgcagtccttgtaacacatggcaagcctgtgtgctctctctgcctgtgacagagggccccagagctctgtctgcgacttcctagccctcacctgctgctttaggcttcctgccatctcaacacccaggttggggtgtggcttgcagagccaggcaggttcagctgagagagattggtccctagatcctgaagtaaacccccccccccatgaattagtgatgctggacacagtcaacactggaggtcatcaggactggggagctcctacacactagggtgatataaggagcctgcacggttcctcaagacaggagttggtctgggcaagtagacacatgcctctcattgcagtgctggagagactgaggaaggaggattgcttctgtttctagaccagctaggagtgcatgggaaaacctggttttataagggaaactggttggtagggtgaaggccccaggacccacaaggtgaaagcagactcagttctcacaagtttgctctgacttccatgtgtatgctgtggcacatgtatatacacacacaagataaaaaccaggaggagaaactgaggcaaaagctgcagactgacacactgccctgcagtaaggtgcttgactggcaggatacaaagccaggtatctccatgggagtgctggtgttccccacttcctgagtggctcctgcagggcaaagcctagggctgctgcacctgc

SEQ ID NO: 19041 - DNA, 1599 bp, Mus musculus
ggagctcttgatattggggtgctgggccattgcctgggtatcagacctgagctaagggaagcttctgggataggccactggccccatcaacttgtcacacagtggctctcgtgtgggaccagcgccttcctcgatggtatcgtggtggctgttgccagtctcagggctgaccttcagctcatcggggcagtccagggttgtgaggtggggcagtgcttgggagaagccccgtggccctcttagcctagcccgaggcacgttaggtgctggacttgtgccgcctcccatggggctttgcttgtcctggtggtccttctccactatggcctgaaaccaccacagcccagatgactgtccactccctgggattgagccaggtgtcacaggcaaacaggaggctccaccagagatgagcatgtgtgccatgactagatgtaggcttctcacagcaggcagggtcagctaagcaatgtcctctgttgcagggagatccagctgctgcggcggctgcggcatcggaatgtgatccagcttgtggacgtgctgtacaatgaggagaagcagaagatatatcctgtgggtggagtgggctggggtggcccctgtgttaggggctggaagccttctgcaaggcctctggcagcaatagtgctacatgtcatcctgtggtgcctgtcagctcatcaggcaggggagcaaggcatggggcttccacctggtgccagcctgttctgagcagtgtggctgggactgggcatggcctcacagggacttggggcctatgtacattgacagggccccggctggttctagaggtttccatgctgccccttcccagaggtagaggttgcacagcctacgttgcatctgggcagtcctgggagcattctgagaacccagtgccctgcagccccaactcctggtacccatctctccctgtggctagtacaccagctgatttcagtcctgttgtaatctatgctgactccatgtggtccaagtcactgtggtggtcttgtggaccctgtgagtactgatagggagcgcagaatggcgggagagcagagtggtggtggtctgttggcccagcggggccctccagaccactgttgctaggagcagggctcctgggcttggtgtgctgctttccttagcgccctacgtatatggtgatggagtactgcgtatgtggcatgcaggagatgctggacagtgtgccggagaagcgcttccctgtgtgccaagctcatgggtgagtgccctgctgggtgcaggaggagcagccattgtcaggaaacccaggtgtttctgggcccccagtttttaacccagccaatgtgcttagggttaccctcttgttaggccctgtggtcccgctgccctgcagagccatagtgggtctgagtcctgttcagtgctcccaggttcagcagaatcacatcccctggttagcagagaacaaagggaagggaagggaaggaagcaagccagaggggaaacctggctccctgggcctgggcagcagtgactgccagttgccctgtgtaattttagtggcccagccttctgactctcaggtctgtttgcctgagccctaaa

SEQ ID NO: 19042 - DNA, 1200 bp, Mus musculus
tccaggagcgtgggcagtgggctgtgtgctgggttccacagccgcattgccaagcactggactgtggagttacatgtagacactgacctctggagcctgggaagcttcaggagaggccatcttttgtcccactgcgagggcaggccaacagagcaagctggtctgcagccctcagctggatgatctccttcccggtgctcatcgcagctagtagctcccaggccgaatgcttcatctccttgtgcctgtactgagggtctagagcctctcccttggagagctctgtgagctggtgctgggctgcccaggctagacaggcaggtgagcgtgggcatgctgcaggagggccagggcatagcactgtgaaggcagtgggcctgcttgcctttggagctactgaggggtgggtggcaccagaggctagagcacctccgaccagcctctgtcacagttggggctggctgggccctggggctttgagctacctgccccttggctcaagctatgcttgccatcttcccgtaggacaggtcctggaagaggaagtgggtcagaatggacagagccacagtttgcccaaggctgtttgtgtgaatggcacagagccccagctcagcagcaaggtgaagccagaaggccgacctggcaccgccaaccctgcgcgcaaggtgtgctccagcaacaagatccgccggctctcggcctgcaagcagcagtgactgaggcctacaggtgggcatgggcctgggtccagccatccctggtgttcacagtgggtgtctgctgggctcctagctccttcccgtagggcagtgctgcaagggggaaggtctggtggttgaggtggtactaagtgaccacccattctaccaacagtgtgtcatcaggatctctgggcaggtgtccctgcaaggctgggttttccaggcctgcctgtccactcacttcgggacgttggagccgagggcggacctgctgccccagaagcactttatgtcgagaccactggccggccttgcctgcatgccgccctgcgagcctcgctgtctttgggttggtttctttttttttaataaaacaggtggatttgagctatggctatgagggtgtttggaaatatggagcaggcggggcacagggtggcctgcagagaaaacccagagcaaacaaatatgcagagacatttatgattaaccagac

SEQ ID NO: 19043 - DNA, 1173 bp, Mus musculus
agcatcgaggggcgcggagcaggcgacgaagtttcagaacttcctgctccagcccgcagtcctccccgcagcccgcgagcctggccacgcaggccgcgccgcgattacagcatcgacgagaagacggacgctcttttccatgagttcctgcgccatgaccctcattttgacgatgcaccgcgtcaccgcacacgtgcacatcctcacactcatgcgcggaagcaatggcaacagagaggacggcagcacagcgaccccggtggtgcacgtgcagccacgccccctggagtggcccgccctacacgtgcgccattacgccgtggggacagcgttgattgtcctcctgaaggccgtgcgctgcccatcacgggtgatgacccatccattcctgtcatcgaggaggagcctggcggtggaggcggtggttgcccaggctctgggttgtgcgttgagcccgccggggccctgctagacaagctagcagccagcctcgacgagagactcttctctccccgtcttgctgagccagttgcctcatcccaggtgctgattgtcgctgctgctgcccctacatcccctgaccacagcccggcctaagctctgtactggacctgcctctctgctgcttctccggcagcacatggggctgctgtgggaatggtggcaacagcgggagcaacctgaggtggccgtgcatgggtacacggcccccaaatcccaagtgtgcacatatagtgtcccctgggcacttagcgcagtggcctccggaagcaagaggctccaggacccaggctcaactgcagggaggatgacgagactggactctccggtccatatatggttgaccccagcacccagcctctggccacagatgctggtggagcaggttctgaggtgcatgtgcagcctccctccaggatcagctgaccctccactcgtgagcactggcaggcagtaacactgcctgccactgtgtgagcgaacctactggaggtgaagtgactgtggggcactgaggatcagagaggagctcgccgccccatattctgagttgatttaccctgtccatggtatgcgctctacctttcctctctgagcaataaccgaccgcgcctgctctctgcatgtgcacaggctccccgtctcattcctccccgagagccttgggctttg

SEQ ID NO: 19044 - DNA, 1636 bp, Mus musculus
ccttttcggtttgctttctgattttaaagcagtgtttccttagccatgctgactttgaatttctgatcctccacctcctgggtgataggggtgacaggtttatgttggcatacccagtttctgccttgctgagggttgaacccaggatcttgcacatgccaggcaaacacagtacccaccgagcctcagtcctggctcctcttttacacttagtttgagggaagacctctctgtgttgtcttgagtggctttgaactggcagtcccctacctcagcctccccagggggctaggcgacaggtgtgcaccgggcctggccatcctttgccaccatccacatgcttggcctgtgccccagtcttgcagggtcactctgcaagtggcctagagtgggcattggcctggggaggcagagggctggtggccctgagcacacatgggcggtgaggctgcccaaggaggctgctcagaccctctcctccacagtgagcagcggctccgtcactgtgaatgccgactcctctgtgcagttactagctgaagaagctgtgacactggacatgctggacctgggggtgagcagtggatgggaaactaaggcagggcagggcagggcaagtgctgctcacaggagtgtgctttcctgcttccggccctgcctgtccctcacactggcccactcctctgcaggcagcccgggccaacctggagaaggcgcagtcagaactgtcaggtgcggcggacgaggcagcacgggctgagatccagatccgtattgaggccaatgaagccctagtgaaggccctggagtaggtggtacctactgtctgacacccacggggaaactgagccaggtccaggccgatgagaagttcccagtgggctgaagtggccaccaggggtcagcagtgctccagttgctgggcttaaagcttcctggtgcctgtctgccaggtcatggaggattccccaatctggcatccccacgatgcctctggagagatggccttgattgcccctcaaagccacctgaaccgtcgtcaacttacccagcctgtctccattaaacaccaggaaccaactgagtgttctgtttctaactgcacagcacaaagctagggctctcttcaaccctgcctggggttcctgtgtctggctgggcccccagaggcaatcggcgactctgggtaggaaacatggtggctggttgttggggtgctgcctgctggaatgggtgggatgggcaagcgttgagggcagggcatgaagtaatgggtgtgactagtgctgctggccaggcaaagcgccctgaccaccagccaggcccccctgtcccaccccacaggctctgggaagaatcgggaaccacctgctcccacagaggctccgccctaggcacacccaacctgtgggtggccctagcctggctggctgccttcccagtcccagttggcacctccttaggcacttaggcccctagctgcccctgggtggggtggggaggcctggtagggggtggccttggcaccaccccatacctttgtacaaccacccctccccttcccaccccacccccatggccaggtattatgctggcttgccctccttttatataacccacttcagcagcctgagta

SEQ ID NO: 19045 - DNA, 1117 bp, Mus musculus
cccagatcttgcgagcggcggctgcggctgttgctaagggaagggacgcgcggggtagcacgacccgagagggatccaggcaccgtgcgaaccaggatagcttgccccgtttctctaggaccctccccgtgccgtacccaggtcgctgtcatccgcccttgaaaacggatcacagaccccaccccggggcgcaacccaaggatcccacacgaccccggagcaccactcggattcttgattgccggctcaattcctaacgttgggaccttccccaaggggcgcacgcactgctcctgtccctgggcgcccgcggagcggaggaggaccttgtttcggcgggggagtcccggctaggattggaggcgacccgcaggcccccagttctccagcgcgcgccggggatggagccgcagcccggcggtgcccggagctgccggcgcggggcccccggcggcgcctgcgagctgaacacggccacggagtcggccgcacccatgagcctggcgatccacagcactacggggacccgctacgacctgtcggtgccccacgacgagaccgtggaagggctgcgcaaaaggttgtcccaacgcctcaaagtacccaaggaacgcctggcgctgcttcacaaagacacgtaggtagagcgccgcccccgcctgcgcgccccctggcaccgggccgccccctcgggcccgggccccgggcgggaacaaagagcgcgccgcgcggggaagcaggggcagccagacgggggggggggggggggatcgggggcgcgccgcgcgctctcgggcgccctctgcttggccttacttgcttgggccccttcccccgccggggtctgcacaaaggcaggagcaccctgcggggccccagggtgcacgggaaatacagggatgacaggggagttgtgggcccccgggatggcacaaggaggggtccgttcgctgtgtgcctggggaggggtgcacagccaccccctctcatgccggcggtctcgccgcttccgcatctgcttggcggccccctctgcgtctggctgtctccccatcacttgcgtctctctacccccctttgttctcggttccccacacctcctcctcacctggtattt

SEQ ID NO: 19046 - DNA, 2081 bp, Mus musculus
ctggggggcacgaggtcacctccgatgccacttaccagcctttctgattcttttttagctccccgattgtctaccccgcatccctggtcacatgcccactctattcccttaccatggtcacggcctctgcaacagggcccttccctcccacctctccagctccaaatatgtagcagtctgttcccggatggcccagacggaggaagccacccaccccagcccttccgctctgcctagctctccccacccccttccataacccaattcaggtttttaactcaatgtagattctccaagcactttacagatgagggttggggaccccaggatgagtcccacccccacccccaccccagtctgcagacttggccactgttccaggccagctggatcccctgcccctcccaccccggaaagctgatagactcacagaggatacctttgtccacgaagcccacttaactcacagccttcctcctgcctcagtctcccaagtgctacaatgacgggcctttgccactatgcttggctggccttgctcttgccacaaaagctcgttggatggaaaaagctgaagcaagtggctgttctctgatcaggcgggggatgcctcttttcctcgcgaggcggccatcctctctggacactggcctcgccgtctctttcctccctccacacacccacttatttccttaaccttctttcccaatggagcttgggggactatttatagatttcatttttctcactgagccagtgatggttgctatcctctaggaaaaaaaaagaaactggggtaggttgtaggaggggggcccagaaagacacccctgtacctcttctccaggcccagcctgccactggggatgggaagaggggttctggactgtgcctgcattaactccacgctggggagggcgcgctgctggtccacattggctccatgggggagccctccccttgagttggggctgatatagcaggagtgaatcttgtgggggagtttttttcctccacattttgagattttgtgataaatgggatgtgtgcccacccctgacatctgtccatgttgtctagactccacctgtccacggttcctttgttctaggctgtgaacccgtccttgtctcttcccccactgtgtgtttaaaccttaatggtttgggatgtgaacgtgtgttggctagctgtaaaggttttttggggtgggtgggtgggaaggggatcctgaacggtagaggccaagcgagaattcggtttggtttttttttttttcctatttttttttccaaaaagaaaagggaggggggtgtgagtgggtgcattttttaaagctgtcttgaatacctatttaaatgtgtgttttggggtgttttttttagggttttttttttaagctgcctgtgatatgtccactgggctgagattggaggcctcaggcaggagcccacccatagttctcttccctatgacgacttccccagatagcattagccaccctggggggcagggggggaagaatccggctgtggggtatccacctcgcccaagtctccttttactgaaataaaatttgaggggaagagaaaaaacttacacgagcaccgaatttcaaataaacgaaaatgagacatgacctcttgcccctggctgttcctttaggagttcccaagccccttgtctggtgagtagtgagccctagttcctgcaaatggtttcccaagcagctcccccagcttgggaccggcaggaagctgcttagggtggaggggggggggggcctggccacttcctgctaccgaggaccaggacggaagtacctttgggcgtggggccggggcttgccctgggcgacgctttcaccctcagttcctggctctgaagtgggctgaagacgggaacttgggagtcagtactggggcaaggcttcccagctcccaggagtgggaggtgttgctccagcccagaaactgggaagtgcctgtgagagtcgcacgccaggcaaagggagtcagcactgtgacttgaggttctcagggagctagacctcaccagcctcttgtgacctgcctctcctc

SEQ ID NO: 19047 - DNA, 1212 bp, Mus musculus
ggatgaggtgaagccatctctgtccttcctggaataccggagatccaggggcctccagctgctcctttcttctgtgtcctgttatttgggtcccagatggagcccaccgcggacttgccttgcattcctcaggccaggcaagcctgagccagaaagggcgcacggtgccagcccctctcggggactctgggggtgccatcccccactcttcttccagccactctcgggccccactcccacatcatctcagaaacccttcagccctcgcaactcgcccctccgggcccccccaccaggcacaaccatccccggggccagccgggacgttgtcggtttatttctgtaaatagaaaccagcaagtgtatactgtgatttattttaatgtattcttaaggacagaatggaaattctttaaaaaaaattttttttccgaccttcaattcaaggggtcatttattttggtggggggagtggggtggactttttaggatagaagcaacactttgcaataaactcatttttttttgttccgttggagccctcccccttgatcatgtgacctagtaatgtttataacaaaaaaaattaaaaaaaaaaaaagaagaaggaaaaaaaatacaggactggaaaggaaggggagctacctaccaaaaatacagcaggcaaaggactgagtgaagctggccacaccacacgtttatacggatttcggatttctacccacgtttcctcactctgttttctatatattctatataaatatatattgtggatggccgccatggcgagtggtggctggggcttttctaggggcgggggacgggtggcccggccccctcatcacaatcagctttgaagtctgtatttttttataataaaatggacaaactgttaagcgtgggcctctctgttacaggtgtgctagatttccgacagagttgggggttccggggagtcccctggctgcggacagggtccgctgcttcctgtctgctctcacggttacttactgggagggtccaccttgatggcgggcctgtcggcctgtcacccgcggctgggtggcacatggcggctgaggctattcaggccagcggtagcgagcaccggcaaacaaaagacagcgcggtgggaggtgagactgacaccgatgtcgcccctggtctttgtgcccgcgctcccacaggcgaatacacaataaataaacattg

SEQ ID NO: 19048 - DNA, 1146 bp, Mus musculus
ggccaagggtgcagagagccacctgcgggctatcttgcacagccgcaagccctcacgctggctgaagacgttcctgagctccagtcagtgcgtgacttgcatggagacatacctggaggatgaggcgcagctggatgaggtggtggagtacctgcagggcgtctgcagagacatggacggccaggtgcctgagcgcggcagtggagaccgcattcgcttcatcttggatgtgctgctgcccgaggtgggtgccccacatcctcatgctcagcaccagcagggcctggacagtctccctgctgaggcttccaggaagaagctgccagcctgtgcctgtctgtccccgtgttgctgtgggtgggacatgctcacatgaatcggaaaaggaaacagtggtacgctgtgtgctcatggtgtctcgggctggcctgaaactgggcacgctctcgtctcagactcctaaggacttgggacagttctcaccaccacacctgacccctcaagtcactgtaactactactgtgtgtaactttaaaactgggtggttttcgccgggcgtggtggcgcatgcctttaatcccaggactctggaggcagaggcaggcggatttctgagtttgaggccagcctggtctacaaagtgagttccaggacagccagggctaaacagagaaaccctgtctcgaaaaaaacaaaacaaaaacaaaacaaaaaaaaaaaaaaactgggtggttttgaccatgaccagctcctaacactggaaatggagcccaaggcctcatacatgtcaggttagctttttgttcactgagccatggcctgaccctcattcttccgcaggcaatcatctgtgccatttccgcggtggaggcggtggattacaagacagccgagcagaagtacattcgtggccccacacttagctaccggtaggtcctcacatggccgtgtgctgtgctgtgtcccctgttgtgacaggactgccaagcccctgtccacaggtagtacaagtgctgtgtgtcagtgcgcaggtgtggtagggtcagctgggccttctttccagacaagggctggacaaaggcccaggtctgtaggctgtgttctgctatgggctaggctggctgcaagccaggaggaccctagggc

SEQ ID NO: 19049 - DNA, 1208 bp, Mus musculus
tcaatgcgtgctcatgtctaggacacagttgctgggcagctgtgcctggttcccgtgcctggatgtgacaacccctgtctgacaattgtccattgacaggcatgcccctggacctgccttagtctcctgggcagtgcctaaggctctggtgggtaccctactggagcctgaagctgctaggacaaggtgcccactgcggagaccagacataggtgcatccatgaggagcgtaagcacccgtggacagagaacattgagggaggcaagtcagtcccaggagattcctgagggacagttgagccaatccaaggacatcaagaggggttattcatgatggccagagcagcagctaggcctgggtgctacctagagtcctaggcctagggcaacctctggcatcaggtgcctgccaagcactcagtgtcactgtgcccacgaggtggagagacaatgcctgcacagggctgactgtctgtgttctgccagagctccctgtggcctatgaccttcggcctggcgtgctgtgccgtggagatgatgcacatggctgcgccgcgctatgacatggaccgcttcggtgtggtgttccgtgccagtccgcgccaggctgatgtgatgattgtagctggcacgcttaccaacaagatggcccccgcgctccgaaaggtacatctgggccccttggccccttctactgccttgccacctgcagttatctgacctgtgtgtcttgtaggtgtacgaccagatgcccgaaccccgctatgtggtgtccatggggaggtgagtgtgtgctcagacgcctaggggtgcagggcccacccccagctggcaccttcctcccagctctgctctgtagacaggaaaagctccaggcagcccaaggctcctcctccgtgctctcctctccctctcctcagtctttctcttcagctgcagtaacttgttcatcctatagtaaatgcatgcatggagcctgagtccctgggttcctgtgcctgccaggcgaatgcgcacatcctcgacccaacagcttgggtcttttcttgcagtggaggctgtaggggagacccctttaaatcctggtacccacacaggggcccacaactgcctgtgacactagctccagacaatccaatctttaaaaaacaaaacaaaactgggtgtggtgaccaactctgaggccaaggcagtctgatctcggagtt

SEQ ID NO: 19050 - DNA, 2088 bp, Mus musculus
atggcagagggcaacttagagttggttccgctgctgggatgtgtactgcagagccagtacctgtagccactgagccgtccttccagcccaggagtgcaggctttctgttggcttgagactggctggctcttagtgacctctgcagcagtcctgagtggtaagcacaggcccacaggtaccgccctgaccacagaccttccattcctgtggtccaaggcaacgtgcagtgcccgaggaaggctgcaggcccggcctcctggagtccccagagcagccatgcagtttcaggacatggtctggtttcagctgactcagaagccttatgagctggagtagcagtgggtggggatggggggtgggggcaggtggatctggagttgaaggtcagcctgggctacatggtgagaccatctcagaaagcagtacaaagccacagaaaagggttgtgtggtagccagcctgtggggggtgatccctcagaagtcactgacccctttccttcttgacagcagaaaggacccaggagcgacagcagcaaatccaacaagatctttgtcgggggcattccccacaactgcggggagacggagctcagggagtacttcaagaagtttggagtggtgagctctgcgggctgtcatggccgccctgtctcctgcttctccacatcagtgttgcctggggttttaaggagggggggtcagtggacagtgaggcgcttcccatgcctaggaggcatgcacgctacgctgccttatggtggccagggcctctgagccctgtgccacctggacacctgggtttatgcccacagaggattccgctataggagagcagctggcctggtgctgaggtgtgtgcactgtctcacctggtgccttccagagcgtggaaccctttgctccatgtggggatttgagtagctaggtggggcagacaagataagacgggcttaaactgctaggtagtgcactgggcagcatcctcatgaccctgggtagtgtgtgtccatcagacttcatcccacctggggcatgcagcccccacagttgctggtctgccttagcaaagttctcccttagctggtccctggggaccttatggagtgggctgagtgggtctgtggcatctacccccacaaagcctgcctcaatcacactctgtccacaggtcacagaggtggttatgatctatgatgcggagaagcagcggcctcgaggtaagggctaagcctgttcatcctgacccatgtcctcccctcagatggcaaactatctcaccctagacaggccatggtcagatgctgcacagccacttccactgggccacatacttgacacagtctctgacctccactcacatcacatgctctgctcctctcccatcaggacattctgaccccttcacatgaagatgaacacagctttttgtctgtaaaggtcctccaaagcacaggtgccttgcctcatccagctgtcccagtctgccatgctgactgccccagcctcattccacccaccgccctagctgcccacgcccatgctgaccgtcccaggagcggcgggagacagctgtgctctccggcccttttcctggctgttggttaccctcatttttggttcagcatcctttttggaccacagtgctccacgccacagtccctcacctcacacaaccctcccttcacaccctgcgtccctcaacacacacaaccttcatgcacgtgtccctgtcaccgatggccactcaggtctcgtggtgcgccaccactcaggagcatagtttgccatttgagcctcctcactcgtccagggcgcactgctcactcgtgtgcttagctgttaagtcttagtcttaatttacggtagacatacatgcttaatgacgtacgtagtgtcatagaatacggtaccgttaagtaagctgtcttctctcttctgtgattgtctgtgattaacgatgtctctctagatctctctccaggtgctaagttaagtcacacaggtacaggcccgcccgcagtcagaggacggagcggctttgctcccgtggggtgtaaacgaagtttcagtgtgtttgtcccgctgc

SEQ ID NO: 19051 - DNA, 2183 bp, Mus musculus
tgcttgagaccttgtacatgagagaggcagaaacacagagacagagaagacaaagaaaaccagggacagagagacagacacactaacaaaaaccccaaagggagccacgcccctccggagggtagcggcgcttttgctctggcctccggacagcggggggcaatggcgagtatccgcagagcggaagctgttgagcggtggaggcgggccctcccggcagagctcgcgataactgcgcaagcgcagcccgtacttccttttccgagtaaccgccaagatggtgagtattcgtgcacggcggtctgtgctcccgggtatccgtcgccatcctcccggggccctttcgcaagactctggactcgctgcctggggatgtagcgatgtgctcgggtgcccggagactgcggatggcgggtgcggaagggcccggatggctgcgggcggccgcggggctgtgtgtcccctcgcccgtccgccgtagcttagaggagcgcggctcgcgcagctcaggtccctgggctcccgggtaaggttgccgagcccctgctaaccccgactcgcgctcacgcaggccgaagtggagcagaagaagaagcgcaccttccgcaagttcacctaccgtggcgtagacctcgaccaactgctcgacatgtcctagtaagaggccccgtcaccttagtcccgccgggtcgctggcccgtttgtacattttccttttctgtgggtggtgctggaaatagagccagaacctttgcacatgtcacatgggagaggcaaggaagggtctcgagtgccgggcaatggtggcgcacgacttaatcccagcacttgggaggcagaggcaggggaattctgagttcgaggccagcctggtctgcagagcgagttccaggacagccagggctacacagagaaactcttgagtcggaaaaaaaaaaagggacccgtgtagcccaggctctcctcgaactcctgatcctctcaacctccctaatgtttgggtcaccatcacggtgcagagcatcaaactcggggcgtcctagcctcctaggcaagcgctctagattgtgacctcaactcggcccctgctacagttgtgcagtgttcgacagtcttatgtagacagaactaccttgcctcagtctcccgctgactgggctcacaggcctccctgtgaccttggggaaaatcaaccacggataggtaatttgtctgggtgggctgtcaaaggaaaaggtttgatctcggcttacgtcactgcctgtggaagctggtggattcattttagagggttgtgccctgaaggttgacggcagtgctatggaggacttgtctttagtgagctcccggcatgttcctttctgggtgtgaaagaaatggagcagtgctggcgcagcatgctgtccccgggtctccaaaccacccccttctcccacagtgagcaactgatgcagctgtacagcgcccgccagaggaggcgcctgaaccgtggtcttcggcggaagcaacactcactgctcaagcgcttgagaaaggccaaaaaggaggcaccacccatggagaagcctgaggtggtgaagacgcacctgagggacatgatcatcctgccggagatggtgggtagcatggtgggcgtgtacaacggcaagaccttcaaccaggtggagatcaaagtgagttgtggtccgggagtggctgggtgggtggcttttctctgtgccaaagctgctcacaccactctgcttcctcctctcaacctgcagccagagatgatcggccactacctgggcgagttctccatcacctacaaacccgtgaagcacggccggcccgggatcggtgccacccactcctcccgattcatccccctcaagtagccgaggccaataaagactggttttggtccctggattctgggtttttgttttttttctggggattgggttggtccctgtgtgtggaacctggagccttttgggtggctgtcacagtccaccagaatgaaggtgaacagttacatgtaaggggctcacgtccatgtccacgtcatctctgctgcagtctccgctttcaagctgcccagcatgcacggcagagctgagcatcaggaagggcaaggggctgctccctgggtttgggtcttgggggggggaactgcagtgacagtggacacacaaggggac

SEQ ID NO: 19052 - DNA, 1255 bp, Mus musculus
ggtcacccaaggtgacagagaagctgtgtggagtttctgaaaggggctgtggtgatgcgcttgtggactggtccctgtgtgccctgtcagagtgtgttctcctaggaagcaggaggagctggtacagcaggtacggaagcgcctggaggaggcactgatggccgacatgctagctcatgtggaggagcttgcccgagacggggaggcaccactggacaaggcctgtgcagaggaggaagaggaggaggaagaggaggaggaagagccggagccagagcgagtgtagcacaggtgctgcaggccagggtgggatgtcagcccatcccctagccgggctgctaacagcttcccttcctgcctattgcaggtgccctgcccaagtctgggctgcagactgccttcagccttgcctggaccaggtaggggccagacctgtaggaggcagccgtccacctcctttccaaagcctcctgcttccaggtctcagtgcagggagcccctgtggaccttgaactcacttgtccctgcgctgcctggcaggaagccccacactgaaagcagatgagcagtgacccaactgagaggccacctggacacagtcacctccctgcctccttatcataggacaaggccttgcttggcaccgaggagctgggagccgtgttgggtgctggaggaagtttctggaaacacacctggctatgcccaccttatgtccctaaggctattacaggccagggtctggactgctccggcccacagggctgcccagcctccccacactgagggtcagcagcccaccaggaagtcactttccttcaataaactgatggtaggaacttgtgaactctgacttgtcactgtgtgccacacctctgagggtgtctgctgcccgggcccatggaaacctgctttgggccttagtgtccctgtgtggcagggacacaggctccaactttgagagagcagttggcagcctctctgtgcttggtgcctagatcttggacacctgaactgtgcccctgcagtcggagcctccaagaaactgacgggtgagctggggtgtgtagcccagtgagcgagtcagtctgtggatacaccccagtgactgagctcggccaccctaaatcagatcagggtcttgttccccagcctagacagcactcagggctggagtggtgccttttgtcctcatcccaaaaggaccacccagctaccctgtcacatggacttatatggggcagcctcctgcagt

SEQ ID NO: 19053 - DNA, 1205 bp, Mus musculus
cggccttgtccctaaagtgctgggactataagtatatatagccatgcttagctttgatgtactactggagatttgaactcagttcctggtcctttcacagcaggctcttactggccatctctctagcttgtccactttgtgttttaaggttcatgtttgtgtgtgtgtttgggggctgtacctgcagtgctcacagaggccacaagggggcatctgacctgaagtctggtggttatgagctgctgtgtgtggttgctgggaactggacccaggtcacctctccagatccatccatacaggtctcttgttgaactggagctcctggattaggtagactggccagtgagcctcctgactttttgcatgtctgctggggggtggatggaactcatttcctacctacttattgctcctccaaccctctcactccatcttatagacaagggccttgtagtgtgacactgctggcatcactcccagagctcagaggccctgggctgcccgagctggttcagtgtgcttagcttactcaccctttgtcccctcccccaggtaccatgtgccgaggcctcagacacagcgtagtcctgtggaagacactgaggaagctggacactggagaggtctgcaccgctcagggagcttccatgttgacagacactagggctgccttgatgggtgcagcattaaaccttattcttatgccttggacgcctggctccttcctcatcatcttcctcaaggctttccgtgctcaagggaaattcgtctcagcccccagcacttgcacgtctgggagagtctttaacaagcagaaacccttacactacattcaagtgttttctgggtggaaactgcacattgttttctctcagctggtctgataaatcactcccagctttaatgcttttaaagtagtattcacggcccctattggccaccatacccagctagagcagggctccttccttcctggttttgtttgtttctaagacaagttcttatatagcccaggctggcctcacactcactatatagctaagtctgaccttagacttctcaacctcctgcccctgtctctcaagtgctcatgcagctgtccactgccatgcctggtgttcatggagccgaggatggcccctgggccttcttgcatgctaagtaagagctgtgccagatcagccacagccttttggtaaaactgc

SEQ ID NO: 19054 - DNA, 1679 bp, Mus musculus
acagtgaggcctttgtccttcccagagtaaccacctggcctcccggagacatggtctaaggacacacatacaggcagatgcccataggggtgtgtcacctgcacaaggcacagttgtccacactgcagagctgctatcactgtgcacattggctgccacccacgacacccattacagcaccacaccactgccaccaagtcacccatgacaccctttctaccctcacacattacatacacatagcacgcagtggcccggcccccgctgacggaggctcggtgctgtgacccagcagtacagatgaggtgctgtccctggaggagaaggacctgagggaccgggagaggcgtatggccaataacgctcgggagcgggtgcgcgtgcgggacattaacgaggccttccgggagctgggccgcatgtgccagctgcacctcaagtcggataaggcgcagaccaagctgctcatcctgcagcaggcggtgcaggtcatcctgggcctggagcagcaggtgcgaggtaggctgcgcccgccccgtctgttccatcctgctggccagggcagcctcggcacagccccgcccctctctgaccccacctgaggaccgtctcccactgctctctccttccccactcccccagaacgcaacctgaaccccaaagcagcctgcttgaagcggagggaggaggagaaggtgtctggcgtggtcggggacccacagctggccctgtcagccgcccacccgggcctgggtgaggcccacaacccagccgggcacctgtgagccgtcacagcttcttcgttggaccagggaccaccatatctctgcccggggtgcatcaggacggttctggatgagacaggtctccatcgaagcatgagcagagagagggctctggggacacttcagggcctggggagggtggcactgaacagctccctgcttggccccagtgaccaagcagaaaagttccttcctctcggttaaccagaactggaaacaaagcagcatgctcccttttcaaaaaggaaagaaagatgccttaactatgtaagacggaagagtcggaccgtgccctggcagggcggcctgggactggcttctacttcagagccaccagcacatcgtgcctaagcatttttcgtttttttaaaggagaataaaggaacattagttttcagattttttttttaaatgtagacaaaagttagcaagaacgaggccttccgtgtcttttttttttcccttagcttttttttccgtatgttttgtaagcaacaaatttttgtataaaagtctcatgtctgtttctgtttctagaatttatcgtcatatttcatggtctacaaggttattaaagtagcattcaaaagacccagtgttgatctaagggtcacccctaccctgaggcctggcacaagatctagatgcttgccccttcctcttcccatgaacatgaacccaaggcctgtctgtgccaggcatgtgctccttggctaaaccatgccctcctcatgtgaagtgggccgtcctcatggtcctcaatacttgggtgtcatgcattaggggacctctaaagaaaagttgctagaataaggtgtgtgtgtgtgtgtgtgtgtaaggatattagaatggcttacaggccatgacctgggtattctcaacagcgacaaagcg

SEQ ID NO: 19055 - DNA, 2336 bp, Mus musculus
aacccctttacctcagcctcccagtgctggggtgacaggtgtgttcttgtaccagtccacagactctccccctgccccatggttatagcagggattgctcctcccactgctttggttttctgagtcagggtttctctgtgtagccctggctgtcctggaactcactctgtagaccaggctggcctcaaactcagaaatctacctgcctctgcctcccaagtgctgggattaaaggtgtgtgctaccagtggacagctgttcccctagttttaaaacttgtgagtttgccattttcaaacagagcaggttctgcagttgctggtttgccattttcaaacagagcaggtctgcagttgctggttctgtgaagggtctagtgtgacttcagtgtcaggcagggagccagctcccagttgagggcagccatccagcctgcctctctcagtttgtttggagctgcgtcctggcaaggggcccctcatccctggcttgtttcaggactcgggagggcaggcacaacagcgggtgccagcgagatcaagcgggaggagaaagaggatgaggaaatcgcatcagtagccgacgccgaagaggacaagaaggacctgaaggtcccacgcacgcgcaccaggtgccaaaccccaccccttgggccatacacgcacacatcacatgttacacacatcacacgtgcacacagaccccgggaggccctgcaggccaccacatcacctcactgtctccctctggcccccggctcccctcccccatagcccagacgaggacgaggacgaccttctccccccagagcagaaggcggagcgggagaaggagcgccgggtggccaataatgcccgagagcgcctgcgggtccgcgacatcaatgaggcctttaaggagctcggccgcatgtgccagctgcacctcagcagcgagaagccgcagaccaaactgctcatcctgcaccaggccgtggccgtcatcctcagcctggagcagcaggtgcgaggtcagtgggcggcccgcgccccgcgcctccgcgatgctccttccctgctgcccaagccagagcagtgacagtccctcaccgaccagtccttgcacccctcctccagacaggaggttccctgcactcgctgctctctgaactgactgtccctgcccagtttgctacactgtggcactaatgaccagtcctgcctcatactgctgtccccactctgactgtccccatccactcttgactgtccctatccactctgtccccatccacattgactgtccccatctactctgtcaccatccacactgtctgtcaccatccacactgactgtccctatccacactgactgtccccatccacactgactgtccccatccacactgtctgtccccatctacactgactgtccctatccacactgactgtcctcactctgtccccatccatactgactgttcccatccatactgactgtccccaaccattctgactgtccccatctactctgtcaccatccacactgactgtcctcatcctcattacctaacatcacatccaccctcttccacaccagctgttcccaatgtcagctgtcccttgtacctactctgtctctgcactgtcccacaggttgtctttctgccggtcacactctaggtcgactgtccccgtccccccccacccccctgatctccttcatacctgctggccccagttctgactgactgacctccttcctgccttgctgatcctgggcctgcctctgacaggcctggagtctgccacactggcctcactggcctgaggacttcaaccctgacttttcccatccccaggctcttgctagcccagccccagccccagcccaaaggtgctagctggtgtctaagccaccattgttgttcaacttagaaggctccctaccccacagtagcttctccctgactcagtttccccatctaatggtgttaatccacctgacccggggctgatgagggaggacaacagctcggaccccactgcttccttaacctgcacttgccctggcctgcctgcctgcctttaaccctttctctcctgcagcatggtgtgatctgcacagccacccactctccccttgactccaaggtctctatggtggctgagtgcgcagcccaccctgtgactcccaagcccgtctatctgctgtctgtgtttcatgctgtcccctttaccctggctgtcccctggcttcgcttgccaccaccgcccctcacctcgcacctgctgccctttggacagggctgatcgcaccgtgacctaggggccttttgtcccataggccatgcagtt

SEQ ID NO: 19056 - DNA, 1174 bp, Mus musculus
tagctttcttgaatgaggttgggttttgggggtgagagggagaagttgtgggtcccagggataacacctcttccacccactagagccttgaggttcacagtttgttttgctttggatttggggtgaccagggtcttgggtattctgtgacagctgctgcatgggaaggttccaccaagtttatttggaggaggcagagcctgggccacccctttcttcctggacagggcccatagacagtcccccccccacccctttaaaatgcaatttgacactctggtgggcctctgggaattgggagatttcatatgtgtaccccttctctccattgttcaagctactcatttgctcatgagaaggatctacagaggatccccccagaacccaggctcctgcctcttccttcaggacccccattgaccccagggcctcacttctaatgcccacttgtccacgctctcagtccctctgtttctccccttctgtcccctggtgtcaccacagggctgtctctagatctgggggacgcaccccagttccaacacctgctgtcctgggtggatgatgaaccagtctcagagaatggcacccgtgggctctgacaaggaactgagtgacctcctggacttcagcatggtgagctagcgccccccccccccccccgcccctcagtgcctacccaccccaccactcctggcctggaaggtagggttgaagtgggagtgtctgccagtaggagtggagcccccagcttgcaagagtgggggaaatctcagaggaaatggagccccctaccgtaggcctggtgacatccaccaaagaagtgctcccacctggcacctcaccagtgaggagaagaacggagcccagagagagggaagggctgttcagagctgtggttgttccccagtgttcactgcagaagtgcctgtgggggctggtggccttgagttagaaaagtgaccatcgaagttacaggctgtgagaatgaagtcccaagctgttctgacacgtgctggggccttagagaaggaagccaccaaccccctgtaccgctggtgacttaccctcctcagtctgggtgctctgctagtgagggagactctggcctgggaaggctgttagcagccctgccgcattagcatacagcctgcagtggctgttcccaccctctg

SEQ ID NO: 19057 - DNA, 2320 bp, Mus musculus
tctgtctgtccgtccccttctggcagcactgacacacagtgcccctgcagggactgccctgtacagccgcctcagggagtacctgctcactcaggagcagctgaaggagaatggctaccccttcccccacccagagcgcccagggggtgccatcatcttcacagccgaggagaagaaacccaaggaccgtgagtatcctcccagcattgccttaggcaggagaccggggtgttagctgtctgctgttaaggaacacagctcagggaaaggcacttcatcatgctcagggggtactaggctgctggcccctcacccacttggcctctctgcctgtccatctgtcttcacatacagcctcctgcagaatttgctgtcgctgtggcacagagtaccttgtgtcctcctcgggccgctgcgtgcgcagtgaggagtgttactaccactgggggcggctgcggcggaatcgaggtgaggcttgtgcccacacgtgcatgcctgctggctgcgaggactcctacccatctcaccccgcccccttctgaagctctggccctgtgtaatctacgtgttccttctgagcacaggctctgcttgtctcacccctgcagtgtccccaagggtggggaccgtccccaggcctacatcagcttatgacactgtggcccagatcctttccctgagtccttgtccctgactgggtgggcaagatccctgccaggtgccctgaacatcattgctctctcttgccagtggctgggggctgggagacccagtatatgtgctgctcagctgccgtcggctctgtaggctgtcaggttgccaaggtaagtcctgctgtgtgccactccctgctcttggtcactggactggcattgagggatgcagttgagtcctatgctcagtccccatgtggccccagccagcccttcctgactgtctacacactaggcctgacacaagtacctgctcttaggccttaatccaggacacaggactcctcgagagtcatgcacagccatgctggcccttctgctgactgctgacccccttgttccccagcaacacgtgcaggacggccggaaggagaacctggagggctttgtgcgcaccttccagaaggagctgcctgaagatgcccatgcaggggtctttgccctcgactgtgagatggtgagtctgggatcgcaggaacctgcatcctccctgggatggtgagggagtgaagccaactaagaactggcaagggagcaccacacctcaggctagtgtcctgagagaggggtcagcctgtttgggaagggttctctgagttcctagcctgtggctccctctgcgttggtggttcccgtggtgtccctgacaaggtctctgcagcagccatggctagccacagaggggaggtgcacttgggaagtcggctgcatctggtgcccatctctgttctcagtcctacactacatatggcctggagctgacccgagtcacagttgtggacacagacatgcaggtcgtgtatgacacctttgtcaagcctgacaatgaagttgttgactacaacaccaggtgtgtcccggcctaccgcgggaccccatcctcgttcccatcctgcccggcccgacgcccctcttgcatccggccctctgcaggttctcaggggtgacagaggctgaccttgtggacacgagcatcacgctgcgggacgtgcaggctgtcttgctgagcatgttcagcgccgacaccatcctcatcggacacagcctggagagcgacctgctggctctcaaggtcatccacggcacagtggtggacacgtctgtgcttttcccacatcgcctgggcctgccctataagcgctccctgcggaacctcatggctgactacctcagacagatcatccaagacaatggtgaggagccagggcccccgaagtgggggaaggggaggggaggtatgggagtaaggactgtgctgagcatgtctgccctgtagtggacgggcacagctccagtgaggatgccagtgcctgcatgcaccttgtcatctggaagatccgagaagatgccaagaccaagcgatgactcccacccaacattaccatgtcaccccccttcttccatccctggctgccctcagccccaatccctcagccccgatgccctcggcctcttttcaaactctgtaataaaacatgacagctgaccacgcgtctcccaagctccagctgcaggtctgcagtgagcagcccagagtcggggctgagaccaaccctcagcccaaccccacacctgcccaacgtgacatcacctcctttcccagtcct

SEQ ID NO: 19058 - DNA, 1809 bp, Mus musculus
tggcgccttgcagccctgccacaagcatagatgacgatgacaccttctcattggccctaacttacacgccgggtggcctgctgagcccggatgctgcctaccagcccaccccactggctgtccctgccgagccagggcacaagtactcactggccccttcagacaggagtcagggcagagctgcaggaggtgctggtgccctggagtatgtccccaaggctgtgggccagccgcgccgctgtggccgccctgtgtctggtggcaagtatgtggtggatagttcaaaaccttcaacagatctagagtatgacccactgtccaactactcagcccggcaccttggcagggccagtgctagggatgagagggccaccaagagaccgcggggctccaggggtgctgagccatacactcctgccctcaagaagccctgtgaccccttcggtggctgtgaggccaggttctcagactcagaagatgatgtgaccagccccccaaaggctgatgttagcagccccaaggctggagctgaccctgaaagcaaggcacctgggaagcctgtctccaaggagggcagagagcatgaggacggtggcctgcggggcaccaaggagatggctgtgcagtatgacgtggaagaccttgggcagccccccaaagcaccagacacagtgtctgtggtcaagcctggctccccagccagggcctctcaagatgctagggtccccaaggaaggtaaagccaaaaagaagaaaagtgggacatcagccagcctcagccacaaggacaaggttcgcaagaaagacaaaaagaaagagaaagacccagccaggccccgagggaaggaaaaggtgtgtacggacaagaagaagctgccagccagtaaccccagggggaaggcccaggggcctgaagggaccaagaaaaagccatcctctgcgaccacagtggccagctcagggaaaggggggtcaggccgcccctccagcacgggacctcaggactctgggcctggtccccatgcaccactggcctggaaggctggtagtgcaaagaagatgtcatcgggaaagttggtggaacgcaaggcccgctccctggatgaaggagccccccaggacacccctaagctcaagaaacgggccctgagccatgctgaactatttggggatgagagtgaggaggaggactcaagcctgggagcgggagcaccccgggtctggcccccgaccctgcccagccttagctcagactcagaatcagactccgactccagcctgggcctggacgagacaaaggtgcccaagcgtctcaaggccgcgccgcccgcatcccccgtgccgccctccccattgtcctcctcctcctcgtcctcgggagccagccagtgtgcagaggaggatgtggactactcggctctggagaaggaggtggacttcgatgtggaccctatggaggagtgcctgcggatcttcaacgagtccaccagcgtgaagacagaggacaagggccggctggcccggcaggtgagggcactggccttggcaggctagggcccttggaggggacactcagtcccacggtcatctccagccgattccagcctctgtgacccaagcagaagccgctccttcagcgccggcctcttataactccattcaaaattcaggaaccctcggtggccgcctgctgcccccctgcaccctgcccagaatgaggatgctggctttctacccacccagccggcttcccgtggcagcgtccgactgactgttcagactgaccggcaaaggggtaccgggccctccc

SEQ ID NO: 19059 - DNA, 1698 bp, Mus musculus
ggcctccttactgggcctcagcagggatttctatcaagggacacatctgtcctctggagagcctgtgtcctggagttccagcccacctcaagaaagcagcaaggggactgagaatggacttgggtcacctggggggcctgggaggtggcctcaggttctgtctgtaaatagccatggttaactgtcctgtcccctctgcagggaccccaaatgggcagttggcaggcccccccatcccttcctgccaccctctgctttccctcctgggtggcgttgggcatgaagcctaccccactccttgtcttcagccccctagtcacccctccaggttgggacacaggtacacagagccataggtgactggggcttcccatgggcccctacctgtccccactccactgaaagccattggcggaagttcagggaaatggggggggtgcagcctggctgacccccttccatgggtactcaaatctcaggtgtccataggttctgccctcaataagggccccccactcccagccccaggggtacaggagacccacagttttcagagaacttagggctgtggggtacaggtggggcacgtggaggtgcatcccccacatccccgctcaccttgggtgtggtgctgggcagatgggaaagaaattatttattgtcctctctgactgctggtgtgggggggcctggctccccctatctgggtgtgcatatgtgtgagagagacagtgggtgtctggtgcctggggcttagcctccttactcccactgggttagggtccctgagtttggcctttgtggcattgcgtctcagacaatctataggacccctgcggccatcgggctatggatacagggctctggtctgccgtcatgtgctccacactctcgggtgtctgcagagggtggccttggactccaggattgggaacagggcgttcagctcctggaccttctggggtagctcgggttttttttttttttgcacaggatagatttatttttttcaggctctgagttccatgttccagtgggggtccccttgtgtggccgtcatcctcaggggtgagtggggaaggtctcaggagagtctacagtaggatcctctactactgcagactggatttcttttctagaaaggcaattagggattgccacacacacaccaagaaattggggacacagagaaagttgagctgccctgtgttggctgtggggggtttactggcattcccatttgttccagaatcttccatcatgaaatgagggaggctttgggtaatgctacctttacctgagcctacatgagggaggtcacccttctggagctgggctgagggccctgggccagctcctctcctgggtacttccatttgccccttctctttggccacagaaatgagatgccttagtttgcagggtgggtggggggctggggccaattctttttgtcttttggatgtatcttgcttcatcccagctcctgctggtctcctgtccttcctgtaaacagggggaaaggactgaggttcttaggagttaactccataagcaatcagagcttttccgtgatgtcctcccccagccccccaacttcaggttctgattgataactgggacttgggtctaaccattgaagggtgatgaacgcagggcaggcaggacaagggtcctaagggatttatttgttctttc

SEQ ID NO: 19060 - DNA, 1210 bp, Mus musculus
agagacccacactggtggggaggcagcactgggaagagacagccctctgctcgtgggtcagaagggaacaggaacttttggtctggaatcttaggtccaaagtcttccacagtcaggcactgtcaccctgacccccaccctgtgggagggactgaggaaaaagccatggagctactgcttggcagggctttgggagttgctcatctccaggcctgctgaccctgctcctgttgtcgctcaggtatggcatcagcccagacagtatcatcctgtatggccagagcattggcactgtgcccacagtggatctggcgtcacgctacgagtgtgctgcagtggttctgcactcgcctctcacctcgggcatgcgggtggccttccctgacaccaagaagacctactgcttcgatgctttccctaagtgagcatgggggcggagcctgggaaagggcggggcatgagaaagggtggggctccagcctgtgcatcttttccctcagcatcgagaaggtgtcgaagatcacgtcaccggtgctcatcatccacggcacagaggacgaggtgatcgacttctctcacgggctggcactgtatgagcgctgcccaaaggctgtggagccgctgtgggtggagggcgctgggcacaatgacattgagctgtacagtcaatacctggagcgcctacgccgcttcatttcccaggagctgcccagccaacgcgcctagccaagctgcagggacctcagcagtacatgggcctcctgccgggactgcatgtgacccggagcccaggaccctgcctggcaccccaggggccatgagccatgttcaggcgtcagaggtccctcttctctcctcatggaagcaaagagaaggaaagagggaaactaattaaaggattaagattttagggttgcttggctcctttgtggctctagtgcgccttcctagggctgggagatcgctgagaccagctggctatggggaatgtgaaggaaaacctcgggttgtcccacccagggcctgcccccaggactgcagggcagtccctacagcgcacaaggctcccactctggatgcgaagattcctggtccaaagccaggaccaggccttgcactgtgtcacctgggagctgaaggggtccccccagacctgctggctctatctaggctcgtgtgctctgtggagttgagccatgtgttgtttcct

SEQ ID NO: 19061 - DNA, 1137 bp, Mus musculus
gaccctgcgggagacccccccacccctggccccaagcacggggacaaactattgtcccagtcagtggggccctgtgtctggcatgcatcctgtccttgttcccggtctttgtgtctgtttcctcctttggactctgtctctgtgttccaaggccccttggcttatcctccacatcctcctgcgtgggagccaatgagcctttggatccctttggcttaaaacttggagctgcctttgttacctgttctggaggataactccttcaaggactgagggagaaactggtggggcagacagaagggtctgggcataggcctaggggtgctggaatggcagaagctgggggccatacatagaatgagttctgccacagaggcctgggagagctagggttgtgggcaggccaagaggatcaagatagaccgtggatgtggggacacgccttcctccctgcctggcacaggctggcacctggttctaccctagattcctggagggaacctacatgttggtgtcccctgcagggtatcccactgtatggcatggagacctgtggctgtgaggctcccgggggctcgccttggaccgcgatggggcccggctgcggcctcctaacgggactgaggtgtgcagcccgcgagctgccgctgcccgcatctcggagcacccccgcccctcccctggcccggcgcgggcccggtgcccgccatgaacggcctgtcggtgagcgagctctgctgcctgttctgctgcccaccctgcccgggccgcatcgctgccaagctcgccttcctgcctcccgatcccacctactctctggtacctgaacctgagccggggcccggtggggctggcgctgccccctcgggtcccctgcggacctcagcggccacacccgggcgctggaagatccacctgacggagcgtgctgacttccagtacggccagcgcgagctggataccatcgaggtcttcgtgaccaagagcgcgcgcgccaaccgcatcgcctgcatgtatgtgcgctgtgtaccgggtgccaggtgagctgccccctcccagggctcacagcaggggtgcctgggttctgtactaccctgtctttcagcccacctgacccctcttgtaaagcacaggaga

SEQ ID NO: 19062 - DNA, 1144 bp, Mus musculus
actaggaggaggaaggacaactctagaagggaggtcactcaataggtgtgtgctgcagaaagtgtcaaagtagcgagggccaagcctttgacacggaatgatagcggcggctgagatggaccttcgtaaggttagagtgcagttggggaaaggttcaggtggtggttgatggaaccagcaggcttaaagatgatgggagtgacccggaggggagtgtgagggacagcactccctttcctggccttggttcactttgtctccagcttggtcaggtgttctttctcactggaccacaggtccttccaagccctctgtgtctaaggggtgttaaatgaggaggccttgattataaagccagtgtctctaaacattgaccttgtggatatttggagcggggtcattcactgatagcctgttctgggctattcagggtcttggacagagtctctggtccccacctgctctgtaggtgtgctcccagttacagatgtggcctggtgttgtcttggttcccacctgctctgtgctagaagtgctcccaactccattctaggagtgctgtagattccaggtgtggcctggtgtctcttggagacacctggtgtcatctgcatctttgagaattgctacctgggagctggggacttgttggtactatctttgtccttgctctggctgtcatagctgtcctctcagtgtgtccctgaattgttagggactgggatatccctctcaccagtggtcttacacctcagattctcagggatccaaaaatgtgtgtgtgtggacccacagctgcctgagtgtcatgtgtctccctttgcctgttatccatgtctctctgtccctgtggatttatatgctgtgacctaaaacccaggtgtaggttgatatcctgttaaaattgcaccatgagccaggtgtgctggtgcacgcttttaatcccagcacttgggaggcagaggcaggcggatttctgagttccaggacagccagggctatacaaaggaaccctgtctcaaaaaacaaaacaaaaacaaaacaaaattgcactatgaagtcttctgccttcctctcaggttatgagagatggttgtgggcttttctggaaatgtctctgtatctatccattggcagctctgca

SEQ ID NO: 19063 - DNA, 1099 bp, Mus musculus
gaccctgggcctttatactgactggcttccttctctctactccccaaaacacatgcaatgctggtgtgtgactctggctgcagcccagagaaggcatggccgatcctgcagggctgtgtgctctatagcctgaagtacagggagggtgctcaggcaggcatctggctgtagcaggctacctgagggtctccttcctgcaggaaaggagaacaacttccccccactgcctcccttcctgccactgaagccctgcttctaccaggacttctctgatgagatccccgtggagcaccaggtgctggtgaagaggatctaccggctgtggatgtgtgagcctctccgggtgggcgggcccaactcagagtgcagggtccccactgagcacaggagcattgtggtccaggggatgtgcaaggctcatccctaatgtgctggtagggtgggtccctgggccctatccgaggtccctggtgacttacctcctactctcccatctatgtccctcttccagtttactgtgccactctgggtgtgaacctggtggcctgcctggcctggtggattgcgggcggagctggtgccaattttggcctggccttgctctggctggttctcttcactccctgcagttatgtgtgctggttccggcctgcatacaaggccttccggtaagcctggtctaggggccctcaggccacagaatcttagacccactccatggggtgaacatgcttagaattgtatccaggataggtttcggccacattaccaatagttgtcctccacttattcagtgtgggtggccatttatgtcatggtcagcaatcaatgaccataggctgcagctaactgctgtcttggggttgctgggatggatcccagggtataagatactaggcaagcagcttgtgagccatgtgcccctgtgccctcccttggtgctgtggagtgttcctgcaggaaggtatggttacagttccccttcctgcagcaccctctggattgtaggcctacactcggagacacgagtgtgtatgtgccatgacacagcgtagcagtcacaggatagttctttttctaccatgtaagttgtggggat

SEQ ID NO: 19064 - DNA, 1731 bp, Mus musculus
agagttgcctcacactgctggtctactgtgtctcagcacacctgcctaccctgcaccaccactactgtctccctcgggggctgtaaaaacacagtcacaggtcacacaaacacatgtgcatgcataaatgcgtgataatgagatggcacagtggggtggcacatgcctgcttgttgaattgggtgtcctgtgggctatggaggcgggtggcagtgtggagatttggcaccaggtcctgcactaccctgcattgtcactcagttcacagtgggtccctgtccctgccagtacactgacttcctcttctatatccttgcccctgccaggtgcacaggatctaccgtggggctggtggaagcctccagaaggcacagacagagtggagcgctggtacctggaggaacccaccatcgagggaggcccagtttaacagtttctctgggaacagcctgcctgagtaccccactgtccccagctactcgtccagcggaggccactggccttaggcggctgcctggccccagcaccatggctctgtctcctgttaccaccctcggtcctgaggtctgagcatctctcaagggtcccaggaggtccttggcccatgttcatctcttgcccaagccctcagcaagcactgcccaacaaccattgtccactgccatcctaccagagcctggctggatttgccctgctcccacctgttaagagggtagaaaccctcagcctgtgcaaggagaggcctcaacctccaagcgcctgtcctttgtgttgctgagatgtataaagccaaactctgagcgcttgtgtagatgggtgtgagtggacagtcaggagcatggtggctgtgcctgaatcctctgttctgccatccactatacctgtgctcctctggaccctgctacttccttgtcccatcccttgtgacagtgacaacctgctgtcccctccaccacccaggatcctgaataggcctttgcccacttgcagaccctgatccacttggttgagggtgctctggctgccgggagaccccctccctctctgtgggcaactggtgggagaggaacaggctctgctacctggcaggccatacccccagccacaggactgctgggacagatctgtgccttagagagacctgtacttctccccacaccctctgccttcccggggtagctgtggccttgccagaagagccaatctgagttttggagtgtccacagcacctctgatgacattggactcaatattcttccttgtgacccgatgttaccagccaagtcaccaggcctccccacaggcctgtgtgccagtatcatgccaaactgttggggcacctgccctctaccccatcgtgtcatggagatggagtcaagtgcccgccatgggtaacaccctacagccacctgcggctcttccctgttcacccctgggtatgtgcacccacacgccatagttggttttgttatgtgagaatattctggaaataaattctctttctgcagcagggcctttatctgtggatgggaaagcatgcacagggcggagcctagaggtcaacatcactgctgctctctgttgccacacaccttgctcctttgagaccatctcccactgacctgaaattgaaaggggccggtgagctccaaggatcctcctgcctctgtctgcccagggctggggttgtaggcaaaccccaccatgttctgctgtttacctgcatgcaaa

SEQ ID NO: 19065 - DNA, 1192 bp, Mus musculus
cctgtctcgaaaaaccaaaaaaaaaaaaaagggggggggtgtttacaacttctgtagccaaggctggtcctaaactcaccatatagaccaggctggcccctaaactcatgcctccttcagcgtcctgaatgctggggcataggtttgtggcacaacacccagggaaactgtccttgactctactgtaggttattgatgtggtgtcccaggtagcctgggctgacctccatgtatctgaggatggcattgaacatcttggttcctgggatttgatctgtgcatgttctcctggggttaccgtgggaaaaattgaaggtactcctggggcagctaaagtaacccgtagcttaggcttaggccttgtagggtcttcaggtgtgtatacaggttaggggaggggcatgggaagcaggaacacagggcaggccttgccaggagccccagagtctgcagctgccccaggcactgaagagctggcctctgggtggctgagacccacagggctggcaggtggtgtgcatctccaggctctagcctgtcctctcccactcactgtgtctgtagcctgtgcttcctgtcagggcacgcccctgtgggctcctgggagatctccatgctgcccttggctgtccagttgggccccctgagaggaggcgtggcttaggcagagcagactctgctcctctgggtgggcagctgtgtgcagtcagcctgtgcttcacttggtgctggcctgaccctacccagtggaggccagggctgtgtgctgggccctccatatgctgactatggcaggacttaggggaggtgcctcctggacagctgtcccctcagttaaggtttgtggtcaccttcacctatataagaatagccagttctgggctcccctcctcacccctcagtttaaaatgttaaaactaaggatggtgggttcaaggccagcttgggtataagtgttgggggaggcagtgggcaaatgattgcctaagctcaggtctctagtgctcacttagatgccggcccgggcactctcacctcctgtggacccatttcaaactgagctggctgtggtagctaaagtgagttcagcagggagacacggcttcagtataaggtggagagtccttgacaccagcctctggcatatgagccccccgccccatacacacacatacaaatacaaacacagaag

SEQ ID NO: 19066 - DNA, 1469 bp, Mus musculus
agccagggcattggggctgagctcactgcctggggcctccagagcccctccctgttcacccagtgatgcatgctgtgcccctcacccagcatagttggagtcactttgcctgctcctgtccctatgtgggcactctttatctgccactttcctcatcttggctggtcgtgtggttagactgtgggtcaccttttacctggatcccccttgttggctttagccttccagtgtcctttgctctgccacttggtagcaaattggggcacacagccactccatccaagccatctaccccagtctcttaactgctctcagcttccatttggtcataccatgggagccgttgctgtggtctctggcctatcccagggtgacagggcatggacatttcccacagggagaggtgcaccctccaggcagggatcttaccaatcctgttgagacctgcaaagacctttttgtaccagtccatgtactctgccctctaacctgtgcctctgtttcttcacagctgggcaccacaagatttaaggcagtgggacctgttggcagaatgtcttctctctctgcaagcaaccctgaagccaccaagatgagcaccccagtccggcctgtgagcgtacccgggtgtcaatagccgggagccgaggggccaccgggagcaatggtgtactaggccgggcgcgagctcaggtttcgcactcggatctcacggcagagtcaccgtggagaggccagggtaccacaaacttatggattttgacaagaaaggagggaagggggagttggaggagggcaggagaatgtccaaaaccggcacgagtcggagcaaccacggcgtccgcagttcggggaccagctcaggggtcctgatggtgggcccaaacttccgagtcggcaagaagataggctgtgggaacttcggggagcttcgcctaggtgagtcctgtgtatctcgtcccctgtccatcactaggcccctcaggaggaaggaggagaccggctctgggtacccatcaggcacctcagatcccagaccttgctcagagtggtcctgtgagggaagtgctcccagggcccacactgccctccctcccccagcctgaggcttggctgtatggtaaaccagatcatgggccagtgaggaccacagagtctgtggaggacagaatctggtcacactgaggggacagcagaccagcacaggccctgtcctggtacagagcctctgcagccctgtgacagggctgcactttctgtggccttgggcctctgagccctcttcctgcagcccatggcttcagtgtctcctaaggcccagctcaaagatggttcctacacagtaagacatcaaactgcaaccttgaagccagccattatggccacgcttttaattcctccaacaatcagaagcagagataggacagatggatctctgagtttgagaccagcctggtctacagagtgag

SEQ ID NO: 19067 - DNA, 1289 bp, Mus musculus
ttccgcatcaccacccttgtcacccgtgcaggtgctgctgcttcttcaagaggagaaagagaaaatcgctgcagcgacataagtgagggtgggtgcagccgctcaagatccccaggcgggtgtctaggaaactggcagtgtccttggtggtgtggggctccttggcccacctgcaggcaccatctttcgggacttggggtcccttccttcacacaggactttggcggaaatctctacacccgtgtctcatcatccccttcgagagcattaactatttaaacccaggagagaagcgctgtgccgtccctgctgcgcccctgttagctcataaagtccagcttgtcccctcaatccaaaggccattttctcgaggggggcaggcccggggcatgggtgtcacatggggaggcctcagccaccaaaggggaggcgcgtgcacttccacaatgctgcaccaaagccggggcggagcgcgggacggtcaccgcatagggactggtatgggccccacagtaccagggcggccgtgatccgtgtccctgcgtgcagggcccacgggacagaatcgccttaacgccaggcctggggcagcagagaggcggtcccacaggagggccaggccttggtcgtgggaactgagttcttgctttacgacgtgtacagaaatgaacttatgtttctctggcgcttccttgaagccgtagagtttaggggctttttttaaaaaaaaaaataaaagaaaagaaaaacatcccagaatgttggcctgggctttaccatccataggacaattcaagtctaggatcgcgaactgacaaggacccagctggatcatgggaatccctagggagctgggcactgtctgccccaggaaaacggaggagactggtaatgcggtgggacaggaaggctgctgcttccaaacctgagggacccagtagtacccaagcagatagacgggtcgggtctgagcacagccccactaagggggacaccttgagggcagggggctgcatagtgcggctgcagactgaaagctgcctcagaagccaagccctgagcactgggagactagcggagctgggaggaggttgcccaagtggaaaggaaatgggggtgggggtggactccagggcttcatgcttatacaggtaccaccaaggaaacaacatttctaaaaggggctggagagatggctcagatgttaggagcactgactgctcttccagaggtcctgaattcagttctagcaaccatcatggtgtctcagaaccattctgtaatgggat

SEQ ID NO: 19068 - DNA, 1769 bp, Mus musculus
ccgatgcaccctggtcccacacgtgtcccatcaggcttttttgccatgcccccgccatacccatcttgagagcatgcccaagtacccaggccacgtcctcatcagtccctgtagcctctgcttgcccagcacagaccctggcatctgagcagcctctgtccccagatcatccacacggacagcaacacagtccttggccagaacgacacaggtttcagctgcgacggttctgccagcaccttccgtgttatgttcaaggagcccgtggaggtcctgcccaatgtgaactacaccgcctgtgccacgctgaaggtggggggggggggcgctgcactgcaacccagggcttgttcctggtccctgcgggctcgggctgtgggtgcctctctgttagtagtaacagtcctgggcatcctgacctcactctgcctcccacccacctccagggcccagactctcactatggcaccaaaggtctacgcaaggtgacccacgagtctcccaccacgggggctaagacctgcttcaccttctgttacgcggctgggaacaacaacggcacatctgtggaggatgggcagatccctgaagtcatcttctacacctaggccatccacccaggtcaccctggccagccataggcctgcctccctccccaccacctcccacatcatcatggaaggggctgcctgtgtccacagtgacaagtgtgaccgcctgtcccaaggcactgaggaggtggttaggccatgggctgggccccgttgagacaatccttcagtcttgggggacagagtgggactagccttggatggacagagcgtggtgggtcgcagtccctgaagctcagggcagcaggccagctccgagccctggtgctgccctgctcctccgttctcttcaactgcacactgcaatgcatacaagcccacactcagctggagcccgcgccgggcctctcctccagccagtggtctgggtttcatgttccttttcttctccgctgctccctgggaggtcccaggtcctgacctgcgtgcactgctgccccctgaagccctggcctgctgggcatgtacacagagccactgggagctctgccccagggtaggtgacatgtggccgtggttcctacttctcacagcagcgcaagtgcccagtcagcactgtccacccaaggcggacagactcctcacaggtgtgctcagcagagctcagccttgagcctgcagacccatcaaaatgcactgggcacccagctggcctgatgtggctctccgggggtaccacagaacacccctgtacataccacagccctggccctctaggccaccacatcaccccatccagtgatgtcccagaaggcgcagtctccagtttggggttccacttcctcatatttctgtaccagtgacctcctgcccagaacccatcccaaagccatgggaggtgtgccctccacactgtgtccccaaatgattttttttttaaataaaggaaaacatctgccttgaatcatcgagtgctatgttgtctgagtgttacatggtggctgagaggcgggcgtctcagccacccacactgttccctgaggacaccttcgcagtaccaagaaagcaaataggcagccaggctggctaccagccagatgtggtctgccatcttaggccccaagaagcagatagcctagggtacatgacacctggctgggcagtggtggctcacgcctttaatcccagcacttgagaggcagaggcaggcagatctct

SEQ ID NO: 19069 - DNA, 1186 bp, Mus musculus
tcagggcagaggggtgccaggcccctactttgtctgggtacctggactgacactgaagaaaagctctgtgacacctgaggccactcagaagcagtgagacaagctgattggtgtgtgcctgtcacccagcctgtgggagggaggctgaggcaaaaggagcaaagatttatctttggctacatagtgagttagaggccagcctgggctacatgagtctctgtctacaaaacaaagcaggaattgagaagacagataactagataaagtttgcactgacagaaaagctggacagacaactaagaagataaggggtccttggaacaacctaggggttcaatgaaagaccctgtctcagtagacaaagtagagagcactcgtggtggaccccagtactgacctggcccgcaaattcattgaaaggaccagacattaagagctttcagctagggttggatgtagctcagtggtggagtactcctgggttcgagccccagtcttaaagaaaatgttttgagcagctatatagtctccttagctactgttggactcggctgtagccataggcaggaggaccttcaatacgaagttttgttcaagtgaaatagtagcaaaaacctgtgtgtgttgtgtgtgtgtgcatccccagtacatgttctaatggttttgctgttgtttttgagacatgctggcctggaactctccaggagctcaggctgtatggaaactcttgcaggacccagcctggtcctcctgcgtactggagtgacaggcctgccctccgtgccctgcccttccgatagcttctgaggagccgcccacccaccagcattttccaagatggctacagctcccacactgcctgctacatggcttctgaagccacctgggtccacttgggagcagtgggccttggggtgcggagtgcgtggctcctcagagtgcccttcagggtccccctctgaagccaccgctctgcacgcctccttgtgggcagatccacagttttgcaggctgtccttttttgggacacatggcttccctagttgtctgtcctgtctaactgagctgaggctggagcccagggcctgtgtctgctaagcactcaccccacctaccacactacccactaccttggtatgcttttgtttggttttgagactgggtcttgctacaaagcccaagctgg

SEQ ID NO: 19070 - DNA, 2358 bp, Mus musculus
gctacctcacgctgcctgcagctgtccccaccctcccagtccaagctggcccagcggcgccagagggctagcctgtcggccacccctgtggtccttgtgggggatcgcgcatgacccccactagctccttgtacatatgcccctgccccgcggggcctgaaggctagggacctggacaccccaccccttgccattccaggtgccagctcagctgggtcctctgggggtgtaggggtctgttagggggtgtctccttttctccctgtccttcccctgccctgcccacttggctttgttttgtttgtttttctttgccgctattgaaagcaagtgcccggaggagggcggagggctcaggccgcccagcctgcaccccacgatgctcacctgccaactgtgaaggtcctgccacctgcgcccccacctccactccagccactctgctgtcttccagggttggggatcccgcagggtcagcaccccacacctctcccagccctcagtgttgtcagggacaggccctcctggtgagcacagtggtggttgcatctcctcaccagagcacccttgggtctggggtagggcagggctccctgtcttggatagagacctctggggagcaggtggatggggacagtgcacttgattgaccccgagtccccatcatccacctgcagtgtcccttggagggttgacaatcagaaacccctcccaggctgcttagctccttgccctgggacagacctactgctcccaaccccacttcccaggggcagagctggaaggggaccctgcacccagctagctccaccacagcaggagaggtgctggaccaggctttcatcagcaaacatggggctcccacatgtctccccacccagggcacctgagtgccccttctcagggctcagcctgaccacggccacgtcctgcccctggggttcctaagctctcctagctgcttctgttagccagagctgaggccatacccagggctctcaccttcctgttgcccccagagggcagcagctcaggcgtgcctgctttcaggaaagggaggctgggaagggatgtggtggccctgcggtgcccagacctaactgcccgaggcctgtagactgttctagccgaactactatgcaatacgagttcccattttctccatggccctgctggtcgggggcggctgccaggggccaggccaccctgccctgcaactgctcaggtgtctacagggcagcccctggcctcaaaaatccttggtcaggattgtttgtcgagtttagtttaggctttttttttttttttaaagaaataatttgacttgcttccctgttcttgaagagtacttgaatgtcggggtctggtgggtgggggcctgggacacccactgcccagcatcctccaccctcctccctagtctcataggatcgtcacagtggaggtgacatgccttctccagtcctgccccacctgcctctgtggacacatttccaaagaacccctgggggtgggacctcctccatcagtatgactcagctgttggccacctgaggactcggcccccctgcaggttcctgaagcaacctgactgggcagtgagcagcattgacccccactcacccccaaaacagggctgtgatttccttagtccttccaagcccgacctggaggatgggtcagaccccttaactgtgaatgagacatgatcctgggctggcttcgccacaaaccatgcagaaatctaaaaggcctgttgtagagtgggggacatgcaagcacttttaactccatcgtaccaggtgaactgacctccggactcctttcccaccaactgtcaacgccaggattttgtattctgttttgtaaggatttaataaaagtcatttaaaaatttctgtgcagtgacagcagcagaggtcagctgcccgcaggtcctgagtccttggttctttggactcctgcacacccctctggatgtgtcccagggaggtgacatcaccagagcggaaacacaagcctaaaagaaaaacaagcatggggcaaggcggggacccagaggggcgtggcttcgttcggagggggggggttgggggagtgggtctgggggcgtgacacttagggtgtggctggattccgactcttccgaagctcagcctggcctaaaacttgtgtaaatgatgagaaccttaaatttctatttcccttctacttccaaagtgctggggtgaacaaggtccaagatgaccagccttgccccagcatgcagctctggacctacttgtcactagacccaggtggcaactctactgctccgccagaggcctgtggccctgagcaccactcccggattctcca

SEQ ID NO: 19071 - DNA, 1168 bp, Mus musculus
gtgtccacctgggaagggagagccaggggtcctggaactcctctgagagcaaaggttctacaggaacagtgctttctgggccttctatgtactgggtgcagtggagctgcttcctgaagtttgagaccactggtctaagccaaacctaggcccatggtgccaggtgcccagtctggactggaaaagagaaggcagatcatgatgtggtatgggctgggccagcatccaggtggcagagtgccaccttgttgcatgggtcatgtgagagctgagactgcttggccctgccttgctggggtaaaggcagcagctacctagcagaggggactcctgggtcagggtggagaactggctgcttcctctctcttcgcctgagctaccctgaccgtgctaacactgcagtctgacttctagcaatttccaggcccagggctgcagtgttcacacagggtccaggtggcatgtggggggcttgctgacaccttgcaggtggcatctgggcagcttctgcaggtgccgtgtccctccctacattgtagatcattgagaagcagctgggccacatccgcagcagggtgttccgggaggtggagatgctgtaccagtgccagggacataggtaaggtggcctgcctaggctctctggccagagcccatcacttcagcaggccacggactgcgttctgccaggacaacaggctttctattggcctcatggctccatgagggagggtgtcacctcccaggctgggcagcaggtgctgagggcctcagggtgactcagtttattttcccccttctcccaactcaggaatgttctagaactgattgagttctttgaggaggaggaccgtttctacctggtgtttgagaagatgcgtggcggtaggtactggtcagggaggacttggggtgggagctgcagaccaacaggaagtgccatccaagggccccagctttgatgcgggcactggggctgtgtaccttcctgtcccaatggccacggcccagtattggacccaaggaagccctggggcatccctgatggactgaggcagggctaggagctggctggtctgtggaggtgacctagctctccctggcctgcacaggatccatcctaagccacatccatagaaggcgccactttaacgagctggaggccagc

SEQ ID NO: 19072 - DNA, 1208 bp, Mus musculus
ccacagttctgtgccactgaggctctgagacactcctgtgatgcctccgtgctgggtgaggagcagccgtagcctgctgcagcctgtgtgcctgtagggcggccagctgctcttggtctcagcactgtgacggggtgatcatttatacaggttgctgcacatttggggcattctggcagaaccaccctgaacatgttccccttcaacaggggcagaatcctttcgagttggccttctccttagacctcgcccagcacagggactctgacttcagcccacagtgtgaagcccgacctggtgagcccccaggaggtggacaggacatggggtctctggggaagtaggctaaggcagactacataccatctgggtctctcttctctacagacatgccttccagccagcccattgacatcccagatgccaagaagagaggccggaaaaagaagcgctgtcgggctactgacagcttctcaggcaggttcgaaggtgagctgcagagagctgccagctcctctggggaagggacgctgggctatagtcccttacctctccactcgcattccagatgtctatcagctgcaggaggatgtgctgggggaaggtgctcacgctcgtgtgcagacctgtgtcaatctcatcaccaaccaggaatatgctgtcaaggtaagctggggtctgcccccagaggccagtggcctttgagtcctcagatgacagcctcagaaaaccagtgtctaaaaatggccctaagacttgtgactggccaccttgggaatccaggtcagacctagagtcatagaaaggcacaatgacagctggcccttgatcactccatgttctggaggctagcaagccctagcgtggctatcaagaactggaaacttatgtcagagaccatgctggcccacctgtccctaaggctgggcctctgcctctaagggtgactggcctaactaaggcttacaaaccgatgcaggtccccaagagaatcctgtgtgcctttgccactcctgtatatacctagagccttgccaggccctgatgtagcctcctgaccctgtagggccaaccagtcaccctcatgaccagggaagcctggtgcctgtcagggtgaggctgccgctctggatagtggcttccgcgtctgagggtaacagggagaagcaaaaggaagagtcatttggaagttagggtgtcggagcagt

SEQ ID NO: 19073 - DNA, 1175 bp, Mus musculus
gtctattcagaaatatttttggttttgtttgtttgtttgtctttgtttttgttttgagacaggctcttactatgtagccctggctgtcctggaacttattctgtaggccagactggcctccaactcacagatccacctgcctctgcccccaagtgtcagccagctcatctggagatttttgggattactgataactggtttctagtggccaccctcctgggaacagtatctgggctaacctgggatccagtaatgaattcacttgtggctcccacccttagatctgcagttcctggaaggtggtgacaggaacctctctcttcagtggcagcctattgtgtagcaaaactatgtgtgttgtgtggcccctgtgggccacaggaccaaactccagcaggtccctgtctgtcatgccatggagggtgtagcagaatatgactgttcccagctccaacttttgagcctcatggccattccctgagacctctgcactctcaagaccctgaggaattctggttacttttccagaggctgccactaaactaaatgtgtacagtttaagcttggttgcctgagcccagggctgagagacacccctgggtacttcccgaagtcactgtgcccaatacccagctctggaagaatcagggaccagccctcaaggcttgactgagtgtatttctcacctgtaagacttggccaccttgccaaatcccagcagcccagggaggggtccacctgcctcattcactcccacctctgtgccagcctaagaataaagtggtcctctccatactgcgggctgctccttgttgtttctgcccagctcccttcttgaaagatggcctggtgacaagctttgataacagcctgttcgaccacgaagggcccaggtactacaagataacatgaaacgacatagaaagcagactcagtatagctgacaactttctttccttttgagatggggttttccttttgttgcatgaatgtgagttatgtgtgttgtgtggccactgtgagtgtgaaggtcagaggacaactctctgccttttacccctaaccacgcccccaggccccttactggggaattctaggcagggccttcatgccagtcctccagcccctctgatttaagtgaaaagcatacagtttgtttgtttgtttgtttttgt

SEQ ID NO: 19074 - DNA, 1447 bp, Mus musculus
tccagatgcatctggtttgggaacacaaggcaagaggaagggaagagtgggctcagaactgtctccggcgccctgaagggctgtatgctatttacctgccatcttagcactcaggagacagaggcagggttactgcattccaggcaagttggggctacatagcttcaaaaaaataaagtgaggtctaggctccagggagggtaggagaggtgacatttgcgccccccacacacacacacacacacaaacataggcaatttgtgcatgtgccatcccctagggcgagagctccgtgtcagtagatgggaagtgcagcgatgccacgttgctcagcagcctgctggaggaaatgaagaccacgttggctcagtgctgagttgcagtccaggatgtgcaacagaccacagaaagatgtgatgcgtcttacctctcctgttgtgtgtactgtctcacacccagcattaatttaacaccaccggcctccactgtgtgaccctgaggtcctatgttgcatcaacttcttttattatcctttattccgacctgcactcctttagcaaggaaggccatcctgaccctagccagaaaggggctgctccacttcccattctcaaaggcggctgtggactgcagggttacagcaaacacactgatgtggccccactcctgaccccatgctgcctctggaggaacccttccagatgctgctgtccacaaatattccaactggtagcctctatggagaggtgataaggccagctgttaatgcttttccccacagcctgcaaggtcagatggatgaagtgtccttgtgggtggctccgcagctcagctgcagacaacagggatggccctttgattttcttctgttcaacagaactgtggtctgtcttggggttctgttgtgggggtcagtggaagagtgcaatgtatgcctcagtttgtcactacacatcatgggcttgtccctgcagctgtggagggcttagtgccttgcagtggagagtgtgcatcctgggagcagtcagtgcttccccagctgttcctgggtaaggtgaagagacatctaactgggtagctgggcacaagctgagccttcctcagaggtgacagtggtctacagacattctggcttcctttgaggacaactgtcactttagcatgtagagtactcttaccgaccccatgtgaccttccagctctatgatgttccatgattgatttgctgttgacattcccatgtgaagagagatatatcacgctgctgacgatcggtgtcacaatgacccattaaagagtcaaaaaacatttgtgtgttgtgtccccatggtaccccagggcagtccccagtgtgccatttaggctcctgaagctcaggtggtacagaccagtgagtttctccaacctccaccagtaggtgccttgtgtgtggggattacaagtttgg

SEQ ID NO: 19075 - DNA, 1178 bp, Mus musculus
gccagagggctcatcggtacacgacggtgtgcccgtgcctttccaactgcctcccggtgagcctacccttcggccctagccttcgtcacgccaccttggctcttcacaatggacttaactagagctcccagggacagctgaagcgaaaggccccaagctcttgatgaccctcccgtgtctcggtgctactcttgggccacatgctggcttccacctgggccattgggctgagctgcagcagtgcccattgtttctgtcactctagcatcccacccagctaggacagacaccccagggtcagtgctggcccactgagtgccatgtctcccagcaggcgtctccaatgaggcccagtttgtgttcaccattcagagcatcgtcatggcccagaagctcaaaggcacactgtccttcattgccaaggtatgcactctatgctgaggtccaggtccctcccgctccccaggggatgtcaggcatcccaggaaagaaagtgcctgattggaaagtccaccctacagcctttctccttgcaggatgatgaaggagccacccatgagaagttggacttccggctgcatttcagctgtagctcgtacctgatcaccacaccctgctacaggtgtgtctccaccccaccacacagctcgtgggaggaaaggaggggtagagtttgctgatgtgggctgtgaggtaggagtaacatgagagtgctcagccttcatcacaggcgtcgcctccacctgaggccacctcttctggcaggtgacactgcagatggttgcctctctgtcccggaggactaccctgtgtgcctgtcactttctgatgctcacatgtaggtagcccaggctgccttggagtttgaagctgccctcatgccgcgacattcctaatgccaggtgactgctgacacccaggccctgccatcacacactctctgtcctcccacagcgatgcctttgcaaagttgctagagtcaggagacctgagcatgaactccatcaaagtcgatggcattagtatgtctttccagaatcttctggcaaagatctgcttctaccaccatttttccggtaagcaatgttacagtgataacactcttggtggctttgtaccaaaaatgacagaagctactttcccacccctaattagacccttgctgcatcaggcctggg

SEQ ID NO: 19076 - DNA, 1165 bp, Mus musculus
tcagccaggtgcgacttctggaacctaggggcaggcttaggccaggaaacttaaaaggtccagtcagaaatagacctttatggtgagttgtcagagccaagtgccaggagtgatatgtagggaactggctctgtgcattgctgtgagtcgttttctgtttgtggtctttgggataaactcagtaagcatgctcttcatcactgaggcacaccttttgtgtgtgtttgtttggtttttcgagacattgtttttcggtgtagccctggctatcctggaactcaagctatagacaggctggcttcaattcagagatccatctgcctctgcctcccaaatgctgaattaaaggtgtgtgacactagtgcctggcaaccttttgggtttttaattcagaatcttagcatggagttcaggctggccttgaactgacagtgttcctcctgccccagcctccccagttttggatgccagacaggtgtgctgttagctgctgttgagtataatgggttatgtctactcttgtccccagtggaagggcactacacagcccatgaagctgaatactcggccgtccaatggacttctgcggcacatcctgcagcaggtatataaccactctgtcactgacccggagaagcttaacaactacgagcccttctcccctgaggtgtatggggagacctcctttgacctggtggcccagatgattgatgagatcaagatgacagaggatgacctgtttgtcgacctgggcagtggtgagtgtcttgcagcatggtctttgagccgaccttgagtcccaaaaaaagtcaaggctgcccatgagtcccaaaagggtcttttcacagaggacactggctgagcgaggctcctgctgccacctccctgctcagccttctcccagagccctctgccctgggcctcctttcacccttgctccagcttttgacctagtggctcttgggttgtggctgcttaaccagaatcgtattcctgaggtgtctggtcatggctctgtgctactatacacttggttcagacactgacacatgcacacagacagacagtcacatatacagacagcagtgttgctggactgcctgcatggttgtggttcactcgactgacacttttcttggggcatgtcttagggtttattgcttcc

SEQ ID NO: 19077 - DNA, 2932 bp, Mus musculus
ttcctaatgatgaggttgcattctcagcctccaccctggagtcgtgtgtggaggaaatcggggtagtcaggtgggtgaggttctaggctggccataggcagaaagctgcctggggtagcatggtatcctggagcagagagttgggcccacctacctctcccagaacagaggttgtgaaaccctgcctggctgtcagccctgtaagtgaagaagagccaggtggcagccctctggccttctccattgggtctggctatgtggtggcagtagcctgggcagcgagggcagcctggccattgccatctggaggtcctagagctagcacctctccagctgacctactctggatgttcagcaaggcagacctggagggggctgggcccactggcacctgccaggaatgcccccccccatacccttgtgccctgctgggcagctcagctgagacaggcatattgaatgcacctaacctgtgctcctcttccctgcaggtaattaggacttctactacctcagccacgacctatgcaaggacggtgtggaccaagactgctgcctgccaggccggcggagccggacatggagccactgtgaatcggcggcaccgcaggaggtgctggactggtccagtttgtactgtcaatagttttagataaagtatttatctttttttttttttaaagtataagcaattctgacttactttattccatcaaagtcgtccaaggcaacctcttgagacgtctaagtgtctgtgagagagaataatataaagacttggcctgctgggctggccacaaggactcctgactccgtcccggtgctatctcaccagcaagcccatgcctgcccatctccacctctgtcctgggtgctgccccaaacatggactgtggccaaacagttctcagatgcgcccccaacatcttgctctgacaccaaaggcatgcctggcatgcccaatgggggctgacctttgttccccctccttggaacttgcctgctgtcactgtgaacaccccactgttaaccctgtggctttgggcgtgcctttgcagtgggtgcagactgggctggggcaggaatgggggttcccagctgggctgagtggtgctgacaggtgagggccactactgcagggcttggtggctcctgtgacaagtgcatttactttgtatttctttgcttttctggctcggggcatgctggtcaggtgacatggggctggcccaatgtgggtcccctggcatctgtgtataagagagtcacatgatcagtgacagtattttatagagatttgatggagatttataaatttcatagacttgactgcatttatttttagattgtataatgcacagtgaactttaaagaaaaggaaagaaaagtgaggaggaaaaatacttttatttattcaaatgcacaaaaacgaaaaaaaaaaaaatggcactggccagggaccctgcaggagtgtggcccagatgtgctgggctgcccagggcctctggtcactatgggcatcgcctgcctatgtctaggagttgcttcctggtcctggggataggtgcactgggagtgaccacagaggtcagggctgacttgatttttctgagatggtcctgactgccctcaatgttgctcacttccagtcgtgggttggtgggctgaggggagaggccatgttgccccacccccacccccacctacttcccaaagtagttgtgaagacggtgctggtgtctcccactcccttcccaccccgcgatggtgctcatgttcggcaggcctgttcctgtgcaccacagctaactaaggtgctgcagagcaggatagccgaaacaaaagctagcaaatcccaggcctggaacaaaaccccgagtgaacactgtacacaccgcccgcacgccatcctggcagctgctgctccagcagccattgcctccaccttacttgagtgttaggggacagacacagcatgttcatggcccagtgggccacaggtgctctgggtacaactgcaagtcctttcctgagcccataagaaacaggaacccacagtaaactgaccatggtgcatagtggccccaggtaccctgtgactgatgggcctagtacagggtaaggctgcctcagtcatccttgccactccaatccaaggttgctgcagggctttgagctcaggaactgatagaaagccctacagactgggaccaccactcccacactagcccagacgggacacacctcccagttcccaccctcaacctacacagcttttttgacagcctggcctgtttgtttgtaacttgatgcagcatcgctctgtcttgtgatgacctctgtacttaaagggtgcattgttctcttcccttggttcccccaaggcatctcacacattgttgctgcctttagacacagtataataaataaagccgttttcacttgagccagttctcagtgccagtttttctttgcctgtttattgctgtccaacctggactggaagagcagagtgcctatctgtctcttgtgaggctgacagtgactctgaaggattcccgctttgggaggacccagtctcacttaagaatccaatcctgactgagtcaaagccccttgacacaaagctgtgtcaaagcttgcctgttttgttctctgtcccagatgctctggaactgcctgtgtcctaccctcctcttcccgctgcctcccaagtgcacacagcctgtttagaaagccaggatttaggtgtcccttacaacttgggcagaacacacctttccccatcagggttacctacaactcccacttatatgagtaccactccccaaaacccaaggatggatccacatctccacagtgagggtgtccaaccagggttcaggcacactgcgagccagaggcttgtccccccaagtcctgcctacaccta

SEQ ID NO: 19078 - DNA, 1099 bp, Mus musculus
ccccgggtgagtccccgctgagacctcgcgtgtgtccacagagaatgacggacaagtgtttccggaagtgcatcgggaagcccgggggctccttggataactcggagcaggtgagacatctcgggaacccggggtggtgaggggcgcggggtcaggagcgtctaggaggttgagagatgtgcgcgtgcgcggcctctagccttagctactgaggaagttgtgcgcgtgcgcggggtgaggacccggcttctgtgcctagatcggtgcagccttcatgggtgatcctcgggtcgtgtgaccgtcagtcagggatccccctccacgctttgcagaaatgcatcgccatgtgcatggaccgctacatggacgcctggaataccgtgtcccgcgcctacaactctcgactgcagcgggaacgagccaacatgtgaccgggacctgtgcctcgggacaccgtgcttatggtctgaactgttttccctgccagttagggtgtctcctcctagccgccctgaagtctggcagcatggagggcttggggatcgaggcctctcccctgggttgctgcgtccagctcaatctcagaagagagtgaggacccgacagagcacagggatctggctggccccactgacctgtgacctcaggagagcaggccaataaatcgctgctggggcagtaaagcaggcgtgtcacctcactgcttcaggtcccttcccctgagtaggcccagacctcccagggtatctttccccttggggtcagtgggctgctggctctcagggaattcggagcatgatctcaggtgtttggtcatcccggggagaccagccgaggttaagaagcaaggcttcatgtagccttcacctatcatgcatgaggcccagggtgctgaccttaactctgaataaaccaagtgtggtgcacacctgtctgcccagcacttgagggtgggttaagtgtggaggcaagaggattggtacatgagatttggtcaatttggtcagtcccaccaaaacataagcaccaaaggagccaagttggagacatgccctgctcctggagactcgtggctttgacagaggttctgagccagtag

SEQ ID NO: 19079 - DNA, 2047 bp, Mus musculus
tacaggttccacagtcttgcctcagatgcagacttacccactcactgtgtgggctctgtgacaccacagacctcagaggccacactcctaacccttcagccaggattccctctgcctagagcttggggtggggagacagggactccagcccccaagtctgggctggggacaaatggaaggctctggaatagggcctttcacttgcttgggagcaggctgcctaattgcatcctccctcattccttgcagggggacccaaggactacctcaaggggctgccgactgatgtgaaacctgccccacggtcaccatggtccccagagcccctaaaactacttttttatggtctgctctcactagtccttggtctgtttctcgatgactgttaagcaaccatgagaatgtgggtgggctctgctgggtttccgagatggaggtgccctctgcccaccggcctgacctggccccatgccgtcaagatggtatagaggcctggggctaggaacccgcaggctgagggacttgggcctggatctggggcaggagaatggctgctagctcagggtggactttgtatgaaactggtgattcagttgttttctttgaagcctttcaaatcaaatcaaattcagaatccaagagtgctgtggggcccactagcctgtcaggatgtggtggctcttaggacacagggcagaccctcctctcctggagttgatggcacctgaaaccagggatggcccagctttgtgctctgaatctgaagggtttataacagtccccagctccagggcattcacaggcttctctggtcccagattctgaattgttctagtcccttctaaagcggaggaccaaggaggagcgagttcacacatgggacgacgcctcccatcctaagactgaaggggacaggcaaaccgtgggcgttgtgccttcaggagcaaaggctgcaggttcccagccagtgactgctcacatgagtgtggccacactagctatgctcctggcctctcctgtatgaatactgtgtggcccctctgtgccccacctcgatggcaaggcctggaaacttgcttccctgcaacttagtgccaggagccagccagtttcacctgtcacctccccaccactgacacatggtatttttttaaagaatatttatttttttacatcggtcagtaacgcagctcactgggatgatgctctgggggttcaggcctggagctgccacaactggcagcttcctttactgagctagggcgagttctttctctctcctggcacagctgatggtaggaagagtccaggcctagtcttcccccaaggcaagagctcttggccacaggatgccaccactgccaccaacctccagaacccaccagccacctcctgcttctagatacctccgttttctttgtgaccggcgttggatcctggatagttatggctggctgcagtcactgcgcagctctgctgccttgcccacagggcaggtgtactctgcactggagctagcttccttgtatttgaggagcaggtctagagtaatctgcaggtcctcaggggtctgtttctggccctggctaggtgagatggttaccggagtggcactgctgctggggagccgccggcactgcgcacatcgctcagctctacagattgtttcttttataagatgcatgccaaacgtgtgttccaccttttcttttacgcctatgatttgtaatatacattttacaactggaaacttttgtatactcaaataaacattgactttaactgcagcctcagagtagatcttcagattaagataggagcagcaggctggtaagatggctcagtgggtaagagcaccggactgctcttccgaaggtccgaagttcaaataccagcaaccacatggtggctcacaaccatccgtataactttaaaaaaaaaacatattaaaaaaaaaaaaaaaaagcagcgaggattttatattgtacgcatgcgcagcggggaggtccaggacaaaatgaccctggtccagcccttgccagggcgt

SEQ ID NO: 19080 - DNA, 1207 bp, Mus musculus
gctgatttaaaagaaaaaagtccaaacttctgcaaacactaaagcaaggaaggacacagtgggaaatcctcagagcagctcggggtcagacaggagttgtgactttttaaagtgacacagaggtcaagttggctaccccagtggtcctcagagatgctgaagcttcctgtacccgggcaggtccccaatcctgcatcctgccgtgcagcaggatgggggaaggttggtttttatcctccctttgccttggcattgagtgcagaggtgagctacactttgagaagcttcctgtctgttctcaggacctgtgtggttgctaggtgaccgaaggcgtcagagttccttgtgatctcactcagctcagaaaaagtagagatcgatgtccagaaacaataagaatcagtgctccacaaatgggtcgcctctgttcatgtgtgcaagtgtggatggaagaacggatatgtggatggatggatgggtgggtggatggatggatgatgggtgggtggatgggtgatgggtgggtggatggataaatggatgaatagatatgtgggtaggtggatggatggatggatgggtggatgcactggtagatgcacagacacacagatggatggcaagacaggtggatgggtggatgtatagttggattcatgagtgcatgtccaggtcagaggacacttggcataggtttcaggaatcaactttaggtcttcagattcctttgtagccaagagttcccaaagcacagcctggatcagcagtctcaaagctgagataagatgatccgagctcatgaggacgagtgattggaaaggcctggatgggtgcgtcttgtttatatggacaggttctttctgtgtggctgtcaccactgtcaccactgtactgtactggtgctcgctctgtggaatccatggagctccgcctgcgctgcctccaagtgctgggattgacggctgtgccaccaagtgcactgccagcagcttccctaagataagatgttatacgttcttacgttcacacaatcattcttgctgtctgtttcaagaatttaaaccagaccaaagttctctctttgtcccctggccacttctgttcctgtcctggagtccacacagtgtggcccttgtgtttgggtgccactgatgcagatgtcctcaagacacactgtgggaggaactgggtgacactctaagtgact

SEQ ID NO: 19081 - DNA, 1198 bp, Mus musculus
taatgccagcatcttgggacagcctgagtgaggactctctggggacataagcctgccacagctcaccaccttccctaacctggggtctgtgtagcaggcttcacctcagcactgccttccctccgttagctgaatgtcagactcctccctagtgccctgtcgccatggccaggtgaccaaaatgacttgtcgagtgtgcccctacccagcgacactcagatgatacaaggcacaaagagacatggccttggggacagctggggcttgggcattgtcctcagagccccaatgcctgggctcccttagtgctgtaatacacccaggttcacacgccgcttggcacacattcagaaccccgggctcccagtgaagggcccactctgccagtggttgaagcctctgctagcagtttctggggttctttcccgaggagccccatcatgtagatgtggtgatgtacccacagtgccacctgggcttactgtccttctatcctctacttaactatgggtgggtggggggcatccaaatggttctccagcttcccttggccccaggtgggccccacggggccaccatgcccctgcaggtatgggctcaggtgacaaagactaggccagggtaggaaggtccttagtctggccatcccaacagggagtctgcacctcccacatgggtgcatacaatggcattctctcctttccagcaccaactgctctgcccctggggacagcagcagcagtggatctggaccctccccattagatctcttgagtctctgagagtcatcccaagtgccagctcactggcaactgggggcctctgtgtctcttactgaaagttccagtttagctgacagcccttgccccagctgcaggagaccctgggccatgctaggacctgtgcagctgtcaggaggaatgggcatggaggagaaatggacatgccgggatgctgcaggggccaggccacccccaccccactgcctcctgtgggggacacagcaggaacacagctagacaggaggaaagagggcggtgcgggtggcccagcttcactgctgatctgtgtgtgtaataacagcatgtcagcttctcctatggcttgtttgtgttcctgtaatagaagttattagtgcaggcgggatccggcacagccagctcctggcatcctgccctcattgcactgcaggggcctg

SEQ ID NO: 19082 - DNA, 1218 bp, Mus musculus
cctggaggagtctacagaagacgacacaccagcaccagttcctccagccacctaggagctgcagggaggggtggggtgagtgtgagtcactgagtgacagcctgggccctcaggtctcaggccccaccctgccgggttcctcctaaagggacttgagtagctgactctcatccccactgccagccccagctgggcaccagcgtcccacaccctcgcctggttgcaggtcccagcaggtgcccccgcctgccttattccagtggcctgtgccacataggactgaggcctgtgacttctgcccagcgtgtggaccatccgtgtctctttccagcttcccctccatctttacagccatcagccaatcctaactttgtgtccagtccagcaccatcctcagcctgggcagcagacatagacattgacccatctgtgtcatcctatccttgatctcatgggaattcaatgtctggggttggcagggagtttcggggtatcggccctgaagcagccaccagaaccatctttgttggggtcagtctgagtgagggtgtggatgttcccacacacattcttggccctaggagcaggtgatgagatcacaggacagctgaacccttggggggtcatgatggcatcaggctttggcagatagtgtcagagctgtgtgtgtggtaggtagccagtaggaagatgggcccccgagggcagcagcgccaccttgggcacagagtgcctggagaataaagacagtgatgacgctctgcctctctgcttcctgtgtcagcctcttgagcccctctgagccccactgctctgagagctaacataccacagcgggagaggcggtctgtctggcctgcaggatgcagttgctgtgggctccagtgagtgtggcctgtgcaccgcatgggaaaggaggttcccaccctccctgagggccaggccatgcagccagcaagccgcccccctgctagttccctgctgagggccagacagcaggggacatttaggattcagtgagtacatcttgtccggtttccatagatgacaggaagatcatgtgggctgcaggtctgtggctgtgagggctcaggctcactggggcaggcaatgagagggcacccagcttctggaaccagtctctcaatttctgtgtggccagagagaaaggccttgacctgggtgtgtagtctaaagagtggatatccctgggtgtaa

SEQ ID NO: 19083 - DNA, 2037 bp, Mus musculus
agaccctgccagagatatttgaagcagccacttccagcaaggtgagcctgggcttcccttgactgtgcccacgatggcagtgtgccgttctgtgctgaggcttgacagcgctctgagctgtgtggcatcctgcaagggcaggtgtggcagggtacagtgagattgtttcacccccagcaggagatgccacaggacccgcgggcccctgacaggacaccaccctctgaagaggactcagctgaggcagagcgcctcaaaacggaaggtgagggagacagatgtccccatggggtctgtgcaaagtgctgtagggatgcagcccagatcagccaggtcccattggcgggggcggggctggggagctgaagagatggtgtggcagttagaggcttcctgcactctcaggcagctagctcagggctggttctaagcccaggtttggggcatctagtgccctcttttggtgtctgtgggcactgcacctacacacatacacacacatatcccccactcagaataatatatatttatgctttaaagtggcagacttaggcaaatctctgtgagttcaagacaagcccagtccacatggtacatttaggccacccagaactacatcataaaactttgtccccaaaacaaaacaaaaaatatttttaaaaattaaaagatcctggtttggtggctcaaacctttaatcccagcacttgggaggcataggcagatgggtctttgtgagattgaggccagcctagtctgcagagcaagttccaggacaggaaagactacatagtgagaccctgtctcaaaacaccgaagccgaggaaaataaagcttcatggcctgtgtggatgacgcagctcaggaaacacccaacccacgcgctcaggcagactcctggtcttgattgcaggccacgtgtggctcccagaaggcaggtggtcttggcatttaacccaggctgaccctccctgtccatggctctgcatgggatgtgtttggctggaaaacaagcttgtgtaagctggattcttgttattgtcaccagatgcagcattggaccaccatggaccctgctctgccactgtgcacctggcacacacaaagctggcatctgtccccaataccacattcaccaggcttatgtcacatctgttgtccccacatgggagaggcagggagggtcaagagctggttacatcataagttggaggacagcctaggattcatgacccctcacctgaagaaaaaaagtcccagtgtgacctaaggatcagatcttcctttgggaatcttagaccagaggagataggtgttatatgggcagcatgggccagcctgggctcctctgcctctctctctctctctctccccccctgcaggtaatgagcagatgaagctggagaacttcgaggcggctgtgcacctctacggcaaggccattgagctcaaccctgccaatgctgtctacttctgtaacaggtgtgggtggtgtggagggcactggtgagcgatggggtggggtgtggactgtgcatggtgagctgcgtgcgtgtggctctgcctgaagaacggaggtcaggtgtggcatggtgctcacataggaccctgagctgtttagtcagccctgcccagcagacaaatggacagtgcagatgcactgtcctcgtggctctggttggcatgcaggctgctcttcagctgccatcatgtccttcagcttgctttggtgtaggaggcagggtttcacggagccctacacacctgccaagtcccgtgtgggctgtgagcttctgaggtccctgtgtggtgggctacagtatccaccttctgccacagaccagctcctggagaggcctcctgtggagggcccgggagtccccgactgacagtttcctctccccagagctgcggcctacagcaagctggggaactacgtgggggccgtgcaggactgcgagcgcgccattggcatcgaccctgggtatagcaaggcctatggccgcatggggtgagtgcagcgatctattgtgggcc

SEQ ID NO: 19084 - DNA, 2070 bp, Mus musculus
atgttcgcacagctcccaaggacactgcagacagagctgggctctgctgacccagatccctgagctggggcagccgtgttgtccttgccgttttctgtgagcaagtgtctggggccacaggcacccagccacactgtggggtttagtttaggagtaggggtggtgagtctcagcccggagtcgggaccttggagcatcagcacggctgtgtgctgtgtgggccttcgctctatggctgtggtaccttcactctctggtctgaggccccagcatctctggcgaggcccattccctgctcagcactcatcctcacttgctgactggggatatcctgccaaggtcacctacagccctgggaggttcccttcaggttccaagctcagagctgctggcctgacttcaaggctccgggctgagcagcgtccgctgcatccacaggtgggctcccggaggactttctgagctctctggagaaggcagaggacggcaagctgaaggtcaccctcaagtaccctcactacttcccgctgttgaagaagtgccatgtgccggagacacgacgcctgttggaggaggccttcaactgtcgctgcaaggaggtggggctgtagacactgctcgctgtccccaacgcgtgctgtcttcccctgggacatcctgctgcagttgcagactgtcttgctgcagctgcccgctgtggccctgtgctcaggctgtcacagggacccctgttggccttggaacgggcagtgcccacttagctcttgagcaggagagacactgtggctcattccctggtggtaccatgttctggccttgtgtcagccaagggattgcaggtaagtggcccgagctgcagcagggcagagcagggaatgggtcctgtttttacttcctttggctttagagtacctggagcctgggtcccccactttcctgaccctgccccaaacagaacgggctgggacttaacacgctgactgagctgtggcctcggatccagggccatgggctctacctcccagaggcacgggaggaataattactgtcagttaaccgacccaactgctcaagactcctcaccctatagtctcccctgacctcccaagctccccatttgtggctggtgctgcctctgtgaggtctcctgcccacctgggtgcatgagttcctgtgtggtgctgggcatgctgtcctggccagtcctcatccatcctctggccacctcttccccagcccaggcttccattgcttgctcttgcggtgctcaaatggagcctgggcttgtctctactctctgctgtgccactctgtgtgtgatcaagttgctgcagcctacaaccagccccaggacagccaacctctgcacctgcagctctggttggggtagtgcagagctagagccgccatgcctgtgtccctgcaggagaactgtgccattctgaaggagctagtgtccctgcgagcacagaagtccagcctgttggggttccacacacacgcggactacgtcctggagatgaacatggccaagaccagtcaaacagtagccaccttcctaggtagccactctactctggccatggactcccatctttgcctcacccactcagcctggaaggccattgtcatgaccgtgtcaggggcagagcctgcagcccaagtccagctgcttccttccacacgcccttgccctggcagtgaggggcccccctggctctctctcctggggttctggatggtgatgtagctaggtctcctgttgcatgtgggtgtgtgttgtcctctttcctgggcagcaggcaggggtggcggagggtgacggtggtgtctctgcagatgagctggcacagaagctgaagcccctgggtgagcaggagcgcgcggtcatcctggagctgaaggaggcagagtgcgccaagcggggactgccattcgacgggcgcatccacgcatgggacatgcgctactacatgaaccaggtggaggagactcgctatcgtgtggaccagaacctgctgaaggagtacttccccatgcaggtggtcacacgtgggctgctggccatct

SEQ ID NO: 19085 - DNA, 1181 bp, Mus musculus
ggagacctacttccacgagttcgggcacgtcatgcaccagctgtgctcgcaggtgagctgggcccgcgagatcactcctcgccagccctgggccttctgccctgcagaaattgtttttattatatttgctaacttggtgtgagggcatgtgtgtgtgtgccttacgtgtgcagaccccaccagcatcaggcttgtcagcattgacccactgacctgacctgcctcttccctcctatgctgtgtctgacagtgacctaccatctgtcacagtgccatctcacccacacttgcatgccaggatgactttggggacagtttgtccaggagggaggctggagcagagccttattgagtgtgagactggagaaaaggagccagggaggtggcacagcctctggcctcagcagctgctggcatccagtgtgcagaagccagggagctgacatctgccgtgcctggtctaggcggagtttgccatgttcagtgggacccacgtggagcgggactttgtggaggcgccgtcccagatgctggagaactgggtgtgggagaaggagcccctgatgcgcatgtctcagcactaccgcacgggcagcgaggcccctcaggacctcctggagaagctcatcaagtctcgccaggccaatgcaggtgagccgtgctgctgcagccacgttgctcagccaggtgagaacctttgcagtgctttcccagcctgaggctgacctctgacctccccccaaggtctcttcaacctgcggcagattgtgcttgccaaggtggatcaggtcctgcacacacagacagacgcagacccggctgaggaatatgcccggctctgccaagagatcctcggggtgccagccacaccaggtaatgttcacactgcagggccaccaccatcccagctcccagagagctgagaattccccaccctggggggcggggggctgcaggagattcaggccttacccgtggaggctgtgcaccctcaaagtatctccatgggcccctcattgcgccctgtgtctgcccaggtaccaacatgccagccactttcggccacctagctggcggctatgatgctcagtactatggctacttatggagcgaagtgtactcgatggacatgttccacacacgcttcaagcaagagggtgtgcttagccccaaggtgagct

SEQ ID NO: 19086 - DNA, 1144 bp, Mus musculus
acatagcaagacactatgtcaaaacaaaactgagccaggcaacggtacatggccaccatcctcatacgaggacgagaaggtcatatatagccctatctcaatgacaagaaaaaatggccactctgccctgctggctgatgcagtctggttttaagtcataggttacatggtataaaggaaagcctacctttagggattgggggatgttgggtggccttttggctggtcctgggcctagtccactttcaatttcctgtaggggtgacacagaaacagtgttcagctccagagactgaagtcagggagtgactatgccaccagtgtggctcccagacctggggtgcaggcagcagtgggctctcctcacttgctattattggcttgtgttaggcagccccacccctacccctcagcccccgccgagagagaacttgtcactcaagagtaggaaaatgcagttgttgtcagtggtacagctctttgggtaccacactacagtggtctacattcaacaagacttagaaagggcaagatgacaccaggccatagctttgtctatgcctgtggcctaccctgggctaattggaactgtggtctctgtctgaaagcttgggtgcacagggccttgtcactgatctggaatgttccagccccagcttgaaaaaaggctcggggagcgggggagtggtggtggtggtggcagaactgctcaacctatatctggaagccaaggaaaagaggagagagaagctggggtcctgctgtcatcatccaaggccagacttccttctaggccaccctctcaagaggccctgccctcttcctactgccacacttacgcccagttagcacagaagggaagctcttctgggtgtccttaagtggggacacctgctaggagcctgctggagagctcacactgtcatttgcagtgtgcccatggcagggagagcaggaagttctgggggctcagcctgggctgtgtcggatctccttaagaaaatgtgttgaggggctggtgagatggctcagtgggtaagagcacccgactgctcttccaaaggtccgaagttcaaatcccagcaaccacatggtggctcacaaccatccgtaatgagatctgactccctcttctggagggtct

SEQ ID NO: 19087 - DNA, 1220 bp, Mus musculus
ggcatgggtggtagcttggtttcctctgctgctcactagagggggctatctggcctggaggcatggcaggaagggggtatccctagtgtacatgtaccaggcaggcccgggtccaggagctgggctacaccctgtcctgcctgaggaacccaccctggaagcagggcctgtggtagtgccagttcagacctggcccatggctcccgtttgggcttccttgtgccatccctggagagactgaagctgggggcctacctcaggaccccacgcctggtccacaggcacggggaggccctagccagtcgatggaactcttcctctgtcacgtcgggtcttggtgtgtcttgtgactgtgttcccctggggaaactgaggccaggctccacccagagattatcccctacgctgactgctgcctctttctgcaggtgtcgcggaagatggctggcggcgtggacggccccatcgggatcccgttcccggaccacagcagcgacatcctgagcggcctgaacgagcagcggactcaggggctgctttgcgacgtggtgattcttgtggaaggacgtgagttccccacgcaccgctcggtgctggccgcctgcagccagtacttcaagaagctgttcacgtcgggagctgtagtggaccagcagaacgtgtacgagatcgacttcgtgagtgccgaggcactgacggcgctcatggacttcgcctacaccgccacgctcacggtcagcacggccaatgtgggcgacatcctgagtgcagcacggctgctggagatcccggccgtgagccacgtgtgcgccgacctgctggagcgtcagattctggcggctgatgatgtgggcgacgcgagccagcccgacggggcgggccccactgaccagcgcaacctgctgcgtgccaaggagtacctggagttcttccgcagtaaccccatgaatagcctgccccccactgccttcccatggtctggcttcggtgcccccgacgacgacctggacgccaccaaggaggctgtggccgccgctgtggccgctgtggccgcaggcgactgcaatggcttggacttctatggcccagggcccccggctgatcggcccccagccggcgatggagatgagggtgacagtaccccagggctgtggcctgagagagatgaagatgccccgcccggagggctcttcccacctcctactgccccaccggccacc

SEQ ID NO: 19088 - DNA, 1213 bp, Mus musculus
ttggggggattaaaaaaagtaaaatgacaaaaaaaaaaaagtacaaaaacaagagaaaataaacacttaaacaggccggcagcctgcacgccacctcctggagcagcccgcagggcgccgggatttcggacactggacagcggccggcagctgtccccgcttccctgcgttgaagccgagccctgaccccggagcgctgacccagtcgcgagcagtttagttgagaagccatggtggggcggcgggccggggacggcggccacaatgtgcaataacgtggtgtcgcggggccggacttgggcacggacctgggtggcatgggggggtgtcgttttctagccagctacctcggtaactccaattcattcaggttaacttccccatggggcagccggccgcgggcttgggctctgtcgccctgctcttgtgtggcccgcggcgtgtgaggctccccggctgcctccttaccttcgggagcctcgctcttccaacgccccgctgccaggcagaccctggggcatcctgctgccctccccacccgactctgtcaggaagcaatacccggtccagtctggagctgggctgcctggcggtgtcaccgcatgaactcgccgggaggccggggccctggccagccacacggcactcttttctaatatttgtattctaatttaattgttttttaaaaatgcaaataaaaaaaatgaacgaagagtagtcagtccggcatctgaacatctgtggtttctctgtagcccaggctagcctgcccgtccttcctaggagctgggggtttgggggggggggggggcatgaattaaccaagtggacttgttgggcagccagacactgatgagcctcaacgttatcaggacataggggcaaggatggtcaaacaaaaggattagcccctggtctgagtacctaccaaccagcaacttgagtgggccccagtgtgagtactctcccacacagacatttgaactcagactaacaagaatttgtgtagaaaatacgctggaatattactcgaccttgatcagaatcgaggctcagacatacgcacagagtggagggatctggaggacgttgtgcgcagtgagaaacccatgcgctggtacagtggccactcacatggatggagctcaagtacaagtcgagaggactgcacagtgtctgaaacctcagcatgggagagggtaagcagacccag

SEQ ID NO: 19089 - DNA, 1240 bp, Mus musculus
gctcatggctgccatggccctgctgggctcaccccacctccttcagggtgcctactccgggtaggcatatctgagtgtgcccaggtggccctgagctccagctctgccctcgggtcctgcagcattgctgcatgcagcctactctcacccagggacccatgggctctttgtatacatgatgctgggctggctgcaggggtgataactcctcaacccagccactccactcccctagttcaaagtctgcctatactcattgtgtggcacaggcaccacagcctgtgggtcagaaggttccaggccagttgcacctagtcttagctgctattgtgaatggggtcttgtggctggacagacagtgttccctgacagggatggtggttggttttgcagagctgggtggagctatcagcctgttccccactgctgtgtcctcaggctgcagactcacccaggagtccaggctggtttttgaacccaagatccttctgcttgagcctcctgcacactggggtggcaggtgcctgcaccaccgccgcctcctctccctcagagggctgctgaggctgcatcgcaaggcattgctgttaaacatgcacatgacataagagccctccctgggctcctgcatagtaggccagcattctcttttggagactggacctgggtgcagacgagacggtggcctgcagatacaggtggctacccctctacctttgggatacctggctccagagggacccagaatgggtgaggccagtacatgtcactgaaatctcaggtgaagagggttggcctctgttcagccaggctacctgacccacgtgtgttcagtcccacagagtgcagagaagctgcaagagagcccatgcatcttcgcgctaacacctcggcaggtggagatgatccgcaactccaggtggggcccagcaggctcaagaactccccaggcacacatgtcatcagatggaacccagggtcccttgggttcggtggatgtgggtgaaccttctgtgatcctgagctgtccctgccccatttgtcaaggcagaggtcaggctagggtggttgggttctgtgaccacttagctggtgaccgtgcaaagggctcctgggtggtctgtgctgcaactgactcctgctcttgccctgcccacagggagctgcagcctggagtgaaagctgtgcaggtggtgctgaggtacgagcagccctggccccgcctgcccctgctctcatt

SEQ ID NO: 19090 - DNA, 6954 bp, Mus musculus
acagtcttttagtccgagcactgacgcagtagattaaggcagatcttcatgatttggtgcggtcctgggctgcatccaaagaccttgtttccaaaacaaacaaacgaaaaagtgtaataaaaatacaagcaaggttttgcagaaataaatctgtggcctcaagggtccctttctccagcttttcccagaggtgtcaaattacataacagtctcaaacccaggaaattgaactttggcacaacccactgaccggtccgaatttcaaagtctttttcctattgacctacaaggttttcaagaatcatgttgtaagcaactgtgttctgaggaatctatgtttaaaaacccatccgtggatcttggcccagggtccagagactgagctagccacgccccggccgcgccgcagccactcccacggcagttcaagtgttaagtcccaaagaccgcgctctgtgcatgcgcagacccgtccacagctggctcctagccaacccggccggacgagcacccggcgccgtcacgtgacgcacccaaccggcgtcgacctataaaaggccgggcgttgacgtcagcggtctcttccgccgcagccgccgccatcgtcggcgcgcttccctgttcacctctgactctgagaatccgtcgccatccgccaccatggtgagtctcctcggctccgctagactcggggaccgagacgaatctctggggcagcgggacgtggctgtagcgggacgctgagagggacgggaggaagagacatggctgccctggcccgggcggcaggacgtggtcgggccgcggcgccatatctgcgcgtccctgagggccttgggagtgtcaactgccgaggtcggggtgttttcttgaagtccttcaactccccgcggccgccggggtgactgcgggaggggttgtgcttggtgatgtggcagcgggcaaagcgccgtccccgcgcccctggtgacgggcggagggtgtcctcgggaggtgacagcctgtagggctggcttccttggacacctccagtgggctgaacgccttccgggccctttccggtagcccccgtctctgttttctatctgagttcacacgtgagcaccggtccccataatctaagaaagtggctcactgggcctagtggcgcattgtggcctttgatccgggctttgaccttggcgcacagcacccagtggtttggggaagaggtgtgtgtagcagaggaggttttttcgtgctttggtcccaatcaatccggcatctttgcagtgccgaggtggccgtgcaccttggctttgaattcttgtgctgaggttatgtgacttgagcctcaagatagggtcttctagcacaggcttgctcttaagtgtcgcagttgtcggtttcggcgtttgtttagagctgtggacacatctgtgaacttttgatgcttatttcagaggtcctgggttgtacgtttgagtcacactgtgagctcagctccaatcttgggccgacatctggttcctgcccctgctgtggggtgctattgacccaccgatgcctgccaagttgggttcccagaatcagcctggctgcccatccccccaccacaggtgaacttcacagtagatcagatccgtgccatcatggacaagaaagccaacatccggaacatgtcagtcatcgcccatgtggaccacggcaagtccacgctgaccgactcccttgtgtgcaaggctggcatcattgcctctgcccgagctggggagacgcgcttcactgacactcgcaaggatgagcaggagcgctgcatcacaatcaaatccacgtgagtgaggggacagccccgaggggttgtgctctgggtgtcactcgggtgtgtttgctgccagtggacaaatagtggcgtgtttagggtcctctctgtgacatgcttgtgtgtgctgcctagcctgccttggtcagatgctgaatggactgttgacctcttcctctccgtagcgccatctccctcttctacgagctctctgagaacgacctgaacttcattaagcagagcaaggatggctcgggcttcctcatcaacctcatcgactctccaggccatgtggacttctcttcagaggtgacagctgccttgcgtgtcaccgatggagctctggtggtggtggactgtgtgtctggtaagccttgggtgggagctgtaacagacagttgctggtgttttcatggcccagtaccacatttttgggggtgtaaattgaaatcatattcattttaaggcaaggatgaattctgctctaatttgaaattgtatgtgccagtccccatgtcagggcagggagattgtgaagtccacctaagtgtggggccagtttcctataatttcagtgctctgaggcagaggtgcatgggtctctggaggtgggaggggctgagtggcatagggcctggtacactggacacacttggagatttagcgcctgggcatccataccgtgtaccttggagagtgcttgtgtacatttcacagacaaaacatacgtggtcttcaggccttgaactgtcagtggtttagagtacttgagagttaagggtaaacacttagtccttttcaccctgtcctcaggcgtgtgtgtgcagacagaaactgtgctgcgccaggccatcgctgaacgcatcaagcccgtcctgatgatgaacaagatggaccgggccctgctggagctgcagctggagcccgaggagctctaccagaccttccagcgcatcgtggagaacgtcaacgtcatcatctctacctacggcgagggcgagagtgggcccatgggcaatatcatggtgcgaagctcttctatggggggcggtcagggccacgctccctgggaatctctgacccaccatgatgacggaaattcttcactttgacctgatgtctgttgaagaaactcagtgtctgagactgtgggcttgtggctgggctggctgctgaccatcttgccgggctaactgctgctctcctccctcagattgaccccgtcctgggcaccgtaggctttggttctggcctgcatggctgggccttcaccctgaagcagtttgcggagatgtatgtggccaagtttgcagccaagggtgagggccagctgagcgcagccgagcgtgccaagaaagtagaggacatgatgaagaagctgtggggagaccggtgagtacatggctgtgtgactgtctctacccctgctacttgtggacaatgcctgcctgccgatactatgtgactgctctctacaggtactttgatccggccaatggcaagttcagtaagtcagccaatagcccagatgggaaaaaacttccccgcaccttctgccagctcatcctggaccccatcttcaaggtgggtaagctgtggtcctggcctgtgttcccagccttgggaagtcgctcccatgacctggccttgctcatctgcttcccttgtgcaaacaggtgttcgacgccatcatgaacttcaggaaggaggagacagccaagctgatcgagaagctggacatcaagctggacagcgaggacaaagacaaggagggcaagccattgctcaaggctgtgatgcgccgctggctgcctgcaggggacgccctcctgcagatgatcaccatccacttaccatcccccgtcactgcacagaagtaccgttgtgagctgctatacgaggggcctcccgacgatgaggccgccatgggtatgtactgtaggggctcctgggcttagctcttgggtcctccagccttggcaaccaggtgactcgatttcccaactttccataggtattaagagctgcgaccccaaaggcccacttatgatgtacatttccaagatggtgccaacctctgacaaaggccgcttctatgcctttggtagagtgttctctggggtggtgtccacgggcctgaaggtccggatcatgggccccaactacacgcctgggaagaaagaggacctatacctgaagcctatccagaggtgggcactggccttattttcctgagtcctggctgcttcccaggagcaccctgttgacagttgccctccctctagaaccattctgatgatgggccgctacgtggagccgattgaggacgtgccatgtggaaacattgtggggctggtcggagtggaccagttccttgtgaagacggggaccatcactacctttgagcacgctcacaacatgcgcgtgatgaagttcagcgtcagccctgtcgtccgtgtggcagtggaggccaagaacccagctgacctgcccaagctggtggaggggctgaagcggctggctaagtctgaccctatggtgcaggtgtgccactaggtcttggcttattgtggttggagagggggaacacctggcaaaagcaggggagggctgaggctaggcctgtattggctgttgtcatagggctgagccctatgcctggggaggacggcagggtgctgaccattgttcccacagtgcatcattgaggagtctggagaacatattattgctggcgccggtgagctgcacctggagatctgccttaaggacctggaggaggaccatgcctgcatccccatcaaggtgggcaccagaatgggcgtctcatccttctgcctatgtgcctgaggtgctgcaccatgtgctgagggttctatgcaggccccctggaagccctgtagtgttgacagttgtggtctgtttccctttcacagaaatctgaccctgttgtgtcatatcgggagacagtcagtgaggaatccaacgtgctgtgtctgtccaagtcccccaataagcacaaccggctgtacatgaaggccaggcccttccctgatggcctggcagaggacatcgataagggtgaggtgtctgcccgccaggagctcaaggcacgtgcccgctacctggccgaaaagtatgagtgggacgttgctgaagcccgcaagatctggtgctttggccctgatggcactggccccaacattctcaccgacatcaccaagggtgtgcagtacctgaatgagatcaaggacagtgtggtggctggcttccagtgggctactaaggaggtaagtgactcagcattggtgaccctgtgttctgaggggctgctggtgtctaacttccagctcttcacagggcgctctctgtgaggaaaacatgcgtggtgtgcggtttgatgttcatgatgtgaccctgcatgctgatgccattcaccggggaggtggccagatcatccccacagcacgccgctgcctgtatgccagtgtgctgaccgcacagccccgcctcatggagcctatctatctggtggagatccaggtaacttgtgtatcttaggtggtgtctgtctatcctcctgcctctgcccactgctcaccatgttctctctttttcctcgaagtgtcctgagcaagtggtgggtggcatctacggtgtcctgaacaggaagcgtggccatgtgtttgaggagtcccaggtggctggtacccccatgtttgtggtcaaggcatacctgcctgtcaatgagtcctttggtgagtgtctggtccctggggtttgcagataacctgcaaggcctgtgtaatatagctgcggggtgcagaacagaagcagatttctgtcatcacggccagcttgcttaagggtgccaggaaagacagagctacaaactacacagagaaaccaaaacaaaggacccaggaatccctcctgggaggggtggcaagacagctaagcatgtcccccccccaccccacccccccagggaagtcacctgagtctcctgtcttctgtctaggcttcaccgctgatctgcgatccaacaccggcggccaggccttcccccagtgcgtgtttgaccactggcagatcctgcctggggatccttttgacaacagcagccgccccagccaagtggtagctgagacgcgcaagcgcaagggcctgaaagagggcatcccagcgctggacaacttcctggacaaactgtaggcagcctgatactgccacatgctgcacagtgcccacccatcagaagacaccttgagactgtcccacagtgctcctctagaggctgctggggccaccctgacatcactcagcactcacttgctaccaattctatttatttcggaattacaagatagcgggaatctctctgcaggctggactggcaggctgtggggtgggcgggacacggctcttaacattttcagagggaaacgcgcagatgtccaaaagtctaaataaatgcattcagaggtttttggggtccatggccaagtggagttcccccagagggggaggtggggtaagtgcctccaggaaggcaggcagcctgccttagacttgcagcccggctgtgggaatgaatcattggagtaataaactacagtggttgatccacatgtgctcgcaactctgttttgtacagcgcacgctttcctggttttcagggtatctggctacccttaggtggcctgcggtgattcacacataacacacacactgcaccccgtgcgacagaatgggttttattgtgagttcacagtactgcctcagtccattccacaaacttgaatcactccatagacctgcacatcaggggtttggtctgcgcatacccggctccaggttattggctttcagcctctcgcgttagccaatcatcagccaggagcccaataatgatgtgctccacaagggcggtgtcgagccttcctgtgaatctgtcaggctggccaatgagcactggactctcgcctagccttgggtgatgacgtcactagtcaacgtccgcttccgctgagaggtcagatgctaaccaatgagcgtgtgcattcaatttccggttaaagtcgtagtccaatgagcgctggttttcgggttttgcggaggtgtgcccctgcgctgtcagcgcatgcgtagat

SEQ ID NO: 19091 - DNA, 6954 bp, Mus musculus; identical to SEQ ID NO: 19090

SEQ ID NO: 19092 - DNA, 6954 bp, Mus musculus; identical to SEQ ID NO: 19090

SEQ ID NO: 19093 - DNA, 1805 bp, Mus musculus
caacagagcccctctgtcacctcaggtttgggacccgagcaaaccaggactaggcatgccctgtggtctttctgcatctgtttactgccactggaaggacatccccacgcatgactgtcacctaatgctggactgggagggtccatgttgtctgcctctcatccccttgaagccctgagctggtgccgtgggtcccctcaactaccaggggattctctgccctaagaagggcacagtcaggctgcaggctgagggctgggtcctaagacaccgtggctgaagaaaataagggagaaagtgacatcacctcagcaaagccaactatgtccaccgaacaccagggagattgcggccagtctcctcccctgggcacaccccagtgtgttgggtacagtccaatcgtgtcatgcccctgcttcatggatgttccacccacggtgtgctggtaggaggaatcaggctgaaatgttctgaaagccagcagcctgaagccactgcttttgggccagccgcgtaggcctcttgggttgcaccttcagggacagaggtcaggacctggctggcttccaaggactgcagcagccatggaggcagtgaggagcatgacacaatcatcatggccagaaaaggcatggccagggacaggacccgtgcgggggtggggcaaccgaaggagagatggacagatgtctgtccctggacctcagtccccttcctgttttgggatgcacagtgaacacactggtaagctgctgcaggagttaattcaggggctgcaaaggcaacttgggttgggccttgcacagaccaggcaggtataatatcacacctgtcatcccagcacttggaaagttaaagcaagagggttgtggcaaattccaggctagcctgggctacagagcgaaatgagaccaaaagataaaactcccagggctggccctaccactcagtgggcagagctcacccagctgcgtaagccctgagttccatcccagcaccgcagaaaccagatggggtggcacacagctgccgtccctgacttgggaagtagaggcagaaagcaggcatgcaaggtcatccttggctgtaaccagttggaggccagcctgggctacatgagaccctctcaaaagagaatctgtaaatatctttgtgactccccatcgtgtccccatcctgttctctccaacggccactattgccccaccgtggacggtgtgtgaactgtactgtaaggcctgggggctcctccaaggctgaagaggtgccctctccggcccacttctgttctcctcaagccatcccagcaagtcccctgtccagccccacatcaacctcagtgcaatatgccctccccgtggggtcccttggcacggtactgtctgcagccccttgtctctcacccctagctccactctccggtggttaaaaatcgcatcgcacatcctccccccaatcctgtttttattgttgaatccattctgtaaactacaaacctcgtgtgtcttactcatcaggacttgggatccctcgtcctcagcctatgtggtctggtgtttgacaatccaagcacagtgtcctcttggcaccaaccagaggggcctgtccctccagcgcagccggcaaatgtatgcagtccaggtccccgccccacctgtcacagcccctctttttgagatctgtaataaatctctaataagaaacagctcctctccggtgacttatgcgtgcgtgcgatgggagagcaggcgaagggtgggcaccacgtgttttgtctcccccgctctaaaccctccctggatccc

SEQ ID NO: 19094 - DNA, 2336 bp, Mus musculus
gctgtaggggacacatgcccgggctgcacgtgggagagatcacctggcttacggggacacggacacacgggtcggtagcacggctttatcagagcgcgggtgtgaaagccggaggaggctggccgatggccgggcagggccgctgcaggccccgctgtctgaagtcctgcgcggtgaagcgcggccgctgtggcagcgacaggagcggcacatagtcggaccgccagggcagctttgccccgaactggttcctggtgaccactgcggacaggaccggacgagctctgcagctgcggggccgggggtggggggggggctcccaaatccttatgctgaccgagcccaccaggccacgcccatcctgcgctcccgcacctctgcccattgctggcctagccctccttattttttcgtttttttttttttttaatattgttttcttttgacactagctagcccaggctgcctccgggaccaaaaatccccctatctctgcctccgagagtggagtgacccacgtgcagtactacccccggccccctcctgtccgcatcccctcagctcaccgaactccttgccacggatttgcctgtccctccactgcatgcacccccagcgcgggcctgagttgagatactgcgcggttatcgcggggtcccagaaggccatctcccgcaagtgctgtgtgtaggctgcggggaggcacggaagggagggtgtcagtttgagacccacgggtgtgcacgaccggaggtgggatactcaccgggcggcaggccacgctggcgactctgaaagcagccgtgccaacgcgtgtgggcctcgcggtacggagtgtcaagagcacggggcagcttgtaccaggcatcaccaggttctgagttggtcaggccggtgaaccacacctggccggccgcatcccgtcccatgggcgtgaatttccagcgcacggcttgtttgatggccggcgcccaacggggcccctccagggacacgtagtcattgctgagggagggtggggactgagccagggcgtcctgctggtcccagccagctttcctgtcccaactctttgccaaggtgctgggtgagagtcatccccttctacccatctcctctgtgcactttcccacctgcagtctatatcttgtagccgagaatggccctgtttgaggcagttgtcagtgttgacctggcagcaatcctgcctcagccttgagccacttatggctgttgggggaaggagggaccaagggtgtgcctagcctgtaactccccacagatggtgcatgcatgggaggccatgcaggctgcaggagtggggcttgcaagggacccacgtgaggtggcctgtcatcagcaccatggaaggcccaagtgtgagcagacctatgaaatgggacttttctgctaggtgtgggtggcgacactaagtgtgccaaggcaggaggatctctgtgggcttatgaacagctcgggatacacacaagaatctaaaaagggagggcattcaggcacatggctgccactgcagcacctgtagacaggagaatcaatagacccctctgcttgggagtatgagtggcagcacctgtctgcttgggagtgggtgtgtgcaaatgcctaacttacaacccttgcatacctccatcccagccacctgagctgctggtaggggtaggggatctggggtctgggtgaagaaagggaccaagggcaggaacccaccggtagagatggtcggggaagtagagttcaagggtgcctgagggaacagagggccgagtagcctcccgcctcacgttttccatgtctggccctgcctgcccagaggctctagtcaccaaggccctggggccattgttgacagggacaaaggtatcccagcaacagggaagcgggcagccacagtctaagacctcagcttacttcctggtgcggggctgggacccaaagtgttccctcccccctccctgccccacagcgggaggtcatgccctctagagcgtgggtctccaccccatctctgtcctcaagacacatccaagtaagggcacagtgacaaaggccacaaagtatgggccatgatctagagatccacagaaggaagtggatacctaagtcttgggttggggagaatgctctgggatcactggtggcatcgctgaacatgcagagcccagggcctgctcattctgctagtgcatcctgtgtatctcatgacaataaacagcaacaaccaatctcatagctcagtcaaccctttacagtctgtataggcggcgctccacttgggttcctgttttctcaccagacatcacctccccctctctggt

SEQ ID NO: 19095 - DNA, 1280 bp, Mus musculus
ctacaaaggtaacatggcagggtggtgggcaagcctgctgttgtgtccctgggctctcacagccctggcacacagtcacctgcatcccctgttcccaggaatctgtgtctgtgctcaacctcttcacccggatccgatagaccccgcaggcgggatgtgaagcccacaggcagagatggagcagccagcatgcataggccttgctgtgcccgccttccccagaagcatctggcgggcgggagccggagaccccagagtctcattaaatgcctcattgtgagctgtggagccagtgtctgggacggggacatggggaccctcagccagatggacacttgccacctgttaccactgcccaagccatattggacacagctgagcaggaggctgagatcccatgaaatccccaaacccagtgtcacctggggacctgagccgttgtgcccctctctgctgccactccaaaccagaagaccctgggaggcactggcagggacctgggcctctcaccctgtgacactcttaactgcgttgactctgattgcattgccaccctttgtctgtgtgtgcgccttctgtaacccctccccgtgggtgtcagctcaccctgtccctagccagctgccttgtctgcctcttcctggctgcctctaagcttcctgggcctccctgtcttcataccccatctccactgccccttgcctggggattcccagtgtggtggctgtggcctatggtgtgtgcacgtgtgtatatatgtatttgtgacaccttggggtcggtctcctgtgttttgttgccttgccccaaaactgctgatggctggagaagcccctgggacacagtcactatggggttggctgcctgcaggcctgtgggagtcatagccttgtgagctaagtgggttctgcacttaacaggagtttaaggttcagggccacctgctgctgttgacatctgtacccaaaagcaaaatgcctttagatgtgcactagtgtcacaggcccttgtgacctcctgttggtggaaatcctgctgggcgtgttccatatgcaggggtaggtgcagcctgccttctgattcctggctgaccttcttggtgtgtgtggttcagaaggcacctgccctggacagagcagccagctgtgactgtgaaggccatgaatgggaagggctggtatacaggtcagggtgcaggtgagtcagagagtaaggaccaaagcctacagagccagaactgcaagcagggagggcctgtggcttgggctcccaccccacag

SEQ ID NO: 19096 - DNA, 1173 bp, Mus musculus
gggggagggagtcgggttgccactgagttccgccatattagctaccgcggaggccgggggattcccgtgagcagcggcggcggggcctgtcgcaacggcggggcctcgaacaggcgcggcgtgttcctgggaccggcgggaaccggcgggtgccggctggcgaccggagcgaggcaggtgaggacacgggtgactcggggacccgcccccccagccgaccccttccttctctggggctccagtgcggcctgatcctgaaccccacatcccagcgacctccagtaccggccccgaccccgccagctctctgagtctgtcagagtcctccatccccagagctctgctctgatagttgctcccctcgaatccagggcaccacccgtcttgttcccccgaaccccagaatgcaaaccagcttcccagatgaggccctgagtcaccccaaccctgagtcccctcacccggcaacctcgccttgacctcgctctgtccatcacagcaatcatcgcccagagccttgttcagagcacggctaatgtccaaatccaggcattccacatgttgcagctcagaaccctaggtcaggctccttgcgcccccaaattcaggtcaccctttactacttccaccaaaaccacccaattcaggtgaggtcctgagtcagatctcagacggtctgtccccaatgacctcgccctgtcaccaacactctgtattcttttgagctatgttcccttaaatttagagcattctgtctcatgctgatcactcaagactcaactgcaaaccattcatctgcaccctgttgacttccaaatgtaaatccccctgcctcagatgctccctacatccaaactgggatctgagtcaacctccagagtccaggagtctcaaatctggcattccccaggtgggaaggattgtgaactaaatttgccgtaaacacccagtggttcagccaacaaccaggtgtctcatctcaggggagacatggccagaaaccacagacattctgtgtccccaaatccaccacgtaccctctcagatctgaacctccactctgtgtcttcaaatgcaagtccaggtccttccatcctctatccctgatccaaagccattgtcccctacaaagcccttaaatcaccccaccaacttcacttgtctccagctgta

SEQ ID NO: 19097 - DNA, 1334 bp, Mus musculus
gtgcaaaggcaggagcagggagaagtccggagggaggaggggacggataaagtgtatcccacagggctacatgagaacctccagtaaggtggtgtgggaggcaggggtgagatccattttgcaactgacagtttctagatccctcatctaagctatcctgaaaaagtctggccaggtggtggtggcgcatgcctttaatcccagcacttggatggatgtggagaaagttctgtggcctggagctcaggggtcctcctgcctcagcatcccggggctggaatggcagatatgcaggtgtgtgccctagcttgagatttccccttctcctttttctaccgtaggtttctactgcctagaatccggccttgcagatcacgtgctggggaggccgttgccatggtaacggagcaagagatagaggccatagggaagaccttggtggaccccaagcagcccctgcaggcccgcttccgggccctgtttacacttcgggggcttggtggccctgatgctatctcgtggatcagccggggctttgaggacagctctgctcttctgaagcacgagctggcctactgcctgggccagatgagggacgcacgggccatccctgtgctggcggatgtgctgcaggacacgagccaggagcccatggtgcgtcatgaggcaggtgaggaagggcagcccagtgctgtgttcagctctgtccctggggcacagatgggtgccgcacagggctatggacagcgcacgggggtggtctccccagcagagattttgcttctgagttgggacctatgccaacctgttcttcagggacttggaatgctgtccctctgcccaaagtctagtgatgacttgtcactccacccaggggcactggctggggtgggtggctttagacccggcgggccaacttcttgagttaaggattcggattgaccagctcagaggctgttggcccagctgtgacctgggagaccagtcaggtgttgggcatcaagcaagctcctctctactgatttgtctcctcaggggaagccctgggggcgattggtaacccggaagttctaggcctcctgaagcagtattctacggacccagtggttgaggtgaggagactctgactggcccatctctgccaggacaagctctataggccacatctggttactagggcaacctcctggaaaaggaaactctcgagatggggggaggggcacctgtagggtctcccacagctctgggtccccagctttgagaattctacccttgtctgttcactgtcgaaacctatgacctatatggtccttccccttgctcatactgtaccc

SEQ ID NO: 19098 - DNA, 1459 bp, Mus musculus
tgcagcagagcaggatgtggggaggctgcgggaggccctgctggatgaggcacggccactctttgagcgataccgtgccatgtttgccctgcgcaacgtgggtggcaaggaggctgccttggccctggctgaaggtgaggctggagcatatccctggacctgggtgatctcttgtgcagcctgaggggcagctgtcccagggccaccttctccccatccaggtgccccacacaaaccctggggactttacctggctgcctaaccatagtggtcttggtgtgtcccttccttgggaccctatgtgcccactgtttcctgcccagctctccttaccctgtttcctcggcccttaccttgcaggcctgcagtgtggcagtgcgctcttccgccacgaggtgggctatgtgctgggtcagctgcagcacgaggcagccgtgcccgggctggcagccacattggcgcggaccactgagagtcccatggtgcggcacgagtgcgcagaggccctgggtgccatcgccagacctgcctgcctggctgcattgcgagagcacattgaggaccctgagcaggtggtgcgggagagctgcgaggtggccctggacatgtatgagtatgagagcagccaggatttccagtatgcagacgggctggagcgcctgcggccaccaccctaacctagcgcctggctgcctgccctggggctgcctcctctgctgctgccctggccccggccatgtgtgctgtgcctcacatccagatttagggagcagagcagctgaggggccctgtgtcccactcgcctcacctccttgctgggtgctgtctgctctgtggttctgtgtctcccatgccctccaccagcagaggtggcagtgcagacgcttgcagggttgggaaagttgtgggggcaagggtgtgtggggtacacctcccatctgggtcaagcagggagtacaagccagccccagcgtgctgcatgaataaaataagttatttttcacaagtgctggctcctgctgtgtggggacagtcatgtggcctttggggggtcacagaagaaggtgtttagtggtacagctacaagtccatactgtgggttcccatcaggctcccataattccatgctggctggggcacccacttccctggacgccattcacctctgtaaatgttgacacagaacgtagcagcccacagccatctgttccagcttccaagacctggaactcaggtgtcatacccatgcacatgtcacctggcaggtgacccctgccctcccctgccttgtgtgctcttccccaggaagggggtgtgggctctggattgttccaaagtaagtgtgatttgtgtccttgctgccatgtttgctgagccgagaggccagaggctggcgtgggcaactcccaggttttgtttacttatttgaagcatcaactctcgctgagcctggagcttg

SEQ ID NO: 19099 - DNA, 1616 bp, Mus musculus
ttgccagggcagacaggagtccaggctccaagctatccccttgcctctttctgcccccagccccaccccccaaccagtctgcctgttgccccactcagccctgagtgttaggcactggcagagaggcaatggcaggctcaccttgatggagggactggggtgggtgggactaccgccccgcccacctgtctgcactcctgtcacttgtaggcctggctgacttacagatttttccttccccagcttgtgtccacccctgtgccaggagaggtagcaccatctcctgggaccatcaaagagtgggctggagtggggacagtggacagagcatacctggtggcaggttgggaggggccactcagcgtcccccccatttctcagaaaatctccagtcccacccagggaccccaccctggcccagtcctcaggtggatgactgacgcacggcaggagatttttgtttttgttttcctgtatatgaaatgtttttcaaaccatcctctcctcaggccaccaccccttaccctaacccatcacgccctggtgaagcccccaaggcctgctgctttggggtgtggcctgtgactgtgtttcccaggtggggaccagaagatgtctgaggtcctcctgagccctgaaatcttgataatcaggaatacccagggtggtgggactgacatcaggggagtggcgtctgcccaccccccaccctgtccctccgggggtgaaccagccaggctgcactacaatgtccacaggcaagaggcccccaggccaccagcaaatgtcccgcccctggggacagtgcgcccgctcgcccttggttgtgctgggcagcatttgtacatacatgcgcgcatttagtttgcagttaattcctgctgcgctgcccacagtggcttcctcccttcagtttgtccctgagacccctgagtggcctttgcttctccagggtactgggttgaagatccagccacttaatttcccctctgattgttttgatatctgagagacagaaaggtctccccaggctggtctccaactcctggcaatcctcctgcctctgtttctcagttgctctgacaacaggtgtgtaccaccactcctgacttccctgcccaaacttcatatcctacttgttaatagccgtcttctccctctgtcatctacccagagcattcagcttgggactgtcgtccagtgcagggcccaggtgagaggagactgccagcgagtccctagatcttgtagccatgataccacacagtcatttcccaatcagtgcctcacacatctatctgatggtgcagttttggggtctgtccccactcccctcagtccctacccctgctcccctcagacatggggcaggaaacagcaggtgcgctgggcaggaggaaggcatgtgcttcctccccagccaccacccctcccacagcacccagcctcactaccccagcatggggtacccagctggatactcccaaaatgtcacatcccatccaacctcagatctgatgcagtcatctgtgtcccccaaccaaagcccatttgggtctgagggttccagcgtaaatgcctgccctgcagcgcctggcaactggcaagcatcgggt

SEQ ID NO: 19100 - DNA, 1176 bp, Mus musculus
ttatgtgggcaacaggcctgagtttacagggccttagtttgcccatatgggcaacgggtctctgctgatctaggcctcagtttccctgcctgagcagtaggtcttgctggcctaagcctcagtttgcctgcttctccgcaggatgagttccacccgttcatcgaggcgctgctgccgcatgtgcgcgccttcgcctacacctggttcaacctgcaggcgcgcaagcgcaagtacttcaagaagcacgagaagcgcatgtccaaggacgaggagcgcgcggtgaaggatgagctgctgggtgaaaaggccgaagtgaagcagaagtgggcgtcgcggctgctggccaagctgcgcaaggacatccggcccgagtgccgtgaagacttcgtactggctgtgactggcaagaaggcgccaggctgtgtgctgtccaacccggaccagaagggcaagatgcggcgcatcgactgcctgcgccaggccgacaaagtgtggcgtctggacctggtcatggtcatcctgttcaagggcatcccactggagagcacagatggtgagcggctggtgaaggcggctgcctgtgcgcacccggtgctgtgtgtgcagccgcaccatattggcgtggccgtcaaggagctggacctgtacctggcctactttgtgcgggagcgcggtgagtgtggggtgggtggggcatggagaggccagggccatggtcagaggccagaccctgtacaaggagggggtgtggccaggggagggacatggacaggggtaggagcctggatagggtcatcgtcaggagctgggtcatggtcaggggtgagaccatggacaggggagggaccgtggtcaaaaggcaacactgtggtcatgggcaggctgtggtcagagtcatgggcaggggcagggccacggacaggggcaggactatggactggagaggggtcgcagacagggtcatagtcagacacaggatattgtcggcggcaaggtaatagttagggtcatagtcaagacctatgcgatgtctgtggttggggagggatcagtgttgggccatggtcagggtcaagggtgggatcatgttcagagccatggtggggttcaggatcgtcgtcaggggcatcataatggtggtcatggatacagtcagaggctaagctgcggtcaact

SEQ ID NO: 19101 - DNA, 1120 bp, Mus musculus
ggctccgcccacaggggaccggaagctgttcgtgggtatgctcaacaagcagcagtcagaggaagacgtgctcaggctcttccagccctttggcgtcatagacgagtgcacagtgcttcgaggaccagatggcagcagcaaaggtgactggcaggcgatgggggcggagcctggtggcggggcttagggagtggcagcggggggtggtggtcagggttgagcctggcacaggtacagagcagtagattgcaggaatagtggaatgggataggactggaggtgggcatagccaatgggaaggggtggaacaggtggggtgagtgtttgtggttggaaagggtgggtgggtgggatttgggtgtgggaaggggagggagagggaaaggaggagaagacctagttgctgaggagcggtcaggtctatgggagggcagggtcagccctggctcctgagtgtccactcaatggggctgttgtgtcccctgcagattggcccttgggattatggcccgagttctttctatccccaagcctcagcttttctccctgtgtctcaagttctgtgtcttcatgtgtctgtctgtctatctgtatgactaaaaggctggctggtcctggctccatgttgtatgaactctggaggtgcacctgccttggtggacaccacatcgatgtgtttgtctgtccatttgaccagcttccatgattccatagggcccagtacaccgtctgtgccctggaggtcagggctggggccattcaaaccttttcctacttgttctgatgggaccttcttgggacccaggctgcctctgaaagtgtgtgtggctactggggtctcaacatagttcctggatgctgagctgacttcctgttggctgaccacatgaatggacagatggattgatggatgaatggatggatggatgaactggtgggtggatggatagatagatggatgggtgggtggatggatggatggatgggtggatggatgggtggacagatggatggatagatggatgactgacttcctatttagctgaattaatggctgacatctaagtctctgggcctagaagatgttggtgtatcctatctgttcgggccatcttggtca

SEQ ID NO: 19102 - DNA, 1905 bp, Mus musculus
ttgtcttctatgaccagttgaagcaagtgatgaatgcttacaggtgagtgatgggccagagcccagggtgccacagtctgtggggatgaccgttctcctatccctgaccccatggactgtctgtccctcagggtcaagccagccatctttgacctgctgctggcattgtgcattggggcataccttggcatggcgtacacagccgtccaggtaagcagctgtgcaagcgttttgggttgggggctggctctctggtgtccctcataccttgttcttcccaccagcacttccacgtgctatacaagacggtgcagagactgctgctcaaggccaaggcacagtagcagtggccatgtacaggtggcccaggaggtactattcacacacccacagcggccagaccgaacgaaccacagagggttttgatgggtcactaggatgcaaggacacctctccctgtccatttcgttgaatgaccctggaggagagccccgcacacctgcagatgagcccactgggatggaatgatggcccgggccacgtgcactgaagggccacacactagtgttggcctccccagtggctgggtcccagaagccggtctctgcggttgtgcagaggcatccgctgtcagcctgcctccccctagcgctggccagcacctgacagtgtctccctgcttttcctcctcataccccgccctgcctgttgtcacatcctccaccactggacatacctggtcccccagctgatctgagccccctgaggttctgtcccctcctgcaagtgtcccttcgctcagtcctgacgctggtgactgggcaggagttggtcctgttctggagtgtgcagtcctgaggtctccccaccttccaccccccagcctcagtttccctacctgtgatacattctggggagtccacccctctgtcatagtgtctgatggaacagccaggcccagcacagccctggatgtccccaacaggatggccttgggagggggacactagtgctgacggttgacctcagggaccccacggtgaatcaattcaatagcaatatgacccaagaggtgtcaggctggggaccagctgaagaccagctgcttctgtccctcacgcctgctgaggcctggcccacccccacccgctgtgggctgcctctgctcagcagtgatggctgccaccctcgtggcatgcgtgtcgtagagcgagagggctcagcctgctgccctggccctgggcactcttgttctttctactcttaccctggcagctggttatgggtctgaggccagtgccacctgtcactgggaaaggacacagggcacgcccccttcctctgtcctcacagggcatggggatggatggcccctggggtggccgtgggtctgcagttggtgggttacaaaataaaagccatattgaaggaccgagcctccaggtgtcctgaggaacatccactattgtgctgctgtccttggtctctggcggtgtcacatcaggcccggccatctaccctggactgttcaatgaacactgcttccttagcactgggcatgttctcagtggaagagaagttggggacatgccacacggggcaggggtcatcacagtatattaaaggccgtccctgccaagcttagaccagaaccctgctcctcctggattctgggtgggtatgggattaggctcctcaccaccggctctgcccattgatagagtccctgtcttgtaaagtcagtcaacaaaagttcagttgctgctgtaaggccggggcctgtccactcagctcatgacagtattgctaacctcccacacacaggccacaggcattcagagcagggtctctcctgtcttcatcatcacagagcctggcaagtgggggttctaggttcaaacagag

SEQ ID NO: 19103 - DNA, 1191 bp, Mus musculus
taagtggggcccaggggactgcagttcttgaagggatcatcctgctgtatcgattcacctctggcccatgcagttcagacccctaagggtcagcttggcctgccatggttctgtgccggatataccgtgcctgtcctgtaagagccccactctcgctgtgtgctgtgtggaggatggcagctgtgatgatgccatgaccccgtgtcccccataggcacgcggaatgcagtgctcaacacagaggcccgcacggtggacgcagatgtgctgagccgccgctgcgtgcttatgcggctcctggacttttcctatgagcactatcagaaggctctgcgacagtcagcaggtgctgtggttatcatcctgccccgggccatggctgccgtgccccaggatgtcgtccgggtaagcctgtgtctcagtccccatgcctgcccctcaggttgcatctgctgggtgtccttgtcctcccccttcaggaaggaggctgagatggggaggcactgcgggtggctgcagttccctgaacgcatgcgatcctcacagcaattcatggagattgagcctgagatgctggccatggagactgtggtccctgtgtactttgctgtggaggacgaggcactgctgtccatctatgagcagacccaggctgcctctgcctcccagggctctgcctctgccgctgaaggtaagccaggccactggagggtatggggtggccctggtccctgcatctatggggctttcctgggcttctatgtttgcagtacccaccccagctgtggccctggccataagcccaagtgacccctccccttctgcccccagtactgctgcacacggccacagccaatggtttccagatggtgaccagtggagcccagagccaggcagtgagcgattggctcatcaccagcgtggaggtgagctcccaccttcttagcctgcctcagggcctttgcacaggctgcaccatgatctcagacgtccagtcacccctctgccacacacgggaggtggtggcgacaaaggaacttgactgcaggctgaggctgtggctcagtgggcagcacttgccagctcacagagtcctgggctcagtccccaggatcacagcaaccaggtgtgctaacacacacccggaggctgaagcagagagatggggggtgcagggctatccttggctac

SEQ ID NO: 19104 - DNA, 1752 bp, Mus musculus
tgccctcagggctcgcaccatccccctagactcccaagaagtgggggtgggcggcccctgtgcctaccctgggaagtgcctaatcgttttttgttttgtttttgtttttgaagaaaagagaaatattctccactctgacttggcagccaggtgacacactacagggtctagtgaccataacccctgtgttcccctgctgcaggcagggcctgctgttggtgaagtggggggtggggagattaagtccccaagacccgctgctcactgacatggctaggaaaggccctggggaccctgagggactacgtggagttgggcagctggaaggactgtccaagtctatgtggttcagcaagactcgccctccccaaacccagtcaagagcggggtgcacaggggcctcttccaaatattctcaggtccgtacccagacatgggcagtggccccaccccacgcactggtccctggccatagtcactgcaccttgcctgttgcctcctaaactagaggaccagcgtataggaggtgatggccatgaccagagaggacataggcaggcccctgctgctcatatacactacagtgtctatctgtctgtctgtcagatttctttactttttgcacgtgcgttctgggcttggatagccagccacgcctttgtcctgcctgccaagctggactccaggccccagagtgcccatgcactcagacacacgccaatctgggcagtggccacattgccatcccaggcagaaggaaacaagggaccatgggcatgacagagccctagagtatgatgggtggccatgatgatcacccacattcctggcctccagcccgtggattcccccaccttcccacactaggctcctctcctgtctccagttgagggtccgatctgtgccatcccatacactacagagctacatggatggcagggtcatcctatgagagacccaggtcctcatagtaggcatctgtgttgcacaataggaagagaagttgggactgtacaggtgtctgaggctggaccaccccaagccggcaaagtgttagcctctcttgagcagtatgtgccaagtgtgctgggccacagtggccacagccaaaccccggggcagcaaccagctcacccaagtggtgagtggcaggttctgctcaggggaaatgtgtcagggccccttggggctgtgtgccacacaggtcaggatggggaccccagactccctacttctgtcctggtcctcaccaaggaatggcctgattgcaggggacacactggtttctttgtgtccaccttggtgcactgggagtgccaaccaccatccagcacctggtccagggagccaagcctggcctgtggtggctgccagcggctgctgtgacccttgtatattacagtcctaatttcaaacttcagcctatttaagagaacactcaaaacactatttttaatcctcgtcctttgtgaagcatgttcccgtgtgagggggaggctcaggcacacagctcagtgccaggctcctacaggccctcggccatggacgccagggtgcaagcagcaggtcggggccctgaccccttaacccagagggtcttgctgaagccaccttttcatatctttctcttgaattctgttttaaatcggaataaattttgttcctaaactctggctcctttgtgattattagtaaaagtatgttgggggcggagtcagagcaagcacatcccgaggcaccgctgactgtcgc

SEQ ID NO: 19105 - DNA, 1719 bp, Mus musculus
tagcaaaggtgagacgtggagcagctgcactcagacccctgtggcaaggcagaaagagctccctgggtgggcgggcacaggcgatgggagcccccccccagctctaaggaaattcctgtgaagttggattcctagtctcccaccccagcagcccctgagcccctaggacaggacttctcttgcgcttttgcactggttgcctactgcacaggagtcgccattcccccgcccccgcccctcagtccctttccagctttgcctgagagaactctgtcccctcccttgcctattccagcatcagcagcaggtcctgggagccatcgagagagccaagcaggtcacggctcctgagctgaactccatcatccgagtaagtcggagcctctggtggactggggactgacttgacctgggtggccagggtcaggtgacaagaccctgggctgactctgtcacccccacccccaccccacagcagcagctccaggctcaccagctgtcccagctgcaggcgctggccctgcccctgacaccgctgcctgtcgggctccagccaccgtccctccctgcagtcagtgcaggcacaggcctgctgtcactctctgctctgggttctcagacccacctctccaaggaggacaagaacggacacgatggggacacccaccaggaggatgacggagagaagtcggattagctcttggggaagggggaggggggagaccaggggagacaggcacagagagcgcagtgttctaagggccacacagcacacagctctgtcactacccaagcttacacctccagtcctggttctggctgtgcaccctgggcctaggggacgccagagggacaccccaggctaagggttcttccccaccttcaacatttccctgggccacagccaccaatctcggcccagaatgtacacaacgctagctgcccctttccaccctgtgcaccccgaatctgcccctatccccttctctgcttcctgcactgcacacctgctagtcccagacccctccccccagctcccccagctccggttccctcaaccacaaaagaaggggacagagagaaagcattggctcgggactgcagtgggggtgggcaccccacaaacttccctcccctcttccccaaataaacgtgagggttaaaagttggtttgtttatgatttctttcttgtgccagtattctatagctatcatctcagaaaggaaaagaaggaagccccaggagtgtctgtcatagggttagctttgttggtcgccttggtctctgtccagaggtcaaaggccaagccgctgtactgaggatggggtctagctgtgccttcaaaataaaaacatgaaaaggttggccactgtgtccctgcttctgtcttgtgggtggggacccctttcctcagggcaccccgtgtcctgcaataagacatccctggagcaaccaaagacccagagagggtgagctggggacctgggcccagacagtgcaactcagtgctcagatttcacactgttttggcagggtggctgtggtacccacatgggtcccttggttaccttctgggagatggcctggatgctccctgtacccctcccaagctaggctgtcccctgggcatgcgcctcggtttggggaccttttcctttcttgtttttctgaaacagggttttctctgtatagccctgaatgccctggactcattcctc

SEQ ID NO: 19106 - DNA, 1140 bp, Mus musculus
atagaaatatatcctgaagtctatggtcctttgccttccaggacgtagggaatgatcttgggaatatgcagattgacttctcaaggattcattgtctatccagaaattaaagacgaagacttcaaaagagaaattaaaattatagcctatgtaaaaccagagatggaatttaaggcaggtgataggaattgttcatcttctacagtttccctacatcaaagtcaaaataggtcaagtagaaagaacaggagggtttggaagtactggaaaacatgttctggcaaacaatttttaatgatcgtaggccaaaattaaaattgcaagtaaatgtattgaaatagtaagtttggtgggtataggagcagatgtaactattacttatcaaaactctcgaaattcagaacggccacttccaaaagtttacaaacagtttctaggaactggaaagttttctcagacaaaatgtaactgtggatcaaatgtgtgagaccaggatgtcaaaaaggaaagtttaagccttgtgtgggtgtcatacccatgtttatagggaagggctcttttacaacagtgggctcagattgatattcccacaattatgaattcccacaatgatgaaattagggctgaattggttggtacatgctcctgggaaaggtattgctattcatcatcaaaaaatgactcaagtctgtgccaattgtccaaacacaagacatcacaggaattgagtttccagatttataagggaggccaccactgaagtaccaatggccctacccttaaaatggttgactggcatgcctgtgtgggtaatggcccttaacaaaggaaaaattataggcatttgagcagcttgtacaagagcagctgtagggacaacaaacagaattaattcctcctttttttttttttttttttccgagacagggtttctctgtgtaaccctggctgtcctggaactcactttgtagaccaggctggccttgaactcagaaatcagcctgcctctgcctcccgagtgctgggattaaaggcgtgcgccaccacgcccagccaaatagtctgactttaagttaatattttgtccaacaaccacaagaaataatttgtaggtaatttcctcaaaccattgtttattac

SEQ ID NO: 19107 - DNA, 1159 bp, Mus musculus
cctggctgtcctggaactcactttgtagaccaggctggcctcgaactcagagatccacctgcctctgcctcctgagtgctgggattaaaagcgtgtgcaccacacccagctggaaatttttatttcagttgtttttgtttctcttttttcttactttttaaaaaatgatatttattttatgtatatgagtatactgtagctgtacagatggttgtgagtcttcatgtggttgttgggtattgaatttttagaacctctgctcactctggtcaaccttgcttgttctggcccaaagatttatttattattttacataagtacattgtagctgtctttagatgcaccagaaggagggcgtcagatctcattatgggtagttgtaagtcaccacgtggttgctgggatttgaactcaggacctttggaagaacagtcagtgctcttaccagctgagccatctcaccagctccttgtttctcttttttcaagacaggatttcttggtgtagccttggatggcactctgtagaccaggagggccttgaactcacagagatctgcttgcctctgcctcacaagtgctgggattcaaggtattccctaccactgctcaaaatcaaggaactatccaaagggaatattggaagtttatccctcaagggagccaacaccctccctaattcacagccatcaactctactgctctctctggcatatgtgttttaatatttatattaaagaagtttggctatatggcattcaggcacagacagactaaaatcagagagagaaacagaaacagagagatagagagaaatataagaatttagtgagttcacaggtattccagagtcacatcttgaagggtggaaaaactgaggatgctcttatcttcttgctccctagtgaaaacgaggagagtatccatccacacatcaataaaatggatcatctaataaatttatttgtctatgttcctttgcctcatgacagtaagaaaaaaaaaaacagtaacaggaaatgctagaagggtttaaatatgtaaagggcctcagtaatgaaaggatacataaagatggctgggtatctccagagtaaataagactagaaagcttttgcaagttatgacggtctgaagcagtcatttaaggaacataaagg

SEQ ID NO: 19108 - DNA, 1201 bp, Mus musculus
attaactacagttagattttgttttccttcttttccaatgttatcagaatagttagcatcaccttatcagtaatcaaatacactagattccaatgtttctgtctacagctagaatgttcaggtgatcaggaactcttactggatttcctttgagttcttgattatatctccaaatcctaaacggctgagaggctcctgctgaccccacaaagaaattaacagcgaacaaactccaattttttggtataattataagtgagtatcttgaccaaataaaccctgtagccatcagcacagtggaatgagctgcactgagtttctctgtaggtctgaccatgtcatgtcagctaatccaacacataccaatccccatttcattattggagcccaggaaaaaaactgttctggggcctgccaggtgataaagcagcctcaatttctttggcagcaacaagtccactttatccatgagttggtggtaggtggtccacaggcctcgggcaccagcagctgccatctcggcagcctaggagctgggtgggagaactgctgtgtccatattcctggctgacaatgatgtccacctctgccctagggctcccttccctggctctgccagcctgaggtgaagcacctagagactgagtccggcaaaggctatggggcagaggctcagcaaaagcctgccctggcctgctttctgcaagcagatcagggaaacagagaagaataaaatttttcattggttcttgaccacataattgttttgtctgaaatctgcccagaattattggtccagaaaccacagactaatatagagtgaaaacttttttgaactaatagaaaaatgtatccattctattgccctgttatcacaaagcaattccatagtgatactgtgagaaagtatagctaataatgcaggaacagtatagagatatgagatatgctgaacctgagtattcctaagtgcattttcatcctgttataatactatacatgcaggttcagtgcattctttagacgatgacggattaaaattccccttaacatcaaataaaggttgtagttgtgctgtgggaatttttagcatagttctaactcaagtcaaatccactagctgttttttggaaatcatttgagattttcagctgtcttttctaaactctactcatttaggaatgataactgaagacattat

SEQ ID NO: 19109 - DNA, 1200 bp, Mus musculus
gagtaatgactatgatctggctataaacaatttagattctgaagagtctttgtcatttaactcacccttgggtatcttttattgtggtaacataaattgtacctaattgttctttcagctattctctggagcaagttcaagctttgtattcatttccatttcaacaaatgatggcagaagttcctaacatggcagtcacgactggacagcaggtgccagcagtagctcctaacatggcaaccgtgacagaacagcaggtgcccgaagacgctcctgtccaggaacctgcaccaggtagttcttacatggtctcccttgaatgtctccgcctccagcagagcaatcagtgaacacatgctgcgctcctgcacactgggcgctgcagcaggcacaggatgagtgaccagagacctcacagcattggcattaacttggtccaggtgctgaggcagcagagcagtaacataggagctccaaacgtcaccctgtgaacaacagggggtgggggcagtgccagctgagtaggagttgaggccccaaacccctgagtatcatggagcagaggagacggtgagatgggagcagatgaggcagtgaggcttatgtggaccctgaggagtgcacactgctattcccagagcagtagggagctgttgagagagtgggagccaaggagtgactcacatggatgggcgtttaaaagtaggtctggagggtctaagtgggaagatatgaggaaggctagagggtgtggagaaagagttgggaagtactctaaaggtgcacttccttgcctacagtacatggatttcttttcttttttaagatttatttatttattttatttatatgagtatattgcagctgtcttcagacacaccagaagagggcatcagatcccgttattggtggttgtgagccaccatgtggttgctgggaagaacaagccagtgttcttaactgctaagccatctctccagctcgatgtatttcacgtagatgctgagagagaaagagaaagcgaaaagtaccagttgtagtcccttccattattataatgacggacttgatgctgagtaacatttttcttttggagtaagattttttttaaaaaaggtgtatgtgtgtttgtttattctgttaatttttatgtgtgtgggtgttttatttgcaagtctgtgaaccacttccatgtctggt

SEQ ID NO: 19110 - DNA, 1200 bp, Mus musculus; identical to SEQ ID NO: 19109

SEQ ID NO: 19111 - DNA, 2014 bp, Mus musculus
gttcattattaagattttctcaaaatgtgcattacttccagaattccttaccgattaagacatttcacaagtgtttgctacatctgcgtaaggagaactaaagtagctctgaccagggtggcctggccggctggggtgggggcagttccctgctgtggcctgtttggtgttgtctgacataaaaaaaaaaatcttaatttatattttccaatcttagatttctggtgtccagcaaattcagttttcatgatcggaaggacggacggaaccgggcttgtgtggagagagtctgatggagtctgaagcagaggcatgggcggaagtgagggtgaagctgcctccttgtaccataagtagctgtaatgtagcttcctgatgcttgactaattgaggtgttaattctgacttgagaatctttttcatgaatgattttaaaagaaaaaaaaattggattttaaaggtattaaaatatttttgttttgtacgagagtttgttgctctgtatgacgcctgtatgcattgtatattgcaatttattactgtcagagatttgtagacagtttcttattttcatattgaatcatgttattttgtaattcaagtaagcagctgggttaattcataatgtttaccctttaataaaatataagggtagagttcattttgaatgaaagttgcctttattataaatttgagtttgtcttggctatatactatcttgcatggtaacttagctagatgttttagcatttatttattgaaaactttttttgttttgttttggtaaaacagtcatagcataagcaacttcgttttttaaaaaattttaattgaaaattaagttggatgcagaagcaagtcttgtctggcctattaaacttggtgcccttcactgtctgtggctgttcaggcagcttcagttactatcacgcctgttagcattcatttccctttgtggaaatggtccctctcttcaagtgttacagtctccttcacgaagagggacttttcagtccattgatagtcattttaccttcacaaaaaggtcgggttcctgttagaccgtgggaactgagcagtgggcatggttctgtgcagatgctgcaggagagagtggacaagcaggggagcagtgaccactaggaatcacgtggcacgggagccttctggtttgctgtcacgctatctgcagtaaactaacattaggtgatgtagcttggtacagcttagtggtgtgtacttgggttccttttttaaagtgaagatttctattttctcatcttttttttttctttttagtaataattactttgaatttttgtgtatgtgctgtggtagttctagctctatcaaaaatggcttattgtatagtctgtccagaaggaaattttgggtactccagtggacaaaagatagcagtttcctaggtccaggctgaacagtaatggccacttggccaggagttttgtggaacacgcggctggctatttggagattaaatagcatcctcttcctccaactcccttttcagtaataacctttctgtagaaaatgcacataggaaagaacgggagatgatggtgaggcaggatccaacagtcatcctgctgtgctgaaataacaatgttaatattttgataaattcatttgtccttttactttgctaaatatgtatatttttataaaagtgggctcgtgttgtacacactgttttgtaactggtttttcacttattatattgtgaacatctccccagtcacgcatggtcttctgcatcgtttttactgggtttttattctgttgtatgattgaatcatgattatttaatcgcctattgcaaattttgacctttttcatctcttcttagttataaacagcccttcattgaatcttgtgtacatcgtaacttttcttgaaataaattcttagaactgctgggttgccagatacacagcaggaaggtttttgcgccttgcgtgtgggttcactttggaatgtgtcctacccaggtgtc

SEQ ID NO: 19112 - DNA, 1138 bp, Mus musculus
aggcgcacttgggttgaccttcctgcctgtctggctttcatctgtatgggatggtagaccaactgctcagtgtggtggctcttaaccatctgctctgtttgctgtgaagaagttccctcacttttatgtacatgcttgttctgttgattctgactctgagttggctgtgaccaacatatattaatatttaagggataaagttaatgtggctcagttggtaaagtgctcgcctaacatacacaaagccctgggctttaaaataaagacccagcacttgagaggtggaggcaggaagatcaaaagttcaggtcatccttggctacatagaggagcgcctagcctgggagagctgagaccctgacagtaatgggtgtgctctgtgtggctctttgtttttgcagctgttaagaaagtaatacttacatttcctacaaatttacttaaggcttcttttcttcagatcgcaaaagatgccaaagaatgtgttcaggaatgtgtgagtgaatttataagcttcatcacgtcggaagcaagcgaaaggtgtcatcaggagaagcggaagacaatcaatggggaggatattctgtttgccatgtccactctaggctttgacagctacgtggagcctctgaaactgtaccttcagaagttcagagaggtaggtgacacttacggtttacaatatgtcacttacaatgctttgcggcaggtaacatttccggtagtagttaatgtgttaaatgagagcatttaaataccgagcctttattgcttccttagattattacagactggagcagctgggtggtgattaaagggattctgagtttggggcctgaactccttgcccatgggcagttttaaagagtttccacttcggtgtctcccatgttaaggacacgtagagcacactgtgtgtggcttgttggaaagtctgtaagcatttgtccgtgctgctgttaacttaggagactgcttcagtgtgagacttcttagaccagaaggaggtgatgtgaccctacctgtgtgtgtgtgcgtgtgcgtgtgtgtgtgtgcgcgcgtgtatgcgtgcacttgtatacaaattacacatgactcttgtctgtctgtccacttgcaccttattttttgagacagg

SEQ ID NO: 19113 - DNA, 1191 bp, Mus musculus
caggttaaggttgactgtatggatttgagggttgcgtagttgaaagggaaaaggtatctactgtgggttccttttcttttgttcctcttgaatttatacttactacgcgtggaatatggacaggaatgctgaatagttagcaagttattgaaacatttcccaagtaaagaatgttttgagtaaggtcaactgaaaactataattgttgcatctgggccggtgagtgcagggccttgctttctgaagtgcactgaaagtctttgtctctctagatggacggcgacagctccaccacagatgcctcccagctagggatttctgcagactacatcggaggaagtcattatgtgatccagccccatgatggtaaggccacagctagagccacacccacgtcagtgccctcacgtgcctcggttcactggaatctaaatgagcctgcgctagtggagcaggcctataatcccctgctgtttggcaggctaaggcggaagggttacaagttcaggactggcttaaccaagtttgtgagaccctttatcaaaataagaagtaaaggccagatgtgttggtgcacagttttaatctcagaactcaggaggcagaggcaggcagatctctgagcgtaatgctagcctggcctacagagctagtttcagaccaggcagggcttcatagagaaaggagtggggaagagggaggaagagagatgagagaaaggagagacggatggaccagttcggaatagagcacagtgctctagactgaatgcaaggcccttggtcaatccaggtccttctgaagcaaacatgttagaagagacgctgccatctctactcactccatggagtcttcagaagactgctgagttctagaaagagctctgctatagaagtgtgctttaagaaaattcaaactgatcactgactccctgcaaaaagtaattaagaggaattcttagattaatatgctagaaataatttgcttttgtgccatttgtaaatttaaacattaatatttatttttaggagctgtgaagggatttgtgttagtagattctatattatcattatccaattgggttagtaatcaagtctatacaatttaatataaactttatatgaacaagtttatataaatgctaggagttttatactttagaaactttacatatacatgcttatatacact

SEQ ID NO: 19114 - DNA, 2398 bp, Mus musculus
cgcacatataggaagcagctcattttaatgcattcctccttttatcctctggagaactagaggactctggtggaatacttgagttctgtttattttacgtatcacctaagtcactgtaatgtatgtggcgctgtctgtgaacttgtttgctctggagtttgaaatgctctccttcctctttcctgcagatattcacaacgttgtcagtgacgaagcgctctgggggagacatcctccagtctggctgctgaggttaagccccagtgtggatgctgttgccaagactacagaccattgccttgcttccttgcccacgcccaggtgaagttcaggaaggctcttgggtcctaggcgccaattcaaggtgctgtcctaaggccaccgggtccctgggatcttgtgggtaggaggtggcaggtcgaaggaggctgcagcatcgcactggggtcaccatgacagactcagactgacatctggcagagcatcacaggcatgcgtccatgaagtcactggcctcaagcccaagtggtgggcagtgacagaagagctgccgggtctgttgagctcaaccttttcctgtagattgtcttagtctcactttcaagctgtctaatgtcaattctgtttttcttttttcctccatggggttaatgatactagagatagggaatattagcaatcagtttttgtcatggctggtccatctgcaacagtctttactgtgtggaagtgggtgagatggcttatgagagccaaaccaatttatccccagaaagacgaattaccctgtgactaaaatacactgtctgcttttactaactggtgtagcattgtctcctttaataagtcttgtgtccaaaacgagaaaaaccattggccacttttgcaagtttcctgcagtgtgcttagcaagggaggtggcgacttggctaatctacttgaactgcatcgcatggctcttgggtagcttagagcatcgcagggtagaggcagaccagcagtgagtgtctctcctggtacaattattgtctggttctcagtggaaaacgcttaatttgctttaaacttggtgtttttgtgaggtggatttagtcttaagctgtgtcccataagaactacattcacaggcaagtggctcttcctccacacagcctatacatcttctgaggtaattactttcataaggaagctgttcataacgtaagttattattattattgaacacaggtggatgtgaaggatttttcattgaaaaaccaaatggtttttctttttttctgttcagtgagcccacaggaactctgtcaggacagccagtactctgccggcatggctgctggggcgtttacggtgtagtttagctcctaggttacatgaccgtgaacatgctggctgaggactacacaaaccaggtttcccaccatacacggcctggccctgcagcttcttttcttgccctcccctttgcctgtccccacctgcagtactgagtggcgtttcacagtacccttctgggccacctcagggaagggatttgcctggtgtccagccagcagcacccaccctgccccacgaggctccctcacacctgcccccccgtccttgtgttgaagacagtgggaagaggagaaaggaccagggaaaccaagggagttgactgttcagttttatttatttattttttaagtttttttttcctttcaagtctgccagtctctgagatcagaacaacagacagtgtagggtaactaatcatgtgattctcttagtggaatgaaatgttctacccccacaagaaggagtatacgtcattgttcatattctgtaatcgcacaatgtattgtaatgcaaattccaattccatgtatttttattacaatttttctggaaaaaaatgtgaaccaataaaagatgttgatgcacacgcgtgccttctgactgagtggtgctctgggcttctttgacaccgcacagggctgagtcaggctttgtattgaaggctgaagtcttgtcgtctcatacctctggcgccatgcgattgcccgggcagcatcagctgagggtatccgtacaggctggcggttcttcagttctgactggtccttcaaccctggtcttccgggaagcaaagccatccacaccgtgaagtcaccttctgggtgtcccagcaacgtgtgcatggagagctggtgcgtctcgctccaggtggccgtgagggtgtgcggtcttcctgtccacccacctaatatttccccagaccctggaaatgtaatctctgtgatttcagccgcgcctaccacagtgttgacgtcacagactctttgcttgcgtgtacgagccgagccgcagtagcaccagtcattaagcagaagccccaccctgtcttcccaaaatgcat

SEQ ID NO: 19115 - DNA, 1140 bp, Mus musculus
agcttcggtggcagcgggcggcgtggctcccccagagggggcaatgtctaacggggtttatgtcctaccgagcgcggccaacggagaagtgaagcccgtagtgtccagcacacctctagtggacttcttgatgcagttggaggattacacacctacgatcccagatgcagtgactggttactacctgaaccgcgctggctttgaagcttcagacccacgcataattcggctcatctcactagctgcccagaaattcatctcagatattgccaatgatgccctacagcgctgcaaaatgaagggcacagcctctggcagctcccggagcaagagcaaggatcgcaagtacaccctaaccatggaggacttgacccctgccctcagcgagtatggcatcaatgtgaagaaaccgcactacttcacctgagccacgcaacccagatgtatttgtctttccctctgtccccacatgagcctgttttcataataaactttattgtgacaaaaaaaaagtatgtgaaacttaaaggaattgacggaagggcaccaccacccacagaagcgagaaagagctatcaatctgtcaatcctgtctgtgtccgggccgggtgaggtttcctgtgttgagtcaaattaagccacaggctccactcctggtggtgcccttccatcaattcctttaagtttcagttttgcaaccatactctccccggaacccaaagactttggtttcccggaagctgcccggcgggtcatgggaataacgccgccgcatcaccagtcggcttcgtttatggtcggcggtatctgatcgtctttgaacctccgactttcgttcttgtttaatgaaaacattcttggcaaatgctttcgtattttcacaataaattccctcaatatagagagacattgcataagttctgtgactctagagaaccctgactaataaatacatggtccaaatggccactttatagggatgtctgagttggctgtaggcattgactggctttgtgaagtggaagggaggaggttccagagactattcttttgcagtgcagacagacacacagacacacagatacacagacacactaggctaacttccaccaagcagggagctggatagggatttctagg

SEQ ID NO: 19116 - DNA, 1107 bp, Mus musculus
cattaatcccaccattctggaggcagaggcagggaggccagcatggtctacagagtgagtccagacagctagggctacacagagaaaccctgtcaagttctccaccttacacagccacactaattagctgtggaacatcagctttttgcagatgctgtttagactggagggatggaggggctgatggagacagggaccctaagctgttttcatctttgagatggctatcacattagatccccttggcagcagtagcctgagggctaagtttgatggggtcatgcacacaagaagttgtgactcagtccagacatgtgggttgtcatggatacacacctgtgtggttaccagctcaagggtgagggtgggatgggaggggtggggaacaagtggtcccacacagtcccacatacaatcccatgtttgatagcattatatatcacacgcatacagaggacagagtagaagtggggtgagggactggaagtgcagccgggccgtgctcactgaagactctctctgtgttgagggggctcccggagctgagacaggatgactgagtggggtttggaaagagcatagcagagggaccaaagtgggttttctttgggcactacagatgcttgccaacacttctgagatgtttaattcactagactgcccttcacaattaggaggcaaaggcagtcttaagtaagttggggggggggtctggcaatatcagtatttcttttagaccttcccacatggagctctataggaaattttagaagaaaattgcccctcagacagaggtttccaacctttcctgggtctgaatgtcttccccagaccgcgggaggtaggtagccagttggcagtgggtttcctgatctgctatggggggggggtcactgatccctgatcttattttgagacaaagactgagtgctccaaagtgcctgacagcaaagcattgacctggaggagaagtggctgccacccccgtggacattcatatctggttaaggagtgtgtgggagctgcagtaggttccctctttacccctagccccaatcttggggcgtgtatttgctgagctggtgaacctgcagtgcactggtatgc

SEQ ID NO: 19117 - DNA, 1207 bp, Mus musculus
accctagcaaatttgcgtatttctacagttcaaatttgaaagccacacatttggatcaggccacttaactagctaagtagttcattgcccaacacaagaaatgacagaaacccttttgatcatgtatatctagtgcagtgtcttcatagtagaagcctataagccacaatattctccaagcgcaaggatggaggactgctgtgattgattagtgatgtctgccttgactaaggaaagggaggaacatttctcaagggcctcctactgtgatctccagtccacatcttgtcctgcctgccacttaaaacagtgcactgcatacatttggagactggcggagttcaagtgtgaaggtcaaaggtggagtgttggtacccacaggcacatgcccaccctccatgtcctgcattggcagagcatccaggacctccctctcctccagaaggttggaaatttgctctttcctgttccttgctgatcaatgcccaaacctattcctcatttctagttgtttctgatactttgcggttgacatttgagccacattcccatgacagccagtgtccgggtacgtagcagatgctgtacatagttctgatgataagggagctggtaggctgtaaattttgctttttgtgtttttgtggggttttgtttgttttgatgcagtatagagtgaagggggtaagaatattctgaaaaacataaaattgagtaatttattcacagaaactattaaaatggtattgttaggctcacaaggaggctgggggcagcggtaactgctacactgtctcgcagaggaaattattttatttaatgtgagagaaatgtgagccagagtggctgcctgaggctatttataaaacgcaggtaccttccccaatttctctcccctcgcctttaataaatagatttatgtcatgtgtgtgaccaagaacagtgacagatcttggctgtccctggaatagagaggcagtcatggtgctcaggccctgggcgtggtgtagctgatgcatgtcccaccgagcccaggctctccaaggcatcagtttgtggtcacatatccttagaaaacaaaattaagtcaggttcctgtctgcaggagttttcagagccttgaatacatagtctgccttgtgaaactgggagaatgtagcatttctgggctgcatgacctaggtatcctgtatggcagaccatgtct

SEQ ID NO: 19118 - DNA, 1170 bp, Mus musculus
agctggtttttcacacagtagccttcagtgagggtgatctagcctgtctgaggtctgcaaagattgacagctgcttcctagatccttccacaaatcagcagaaacagtgtccatctgggaactttatgagagtgttgctttacctagttggggtgtcttcatctggatactgccccagagagtgatcccgtccctccaagcacagcggagggaagcctagggtgttatggagtggggcaggtggcttaaggacaccttaaaggccacttggtggggataatggcctcgtggggatactcctcacttccacccacagtttggaactgttcactgtgtgcttcaggagttttaaatggagattcgtgttgatttccatggtccgcatctgtttgtcttccgtctgtggtccagtgctgtgtgcagatggtacttactccctttctctctcttacagggagaaagactgtccttctggggagagtgtatcaatacgcttccagaatgagggagtctttctcctgtcttgtgttcacacttcctagtgacaattttcaaaatatgtatcggcttgactgtttattgtagagtgtagaaaggtttctgtgttcctggctaaagacatccattggtgaaatgtgcttggaaatccaagtgttttctactgaggaaaaaaaaatgttggaaaagctttctcctgcatgcctcttgtgcttagctagaaaggggagctgccagcgtcccagctctgagccactgttcaaaggtgcagctgtgttttaggactaggtacaggcagagtgataaggacatgcctgcttagtgtactcatttatcgagaaagtttagactatgagccacaggggtccctgcctgcagtccctatagcctccccctgccccagtgcctttctcagctggtctgggaatcagggcagcccattgaggggggctcagacaaccctttcttcctggttctgggagtaaggctttctctgcagccacaaggagaacatgggaaccagaaacttctctttggtcagcccttctgagcacacaggtttagcccatgctccaagaatgctcctgagcattgtataagcccctaggactcttagctcatgtgataatgattgcattactatcctgctttaactgacaaaaccacagagaa

SEQ ID NO: 19119 - DNA, 1184 bp, Mus musculus
acctaaggactgcggtgggcctcctggtcaggtgggagcacggctcgttcaggacagaaataagacctggctcttggctggctggaagtactgagtggacatttgacctgtaaaagtgagcaggtattattgtatttactgtttatcagcaagcctacagaattatggaattcatgacacttccatacatatgaatgcacatgactttctatgggacatctttgaaattaatatagagaataaaaatgaaaaccttaacatggagcaaggattgtccctttgcaaagggacagctttgtttctcttttaaactttgtcatgtctgctttgccctttctcgatctcattctctcttcttcatttttaactttgacctcttggcatcttctctgtacctgaccattctggaatcttctcttttacctctcattttaagtatacaaagagtcaagtacaggttttaagttggttttagaagtgggtttgctttgaaaaacaattgaaccctataagagttgggagtgtgtgaaaaagggtaaaatagaaaagcctaggctggtatgggttctgagtgacagtggctcctgacctgagccctggtgaatgaatggctggctcttaggttctacactgagatggctgttcagggctctatgagctggagaaatggtgaagaaatgtgattcatattaatattattatggcatcttgtcagcttatagaagcaccttatgagaactattgattctactttcagtctctttttgggcaatttcactgtgtatacaatgcagaacattttatttatttatttatttatttatttatttatttgaggcattatgtgaactggagcccaggttggtctcaaatttatggtagtcatgcttgagtgctgggattacaggtgtgagccatcatacctggctacgtgttagtttaaagaaatataggtggctacgggaagcagaggcaggcaggtggatctctcttcaagttccaggccagccagggctatgtagtgagaccgtggctcaagaaacacagacaaacaaccacaaaaatagaagtctaaatgaagaagatagaagtatggaatcagtagggttctgccggaagtttccatcctgctgaagtgaaaagcttgtcctgacattcatcaaagaaagctaaacagtccagtt

SEQ ID NO: 19120 - DNA, 3095 bp, Mus musculus
tttgttatgtatgaactgggtactagagacaagcccaggatgacagccccctgccatttaaggtgtgacggtgcctatattcagttcaggaaaacccaagctgccttttaaagatttgtaagggatagcagttgacatccttttagagcagattgatctttgctccttctgtgaagagagtttagaaacaactatgtgctatgtcactgtcttgtgtgtgagtgtgaagtcatgtaaaattgtcatttcaaattataatgctactgacagcccgaggaatgcctccagttctagtaagcttacagtgtggatgacctgtagctgtttcactgactaaccagtcttagatgatgttatcagggttagcaagtgccagcagcgggaagacgagcggtctgttcaggaggctacttgagtagaggaaccatgtccctgtgacttggaggagatggtaacacccctgtcgtttatcctggtggtttgccgtaccatgtgatacttcatctttgccacctctgagccagggtctctgattggtcctggaagctactgttccacagtcatgctgggttagggcatcaagcctggactacagttttcccaccctctagcacttctcaccctctgtaccttcctccatagtccctgagcccctagaaagaaaaaggtatcctggtcattttcctcctgagaacagagcagagtaaaatgttcaaggcacgcataactacctgactgaagagagtctgccgtgtataggtcagatcatcatgggttacaatccttgctgcccagtggaagaggttcccctcggtgactagttgatagcctcagtatgactgatccccatattcagaggataattgtcttttttatttctgtgaagagacgcttcatgaccaaggcaaatagtaagtgtttaactgcgggcttcctttcagtttgagagtctatgacattctgggggaaatgtggggatgggcagggcaccaggcagagcagagcagtgtataagactgggcctagctgggcttttgaaacctcagaagtctgtccatctctcctccctcccccgtccagtgacataccttttccaacaaggctcctaattcttcctaaactgtccgccaactaggaaccaaacattaaaatctgtaaggaccattctcatttaaacaatcacagtgattgattgggtacgtacgtgtttggacataggattgtctttagctcgaggttggagggggctagacagacagttgggagatggttaactgtgggcagattgaagcaccacagaacctgctgttcctgtgggacacacaggtagtggaggacttgggagcctcagccaagtgaggctgtaagagttggcttcccctcggggcctgaacaacagcctctgacactgaatgctaactgctcgggattggggtagtgctttcttgtgtaagcccaggttggtattctggtctcctgaagtcagcatttggcgtccttagcagtaggggtgaccatttagctctagtacacacacaagtatagtgacagtagtcacttctgggatctatctccctggccaacaactcacaggaaactagaccaccaccctgggattggagtttttacttaattaacaaccctgcagttgctggaagcactctatgcacgtgtaatgaacagctgccgtttaaatatatgtgccatttctgtagtctggatttttttttcctttttttggtggcatgttacagtcttggcaaaaagttctcttcacacattcctttttgtatatactgattttactgttggtgaagcacatctgaccaagccagttcagtcagtcagcagggtctccagggagtgaggattgaggagaaaacgttagacagcatgatcacctgactccaccctgtcctgagactgaagcagcttcatttctctccagcctgctttatatcctcctaggtgcatccaaaaaacgtggtcagctcttagagcaaagacaaagtaagcaagccaagtagtgaacaagaagatcacttagggtagtaagtaacgtagtaggcaaggagatggccgaaggtggtggtaaagtcccatggtcactgtttctaatattcttatctgagcatactttcttgttggagcccagggagaaatgccaaattctagaagcagcaccaaaagccctcaatacacatcctgctagattccacctgctttggggtttctctctgtggctaacaattgctccagtattattttgtacattgggcttacctttcttcatgacagggatatgaaacccattggaactgtctgttaagtggttttatgtcttgtcccccagccctaggacccgttacttctaaggtaaacattgggacactaagcacacagttgcttaagctgtcccactccctaacccaccccctccccaaaatctactttttgagggagagcgtcatattgaaggaagttgtaggagttgaagggggtgtcggggtgccaatgatcaagatggattgtttacatgcatgaaattgtcaaaaatgaataaattctatttaaaccgtgtttaaagtatttggtggcacattcttgtagtgctagtactggggaaggctgagacaggaggactgcagatttgaagccagcctggattgccttgcagagcaagaccttgtgtgaaaacaaaaaacagcctcttgagccagctctgtgtcctggtctcaggcctccccagcgggctatacaagaacgggcagctggagctgtgtggggtctgaggcagcacagcacccgatgcctgcccctgcaagtctgccaaggctccctgtgaaggtgtcaggtgctgtctgcctgcaaaactacagggctggccttcccttttcacctcgttaaaatgttacaacccttgtgccctatttgagtaaacatgtcctccatgtgcccctgatcacttcatgtagcctggcgcctttgctctttccttttgtcacctgtctgtcctcattatgagttactactttctcttaatctcctttctagatgttaagactttacacctgttggcatacatgtggcacatt

SEQ ID NO: 19121 - DNA, 1149 bp, Mus musculus
aatcaagataacataaatcctttgaaaggccacataaatcgtaatttcccattatggggtcacaatggaaataggcttgtatcccaattaacttgtacgatgttggaggcattgtttgaagtgaccctcacaaactcaagggggagttggagaataagactggctgatgacgttctcacaggatggggagtcccatagtaggcagcctggagatctgaggggaagcaaggcagaggtgggtgtgatatccttgggagtgtactgggcatgaagtcgagcagtcctctgagggggagtgaggatgattgtaggaaagccagaaaagaaggctcaagattagaaatcggagggctgtccagcaaatactgtggcagcctcgacttttcatcctcataggctttgtatatttacagtgagtgggaaacaaagtcagaagccagctggcacaatggctgacatatattagatagctgttcccatccagaggcctccctgttacttctccaagattaacagaacatttagcccctcgccttgagcttcaagagtatcccctcttactgttccatgcgtcagcaggcctggaactctgccagttgactctgcctgacaggctttcacagaagcaggcaaaactgcctgacacgtgggtcctttggggactctggtgaggggtgaagctctatccccagcatagagtgctgtgtggagttactatggaagtccccagtagtcatactgtatatctgcatgccaggggcccatgggggtaccttggtcggtagtaaagcaaagaatgtcatccattgaccatgtgccctctaatcatgtggcattgaccagattcatgaagggcagccccaggcttgtgttggaggagaacaaaacagggtagtctggagagttaacagccactgggaatagaatatgggggtagtgggacaggcacccataatcctcagctagctgaaactgggcaattaagcaaaaggcaagctatgtacattacctttcctgggctttctcttcctctttcccaagtccggtaactctgtggcaggtccaatgtcctttgaaggtacccacatcggcaaagtttgaactctgggggaaaaacatgcatatcctcacccctttgtcagtagtggt

SEQ ID NO: 19122 - DNA, 1175 bp, Mus musculus
tccttcgtttctttctttcctcctccatattttactgacttgtcctgcaatcctcctaatttctgtaacttccttttcccttggtcagattgatgaagacccaccattagagcctggcaatagactttcaggtgctccctactttccgtgaacccagcttccatgtcaataggcagctgagagggcctcccatccgcgcctgggacattattcctagcctctaagagaatcctgtgcctttcctctggtgaaaagaacctgcaacaattattggcaatcgtcccacgtgggctgctgttttaatgggtgtggtgcaccttaggatccaacccgcatgccagtggtctctggtgaataccactccacctgcagacacagacagaggatctgcacctcattgagcagtgcggcagggccttgcggccggctagcattggcagcacatggcacagcctagaggtgagcatgagggggatgggaacaggggtggggccacccaaggaggcatgggagcctgctgcctggggcacactgggcgacgtgccagaactccctcagctccgggtccacaggcgggacatggatgccaccttggtgatccaaggacggcagaagcgcctgaacaccaccagctgctctctggagttggagagtacggggcagggcagccatggagaatctgaaaggaggaggtcagcatcagggtctgacaggattttcaggctttttccagagggcatatataaccacaaaccggtagggaacctgtggatgggagaaaagggcgggcccagagggatgggtagtatctgtctcatgattctcaaaaacagtcatcggtcctagtcggaacacagagacacacaagacacacacagaaactgtcctccaggcgactgccacagaataaaaactaaaaactgaatcagatggctggggacaattacttcccctgcctagatggagttagaccctccaacggtctttctcccagcaggagaatagagcgttctctgaacctcctgttgctgcagtgttcagcacatctgcccactgctctggcaactatcagacaaactgaaagcaaaatagagtcagaaacagacaggaatcccactttaccttgctcgagcagtcctctgatgcacggcatctgggtcctgaggattttcctg

SEQ ID NO: 19123 - DNA, 1180 bp, Mus musculus
gaagcaaagttcaattttgcttgcgtatttgagaaatcattgcttgaaagtccctataataaaacaatactgaaagaaaggacacagatccattcgccgaataatgcagagacaagtttggaacattcgtgctatatgatgccaaggctctagaggagacttaagtttcagtgaaactttttgcctcgggactctgtccaagcttttgggcctgccacacagtttttactggagtgggtgtggcagggaaccccactaactgaaaggtgaatctagtacactggctcttccccatcccactcccctgccgaggagtgcagtgcacagggtctcccctggaaaaacagaacaagcgacagaagggtatcatctctctcaacagctgaaattggctctgttttacaagatcacgatgaccatcagacaaattaataggtgtggaaaggtcttttcccttaagcaaatcaaaaaagggcattaattcttccatttatggagatccagggcctcatccattaatctctcccaacaacttttggaactgagggagagtataagtatcttgaaccttaagttggggtttaaccagggagacggtatctaaagacagtatagagccaaggattcgaaagaggggagtctttgaaccttttccggggcgactgagaagttattctcttgtaagatggagaggcatctatccatgcattttcataacccagatacattgggatgtcccagattaatatctatgtaaatgtaaaagaggatatctgggtctatcaacatggaggaaacaatggaaagctataatattgacaaatgggagagtattatgagccatgccctgaggaagaagagtccattcatgtctcaagtctggacctccgaaattgcactgaaaaggcaaatctcacaatcatctgggtgcatggggatggggaagaaactatctttaatatctattatggtcagatgataggtattagaaatggcaggaatccaagggagtcctctttagaggtcatgaattaaaccattttttcattacttattcttatgtcttataaacaatctccataaaccattacccttatttatcctgaagctaatcaagagcttttaagtatcacaaaattttttgttgctgtataagaatatggagttgatataatttttt

SEQ ID NO: 19124 - DNA, 1171 bp, Mus musculus
attgtcaaacacattagtcacaaaccatttattagctttatttactctgaaactaagaggctgtgcactcgcccttatttcctaaaatgaacagtttttctagcaggggccctcctgccacgtgtctgatttctggctgaaacacgtggcagctctcggctttgcagaaaaagtttttttataccatctttattatccaacacaaaacatagaacattcattcatatagactggacacgaacatacatgaattgaacacgagaacagattggtgcaccggacattagacaagacaaaaaagggaacagagtactcctgctataaggcccagagagaaatttctctctgctttttgggacattttcctcccttatgatgcgttttttattaaatggggcaatccgcctgttccttttaataaaccctttcttttctcaagcctcatgtagcttcggagaaccacggcctaccgactgttacccagctcctcactgctgaacctaagtgaaccagcactcaggtttaacgctgtctcagcttagcccataccttctccggtatgaatttcctttatcctttattttatggagctccgaaccagcagtgtctctttcaaaaatcctttgccgtttctcagtcccacgttggttcgccaattgttgtgtccggccagcagaccacaacctgggttctagcctggaaaggcattttggaaacctggaagagaagaggggctaggtggcgagagaaagaaatgtagccaagacagttattctgatcaaagctcaaattttattgttgagacactagttaagaaggaagggggaggggacttgattcccgccaaataatctcaggtccagtagaaaggtgagcacgtgtgtggctccaaacagcaaagcagcaggttccagcagtgggcgtggcagaacgaatgagcaggaagctccacccctgagcaagcaggtttcaagctgggggaggggagactacagagtgagcgacaggttttcagcgcttcacctctgcctctgctgcccgcctcttgcttctgcctctgctgcccgctgcctgctctggcagcacttttgctggcagatctcttgtgtgcggggcagggcctgggttgcagtcagtcacttggcatgagctgcactctcccttgggactg

SEQ ID NO: 19125 - DNA, 1106 bp, Mus musculus
gccccgtggttatgggagagagggcacagggagagagggcacagggagagaggttcccacataggcaagagtcctgagtctggtccctggctggagcataggaaggccttccattgggagattagaaacggctcattaggagaaagcctatctagtcgtccaagcacagaccttgatgaacagagacaatctggttttagaactttattgtagaaaggcagagggaaagagaagagaaaagagaagagagagcgtgtgcacgagtgagtgagcaagcagacattaccaagaggagagaagggggaaaaggagagagaagaaaggttagaataagaggttagagtgagtgaggagaaagaataagagaggagagtgaggggtgtagcagcccctcttgcagtgggcttatattattttgttgttgctaggtaactgggagtagtctagcctgaaggtcagaagcttggaacatgtgtatgtgactaaaagccatgtctctcctttgggggctgtaggggtggtaacttcaactggagccagggttccaggagacatgagactgttccatgtaggtgaattattaccaccgggtcccaggattccacacctcagctcgactggagaccagcctgtctgtgaatagcccattgtcccacaaccctcctggccatagctgaaggaagtcttccctcaacagtggcataatgggcggggatgtttataaggacctccatgtcctcctcttgtgcctctctaagggacgaggccatagctctagtttgaaaggaagagaggtacccacatctcaggtggccaccattcaacttttcatggcagcgttatgcaatcgggttcatgccatcccagaccaatgttctagtaaacgggtcttgtagctccctgcggaatattttctgtataagctccttttaccctatcagtgaaagaggcaaggtctgcagtggccttttgattgatcccagaaataggggacttagtgggtcccctcatctagctttctccaggcagccaagcctagcacccatccttgtcttggtagggaggtgtcacatcgggggaccagcaggaaagatgcaacaccacct

SEQ ID NO: 19126 - DNA, 1140 bp, Mus musculus
aggttctacttgtatgtccttctggccaggctgctatccttgagggtgagcctgattaccatatcaaacttagatgttacttcatgttaatctgaataagcctggtgaagccacacgagggccctcttgccctgaggtactgagagtggaccttttaggactatgccttctcaaatggaggcagagaggcaggttttaatttttgaggatgggctattgaggccttctaagagggagaagaggtgtcaatctcttgatctgatatgggaagaaggggctttagctaatttatagccccacaatgttggatttctgcaagggaatagattacttctcatgtgatttagaatgccagttaatcctttcagcaatgaagaatccaagcaaaaggttaagggggcacttgtaggctaagttcccggaggctgctcagctatggagtggcggcggcctagggcctgtcagcatgtaagggacaagtaggacatcggaggacatgtttgtgtgacctcggccacagagagttgacaaatatatagtagggtctttttcatcccctgtggtaatatctgatacctcttcgtaggtttacttatgttgtgttctcacactgcaaacgcaaaatgagctctgtcttgtggagccagtggaatttggaagaagcaatctttaatgaccatgtctgtgattcattatggaggtggcgtggcaccagggtggaccagacatgcaagagtcgtccttgtgttctccatttgttcatcagcagcctccagctcctaaggtaatctgtatttgccaggctttttctttatcacgaagatgggggtattaatgtctgctggttgatggttcaagatgacagagttatagctgttccttggctaattccttaagagcaataagtttaggtttaatgatgggtttaatgatccacccagttgacagcttcgatcagccaagtcaatgatactgggtcagggatcttagcgtgtactagtttgtagtggacagtggcccttagaatttggggtgacaatcaattttatgtccaataaggtctggacattcatgttctgtgatgttatagaaggtttggtcatgtactagttgtgagaacagtacccgtgtcctacaaaa

SEQ ID NO: 19127 - DNA, 1167 bp, Mus musculus
atcaaagtatcaaggggtctgaattaaggcggttgtacctgtgccaaccccagccggcacccctagacccaggaagatcgccaaagtcatggtaatgggctctcgcttatggtggactcgatggtcgaattcatcgacaaaagagctgtcatcatggtacaggagcctagggacaagctgaactagaatacagtaatctttagaagtattaaaaacagaagtagatacacagggagtgagaccagtgttgcaagcccacactgtgtctaaggggggcactaggtactgaccactgtcggaaaactggataggttgggtctggttacagaggtgccgtctgccatgtggcacttgacccaagcaaagtccactccctgaaacagctgccagagtcagttttctgtttttcccccaagtgcattgagaatggtctgtagttttattataggtcctgacttgggcgattccctcataatagggggcactagaggcatagcacagtcagcaagactgagtaatgttgggattagtatggttgaggaccaggaatgccccctgtaccaggctgaacaggcgattctcggtttctgggggcgacggagtggttggggctagatctagggaaggagtgtaagcatcagtaggaccacctaaagtaggcccggggagggtaggtcttggagggggtctctgaggccttttaactaagacggggttaggccccactgactgggctggaggactttcttatcttcagccgaaccttaaaagtgaatccagagtccgtccctgtcacataaaatcttaggccccactgcctcctctttatccaatcttctttgcctcttttcctttccgagtaaaagtgatgtttaaagaatcatggcccttacttcctctggacactacaataagatcccagctagaggaagggtgccaataagtgttaccagtggtttcacatccccactgactacagaagaagccctctgctcccccgcaccggcgagcctcttttttactttttctatctctgggacaggcataaaagggctcctgacggcgcctcctttgtttagactcactactacagcctggtatatctgcaatgtactgcccctgggaacttaccccctggttatatgaccgcttctggtagattacctc

SEQ ID NO: 19128 - DNA, 1543 bp, Mus musculus
gggagcagggtggcagggttgaggttagcaggcggagcaaaagttatctggtcatttaacaacgagctctggtactgtgtcatccaggcgtttgtcatccagctgtcggggggctgccacacaactttccaaagcatggggagcaattacagtcacattttgacccatagtaagcttgtcagcgtctttgacaagtagggctactgcagcaatggctttcaggcaagagggccaaccactggcgaccgggtctagctttttggacaggttggccaccggctgcttccagggccccagagtctgagtcaggactctgcgggctactgtagcccgctcatcaacgtatagggtgaaaggcttagccaaatctggcaaggccaaagcagggcctgcaagcagtgcagcctttatgccgtcaaaggctttttggtgttcctctgtccaggtgaacgggacattttctttagtgagtgggtacagagaggccacccgcgttgtgaaccccggtatctagagtctgcaaaaatccgctgtcccccaaaactcacgtacttgttgcggagtggtgggggtcgggatctgcatcacagtcttctttcgagcttcagtgagccaccgctttccttttcggagggtgtatcctaggtaggtcacctcggtgcggcatagctgagctttcttagcagatacccggtaccccaactcacccagttcattcaagattttcttggtcccgtcgaagcacagttcttgagttgaggctgcaagtagtaagtcatctacatactgcaagagagaaatctgagggttctgtgccctgaagggcgcaaggtcatggtggagcgcttcatcaaaaagggtaggggaatttttgaacccttgtggcatccgtgtccaggtcagctggcctgtatgccctccctctgggtctccactcaaagtcgaatagtggctggctgttggggtgcaatcggaggcagaaaaaggcatcttttaaatctagggcagtgtaccaagtccgctctggtgggagagaacttaataggttgtaaggattgagaacattagggtgaatgttttgtacccttttattaacttctctcaagtcttgcacgggtcgatagtcattagtcccgggcttgtgcacaggcaggagaggggtattccaaggtcttacgcgggttcgcgaccggccaggaaagacgcaacaagccagaatcttctgcgtcaaagctttattgcttactcaggagcaagagaggaagagagagagagagagagacgcagagagagaggcagagagcagaggaagagagagagaggcagagagcagaggaagagagcagaggaaaagacgaagagaaagagacgaagagagggagtgccagaaccccatcccttttaaggagaattatcctccgcctaggacgtgtcactccctgattggctgcagcccatcggcccagttgtcatcacgagaaaggcagagcacatggcgggaaaactgcccttgcacatgtgcagattatttactacttagaac

SEQ ID NO: 19129 - DNA, 1888 bp, Mus musculus
aatttgcttcttggtcatgatgttttgtataggaatagaaaccctgacttagacaccgtatattaaaccattcctgcatccctgggatgaagcctatttggtcaggatggatgattgttttgatgtattctttggttcattttgcgaggattttattgagtatttttgcatcaatattcataagggaaattggcctaaagttctatttctttgttggatctttgtgtggtttaggtatcagagtaattgtggcttcatagaattaattgggtagagtaccttctgtttctattttgtggaatagattaaggagggttggaattaggtcttctttgaaggtctaatagaactctgcgctagacccatctggtcctgggctgtttttggttgggagactattaatgactgcttctatttctttaggggaaatgggactgtttcgattgttaatctgatcctgatttaactttgttacctggtatctgtctaggaagttttccatttcatccaggttttccagttttgttgagcatagccttttgcagtaggatctgatgatgttttggatttcctcaggttctgttgttaatctccttttttatttctaattttgtcaattaggatactgttcctgtgtccccttgttagtctggctaagggttgatctatcttcttgattttttttttttcttcaaagaaccagctcctggtttggttgattctttgaatagttcttcgtgtttccacttggttgatttcagccctaagtttatttcctgccgtctacgactcttaagcaaatttgcttcctttcatcctagagcttctaggtgtgctgtcaggctcatagtgtttgctctctagtttcattttggtggcactcaaagctatgagttttcctcttaggactgctttcattgtatcccgtaagtttgggtatggtgtagcttcattttcattaaactctaaaaagtctttaatttctttctttatttcttccttgaccaaggtatccttgaggagagtgttgttcagtttccacgtgaatgttggctttctattatttatgctgttattgaagatcagccttattccatggtgatctggtaggatgaatgggataatttttaatattttttttatctgttgatacctgttttgtgaccgattatatggtcagtttttgagaaggtaccatgaggtgctgagaagaaggtatatccttttattttaggataaaatgttctgtagatatctgataaatccgtttgtgtcataacttctgttagtgtccatgtgtctctgttgagtttctgtttccaggatctgtctattggtgagagtggggtgttgaagtctcccactaccattgtgtgagttgcaatgtgtgctttgagatttacttaagtttctttaatgactgtgtttgaccttccatttggagcatagatattcagaattacctttgatgtgtatgaagtgcccctccttgtcttttttgataactttgggtttgaagtaatttcattcgatattagaatggctactccagtttgtttcttcagaccatttgcttggaaaattattttccagactttcactctgaagtattgtctgtctttttccctgaggtgggtttcctgtaagcagcaaaatgttgggtcctgtttgtgtagccagtctattagtctgtctttttattggggaattgagtccattgattgtgggaagccattccgaactccctggccagcccaggccatactctaagatggcgcctgacagaaatctgtgtcaattaactgggttcccatctgtggagtcaatataactctggtggttgagcagaggtccaattctgctgaaccctcagttgctctcctcggct

SEQ ID NO: 19130 - DNA, 1178 bp, Mus musculus
taaaattcatggctgacaacacatctcttctccataaatttacaggtaaagggagcacataaggttgaaaaacctgtcctaccttctttatccttccattgtaaggattttgcacttatagttggagtagcctcatatcctaatccttgtaggctatgtgatgattgattaacaggccaagaagcaggccaccagttactggatacaatgcttttatctgctcctatatccattataccttgaaaggtttttccttctacttgttattgtaaagtgggacgattatccaaatctaaagatatgtaggccacattagttcctgtagaaccaaatcccttatcccttctgggattctggttactagagaacatgttatgcaaactaggaagaagatcaaatgatcttctcggatgagttggcattaactgtggctgggggagcattgacctgattcctcctgtgggtgctgtcacgacccacaatcatggctcttggtatattttggggaggggagacagagcctcagaaagattcttttggtcgtaactggaactagataccaacctccatccgaaccgggtgtgtgtctcagagaactcagaaatggtcaagttggaccttcccctgcagtgcttagcctcgtacccacgctggtgcccatactgaattcgtattatcacgaaccagcatgcacagttctgagtcctgtgcagttcctaaaggtgaattgtcaacctcagattcagcaaggcctcttcaagaattatgccacttgtaacaccacaatttgtggctcttaggctatattaggacctggaggtcaccctcctcatccctaatatctccacagcctgaggaaccaaggggaccttgcatttgcagcaagggtggaaaactggagaccagctaagggactaagcccgtcttatcagaataaaaacaacattcttctaatatctgaaattaccacctttctagccctcatctaaaccttaatcccaaatcagaccaaaagccacagtatgtattggaatgcttttagaatgaaaattagtagctgccacctgcaggctcttgggggcgggcaagcacgcctgctgcagtcaggctgaagggcgtttattgacctacttgaaaaacaaaatccagacagtgaaaggtaacagtacaaaagcttc

SEQ ID NO: 19131 - DNA, 1144 bp, Mus musculus
ctgacaaaggatcatgtactgaaaaccaagaactaaacccacatcttggactatcacctgaaagcaagcatacccacaatttatcattgtcccaatgttcttgtggacatcctttcagaggcatagtttcttttgatcttacaaaagtttcattataactaaaataccccaaaatcattatttaaagctcccacattaatcttctatgatgtgggggtggggagcttggggaggtgaggggagggcgcctatctggaacccatctatctggagcatcagaaagaaaagttctataactaatgggaaggcagcccatggggggggggtgttccctttaaagtaacactgattggggcagagtctgacgttccctcatacttaatgacaggggaagtcaaatgggaggaaaagtcagtgagcgcccctagcagctcagtcttattagtcctgaccctgatgacccttattagtccccagcccatgggatgaagaagaggatggggaacaaaggcccaaaaacgaggtcgcaaagacacagtatagctgttgcatggcagccacagcaagcatacatagcaagaagcgtgttctctgctgagggtggtttctcgggatcagagaccatttgttgtactctctgggtgagcttgtccccaagttggtgggtctgtccctgtggtggatgataacagtgtctgcctgactctttcccaactggaagtcctgccgtctaatcctgcctcagctgggtgaagttgacctgccagtcatctcctgactggtgtcctcagaactggtgcaaaggctgttgtgtggaaggctttcctgcacgtcagtatgggcatgcatctggcaggaataggaatccttagggtatgtgtctggagtctggcaaggtctcgtaggtctccaagaatctgtatagagcctctaggctaatatacaaggtgtggtgcatgtaagagataattgaggctcaaatgcttaatggccgcaagtgcacttataaagtcggggggggggggcattcccaccaattcatccttggagcctggaacctgcaggatagggtgtagtctctggaatagctggggggggggggttgggctctcagctggtagcagtatcttgaagaggaacagcg

SEQ ID NO: 19132 - DNA, 1113 bp, Mus musculus
caaggaagtggggagggcgttgttggaaaataccaaagataccagttaagagtcccaagtaagtgcaaagtcacaagagtcacaaggaatacctggtaattgtgcaggttatctctcaagacagtttctaagagcccctaacaatagcacatttgcatagcaggttctagcaacagtcagggtgactttctttgaatgaacactcctagaacccaggaagggggtgggtggaggaatgtcactatctgttttatgattagcataccttggtgcattgagtcacagaggtcacattcccaagcctgggcctaaaggcctagaatttttttttttttatgttatactttcagaacagcagaggcatgtaaaattttccaagactctaggttctttaaagaatagcccaagtgttccgggaaggcgtccatctcgggtaacttagctgacagtacatttccacaacctctagaggcttaccagtggaggacaagttttgctcttattaagtaatttcaagactttaaacataatgttaaccatcacaaaatgaagtgtacagatagctggaccgtgtaccctatagaaagataacataactgtaatcagttatttgtcacatcaaactctgagagaagtccttaaagtcatagtcatcttttcaaacatgtgaatttgataacagtatctggcctcctgctttgggtaaggtggctggctggagaaatactcttccagaaagagagagtgttttgtagctgggaaatacagcatttagatttggcctcagcttttaagaagataggcatgttcatctgggcctgggatcttgagtcataagagtttttaatcactgttcccacctcgtttaagttgttgatctcttcgtctgagtttgggaatttgcatgaacaaacacctggatttcttttaggttttctaacctgtaacctgacagtgtagatttttaaagcattcacttagaatattctgaaatcatgtttagtataagttttacctgtttacttgaatttgctgatttgggcataaagtccaagatttcctcctcaccctaagttccaaaaataactctgaaattcaaaatatatatttata

SEQ ID NO: 19133 - DNA, 1617 bp, Mus musculus
ttactgtgtgagttgggggaaaactacccaacttgtctgagctctggcctcctcccgtgttaaacaggagtagcagtgccttccgcggaagcctcattacaaggactctgtgcttcataattcatgtgaatattccattaaatgtgaatgttccttcccaccactactctagaagcacggccctaaattgatgagattcgtgagcagctccttagtcaaggaagctaactgatggatgaaatgaacttcctatacttctcaataatcaaggctcagattactcttccctgcccattcttcttacacagtgcataacacagcaggatgctgccaactgccgtgcagtgaaaaacgggctaggcacagtggttcatgcctgcaaccccagactcaggccagggcagggcagggtccttattgctgacctgaggtcaaccaggctatgcagaaagtgtgatgccagcctgggtcacactaagagaccttctatcaaaaccagaaaaacaaaaccaacatttaaaatatgtcagtggcaccaggaaaagggtcaccttgtccttggatgcttactttgctgtctccaggacatgttgcttctcacgactgtatctgctggctctgctgctcactggctgtgtgtggtcaggggagtcagtgacctcctgtctccaaagtctccatttgttacatggaagatgatggtaagctctgtgacttacttggtgtagtggttagaatgcgctcccagggagctgcatcgtgcctcttcaggatggccactgatcctgtgcggtgctcacaaggtttcccactgtgactcaagtttgattatcaccactgacatgcaaccagacaaaggggaattcctgagcacagaactgatgtgcagcaatccattaatttcttgtgatgactagggagatagtccccaaaataatgaagtggctgggctggaatggggtctagagagtgtcagaggcagtactcatggcataggacctaggcactcatgaccccaaggtatggtgagttaaatgttaaagtgtttatccaacaacatggaaatgtactctgccatagtacatgagtcaaagtaatgtgtggagggccacagtgatgctttgctctttcttgtgtgctcagtctctctgtgtctccctccctccttccctctctctcaactctcatacctaatcagagtattcatgacctccgagacatgctgccttgacacgcactacagtctttctgcacttctggctaggaaggctcatcactcaccccttcctaaactacaagtggacaagaatggtggtaagtccacaggttagaatttgctagaaacacattctgttttcttcagaaccacggatcaggaatcaactgatacttaagcccaagaactttactgacacaaagctgagaggaaagagtttattgacgctatatattccatcccaagtaaggccatgtgccaggcactgagggcctcacacagagcagcagatacacagcaatgtactgcaatacacaagctggttataatcaccagagctcgatacaactaaacacacaaatagaaacatgaaaactttgcatataagatatttaaaccct

SEQ ID NO: 19134 - DNA, 1190 bp, Mus musculus
ccctaaagcatgctgcataattaataatttatattttcattattataaatgtttatattaatgatactggatttgattatatcaaattagtcaccattttatagtaccaatatttctgtctttttcttaaaaatgttctttaattattcctgaacatgagagttcacatattccttggacacttaaaatgggaagtgacaggtaactgttttaactttagttaaaaataatgtcactggggctggtgagatggctcagtgggtaagagcacccgactgctcttccgaaggtccagagttcaaatcccagcaaccacatggtggctcacaaccatctgtaacaagatctgacgccctcttctggagtgtctgaagacagctacagtgtacttacatataataaataaataaatctttaaaaaaaaaaaaaataatgtcactgtagtctggataaattataataagttcatgtatttgaaataaagtctctgatgagagaaatatttaaatggtattaaactgctgagcaacagggcttcagtatgttcacacctgggttactgtatacgttggatgatggttttcttttgctaacaatattttttcagaaatattgtaatttaaatattaacatgagtgttttgttgtaaattcacagaaaacttaatgatgttcaaattctcaggaattaagaactaaccataacattgtcagttctgattaaattttgtaaaagacagcaagtttgttatctcacttgagtggggttctcctttcccttggctcaaatagaatacaatacgtataataaagcattaataaatataatttcaaaactgtccttccattggatgcttaaggtcagaattgaatgttgtcagccagtgggttttcaatgtgcttttgctggtgtgtggaactgcggattgaactagatagttgtctgctccttgaccctgtagtacttgttaatctcttaggttcccttccatacattatgtgtgatctcttttaaagaattaaatatatcaccaggtgggtggtgtatgctttaatctcagcactagggaggcaaaggtctgagagcatctctgagagttcaaggccagcctggtctacaaagtgagttccaggacagccagggctgtgacacagaaaagccctgtctcaaaaaacgaagaaacgaaaacc

SEQ ID NO: 19135 - DNA, 1195 bp, Mus musculus
cagaagcactggctcgattaatgctgtctgtaccactaaccaatgatggaaagtatgtactgttaaacgatcaagcagatgacactggcggaagtccaagtgaaaacagaggcgcagaatctgaagcataactcatttgggcatcgggggtcagagcacgtgggaaggagagccactccttaagcagttttcaacttctctgccgtacaggcacagtgacctgaatttagaacaccgacaatcacgtgcggagtgtacccttggatgccctggcacagaaacttgggagggagacaataagaaatgggtgagagcgtgcctacactctacaaatgctattttaggtgctttgtggtaagtctttgcttcagactgttgggtacccagaacgagagctataaaaatgcattgttcactttatttggatagcagcgcttcagttcctaggatccttttataaatggtaaaaccctggatttacaatttgttaaatactaaatagttcctattaatatgatctatttttgtattttacttagttttaagtgcctgtcattctgaagattatatatttataacccaatggtctcatgcctggacctcatggcactgctatgcaatttggtctcaaacagacagcaaagcctttacaacagaacctttctgaaccagctttcattcaaaagcttcaggtcctcttagatgctttctctggctactcactgtgagcaagggacagttctactagttcctgtttcttctgagccagaccttcctcaaagggaccaattaatttaaaactcacttgaagctcagctggctgtggggctgtctttgaagttctggtttctaccttgatgtttctggttcgtggggtcctggaccaatctccaacccctaattatgaagtaaaggtcttgaaatcatgcagcataaattaattgtaaccatcttcaacaacctgtctttgtaataatttagcaataaaaactgtttcatctcaaactgcttattgtggttagtttatagaccacccttagaaggaaactaaagtcttggtatgtggaccagattggccttgcagtcttgcttctgagtgctagaggtacagctgtcatcaggcctgagtatcagtgacagtgacatagctacattttcaacactcagctgaaggatgagtccaaggccagcctgg

SEQ ID NO: 19136 - DNA, 1237 bp, Mus musculus
tcttgaagctttggaagtcagaagaccatgccaagtaacccccaggccacactcctgtggcatagatcgagtccttccttccctcttggctcctggtggcttctgcttgactcggcctgtggcaagtcacagacatctgtgacttaacatggtcttccttgccctcatctgtctgtgtcttttgttataaagacactgtcgctaagctcagggtccaccaggacattcatggttctttccttgtcctggttacatttgccgagaccccgtttccacaagctctcatgttctgggttctggatggttgtgtattttgagggggatgcaattcaacacattacaaaagattacatacacattttattatatttgtgggaaaccatggttttaggaaattgcataaatcttagttgtaaaaaccgtaagtgagctggggatgtggcccagtggtacaatatctgcctagcatgtgcaaggccctgggtttaattcagcactgtttaaaataaaaaccctcagagctccagtactgctggtaccaagagacccttctgcaatactggaagtataataaactccagcttttaaagactgagcagtgtgactgccgtaggaaacgtggagaatgcaggaaagagcgtgcagcgaccaggccctgagccagggtaagtctgggttcggcatccatatagaactgtaccagttgcaggtgctcacctccccaccgtcacctgcactgtggagagctttgtgggaggcactagagaggaatagcaaactggccatcggctctgagctttttattgtcccattgaaccgagggggaaagacacagaaactgtttctctggctgtatccacaacacctgcagagcccatagggtcccacaagctaaaggcccaatcctgcaaaactgtcctgacttttaggacagttgtaagtgccaggcttctggagcttctggccgactagctaaaattggaggttaggaatttgtgggaatggcccatagctcaggcttgctgtggttaccaactatgttaagatatcacaaagtacacaatgaccagctgaacgcaatgacacattggcaaggtgtagggagggacacagagcttccgactctctagggacacaagtgccagggttcagcagtccggaagctcctcctctcttagataaaccaatctagaagcttcttcacagacatgcctagagctttatttccacaacgatt

SEQ ID NO: 19137 - DNA, 1213 bp, Mus musculus
ccacctgcagggtgggttttgggggttttgtttgttgtttgtttgttttgtttttttctgtgcagtgctttttgtcataaatattcttgccacaactcacagagatccacaggatgtccagttagagataagaaaggtagggttcagattctaggctttgggaattcaaccgagtgcacaacccactaaagttcaataatgctgagaacctaggcgatgcctcttcccccttctctctcccaccgaaatcagagctcaggttttaactaaatgtcttaggaagcatgatagaaatgtgggtaggtgattgtgtttcctccctctggctggtgaagctggaggatgtcacagaactgtccacctaaagagaaagcaacttctgagtctctttgcttttgtcgctcatcgcagataccagccgacccaccggctttcagaccatggccaacctcgagcgcaccttcattgccatcaagccagatggcgtgcagagcggcctggtgggcgagatcatcaagcgattcgagcagaaggggttccacctggtggccatgaagttccttcgggcctctgaagaacacctgaagcagcattacatcgacctgaaagaccgtcctttcttccccgggctggtgaagtacatgaactcagggcccgtggtggccatggtctgggaggggctcaatgtggtgaaaacgggctgagtgatgttgggggagaccaatccagctgattcaaaaccaggcaccatccgtggggatttctgcattcaagttggcaggaacatcattcatggcagtgattcagtggagagtgctgagaaagagatccatctatggtttaagcccgaagaactgatcgactacaagtcttgtgcccatgactgggtgtacaagtagacatgaagaaaccagagtccttttcagcactactgatgggtttctggacagagctcttcatcccttggatcatcttttctaaaacaataaagactttggaactgaaaaaaaaagagagagaaagcaacttctgattcatctgacacaaggatcagggctttatactggcacagagaaattcttcgtgcaaatcacaagcatgtgtctcctcctctgagatgctgcaatcccaggcaaggatgccgctaagtcagagaccagcgaagccctgtctgtgttctgggtctcattcacacccctcaggctagacacct

SEQ ID NO: 19138 - DNA, 2563 bp, Mus musculus
tgccagggaatcaggaccggaggcaacagcatacctgccctggctaagccctgggagttaggttaaagcaggctgttttaaagaaaaacagttaactctttcatggcacagcatgacatgtgttaatttgctcctggaccttgagtagaagacagggcttgcttagagagtgaatatgctgaactctgctaccgaaataagtctggtggtggtgactttctggttttctgggatctgcctcttctttctcctctctcttgccttgttcttctttagtgggatcttctgaaggtgagcaggaataaagatggcagtgtgagagcccagggctttgtgtgtaatggggcacagagctgctggggcctttgctcagtgaatggactgacggtgaagcatgccagcaaggggcgacttaacactttcttaaatatctcagtattaactggaaccccgcctcttggcttctcacctgcacaaggacaggatgctactctgagtctccaaagcatcactggctcagccataggccccattcaccccaagtgtggaatcttgactgtagaagagttgcttctagggagttagtatgtaggtgaaatatgtggccgagggaaagcccagtttgacagaaggttcttgtctcgccaggccttagtattctgcctcgtggttttgatctccctcattttgggggaataaacaagttccattcatccatccttccatccatccatccatccatccatccatccatccacagaataagatgttgagagagcagagtgtggggggaggaggcttagggacgtttcctcgggagccatccagatggctctggaggaggcagaaaggaggtgtatggggtgacaggatgcttaaaaatgttccagctagttatctaatctctgaacactaagattacaggtgatgtcatcccctcagaggggaccctggggacactgggggcgggggtgggggggattgaagtggtctttctgggctgaccacggaatccactggcttagtcaaattagaatccttcttctaaggtggctgccttgtgggagcctctcagacagggttgggggaggatgcatccgtcactgcactgaggacagttgtcagggagatgctgctctatacagcagaaggctgctttgcatcactgtgtttgggccccgcgctttcctttgggctgaagtgagcaggatgtagtgggaagctgcttcgattcttttccttcagtttcacctcctacctgaactgtggcaggggctaaaagggaggaaaatctataggtagagaagtggctctggcgcttggaggtgtatagacggcagcatgtaacctctgaatcctcccgctccctgcctcctctcgtgaacaaccccgcctgctgctacactgctggcccctgagcaggcagctggtctcgggtgtagcagccattgctggttgatggaatttttcccttttgccagctgattgtgtctgtttagtattccccaccatgcagttgactccattaggaaaaccacgcccttcggctttctccccttctcgatcaccagggtcaccagtgtgttctcttttggcgggactctcaaagacaaggggttggggaggggaaaccaaatgtttcacaccaagaacagaggctctcgggtgtggggtgtgtcctccgttccagggctgacactgagttgagtccaggtctgccttgatctggaggtctcaggcacctgcagtggctatgagggctgcttcccacgggtggaggctggagacgtggctgagtggtttcccaaggccctccccgcccccctcagttctgatacctgcttctagctgagatgctgactgtccctgcaggaaatgagttagatcagagaataaagccctaaaaaaagcagtttcccaatggagccctgttatccctgccagtcagtccccagccaaagaagggatgcctgactcatttccgcggagtccccagtgagagacacagatgaccccatgggcagagtgggaaagtcgctgcgtgagctgtcctcgtccttcctttgcttctagggcacttctattcttcgtttacacatctgccaaagggggtggagttgtacttcgttttacaggtaaatttcaaggcacagtcagtttttaagaaagtgctccaagaccctaggcaacgtgacagttctcagttccctctgaattttagtctctgctacctggtgctctttaccaaaggagctcgctgcagggtgaaattcaggcgtgttctgcccaggcctgctgtcttgagtacaaatgtgaatgatggactgactgcttgttgccaaactggaaatgttttgtagggatttactggcatggtatcattcctaggaagaagaagaaaaaaaaaaggaaaaagaaagaaagaaaaagggacaggagagggagagaaacttgactgcacattttttttttattattaaatccatgttgtgacttttatttaatttctatattttttggtaataaaaagttgactttttaatttgaatttgtctttttttat

SEQ ID NO: 19139 - DNA, 2298 bp, Mus musculus
cggagactggaggaagagctacagcagctgaaggtcggggcccatgggtcagaggaaggtgccgtcttcaaagactccaaagccttagaggaactgcagaggcagattgagggcctgggtgccaggctccagtatgtagaggacggggtctactcaatgcaggtggcttctgcacgccacaccgaaagcctggagtcgctcctgtccaagagccaggagtacgagcaacgcctggctatgctgcaggagcacgtgggaaacctgggctcctcatctgacctggccagcacagtcaggagcctgggggagacccagctggcgctgtccagcgacttgaaggagctgaagcagagcctgggtgagctgcccggtaccgtggagtcactgcaggagcaagtgctctcactgctcagccaggaccaagcccaggccgagggcttgcctcctcaggacttcctggacagactgtcctctctagacaacctgaaatcctcagtgagccaagtggagtcagacttgaaaatgctcaggactgccgtggacagtttggtggcctattccgtcaaaatcgaaacgaatgagaataacttagagtcagccaagggcttgctggatgacctgcggaacgacctggataggttgtttctgaaagttgagaagatccatgaaaagatctaagtgaactgcgtgtgtgggcacagtttcttacgaccaaaaccaaacaaacaaaaaaaacaaaacaaaaaaaatcccattgttttctcccaggtgccctctcatcaccttctcgcccctcccccaccccatggaaagtagcagataccgactggacaccgccctggttttctgtgcccagttaatttatttgcagttattaccacacacctttggtttcttaagtcctgtttctgcttttggtttggcttcctgaaggcccagccagccctgtgcagaaaaggatgtgtctcctgttagaaagatgacagtggctttaactggggattatcaggaagcagattaacctaaaaaaagatcctgtcaggcagtcaaatttatagtaaaatagaaaaacaacaaaggacaggtggggggcactttttaaaaaattttttaaggaaaattaattttattggtttgttgtttttgtttttgttttttgtttttttatactcctggccagggtttttagaagctgtctcattcttgtcttccatttagaactggtaaaaactcctagaggtcagctctgaatgggcgaaagaggaccccacatccacccccaacctgcctgagagtcactctcagaggcgtggtctctctccattccctaatccaatcaaacggtaactatgcaaattcagtaggtcctgaaggcccagtgcacttctggtcctggtgacccacctgtgtcatcaggctaggaggggtcaccatgtgcgtttggagggggtgttctttgggttctgatgtgagagctgtattttccacagaggatttgggcatcttcccgagagatgtgggccaggtctttttgttttatcacagcgtctctggagaggcctcccttcgcctcgcccggcccccatctgtcagtgaggatcacgtgggctgcgtttctgtaattgttctccatgtacccttgccctttgagatgtattgtttttgatggctgccttgcccttccactccctctcccctccccccaaaaaaaaggaaagaaaaaaaaaacagaaaaagctgaaaagaaaaccaagatttgttagtttactgtgaaatgaactgtatggcttctttacagtatttttaattcttaataaacacttgagctttgttatgaccttcagtcagtgggttctgagaacttagtgatgatgcattttatcagcataaaatgttcgggataagaaaattggtaacttttccatcttaagacttttttttttttacgatgtacaatgtttttaaaaattatttttttctcaagccgggtgcactcgggaggcagaggcaggcagatttctgagttcgaggccagcctggtctacaaagtgagttccaggacagccagggctatacagagaaaccctgtctcaaaaaacaacaacaacaaaaaagatttttttctcttgggaagggggtgggggtgggaagtgtgtgtggtggcccgtgtgcagagggatctaactcaggttttgcaggctccactcctgcaggcacaggcttttgttggtttattattggatctatttttatgttcctcgtagttgcttcagatccctgcctgactacctggtagga

SEQ ID NO: 19140 - DNA, 1219 bp, Mus musculus
aaaggttagccacaggctcttgcaaagcagaggaggcccaccctggccaattgaaggcagcacactgaaggctgattctctcacttggtcaccgtgtgggagaagaaggatgtagaaatgacctcactgaggttgagaactcgggaaagcacagcctgtaggcttctctctgcaaaccaacccctcgtcaccatggattccctctctagtccagacatgacagcttttggagttacctccacactgagtcataggtagagacaaagaagccacagcccttgcttgaaacatcctggaaaggttaaccagtccttcttttgtcgcaggctgaggactgaaggctgcccagtggtggtggtgacaaagtcagcacttccctttgttagcctttggatgctgtgacaaagccccagagacctgacttggaggagcaaggtcaaggttggctagatccgttgcttttaggtatgggatgatgctaaacatcaggacacctggaccatctggtagaggatgctgctgccgttgtggtagctaggaaacaggaagacagaaggaagacaggaggcaagagcatgctctctgtgatcgtcttctccaagcagtctgcatctctgagctcctaacacctccccctagtgctgttgaatgatgggtatatccatgcaaccactgattaggtcagggcctccatggcttgctcatctctcaacagtgtcaccagctagggtctgctccttcaatactgggacctttcagagagcatacatagtgaccatcttaataccaccaaaactttgctctcattccttcttgtctccagagtgcttgaaccaaagaggcatcaaggagtcatttcctgttacatagaagggcatcatatttcctcaggatttttctttaccctcagctagttttgtaggcaaagataatagccctctgtttcattgagtgcttcgatttctttttatatcataagtaggttgctgacacactatgtgttgactaatcatatcttttcttttgtgaattacattcatggctttagctcactttggagttttaagttagattttaatgtcttcaataaaaaatatactcatctgcattatttaagtcaagcatctgtagacagaagaattaagagagcaaaaaaaatgagggaggcgcctactttcagagtccttttctactaaagaaagatgtatttagtttcaat

SEQ ID NO: 19141 - DNA, 1189 bp, Mus musculus
tggcttattgaccaatggtaaagtagtctgaagtttgtgttttcattttgtttctggaaatgtgtggagaagtggcttattgagtaccacaaatccatgtcttctcttagtttcatattaccagggattctgacccatttgggatttcatttcaggttttgggcgttgtcttgtgtataaaaatgctaagtgcaccttgaaacgatacaccaatcagacctttgataaggtgatgggtcccatgttggatgctgctaccagaaaacccatctggcgacatgaaattttagatgcagatggcatttgttctccaggtaaaaacccttaaaaaataatggatttcagtgtatagttttttaaattgtgagaggtacttaacagtatttctgaatttttgataaacagggcagaaagtaatctgtactgtaatacccccatctacattcagccagtgtggtcattttcactgaattttcttcctatgtttttctatgcattaagtgtgttttcccatagcaaaaatgcatcctaggcataaccttaaattacacaaaagccacacttgaaaccatgttttgaatccggtcttgactctgcatctatgctggttatttctaaattcacacattttgtctatggtctgactttggacttccttttccctaaagggaaggacttcattatgattacaaacgtgtaatgagtttgtaatgagacagcccttgcctttggtcctacaggctagtgtagaaggcagacattacatcagatcacacacaagcatgtcaggttacatccagagtaagggatcagagagagaaccatgagatcattgtgtggcaagaggatttgccctggtgaagaagatctgcactgttaggaaatgcgctgatgtctgcagatgggtaagaggcgtctgctaaagaatcagaaaactccagtggaaacctgtatgagtgacagaagtttggtagctgaggtggtctgaaaggaagactgcatattagggctgtgcggaacacagggaccagctgaaaagtctggtgtcagaccaatcatcttctgtacgacccagccatagttccgctctgcatggacggtgctctagggaacatgaatctgccaagtgtgtgagtctccttcactctgtctacctttgtttctttggaaatttttgtgaagctttaac

SEQ ID NO: 19142 - DNA, 1207 bp, Mus musculus
gcagggtgggagttaactctctggagcacactgcgtggcatttgcatttaagccagcattcaagggagggcaccacaactttctaaagttcttagtgccagaatggaccttatgcctctgctctttgatgaaacacagttttaatttttcattgcaagaaaagagaagaaaccttcccaatgttgtgaagattacatatttctaaaccagagaaatgtaaaagaaaaaaaaatatatatgggggaaaagtgggtttcaaaggtcaggaacgttctttacccctgatggattcaataaaatgcagactttaaaaatcatctgtctaatttgagattcaagatcatcaaattctgtctaaatattttgttttaacttctaagctcattatggcccctttgtgttaacttgtattaaactctgtcagctatgactggtctcataagcacagtcagtggggcagaataagttaattatttacttgtgtcactagtgctcttcatttaatgaaatgcacagctgtgttggatctgcagttggatgtgtagctcccattgttcagcaagtcagcagaggggagaagccgtggtgatggagagtcctcgcctctctctgctgctctggctttctgtgtcgatttcatgggtcttttatcactcgctttctcacaaaacaaacaacacagggctgtctgctatgggaaccatcttggcatataaaaggggtttcagaggctcaagtaattttaagttagcgaagatttaatttttggcttacaggtgcccctggttcaaatataaccaaagcaattctattataagacggaatggaaaaaaaaaagctccttgtgtatgtttttgtcagcaaatgtcagaaaaaggcagaagagaaaacaaaacaaaacaaaaaaaaaaaaaaaaaaaaaaaaaacttcccaaaaggaagctgtgctgtgaagagtaatcgggcccagaggaaaatgactagattctgactgtaggaatgagcatgtatgtcatcttaatagcctggtgaggttaaatcagctcaattaaacacgtcaactaaaaccaggctaccaagtcttccgtcttcctgccatccctaagtcccagcctgcctgaaccagttcccaccttctcctggtggtgtggagggtggaccgcagcctctcccaggctgacaccagcatccctgtgggtcctgcctg

SEQ ID NO: 19143 - DNA, 1451 bp, Mus musculus
gtgttgagtgggagtctcactctatcccaggtgggatttgaactcacctcaattctcctgcctttgtctcccacaagtgctggaatcatggatatgagccaagcatatctggtttgtttatgttattatgttttaaactgtacttgttagaaaaaccttcttcctttaaatttcctctgaggtcttctagctaacagaatcctgggttctcatcagatgtggaggaggtaaagaattgtttgaattgggactgagaagttagctcagtcaagggcctgttgcataagtatgacctgagttcaccccccaacaacccatgtaagggctgggtgtggcacctagcacccctgtaaaagtcagatactgagggggtgggggtggggagcagacagactgacccctggcgctttctgaccagctggcataaccagtcagtgcaattcaggttcaatgagggacccctgtgtcaagggctagtgtgaacagtgactgaggaggaccccagtgtccctctggcctccacacacacatccaaagaatgggtagatgtgtgggcacaacttttgctgaggtgggaagaagtaaactttctctcagaggacagcaagtgacatttgtgactctgaaagaccagcagtcacagtctgctgtcacattgtgagtcagagcttgctcagacatcgatcttgatggaatgtgatctgtgaagtctaccttttaagactctcctcctacttcttttgaacctgcaggatacctaggtctaatccatgggcccctggtcactcatttcctacctttccattgctaccagaaagttagctgtccactctctcagtttgttcttaactgttgtgccctggctccagataaatgtttatatggagaagtgttcagagagagagtgtgccccagcagcattgagtgtgcggatgaggctgaggagggagtgcgaggactttgcagatctcactccaggctcatccggatgagtcacgacttaaagactcaaccctgtttgttttcttcacaataaagatgtggcagtcagaacggtactcagtctgagaggtgatgtgagtgggcagccttccgtgcatcttcagagactcatgggcattgtgagtcagaggaggcgtccacatcctccctgcagggttggtcatcccttaccagatctgccacccccgctgtccttactgacgggcctccggattactgtactgaggtgtgtgtgtgtgtccttgtgccgtgtgcctgttgggccgtcagaaggacctttttcttaggtgaccttgcctgagtctaccaaatccatcaacggttgataaccctgcagccccaggcccttcacatcattcaaggagcaaggcagtgttctgggtacaggcagcaggacatctgctcagcactctgtacgatgccctatgttggaggttccaggaacaggg

SEQ ID NO: 19144 - DNA, 1130 bp, Mus musculus
tacccagaaggcagtgactgcatctccagcttgtcctgtgtcactgatccactgccccgttcaagttcctcacccttgctggaccttaatttccatttctgtagaacaagtgagagatgtgaacaaaacagaacccgtcttctggttctgatattttatgatttatctaaaagtaaagccagatcttatagccatatctttagcctgcattggtagaaaatactctttttgaaatcatttgagcagataatgattttggcatacttgttgtttttcagaaactctgtgaaggcatatttaaggtccttgtcaaggaggtcccaacgacatgccaagtgtcctgcctggaagtactccgcattctctccagagacaaaaagatcttagttcctgtaacaactaaggaaaatatgcaaatactgctgagactagccaagctccacgagtcagacgattctttggagaaggtgtcagagttcccagttattgtggaatcattgaagtgtctgtgtaacatcgtgttcaacagtcagatggcacagcagcttagcctggaactgaatctcgctgcaaagctctgtaacctcctaaggaagtgcaaggaccgaaaatttatcaatgacataaagtgctttgacttgcgcttgctcttcgtcttgtcacttttgcacactgacatcaggtcacaattgcgctatgagctccagggactcccgctgctaacccagatcttggaaagtgcctttagcatcaagtggaccgatgagtatgagtcggccatagaccataatggacctcctctctcacctcaggagacagactgtgccattgaggccctcaaagctctgttcaatgtgacggtagacagttggaaggtgcataaagaggtaaggctgggaaaactacacacatccttctggaattacgcatctgggttgttcttacagctgcacacaaaagaggagtgctaagtttggaaatggaaactgttcccagttccctcattagtctgttctctaaattgaaaaatatttctttcttagcttgccttcgttcaagggctggagagatagcttagtagttctgagcactggctccttttccagagccagccctggattctgttccca

SEQ ID NO: 19145 - DNA, 1333 bp, Mus musculus
ttccccagcgctgagactctaggtacatagcactacgactggcttcagaggaaacagcagcatcctcactcgggaaacaatgtacacaacatggaactaacgttctagccatttagcatgtgagacccagtggccatcagtccattcactgctgcacagcctcttttacacaggtttcactggatagcctagactgatcttcaaacccacaggctggccacagccttgagggtgctgggatgcaggtgtgtctgactgtgtccagtttatctccagactgttcgtctttcccaatgcaactgttcacttccctgcaccctctcctagcttcttcctgtctgtatgtgaaatcatatatagtagtcgtcctttttactggatagcacctgatagctatggctagatcttcatattgcacttgttatttagttatgccttctgctttaactggcaccacgctgaaactttggctctgtccaaaatccttccccctttgtctagtaccagtgacagaaccatggcttcttgcacggcaagctagtgctccaccaccaagtcacaggtctgtctctctggtacggtttaaatcagcaccatctaactgaccttgttgattctgccttgggacttttcattacattctcagctcaacagttactgggatccgtgtaaaatctgagtcagacaatattagttgcttaaaactgtctagtgactgaaagccaaggttctcactgtggtttgtatgcactgtgtctctccgcccgtaccaccggcctcttcactacttgtcaaacacgtgacttcatgttgagtgtctctgtgtggagcacacctcctccagagagctgctgtgttaccctcccatccctgaccccacccccaggtcttgctcaggtctgttctctgtgcagcctgtgtagtgccgtctaaagcctgggcttctacatttccctcctaagcatccctgttccttaggtctggggttttgtccctttgtttgcaagaaggtaagtttcatgaggaaatgggatttaaaaatcaaaagtctgtctttctataaatgtttgttgactacattaatatatttttaattattttttgtttgagtctttcgcctgcatgtatgtctatgccccatgtgcatgtcagatgccgggggggtgggggtgggggtcgcagaagagcctgtcagatctcctggaactagagttacagacagttgagagcccctatgtgggaactgggaatcaaagccagtttctctgcaaaagcagctagtgttcttaactgctgacccatctctccaacccctgggttaatacatttttgg

SEQ ID NO: 19146 - DNA, 1106 bp, Mus musculus
aggagcaggctcacccagctgtgcagctcagttctagaagctacggtatcgagtcacggcagcaggactaagtgcccagacagtcttgcaaggtgagtagcaagggctcaaaccgaagctcataggccaaaggcacacactgtgtctacacacaggagacagtgggcatgacaggacaagtatcccatgcctgagattggacagtgaggagccatgtttctggcaaggactagacgtgacataaagtctgctgtgggacggactgaactggagacaggaaagacaacatggaaagccattgcctcagcatctgaagggtaagcatggcctgagatagagcacgacgggaggtgcagacaagggtgaagtcaaggaacacttgaagctgcagtcagcacaatctagtctgaaggcaagaaatctcagaaagtggaggaaagatctcaaactcggtcccatcttacagactaataagtgggctggggacaggagatggggactaaattatttccaaggagagagaacagtgtttaagaacattgaatgttctagaggatcctagttcaagtgccagtacccacagggtagctcacaagcacctgctacttcaattccatgggatccaacaatctcttctggcctccacaggtacacacatggtacagacagacatgcaggcaaaatatatgtatacaataaaaggattatttccaggatctgtcaaaatcctcaggtcactggtcacttacaaatgatcaagatacttataaagagtggagacagcacatcgtggtcgggagcatatggcacaggaaacacattcagcttctggctagcagaaaaagggggcatggggaggggaagagatagggtcccataaccctttcaggggacagtccccacctccaaacatctccattacttctcagtagtgccaggctgaggaatgaccctttcatatatggtccttcaggggactttccggcaaagatgacagtctccagcacttctgcattgcacaaacagtgccgtgtgtgtgcaagtactgcatagacatgtgctgatgggagggataggacacaagtctcctgagccttactgtattc

SEQ ID NO: 19147 - DNA, 2834 bp, Mus musculus
taattatcagtgaactctttcaaaggttgtaaaattagtttccctcttaaaaatctcaggagtattgaggtaaaggagtttcctggtgtcagtgggtaagagtgcttatcagctgttgtgagtagttaacacgaaatgtgctttagtagttggattcatgctcccatccttaatacaccccacagtatctatggaacatttcttagctcatcaaaagctatgtgggaagtttcatattgagaaggaatacatttttttttttgttttgttttgttttttcgagacagggtttctctgtgtagccctggctgtcctggaactcactttgtagatcaggctggcctcgaactcagaaattcacctgcctctgcctcccgagtgctgggattaaaggtgtgcaccaccacacccggcaaatattaatttttaagttcttataattatcctagtaacctaagataatccttcatgcttattctttctttaggatgtcttaaattattagtagtaattcctttaaaaatacaataaaatcaaccattaatatatgaggattgactcttcaaatgaatgagatgggctctatacattggctttgaatttaaaaaaaatagataaatgctttcaatgacgtatttagggttttttttttttttttttttttgttgttgttgttttctttgagatggggtcttctaaagcccaggctggtcttgaactggatatgtagctgaggatattcttgcgcttctaattctgcactcacctcccaagtgctgggcttaaggcatgagataccatgcttgctttatgtgatgttggggatggaacccagggctgcatgcatagtaggcaagtactgtaccaactgagttgcattcgtagtgaaattcgttcatagctttaaaacatgttctcttatagccctttaaagcagctgtagacataccatttctcaagccagtttcaggcagggagttgaaggtttttgatatggatggtaagtgtgttgtgtcttaatgtgttatcataacatattcattttcacagaatgtaactcagaagttcatttctttttgtcttaatgcttagtttcatggaaatttataagtgacatatatttggcatttatcttacaatctaagcctgaaaaaaattcttaattttctttatacctaaaactagaattctgtcttcattctgccccttctaactccctggagagaggaagggagtggtgccttggtgtaagtcaaaatgtagtgttcctgagaccagaagaagatcacctgaatatgtaggttcaaatgtttggaactcttaagaggattctattagtaatgtgggccaacagttgaataaaaatataaatttaaaaagcactcataaataacagcaggactgtcaagcaaatctacagatgttcttgaaactttgtttatacaaaatttaaaatcactgaattaaatttagaaggaattaaatggtcatttatttcatgcaatatcatttaagagacatttgttgatacatttggtgaaatgtgttaacaaatggtatttttaaagttccaaaattaatagacccattctcagtgatctaaataatggtattggagaaattgattcctgctatttagaagaatttattgattcatatctggtttgtatttctaacttagaggttctactatgctttgtacttgaattagtctaagtgtaggcttagtatactatatgcttgcatatttattttcaactttgcttgtctttaaaatcacttgaggaaaaatggctaattaatttctgctacagaaaagccaactggtaaattttctcaattgtcttaaatgctaaagtataatgtggttcagaggggcttttacgatagcagagaactgtacaaatatacaggtagctgtagttctaactgaaatgaacttgccatttgatgatgtgtacagctatatacctgagtcccttctagtttatgtagactagcaatttgacctgttaaacaggactagtttactttgttgtatacacctggaggtatctgttattcgactccatttttgagttttggcacagtgaagataaatttgtgtgacccacttgaatgactgatctaacaatgttgatatgaatattgtatttagtgaaatgtcagatgaaaatacctgattgaataatgcggggatttttgtattaaagggatgggaaagaacacctgaatctgataataaaggactatgatctacaaagatggaatgtttcataaagatctacagaaataaagggattttgtaaacaggatgatcttaaaagttaagattacacagttcagggtgtgctgcagtaaatttttttggtgatactttacaaacatgatatggatgtagacacaacagtaaagtgcaaacacaaaaactaaaagtctgaaaattcaaatgtctagatttcgtcatctcagtttgttcagtctctttaacaacctttgtgggttattcttgggcatactaaagtgtgaaagctgaagagctagacctagggaacacttttctattgtatgtagttaaggatcccgtggccccttcacgctggcgtttcttctgtgagttctaggagttaaacctaacttaggttctaatgtcccacgtgctgtgtcctgagcccttcaacccactctacaatgccttctcacttccctactccaacagtcactctggataagtcaaccagtgattgccctattccaaattcattagtcacttccccacatcttagttgcctctctgtgacatctcatctacagcaatgactctaaatgctaca

SEQ ID NO: 19148 - DNA, 1223 bp, Mus musculus
gttaaaggatttgttttctatcacttgtatctcttagtacctaattaacaggtttattaatacattatttagttatattttctttggatcagagaatgtgaaatgtaaactataatgctactgcatgtatggtaccttatagcagcatgatccctttgtccctatgcagcacatccaagtttctgtatttctccttgtgatttagttggtgatatttttgctttcttaaaagtgggatactacccttttttattctatgaatatcttacagctctttaaaactcaatgatttgagtaattttttactcttccactagtagcacttccaaggatattgtcttagttatttttctattgtcatgaccaaacaccatgaccaaggaaacttataaacaagaacatttaattagggtcatggtttcagagtttgagagtctgtggccatcttggtgggagcacagcagcagggaggctggcatgaatgtggaccaggagtcaggcaggagcttacttctgagccacaagtatgaagcagagggagggagagagattgcacacccaggaaatgacataggcttttgaaaccctaagcccactgccagagactgtctccaaagaggctacacttcctaatctttcccaaacaatccaactacagaacaggtgtgtgtgtgtgtgtgtgtgtgtgtgtgtgtgtgtgtcctttctctccgtctcccttaccctgtccctgtccctgtctctatcacacacacacacacacacacacacacacacacacacacacacacacacgcgcgcgcgcgcgacacacacacacacacacacacacacacacacgcgcgcgtgcgcgcgcgtgcgctctcatgtgtgtgtgtacgcctgtggggcctcttctcattcaaacctccacaattatagaagtaaattctatccagaaagctgtatttcctgtgtattctttcccagaaatttcttattagaatacaatgtatattttagaatgtttaattttcagttctatctagattttcttgtcttgagttttgctctacagtgacctgagagatgctctttgggtaaatgtatatgtacattgcttgtttactgtttcttcccaaggtctttgaagagttactgcttgatgcagattggagcataaatgctggaagttggatgtggctgtcctgcagttccttttttcagcaattttttcactgcta

SEQ ID NO: 19149 - DNA, 1200 bp, Mus musculus
ctaggtcctatcgacactgtggccggctctcggaggcttctgcatccgtctggtcccagggaggagaggaccagacacttttattttggatgaaaggcgcgggtcctggcgggagcttccttcccggcctggctcgcggctcagtgcgccctcgctctggccccgactccagaagatgacttcaggttccgccgtgtatcttcccgtggtgacggctcggggagacaggcgaaagtagtgacacttgctggcaacgccaggtgggaaagtgagcctaggcgacgtggagccccgctgtccccgaggaccccggtgcccacagatccttgcctttccttcccctcggctccacggcggctgcagcatgaagtggcgcagcgatggccaggagaggtaagaagcctgtggtgcgaacgctggaagatctgacgctggactcgggttatggtggcgcggcggactctgtgcgctcctccaacttgtctctgtgctgttctgactctcacccggcgtccccgtatggcgggagctgctggccgcctttagctgactccatgcacagccggcacaacagctttgacaccgtcaacactgccctggtggaagactccgaggggctggactgcgccggtcagcactgctcgcggttgctgccggacctcgacgaggtcccctggaccctccaggaactggagttgctgctgctgcgctcgcgggatccccgggcaggcccagcggtccccggcagcctgcccaaggacgcgctggccaagctctcgatgctggtaagccgggctctagtgcgcatcgctaaagaggcgcagcgcctgagcctgcgcttcgccaagtgcaccaagtacgagatccagagtgccatggagatcgtactgtcctggggcctggcggctcactgcaccgctgccgcgctggccgcgctgtccctctataacatgagcagcgctggcggcgaccgcttgggccgtggcaagtcggcgcgctgcggcctcaccttctccgtgggccgcgtgtaccgctggatggtggacagccgcgtggcgctgcgcatccacgagcatgccgccatctacctgaccgcctgtatggagagtctcttccgggacatctactcgcgggtgttggcctccgggctacctcgtagctgtagcggtcctggccctggctccagctccggttctggcc

SEQ ID NO: 19150 - DNA, 1174 bp, Mus musculus
cacagggccttcaaaagccgggtttggattttatggtttactctgtgtctttcctgctctccgttcacagaggatgcctcccgatcaatattctgccacttagaacacagactcgttctcaattaaagcactctccagaggtgaatgtgtcacgcttgaccaacagtgatacttgatttaaatgcattggagagcctagtgccagatgatatttactagacatcaaaccaaaacaaggtggcttcacaaggtagggacttgatcttttgtcttacagtaatccaaggtagtccatgagttgaatggcattctaggttccttctgtgtttctttcctgccatccttagtacgtggtttccattttcgaggaagcttcatagtcctaagatgaccatttcagctccaaaaatcccatatgcatcttatgcaagatgaagaacaaggaagggaaacggagcactgcctgcagggggattccactctttgaatgtgactcgtcccctcccaaactcttgtctgattgcaggtgggcacactcatgcagctgggactggcatcagctgttccagaatcagtgagtagaagaggcactgagctcgccaaaggaaagcagagaaacctagggatacaacgagagcagttataacaagagatcatctcgtgatgtattcccccagatttgaactgaccctcagcaggtgttggagtgggccttggggtaggagtaggaagggacaaaacatgagctacgagctaagagggaacaggaaatagaaaaatgaagggtgagttagagaggagatggcccccgttcctggactctggtctccatcaggggttctgatcatttcagactgactctgtacctggagtgtcacaagacagtagctcatttgatcttcagagtaacctagccccattaggtacaacctgccagcggtcccacatactgatggggttaagtgccgtgtctgagacccctgcatccgtaagcagcaggaattcgcgtggggctgctgaggatggagcctgggctggctcccttttagctaccgacacccccggagaggtccaagtggtgattctgttatggactaaataagatgtttctgagctccttttccaacagagttaaggaaaggcagacattctggattagggcaaaggctaaact

SEQ ID NO: 19151 - DNA, 1152 bp, Mus musculus
ggctggagtgatttgagcaagcagacaataatggatagagtttatgggatgtagtggatctcagaaaggacttagaatctatacccacttactgattccctaagtctggtgcctaaaacacctcagactcacttaataagaaactgtggctgtgaagtccacagtccattttaagattgtgaaggcccctagaatgttagatgtattgctgtgagactctaggccaggtctgcttgctttcccctcccgtgttctgcagactatgagtagccactggtgtggtccaagatggaaggacctggaatgggccatcattgttgacctgacctcctgattccaagaaacccagtgtctggaaattgacattcagactaataaagaagccaaatgttgcctgtgctcacactaggtcagatgacagcagaggtagaaagtggactaagtaggtataggcttacacgatggagtcattggcgggcagtcagtgtgaagaggcctttggggcatgtgagccaggctgctcatttgaggttgggaagacttagatctgtaaatgggacaagaggctaattagatcctgtggatggccacaggtcttcctgtttctggatgcctgcttacatgcagactgcctgcaggctcagggcctctgatttttagagaacccactgtcctccagaagtcatgataactatccagatgtgtgactaggttctctaccagtctatgggatggcactttgagagcagagactacctcttatcactggcttctcatgacccgataaatctgaaaatcctggatacctccatggttcatattaattgtcagcttgacaaacatagaatcaccaggcctctgagcatgtgtttgagggattatcctgattaggttgtgtgaaatggaaaagcctgcccactgtgggtggcgacattctctagaacctggactgagtgatggtactggtgatggacaagcttcaatgtagtagaaccctagtggcaggggcggcagcgtctttatgatgtcccattaaaataaaaggttggggatggtgggcaccacagcctgctaccagattgacctgtatgtcacttaacgacttttgtctctgcaaacctcctaagtcactctatgctacctgcgtgtcaa

SEQ ID NO: 19152 - DNA, 1176 bp, Mus musculus
ttcgataaacaatgaataaagctttggtataaagatgccccacgcacctttgatctagcatttatatttgcctaatctggcaatgcttgacaagttcaaagcccacgcgtactggaccgagaagctgtaaggcacagctccattcagtgtttaggatgtcaatgtcatgtttgaagccaggccctggggtccctccatcctctcccaccacacaggcagctgtgtagctgaagggtctctgtggtcttgcccctcctctctcagcaactggcacagattgcccagaggttaatgccctagaaacactgggctctgtggatagcctcaaataccctgccatgtctcacctggacccttgctcctgctggctctgcacagagtgctcttgtcttctgccattcctctccccatacctacaaccacagctcaagggccaccttccgaggaagcctaggctcccctaggctgtgtgtggtgcaaaggggcttatagtttcataacattttttatttagagagagaaccaccgaaccctaaatacttgtatgagatacatgagaatatggcctatgcttgtcttctccggactgtcttcatgcttgtcttctaccagactgtgggcttccagcgcagggctgctgacatgaccctaacaggcactcaatcaacacattgttgcttgattattgttgagtgattattgaccagttcatggggactgggagaaggtactaacattctttcaacatgaagcctgtatcaccctctctcattggtttcctccctcgtttcctggcctagcctcttgctccctgaagtggcttgctgaagcaccttgccatctctcatttcatctagcaagttctccagcttgttctattttgaaaggagagagtccatcctgagctctgtccactctcctgtcttaatgccccctgtctcctctgtcactggaatggacccaggcaaatgcctgctcagaagtccacagccaagtatgagggctcagtcaagtgaacaggaaagcagtaggttctgcactcgggagctagagtggcacagaagatccgaagacgggttctccacacatgcttctctggttcaaatccaagctatcacttatagatggggtagcctcagaaagattcctcattcctgttttttggacagtcccccc

SEQ ID NO: 19153 - DNA, 1807 bp, Mus musculus
ctgctccaaggcagattagagaacagtagaacaagcccgagagaagtacaaaaagaggactaaggaaagctaaactcagtgcattaactcatcaggcttccaggttggctactttctcagtattaaatatgtttcatctcacagcagacccttgttttatactgtagtctgtctgtgctcttacctccttgtctcacggtttctttcagtaaatgaagcatttggaagacgggagcgactcgttataggcggcacgaaaggtttatctgttagcggcccctgtgggagcaggagtccacagcagacaccaatggagtcctgacaaagatcagtttcctgctgtgcttaccttaactccgtttcaaaagactggcctaaaaatgtccacgtatatctacaaccatagatggaaattcaggtcctgttgccatcctttctgcagccttggtggcagtccacagcctttgggctgccttctactgggtactgtacagagttcttgcctttcttgaaaatataaagttttttaaaaatgattccttaacaggccatctgacctttggaactctaggcataaaatacatggtaactggagagtttttgatacgggtcttgctgtgttagcaaagcactggtgtggtggctcgtgcttgtcccagtcctggggaggagagagagacaggcagattcctaggaccaggctgcccagcgaatctcacctatctccatcttcccaggctaggattacctatatgcatggtaggttctagaattgaattcaggccctcgtgttggcaaatcaaacatttcactaactgagcagtgtccctaacccattgataaatgtgatccctaaaggtattttcaccttttgaatgttaatcatattttgacaacttttggttttaaacttccatgttttcagggatattttgtttaaaatgtcaattattttttaaatggggattttgttcatacaattttctatgatcaaaatattttactaaatagacaacaaactgtcaaagtaatacataaccttgtaagttttggtcccagtacattctcccatctatttccttcaaataaacttgaacttgtcaagcccataaagccttctggacttaagaggtcctaaattagcaatctcacaccacctcacagaaaggctgtccactccctcctcccagactccaccattactaagctgatttcccaagtttcaggatgttggtactttttgaagtaatagaataaactgttctatttgtcattgaaattcacctcactttgacttcactcttattttcagaataccagggcatttctcaagtctgatcagaacttatttagtccttgtaagcttccaaattaggaacagaaccacctgagtggtttaatttgtttcccacacaatgactgttgtgtggcagataactgggaaaacacagaatgcagagctttgtctgactgacatttatctaattctgtatcttaaaaactaccctcactcctgtcgtgctttctataagctgccactgtgaagataaaattaacacgtaatgtgctttcccttcttggtaaagactgaggatggctttgaccttgaaattaaagcacctgttctgccctgtatttcagaccgaggacctggttttccagaccaggtctattcatcctcggcgtccagttgtccttacagagctaggattacggtgggctttatgccttccctggtctcagacaggacctttgactcctgttcctctacttttaacacattgtacatacggtagcatgcagcaaa

SEQ ID NO: 19154 - DNA, 1845 bp, Mus musculus
agacctgcaaagagcccagctccagctcctctgcacaggaggaagaggatgatgagtcggaggaagaagatctcgcagactccatgaggacagaggactgcaggatgggcagtgctgtttactcaacagacgagtctctctccgcacataaataggaggagagagcaactgctttggacggaacacacattggtaaaacaaaaccaacccacggttagaagtggacggagtggggacagctaaagcacttacagaggaatgtccagtggattctttaagatggactggcagatgaggcatgcatctgtcctacttttcagtaatgggtggcaatgagagggccaacttttactatctgttctttatttacatgtaatttgggagatgtatttatgcttgagtcaaagtgcccttttgtccacacaaatcagatttctctcatattgctccattttcccccagccagcgtgacttgagccatcccactgcatcccacacattaagcactgatgtaaggtaaccgccgtgcaagtgttaggaggcctgtaattagttaaaaaggaacacctgcctaccttctggctcctgctgcctcagtctcagcaggggttgagagggcaggtaaagcagcaggcgtggatcagaggacagtgactgatagaggaaaaggtccagaagcccacctctgatagaagccaaggttagccacgtggttatgtgtatgcacatctttgtgatctagccttgtctctttaggaaagccttcagtctttcagagaggacctagaacattaacagtgttgagataatacatgctgggtagtctctagtcagcaagtgcacatgggctcgcctgacgagatcacgagatcggttcttctgcccacaggaggaaggatcggaatgatggtttgttttctttctttcttttttgaaatgtaggtttactttatgaaaaccattaaaatgttgctagctgaaagcaacaagtagttccaaatgcattgtgggtttcagttaggccttcccagttgtcttccttgttgctgaaggtcctcaccagctgagtgtagaggataccaaaggaattggaagatgagaaggcttattagtcactccctgtgagcaggcacacccagcttttctccagaagcggacaccctgaacttgacaggattgatggaacacgtcttcctgctcaaaggcttgagtagaggactctgctggcaaggttttgctgctaatgtatttatagaatgaatgtatttcattcaaacctgtattcctctaggaagaattaaaatcatttttaatgaaaatatggaatttgtcatgatcttttgtggaagaaggacttgaaggttaaaagaaagcatttcttagttttggctttgagatcataccctgattgtttctgtgcagtgctcggactgcacctgggtttgtagcctctcccccccaccctcttaaggtggggctttactgtctccttggaaactagcagcttgaaggccagagctgggggtggctgctaatactacggtagcaccattagtgttccaagtggtttctccctttactcggggtgaattcttttagtgctctgcacagagatgctcctcaaaataattaagctaaataccccaaaccacaagacaaaaggaaaggcaaaaatccttgctataaggatatagcttctatcttttaacctcttgggtttaagtggctcattttaaattattattattttgttttgttgagacagggtttctctgtatagccctggctgtcctggaagagcagtcagtgctcctacccactgagccattttgccagtcccacttt

SEQ ID NO: 19155 - DNA, 1282 bp, Mus musculus
cttataaatatacaataatacatatatttttgagaaattagaaaatgcagatgaaaatgtaagaccaagtatttatctcatatccctttccagcactgagtttactcatgtttttaacctttgcttttttttttttttttttttcttcttttcaagacagggtttctctgtgtatccctggctgtcctggaactcaggctggcctcaaactcagagatccgcctgcctctgcctcccaagtgctgggattaaaggtgtaagccactacaccgggctaacttgctaatttaatgggcacctgagtatttatttcaaataaaacttaatagtttgaaagatttccttttggtggattttacagtgttcaattccttctctgtaggcaccagagtcctataagaatgtgacagacgtcgtgaacacctgccatgatgctgggatcagcaagaaggccattaaactgagaccaattgctgttattaaagggtagatccaagactatcagagcgtctgaggtgcccatggactgaaattcctaagacatgagactcaaggcctgacaagatccgaattgcagagctgttgctgtgcgtgccaccatggctggtggagaggctgctgtcacagggttggaaaatagccttccaggagatgtgtctctgatgggagcagggcaaatgagcctcttcttcctttgtcccacaggggtttgtgactgtcaattggggtgtgggaaggggcccagaaatgccctgtttggtcatacaagtctgtaatcaccagagtgggcttctttatcccaggccctgtttgtagcccagaaggtatcatggagaacatgctattaaataggtttttgaatgtttcctttcttctcttcctgtgtcagttttgtctgctcatctgtggagctcctctacaacaagcaaacctagattcccttctcacggagagcaccaagtacccaaagtgttttaatcaagacagtagacaaggcacagtggggtacgttgaggaggctatatggtatgccaaggaatagggcaaaggagaaaataactctccacagccttcctgtctttcttacccaagaaccaggcagagaacctgcagcgcggggccggctgtgactcactggtgaggctgcctggccagctttgaataatgctttacagtgacaccattaaaaaatggttttcagttttatttaacaattctaaaaacactaagtgaccacagctggtgatattaacagttgcttgatgtggatatcttgtcatct

SEQ ID NO: 19156 - DNA, 1149 bp, Mus musculus
ctcctgttccctgtgacagcagtggttcctatactctgcatcagtgacaccccatctctagtgagtgctgtcttagtgctacactaggcatgctttactcccctgagctatatggcctgggggttattgtaaggccgacaaaggttcaactgcagtgtttctttcccttaactctcggggttttgcagatgaggaaacagaagtccagagagggcaggtgccttgcatggatgaaaatgctaaccatccatccctccagtttgagtgttttctgtactacattctgtctgttcttgacccttatagtttccttctctttcttttcccagggagctagaaaatcccaagtagtgctttattatagccacaagagcactgagtcacaagagcactgagtcacaagagcactgagattagaggtttaggtttcttgtacagttctgcaacacaagaaatttcaggcataaaaagcatgtgcctttctaaaatttaatgttggttttgtgtaccctcagctcacaggacaaccagtgcttattggtggcaccatggggacctgtagttacgttctgactggcactgaacaaggcatgactgagacctttggaacaacctgtcatggagcggtaagaagaatgaaaacttgctaagaaatgctgtcagtttagctatttgctcttgctgcaagcctggtgatcctagttccagcccagcacgctcgcatctgtaatcccagcactcctgcaacaagacgggaagactagagagtcaccggaagctcacatagcaggtgtcctggagttcttcacagcagcagaaactagagaccctgcctccaccaggtggaaggagagagtccacttctgacctccacacacacgccatggcttttgtacatacatgtgctcatgtccatacacactaacataaaaggggaaagaataagcacatagtagaatgtgataatggtgagaatttcattatcaaggaaaaggcatagaattccaagggcttaaacactactggagtcaagtggactttagttcgaaatgcataaactggtttattcctgtccttgctcctttctcattctagggccgtgctttgtccagagcaaaatcacgtcgtaacttagatttccaagatgtc

SEQ ID NO: 19157 - DNA, 1100 bp, Mus musculus
tagcttttatttggatatttaattgttctcaggaacttcagaatcagaggcacaaatataatttaaaaaaatataattaaaaagtgtatcacagacactggtgatatagtagagtgtttacttagtgtgcacaaaaactaagcacagtggtgtacgtggtggagagaggcagaaatttctgaagttaggatcattcttgactacagtgagtttaaggccagcctgaactacatgagaacctgttctggcttatctgtttttcagtacaacaaaccatgaaaataagtggaactataatcattgtaatgacactgtcacaattttaaatagtaaccatgtgactgctttcctcaaaaaaaaaaaaaaaaaaaaggaaagaaaagaaaactagagggcttaaactctagaacaaaaccaggtacacaggaaggtagtaattgtcgcatagtcctgtgcgctttgagatgtgtttcttcctgagttttgctgtcctttactaagaaatgacttggatttccttactcaccccagagacttggaggaggcattggagatgggggtggactggtccctgagggaaggctatgcctgggctgaagacaaggagcactgtgaggagtatggaaggatgctgcaagccgaccccaataaggtctcacccagggcaaagaaaaggggccttcctcaggtaactcactccgcagggcagtgtgccactttagcttttgtagagggaggaagtctgaaccttctgtttaacaaaacaaacaaaagttatccttggagagtttttttatagtacatcaaaaagaacataaaggtgtttgcttgtgaatcatttttctgaaaggttatgcagagctttcaaatattcatgaagaactctgagttacaagtgaatcggagaaaagtgggatatgattatgaggtttataaaccatgtcataatttagatttttaaaaatcgttagaaaagaatggaggtagtgagatgctcagtgggtgggaacacaagcctcactcagagctgagctcagtctccggaacactcgtaacggtggaaagagaactgactccaaaaatgtgagccctggcctctc

SEQ ID NO: 19158 - DNA, 1163 bp, Mus musculus
ccattctattatgtgtctgccatgtttgcatagagtgtgagaaagagaaatgcagatgactttatgcagtgacgtagcttagagcttgggatgatctccaccgctcaccatatcttttgtctctcccctcccgccacccccccaccctggtttttttctacagttgtatagaaagaagcacatacaaagaaaagaggctcagaggatgcggcatgcaatgttcctaccatcagcccaccctatcccattttgtcccattcccgtctaccccagggcctaccttcccacctcgctgcttcctccaggaatcattggtggtgaatatgatgagaggccgatactgcctagtgttggggacccagtcacctcacttatcccaaggcccggggagcttcctggtcagttccgtccactcagaccacgttttgaccctgttgacccacttccaggacctcactccctcttgccaggaagagctatccccaacaacagatttcccttcagacccggcaggggtaggtcagctgacagccggctgccattcctgtgaccaatttggagactttatggaaactggatgctgtttccttggatgctgatctctgctgtcggtttctggttctgtgggcaccaaggacaaggttgctcaaagaggggtcagcttgggaataggtgactgctggtctctcccctctggttcacctctgggatggagattgtggtattgataatgttttgtgttatattagtaaaagtaaaaattgtatggcagacttgactttttttaaggatgtatttagtaggaaaacattaatcacaccgtgaatttgtgtatttgaaaattatcaggatgcttctcagtgtgaagggtggttgattataggaagtgtgtttttatcgttggtgctcagtcgggtgaaagctcaacttacagcatgatacaagtggaactagtgcgctcgaactcagtgagcccaaccctttccttagcagctttctgggttctgtgaggaacttcaagggttccgaagaccactgggttggtacagacacattaccacctaagcttcccccttgtgttttggtatcagagacagtcttaacagcagcgtcctttatgtgctgtcaggtgaggcacttgttcaggacagccccctcttgct

SEQ ID NO: 19159 - DNA, 1228 bp, Mus musculus
actgtaatgggagcaggacagcctagaagcccatggcaagcgcttgagaatggtgcagccccggcgcattgacttgtagtagcctcacatctttctcggcccctaagttctccagtagtcacttttagtaataggatctgagtctccttcccttagcactgtaagtggaaaatgcccatttgtcatggctggtaataattcagtcttgggaagagccctttccaacttgtggctccctgtgtaaaaatcctgaattctgtagctcttttttcctagttcctctcagttgctgaggccatacatatctctgtaattcttacctggcagagtcggatagtccttctccttcttctgttcagagttgttccaaggtctgttttcttcctatctgcctatttgagccttggagaagagctagacaggtcctctgctgtgctctagtgctggtggtgttttgtaaactcttgcatggataagggtattgcagtatgctaggcaagtctctatctctctttatgttaccagggttgaggttctaagtgctcactgccctgcccggcttttcagcatggctcctgagaatcaaatgcaggtccttgtgcttgtactgcaaacaccgaccgatctatcgagaccctaaagatttgatttgatatgacttctttttttctctattggaaatcccatgtgagttgttaactcttatttttctgatattccaaagtaaaatgaagtgttgggtatgaaaagtgtttaacttctcaagacttgatgaccacctctgggtgtttttgctttcttctctagatctaccagttagatctgcatatgaagcctgggtgtgcatgtttatcaatctgggctcatgctttgtgggaacacaaaagaggttctgtgtcttttatgctcctaaatagaccagtttggcttgcttgccacccagccttcccatttgtcttcaatcaagcccaaagtgcctcctcctattaaagtctaaacattaaacagtttaatcagctactgtggtttaggacagcatctgccaccaggttaattctatcagctgacttggctctgggataagaagcctagagatacatgtgcaagctctcttgaagggaatggactggtcctggtgatagttatgttaccccttgtccatacttgcaaggctggcttaaccagtgcctgcgactaacctgcagtcgttcaccacttctgaagacac

SEQ ID NO: 19160 - DNA, 1154 bp, Mus musculus
agaagggctgtctacctgcctgcctgcctgcctgcctgcctcccaactctctgctttggactgtttgggagtttttgaatcatggttgtctaggcttgttttggggcctatgttagcacagttcgccatggcagagagggtagagagggtttggtgaattaaaacggttcatgccgtggcagctgagaagtgagagaaaggagaaattgatagagtacataacaagcccctcccctggaaagcaatgctatgaatccatcgatgagatctgagccctcctgatccaatcaccgccgccacccccaagcctctgcttctaaattgctacaatggggaccaaaccttcatcgctggagtaggggaagatatttggtacctaaaccatagtaagtgcagactccttagaacacacacaggataaagataaaaaaacttttacctttttttccccttactatattccagggcctggggtgggccctgatgaacagatagggggattcctctctagaaacctattccctctttctccactcccttctctgtatcacaatctggctgtaacttccccctcttctcctcctcctctccctcctcctcctcctcttcctcctcctccccctcctccttctcctcttcttcttcatccttctctttctcttcctctcccatctcctcctcctcctccttttcctcctcctcctcctcttcctcttcatccttctctttctcttcctctcccatctcctcctccttttcctcttctttcccctcctctttctctgcgctgaaagtggtctccctgtggttcccaatggccttcatgctaattcagtgggcattcttctgaccagaactggtgtctctgtatcacttaagctttctgggaattccttctaccctagaatttttctctagtggcctagaggaaaattctgattcacgttcttctcccagctttcttcttcagtttcactggttatacattccgtctctttcaaggataaattctcctgtgccatccctgactctggccactccataagcacaccgctgtctctcgctaactccctcggcttcagctgccaccctcatctcaacagcctcctgagtcatatttcctacatacgcagtcacgttcctatctccaatta

SEQ ID NO: 19161 - DNA, 1199 bp, Mus musculus
ctaagagaagaagaaaagaaaaaaaaaagaaagaaacccacatgccattttttttttctgattcaaattctacagtagaatggagggcagaattactgggacacaatcaccactcagctagaatggagattcaaggaaatggaaggtactagaaacagactcctccagcctcctccccatagaatcctaagggtgggaagaagaagaagaaaaaaagcaaaagcaaaacaaaacagaaatcaaaagtacactcaagttcttgtcctgtatcaaatatccctaggtcatctgccacccactttccaagacctttctcctactcaaccaggaagtcatggtttctgcagtccagagccatggcaactgagattctaagctctctttgtctcatccaggcaacttttctgtctcccaaccaaggaattcctctgctcaggctcctgttgcccaggatagctctcttctatagccaggatgtggagcttaaggagactccaatgtttactttctccagtcctagctctgccatataaacactgtctcatgttgtgcttcttaaacgacaaagaacatagtgacttttggggatagatctgtctgggagataatgtgagtccaggaggcattactcttccctgcctcacatcaaggtgccattcaggtagttggctcccagctacttaacgataaaaatatcactttcgtatttgtatcagagaaacttaaaaaaaaaataaagtctgatggtagaaatccaatgaaatgggagaaggcaggagagagaggtctcagtagatctaagtcggctgtttgggttgaggaggagagaacccgaggaaatgaccatgctctggggacaggggtaccttagattctctgtctatttttcctctagcaagccagctgtgctgaagcccagtagagatgaagagacaccagccagagaaaaccccctctagaaggaatgtatttgttgctaaattttgtagcactgtttacagttttcctccatgttatttatgaattttatattccgtgaatgtatattgtcttgtaatgttgcatagtgttcactttttatagctgtcctttattctaaacagtaaagtggttttatttctatcacatacctgctgtctcttgccttcttgtgtcctggcttgggaggttataattgatatcagagaggatcttgcaag

SEQ ID NO: 19162 - DNA, 1173 bp, Mus musculus
tgctaatgagcatgggtgtgtatagaacgtacaggaaatttaattggaattaatttaaaaataagtgaatttttagggacccatactggtaaaggcatattggagattatatatttacacggcatccacaactatgtggctcattggtatagttaaattattaaggggatgaacaagacattaaaccagcataacttcattcacccagcagaacttgattactttgactcatcattaagtagtcccttcttcattttttcacctaaccatggctatgtccacatcaaaggaggcttttttttccttctgtaattaaagctagaatacagtaggcatgtagaccctaaaattggtgtcttaacctaatgctcattttgtccgtaaacagttactatgccagtcaaaagaaaacgttcgaaatcaatcctagacacccactgatcagagacatgttgcggcggattaaggtgagcagtgaggggctgctctcttgtggccttaaaaggaatgctttgtaagccttaccaccgatgctaaccaagcgtaccttctatcaggaagatgaagatgacaagacagtcatggatcttgctgtagttttgtttgaaacggcaacacttcggtcaggatatcttctaccagacaccaaggcgtatggagatagaatagaaagaatgcttcgcctcagtttaaacattgaccctgaagcacaggtttgtgtgcccttaactctagcatggctgaccccccagggtagcaccacctgcgaaattaacaagaaatctcctgtgtcttctttctttcccatccgctacccctgacacagggtctctgtgtagccctggctatcctggaactcacttttagaccaggctggccttgaactcgaggatctgcctgcctctgcctacagagtgctgggatgaactcgagcgccaccgccactcagcttggcttcttccttttgcctctcttgctagtttccctgttaaggcagatcagattgactgcagtacttgctaaatcacccattttgatcttaaacacttagatcaaaatagaggtagatggaggccatttacaggttgtggatgtcacctttaggtggaggaagaaccagaagaagagcctgaagacacctcagaagacgcagaagactcagagcaggatgag

SEQ ID NO: 19163 - DNA, 1109 bp, Mus musculus
attctgagattattgggtctcagagctgatacattcccccaacatagtaaggaataccgttttgaacagagctgaagccagggaacacacctaccagttgtctggtccacagtcacccacatactaggcctttcaataagccccctttttgccagtattgtagtgattagaagactaggtggggttttgtttttaaacatttgaaaatattagtcattctgtcaacatatctgagttctagcattggaatatattagaaacagttgtcgttaattctaacacagtctgatgtgggagtgccctggtgcttcctgtcccttgctgagtggtgtggcagttgtgctgtctcagttgctgctatcctggtctcagaagcaaaggtttgagataaaccttcctaaccagattccattttctttaggtgattaggaagaagcttgtccgaaaaactctggacatgatcaagaagattgctgatgagaagtataacgacactttctggaaggagttcggcacgaatatcaagcttggtgtgattgaagaccactcaaatcgaacacggcttgctaaacttcttaggttccagtcttctcaccattcaactgacattactagtttagaccagtatgtggaaagaatgaaggaaaaacaggacaaaatctacttcatggctgggtcaagcagaaaggaggtaagatgaagtgcagctgctagggtccctgggagctggaggcatacagccaatgtgggagaggaaataagttaattgtgtagctgggatagttaggcagacaccagaggacactacctttagtctttgtctcacacagctaatgtgccaaggcagaacttgaaaacacatacttcttttaatcttgtaggcggaatcttctccatttgttgagagacttctgaagaagggctatgaagtcatttatctcacagagcctgtggatgaatactgcattcaggctcttcccgagtttgatgggaagaggtttcagaatgttgccaaagaaggggtgaagtttgatgagagtgagaaaactaaagaaagtcgggaagcaacagagaaggagtttgaacctctgctcaactggatgaaagat

SEQ ID NO: 19164 - DNA, 2445 bp, Mus musculus
ttgccatggtgcaaagggtcgcacaccaattaaaggctcagcctgaaagtcacactcaacttccacttgcaccttcactgggcagaaataatcatgtggcctgtaaatggatgcacagtcctaccaggttcttgaagacagctaggactatttagtgaagaacattaataatcacagatcccaaaatcccttttaatttctgtgaaataagaggtttcctaaggtttatcttcaaaagtatgttatttgggttagtgtctgttctttgacatttataccaggttttgttttgtttttttttttttttttttttttttacttatgctggatttatataaaaatacaaaaaacatgctttttaggtatggttttgaaaaatgccataacatagactgtagggtagtgcatcactatctaaagttgatgtggtccaagctggtttctatatttctttatatggaacctggcttttggcatcatgtgaatgtgaagaagatctaactgtctggttcttgtcttgcttttagtgtgacaaagagaaaaacctgctgcatgtcacagacacgggtgtaggaatgactagagaggagttggttaaaaatctcggcaccatagccaaatctggaacaagcgagtttttaaacaaaatgacagaagctcaagaagatggtcagtcaacctctgaactgattggccagtttggtgtcggtttttattctgccttccttgtagcagataaggtcattgtcacatcgaaacacaacaatgatacccagcacatctgggaatcagactccaatgaattctctgtaattgctgacccaagaggaaacacactaggtcgtggaacaacaattacgtgagtattactgattctaacaaaaattaatactgtgaggatcaagggagaagctgatgggagaccacaaaagaggtagctctgtgggtttttaggtctgagaaggaggctaaggtatgcagagaactgtggaataggcaggaaggcctggcatggtcacagtttaagggactctgcacagttggctgcagttgctgatagttctgcttttctgttattagctctgaaggtgatgcaggagtggctggaagaagacgtgacagaaatagtcaggatttgtaatgagtagtaacaggttggggtaggggtaggtcgaagagaacaagcaaatggaaaacccagcaggtgatctgggtaatagctctgctatcctcagagcctcacatttgactggcagatgtatcaggacagtttcatagcttaggtgcttgggtaagatttccttctttcaagtcctgcatcacgagtcacccatactcatttgaattctacatgtgggttggggttacagtggagaacaggatcggtataggccctgctctcacatggggctcaaggtctttagagtttgaaaaatcatttcagagtgatgtgcaggaaagactgctaagagatgcctgcattttcaggggaagttatcaaaagactgacttaccgttcctgcttcaacacctccccacccccttaaccccaccctatcatttagcttctgttgattgattttatcacttcagagactaagaataaatttttccttggcttttaaagtcagatttgcccacacacatcacattttcaacatgaaaaggttcagtgtgcaagtgtttgttggggagaggagaaagacaggtaataaataatgtgaaggcccttttccactgcctgggtcccatgctcccctccctgcagtgaagcatctttaagtacagagtcactctctgtgtccagtccacagttgaagaattgcttgtataacatgcactgtatttccataaaacctatgctccccccatgttctaagtcatatcttaggtacttatagtattatattatttaaggagcagtgtgacaagttatctacatgatgagcatagagacaaccataaataacctacaggcccgacagtaggccaggtcagcagtgctatgaagtttcatcccgtgcttggtactctctactggtgcaggacccacagtatgaaaggctagtctatcttttgctttgcttcccttctgttggtgtcttgggtcatctgctgtctttgtattgtgtaagtcaccagacggcctgttgccaaagtccaggtgatttagagagatttgattactactgctcctagtagcatgttttttattgtcttcatgattccccaaacttggctctcctgctgctctcaagctttctcagtgcctctcctatgtggggtgcctgtctttacaatttttctttacctatttcctcggtggtgataatctcatctgaaaagttctgactctcagtatctgttccccacactgttcctgctgtggcgtcatgtccatctctgtttctcatatattcttagcctagatcacaagtcagaaaa

SEQ ID NO: 19165 - DNA, 1099 bp, Mus musculus
gatgtagcccactcagcttgtgcttccaactttctaagacctgacaggacacttgattggttttgtctgtgtgaagttagtactatgaaaaatagaacttttatgcctttaacttttaagaaaagggcttttcaatcggtgaggtatattttcaattttggccttctaggaattagtgacggtactaaagtgttcactgtgcaagcgtacacaagtcatgacttgcttttcagtagagggaagccagatgtatttttctgggaattttaggaactatttccagccgagcattaagcacagcccattctgtgatgagagtgagctggtatgtgagtgctcttttaacaagaaggtctgcagaggccagtctgtgtcctgactagagactgagaaaaatgaagctgagtatttgcttatctaatttgatttccttagagaggaagaagctattcagttggatgggttaaacgcatcacagataagagaacttagagaaaaatctgaaaagttcgccttccaagctgaagtgaacaggatgatgaaacttatcatcaattctttgtataaaaataaagaggtaagtgttacatggttgggacagcagtttggatccttccattagaaattaggaattaaattcggaatgagaattcttattggtccatattggggcaggaagggagtggacattgtcctggtctttcgtgtcagctcagaataaggtcatgacctaccgacggatgaagtcacacaactgtacccctgagggagggtgggagaggtattcctgttcccaccacttcagatatcccttgtagttgtcacatagtgttatagagccacacctccttttttatgaagagagtaaagccatctcttgcaccataaaaggcttggttccttgaagagtgtcttcacgattccgaggagaactgagaggagtggataagaaccaacatcttaccatgcttaggggtcaatcgcaactcattaaatctggcttctttttagattttcctgagagaactgatttcaaatgcttctgatgctttagacaagataaggctcatctccctaactgatgaaaatgcactcgctg

SEQ ID NO: 19166 - DNA, 1330 bp, Mus musculus
cattcatgagattagtgcgttgcatgccggaaactgtagtttctcaccaccatccaaacgcattccggatattcaacccctcacaaatttctcttttgcgaaaagaaacgcccaaaagaaaggtgacggcgaacgtagcgctgaaaggactcgtaacgtgacccgcgtcgtagacgagaaaagggtaaaggacgcattgtcttggctaccgtttcccctagtcacggactaaacgttcgctagaagccggaagtggttccccgggacctctaggaatggacagacgtgctatgcgcctacgttcattggacggttttcctcagggaccaaggcttcccaggccaaagggtggcccggtgtgtgagggcccgcggagccatctgattggaggaaagccgctggacaagcccaatcgcaaggagccacgcttcgggcatcgggcaccgcacctggacagttccgattggcgggctgcggtccccccccatgcgtctccattgggtgcagagagtgcgtggtgaggcacgattggtgagttcgtgtttcccgtcccccgcccgcaagcagtggggtgaaaagcggcccgacctgcgcgcggcttagtgggcggaccgcgctgctggaggtgtgaggagcttagactcgggattgggggggtggaggcggctcctgagaccgaaaaggacttgcgactcgccggccacgcaccatgagggtcctgtgggtgttgggcctctgctgtgtcctgctgaccttcggtgagtgaccgggcggcagtgggcgccctccccttcctgtgtggccgcttctcgaacgttcttggggcgttgaacctgggttggggacgccgggtggcctacaggggtttcagggaccatctcgttccctcgaaggagacttgggtgatgatgctttccctgaggcctctgggaaaaggcgacttggagaccgggcatttaaataaataccctgcggatggtgctagagcgctccccgaagtctcgctgacggggcgcggtctctcggactctactcccgggggaagccttcctggaacccctccctaaggacttttgtgatcaggtccgacctttggccaccagagcctgaggacccccagcccctgccctctactcccggagcgcgtttctgttttctaacgcccgactcgcgagcgtgggccctcgggccagcgtcgtggcggtggcccaatatctgattccgatgtgcttcaagagctgtccttgacatgtcttcccctttgggccggatttcagttcccctcaacagaagttgcacaaaccctgtttgcattctgacctgtgataac

SEQ ID NO: 19167 - DNA, 1186 bp, Mus musculus
tgtgatggtaggatattttggaagggatttttgaaaggagaatgagaccagaaattgtcatcttacaggagataaacacacacacacacacacacacacacacacacacacacatatatacacgaaggacaagaaaaaaaggagagagctctcacctgattgatattttcagagctataccacggtttttgtctcaaactaaggagaaggttacaatcaatcaggttctggtccagtaagagcaggttagctgtcaccactgtgcctgatggtgccagcgaaatccaacaaacttcccacaactatcagacccattttccaagtgagaagacagtgtccccactgggaagagactaaggtaggctacacaatggctaaggtggggcttgaatccccagccagcctcgacagctggcacccaaaatcatccacgcatgtttgcacccaggcttcctgcacaaagctaatctggcccaggcattcctggctcctccctaggtggctatacgcacctgcacctgcgtggccagcatgagatatcaggctgattttatgcattctcttccacagctgtgtctgcaatgacggctatgaaggagatggaactctctgttctaagaaggacccttgcctgggatcgacctccagaggaggatgtagtcctaacgtgagtgttgtttctcagagccaggtgccccaggttttgtttcacttaccttttgtaagtaggcacaacaggagttactctgtggaagtgaaaagcagttcgttaaggtaaaaaaataaccttccacgctgataacctgccatgctgcttcagaatagtggaagacagtgacagctttgagcttgctttttgtacatgggtgtaagacagggggttgggggagggagcagagtcggggagagggaggggcggggggggacagctcgggcagggatgcagggatgctctttcagacagaggaggtgctgacagctgaagtcaggggtattcagccagccgtgaagggcttctgaggcacactttaggcttctgtttcctggccaaaccaacccaggtaggaccagagccatcaccctacacagccaccagctctgctgttgttttgtggcctaacacttttaaaagaaatcctgagggagagacatcccagaaagcagtgcctgattcacacgcacaaag

SEQ ID NO: 19168 - DNA, 1218 bp, Mus musculus
tataccaaaagtcccccatacccacccacccccactcccctacccgcccactccccctttttggccctggcgttcccctgtactggggcatatggattctgaagtcagaatgcctttgggagagtcatttttgctaagcattttggttatccattgctatgtgataagtggtccctctaaaagaattgcttaaagcacagcaggcattattttgatcattggcctgtaatgttaccagggtacaatgggggagagttcatctcttctctatacggtgtcagctaggatgggtcttctaagattggaacattcacttcctgctttctcacatggccggtgatttcaacagggacctccttgggtttcctcataggatggtggctcaaccccaagaatatatatatatatatatatatatatcccaagatagcaagacagaagcatgacacatagaaatgacctggcctctgaagtcacccagcattgtgtttggcagggcagtgttgttgtggtttgaggattgtctacttccagactcaagctaaagcttgatatcctttaactgtattaagaggtgagatcttaagaacctggatagctcagttggtagagcatcagacttttaatctgaggctccagggttcaagtccctgttcgagccctcagtttttgaatctgcatttataaacactattgttaggctgtcttgtttgccaagagcactataataagaagaggtgagatcttttacaagaggtgtttaaatcataaaagacttgcctctatgaatggttcaataacattaccataaatttcttttcaatttaattatccagcctcaactattacatcatagcaacacaaaccagggtacaatgggtgtactggattacactgcaagttcatgagcatagaatcaaaaactatggaaaacccatgcttccataatctttcttttggataactgctgctcatccttatgtgaaataaaatagccttttttcctagaccccccaggttttgtcctattatgtcattaggcatagtagtcaattgagtgtcactttcacctgtgtctagggagcaagagatctgctcttcttgcaaccagcatatgatatggtagctattgaacaccccatgtacatattttcatccaaatgggggggggagaataagaaatatacaacaattacatatggttggttgtaagtttgg

SEQ ID NO: 19169 - DNA, 1178 bp, Mus musculus
tacaggagtctgcgacatgagccgcagtgtttccggtggagttcatgagcactggataagaatgtagtgcacccacaaatgcgtactgcaccacaattgcaggggagctacagaatgcaacttgcgtgatgcaaatgcttcgagaaacacttcaaacttactatgtttgatttttaattaaatcttgtctgtcccatattcagaaagcttttactattgccaaatgttttgagacctgcctccccattccgttacacaactccatgttggttcattaccacagtttaagagactgtgctctgagagagctgggaacactgagatggagcaattgcacaaatgaccatcaaacagaagcagcctgtgctggaagcttcatttgaaagcagatgttctgagtcactgtgctgtcccatccactcttcaatcagtgccttccattaagaaagccacctgagaggaagaggcgggctggtgttggaggaaaagagcgccaggaaggtcctgggtttgactctgactacactgctgccagactgctctgttatgctggtggttggctccaagctgcatcggacgctgggcgcggaagccccggggcatggagaactccagtacctgaggcaggtggagcacattttgtgctgcggcttcaagaaggaggaccgcatgggcactggcaccctgtaggtgttcggcatgcaggcacgatccagcctgagagatgaatttcctctgctcacaaccaaagagtgttctggaagggtgttttggaggagttgttgtggtttatcaagggatccacaaatgctaaagaattgtcctccaagggagtgagaatctgggatgctaatagatcccgagactttctggacagcttgggattttctgcccgacaggaaggggacctgggcccagtttatggtttccaatggaggcattttggagcagagtacaaagacatggattcagattactcaggacaaggagtagaccagctgcaaaaagtgattgacaccatcaaaaccaaccctgatgacagaagaatcatgtgtgcctggaacccaaaagatcttcccctgatggcactgcctgcctccttgccatgccctctgtcagttctatatggtgaatggggagctatcttgccagctttaccagaggtcaggagatatggg

SEQ ID NO: 19170 - DNA, 1205 bp, Mus musculus
agcgtttggaagctgattatgggatggatccccggatatggtagtctttagatggtccatccttttgtcacagctccaaactttgtctctgtagtgtgtgtatcttaatccttgctcctgttaaatgatgtgccagtggatgctgacactgtcgatataaacaaccactggttatcctatcagtaattatcggaagagaaatacatagtagaggaacagaagtaattgggctggtgtggtggctttgaatcttcctgaggacaagactcagttaattcttgttgggtgaatgtagggactggattcttttccttacaggcatgcggtatttgctgtagttccagccgctccagattcctgcctggaaggtgctggaaaacaggcaaagattaaatgatggatgttgtgattcagttattccctgtaaaacccttttcttgaagccccaccgggttgatcttgcctacctctcataccatcacccatcattgcaaggcatggcaggaaaggaatcctagccgtcgtcagctgtcacgccaaatgatgtagtttcagtttttaagggaccttagtagcatggaaattatattgcagctaggtaggctggtgcatgtgttagagaaggagggggcggggagagagagacacacacagagacagagacagagagagggaggatagagagttccaggctggcttgtaaatgtcctgttgcacatttcaatacctaagtaaagaaatggtgctggaagctgaccatctggacagtggtttcattggtgaacagtggagtggacaagaggaaaagccaggcttaatcccctttttaatgtttttttatttggaagtttttaaaaataaagtcttagttactaaaaaaagaagttttaagagatgttctgggggctggtgagatggctcagtgggtaagaacacccgactgctcttccgaaggtcaggagttcaaatcccagcaaccacatggtggctcacaaccatccgtaacgagatctggcgccctcttctggagtgtctgaagacagcttcagtgtacttacatataataaataaatctttaaaaaaaaaaaaaaaaagagatgttctggtgtgcaataactaaatgtgcattaaatgtagctctacaaaaacctggaaaaatgtccatcctcctgtttatgttacctaagttgttctagtaagcatca

SEQ ID NO: 19171 - DNA, 2636 bp, Mus musculus
tctgttctctttagtgtttgtcttcatcgtgactgtgtttgtatctcaaatgtttgactttgtaatcctaacaatgctgcgtgcttaaaatgctgttggtatgctatgtagctaacagtggcaaaaccctttccttctctttctttaaatataatttagaagtacatttctcatgtaaacaacccactgattatcattcttggatattttttttcctgttgtgtatatcttgggtgtactggcaatggagatgggaagggaatggggatctttcgtccccaaacataatttaagattcctcatcctctactccaaaccccgagacattcttcagtggatgtttaagaaacactaatgggtgctgcatcgctgggtggcagtgaggcattgtggtgatactacagtggccacgtttcaaggtctcgattgccacgtgctggagggtgcagatgcagaacattctcatccttggagggtgcgctgctccattctggctctgcattagaacttagatgcttttctctccccatcatctcttcccttccatctctatcaagcagcccccgccagtccttttcccagacttaggacttttgcttctgttttgtggcccatttgccttagctggggccatctatgtgatggttggattggggctatccattagaacccgtcaggatcactggtgggtgcacagatgagtgcaatgactctcccctgaatctatcagtagcacaaggttcagcagtaaagagtaggtccctaagcccacctccatggctaacggttgataggttcgttcttgtgcacattgtgagcatgcatccacagatgctgagttcctgactgcaatggatgctttgcctagatgatggcaggttggagcccttctccctatcttttgtggcttacattctttccatgcccccttatgcagtgttcccttaagcctagagggaatcttccttttctccacccccgcatttatgtatctgtagacacacttgggcatttaagtggagaggccagagtagaccagagtttaatatcaggtggttttctctacctcaattcaccttactttttctccttaggttctcttgatgaaccagaaattgaccaatttgggtagaatgtttggctaggaccttgtctttgtgtgcctgaagcacatgctggctttttactgggcctctggaggatctgaattcaagtcctatgtacagcatcattttcctcacagacacctctgccagccctgttttaggtcttgcctcctcagtaggaaatgagaaatttgtgtctcatagtttccttatacctattttcactcaacaaatgtttttggtcatatattgtatgcaagtcactaaactaagtgctgagaatttggttgtggataagatagtttcaagcctttttgcatggagcatatattttaatgggaaaggcagtcattaagtagtcagataaataaccagaattatatcatgaaatgtatcatagctgctagagtgactcttgaggaattgactaatggacaccaccaatttcttagctactgacaagttggaagcacagaaagctggataggaatttatggctgaggcctacagataccatcagcattttagtgcagtcaataaattaagtgatgttcaggctgttttctgtgtttttctcgtttctgacatagaacaatgattatgtcagttgctctgtggtttaaagccacagttattctgagaggacacagttgccatcagtgagcagtgactgatccaaaagaattctggccgaggtcttgccagtgatggaaagaaacggtatgttcttgcagctgccagaagttatgctattctagctgatggcaactttttttgtcttgaaaccctttctgtattgtgacttgtgaccacatgagtgattgctgagaaagcagagagcatgctaattcattgaacagctttttatccacagataacttcaagttgtctggatacctcatagatgcttttgataatgacattccagagaatgatgtagaagataaacctggaacattggggctttactattgttcattattttagttgtctttcactctttacaccctcagtgctgttactctgggaagtcctagcagctttctttagtacaaagggggcaaaagaactgtagttcttttcttggagatattttttgttagtgtgtgtatctttttttttttaaaggtattttcctcatttacatttccaatgctatcccaaaagtcccccctacccactcccaccttttggccctggcgttcccctgtactggggcatataaagcttgcaagtccaatgggcctctctttccagtgatggccaactaggccatcttttgatacatatgcagctagagtcaagagctccggggtactggttagttcataatgttgttccacctatagggttgcagatccctttagctccttgggtactttctctagctcctccactggggccctgtgatccatccaatagctgactgtgatcatccacttctgtgtttgctaggccccggcatagtctcacaagagagagctatatctgggtcctttcagcaaaatcttgctagtgtatgaaatggtg

SEQ ID NO: 19172 - DNA, 1068 bp, Mus musculus
aatatgcaaatatttagaaattgataaaagtcatttgattttggaaattaacaataataaaaattaaagaatagtttggattaaaggtaaatatgacataatttgtggaaccagctaatgtgctttaagggaaacatatgcttgtaaaattaaaaaattaaaaatgggttcacatcttaagcttccaatcttaaggaattcaaaaaataaattcagaaaatgaaaagaactgctaaacataatacgacttaacacaatgtgagttaattatacaatagaaattgagcaaagattagtaatgcctttagtggtattgatcaagaaggaaacaagagttacttattacttacatcaggaatgaaaacaatattactatgattcttaaagttaatgaaagacagagattaaagaccaaagagatggctgtttgtaaactgcttgctgcaaatgtgaggactcgaattcatgctccagcacccctctaaatgttaggcatgatgacgttccctggtaatccccattctggggaagccaagacagcaggatctgtagggcttgctggccaaccactgtagccatatcactgcattccaagtccagtgagagactgcatcaaaaccttatttttttaattagatattttcttcatttatatttcaattgctatctggaaagtttcttataccctcccccagctttgctccccaacccacccactcctgcttcctggccctggcattcccctgtactggggcatataatcttcacaaggccaagggcctctcgtcccaatgatggccaactcggccatcctctgctacatatgcaactagagacataagctctgggagatactggttagttcatattattgttccacctatagggttgcagaccccttcagctccttgggaattttctctagctccttcattgggggccctgtgtcccatccaatagatgactgtgagcatctacttctgtatttgccaggaactggtatagcctcatgagagctatatcagggtcctgtcagcaaaatcttgctggcatatgcaatagtgtctg

SEQ ID NO: 19173 - DNA, 1097 bp, Mus musculus
gctttaaaaaaagtcttatatttaaatctatcaagttttatatttattcttgcactttataatcgtagcacagatagtttctgtctttttttcctttccgcaggagacccagccaccccattgtatcagctgaaaggtttctttcctcaggttgctttgctttgatgtctgtgtgaaaagttaaatccctaacagtaaagagttgtttgggacttcctaactcatttgtttaatgggtaatgtatttatttaaacgttattgctgtattatcttgatgcataatacatatacacttcctagggagcagactttaagggttctggaatagctttgctatatatccgtttgtatgaggaatttttatccagcaatatagctgctttggcaaggaatcacatctaaagaccttctaggtctgtgtgatatggctggaatgtcacacatttaatccctctggctagaatatagacacatccttagtagattcctttaattacagataatgaaggcaaaggttgtagaaggaagcagccatgtttgaaagttgcatctaattgaggggcagacagagtgacaaatgagagaaagacttgacagaaggagttggatacgcccaactctgacaagaccaggagttgaaagtcagttgatgggagtgcaatgctgttgagtttgtgactgttcagttcttggagttcagaggcaattttcactaggacagttttatagacaggttgcagagagaacaaggtagacacaggtgaagactgaatgacccagagaatgagaaggagccagaagagtagaaccaattgatagtgttagtttgaggccaaacagagcaatttagtcagaggctgggagaagccagtttgaattagtcagctgggaaaggagttagagccagaacagctatgttgagccagccaaccagaattcagaaagagctagggagggtgagcttattcagcagtaagcctccaagacaacaggcgaggaagagatacttttacaaactagtttttataataatattgaagttgactagacagcttgtttctttttcatgattgctatgtatgctaagctttgtttt

SEQ ID NO: 19174 - DNA, 1122 bp, Mus musculus
ctactgctgagctgtgtctctagctcttttgttcctttcggttttctcttttagatggtgtaatactcttttccaatgtggtcttgaactcaccctgtaacccacctaggccttaaattttcaatcctccttaacatttagaatagcaagaagaccaggcctggtttttgattgtcttttgataactgattataaacactccttatacactattttggacattagatatacatattggaaatattttgcttggtttggggcttgttattttaacttgtttgtggtatattttagtgacccagtctgtttaatattaatatatgaattttttgtgtttgattatttctaatatgttgtttttaaaagaattctttcctaactctgcaattattaacatttttccatttttttctttttagaacgtaaatatgctcattttcacatttattattaaatctaaaagatttagaatgttacaagcggtggtatatttaggcttttatgtttctggtgtctacaaacctcctggtccattatgcgccctctttcggctgatctgctgtattgtctggaggacgacgggcttccttgaatgtgtgggtccctttctgaattcttcaccctgctgtcagatcaattgccttatctatttatatttttatgtctagtaaatgaagcctatcagcatctcatcagccattcatttctcttaagcagttccttggcaattcttggacaattcttagttcaaaagcatgcggcttcccataggactttctctgaagacacactaacccagactcccagcaagtgttgaaatggagggagcagacatctttgcagggtaatgattttatagaggataataacactttatcctggagagcaaccttagacctcctgtctactgtctaaatggcaggagattcctatttctgccttactgatagctttaccaccatttgttggattttattgaatacttaatactatatgtattttagaaatggtgatataattttctttagtttttagtaagctaatagattgtttctagtattgaagttttcatatgcctgtaaaacaaatcttttatttatattcaacttggaaatatttcat

SEQ ID NO: 19175 - DNA, 1492 bp, Mus musculus
aacagacatttacataatgcacaagttatagcaacatcaagggcttttctccccgcttgcaatgaattgttttcttctgtaaggatgttgcggaccagcaggtatcagacttgccaacatggtcggtagactcttcccagcatacacctgagcactgaaagagaacaaacaatgactataaataccatgcagaattgagaaaaactgtggacttacaacgaatccagaataaatcaaactctattactgattttgaaaaatccccattttttgacacgggtcgcctactatttggtagaactgaattatgggtcttgattttgttatggtcagatccaactcatttaagctcagagctcttttataaaattaatatataggaattgaatgtttagaaagctactcactgtcaaaatctctccttcctatgggaaatttagctgagttttcttcatccccaatttctctcttttcctgtgtggactcagcattctgaactccattctcagctgggaaggctacggatcctttcagagcgaggtaaggttttacagccagactcagtggcagcccgtgagttacaagattctgtttggagcctgtgttctgtgaagagaagttcggtttgtatcccagctgtcttctttaaagaagaactaaaatacagttgtacaacattcttgctgatcaattctaagaagctctacactgcgttcacctcccaacatgtgagatacaagatacaaagattttggataagatggagaaatacctggtttatatgaaattttcctagttatcttaatgcacacgatgactgtttgcatgtatgcctatttataaaattaaaatacaaagtttacttctgggtggtttatacttataaaaggcagactatatatacttacctttgaattcttattgtcatcatcgttcatgaaaccgctctcgtcgtttttgtattgttccagagaaggggcgacaacggatctttctgcagtatcttccttctgaaaggctttccccattcgaaatgtattaaatactatgtcatcttccaaattccttatggacttggaagctgaaagtaaaataccttgagaaaacaaagaaaaagccagcattaacatgtaggaagagagagtcatctttgccatccttagtttgatgcttgcataaagccaaacaagagtgcattggatgaaaactttcacactctgccagtggctaaatgatccccacctttatatactttctgtctgaatagaaagcacttgaaggccttatcttttcagtttagaaatgactcaccccgtagagcctttgtaaagctgcgaatgcttgcattgttttggatttagtggcctgttgtttatttcgtgtgtaaattttctcagaatctgattaaggtctttgagagaaggctttctgtgagtagattataggctcttcaaagtgggatgttattaaggaagaccacaggataccaggc

SEQ ID NO: 19176 - DNA, 1181 bp, Mus musculus
actgcgcagacaacgccactggctggcacgtcgctgtcaccgagatgcgttcgcagagcagcagcccgaatgcccactggaactgcgacccgggggcacagaagagaccagacccacctcgtccagtgacccaggctgggtgcaagcggagggaggagcagcgcagccaggacgccggaaggcagaggtttgaatcgcctcggcgtccctttcaaatctcgcggcacgacctgggaaccaatcgccgcgctcgccctccgacccggaagcagagcgggcgcacgccctggccacctatggtcgggagagccttgcccaggtcgcctcccctgctttaggtgcgtatcgagtgcggtgaccggggatcgccagcttgtgctgcttccccaggggcgcttccctgttctccagagctcttccttgtgacctcgcgaggtgggagtgggttttctcgggcgacgcgtgggggacacaactccagggaccctgggaatattgacccagggctttaaagacctggaggtcaggggttgccatcaaatccggacctcaagtcccctgcatgccttatacctctctgctctatggtcttctcacctgccggtcccgcgtaacatgtgtccagtctctctgagatgggacttaatctgaaaaaactcagcagataactcaggattttacgtgttctttcttagcctagggtgcctccttttcattaacaacaaagtaaaaattaatttgcacgtgagaatgctatttctacagtacacactacctgtctcgagacaaattagttgaggattgtgacaggtgttaataacgttagtatcacacattactccagagcctgtattttttaatctccttattttattgcatgggtaatggttggttataactattgctacctgatattatccttcaaggctcttggactccatgtgtctttaggcaggggtgggactttccagttcatcggacccttgatagttcaggtggtctgtcaaattagaatgttaaaggtcatataattcgaacaaataatgtagcatagtcctgagataggcaggtgtgtgtatttgtgttttctctagcatgtaggcccaacacatgctaaatcttttaaatcctcaacctgttgacgaacttggcaaatttcttcataggcaaagaagggacta

SEQ ID NO: 19177 - DNA, 1200 bp, Mus musculus
taaatctaagaaacagttttcatattgtaatttttttaagattgggatttattgtataaatttatgcatttggttacgtatttcatatatttcataacaatttattaaacatctaaaattattggaatcatttcaattattggagtcttataacaaggaaatactgagttacaagggattactaatactaataatagccactcttttcttgatttaagagttcaatatttactaggtgcttgtagaacaagcctataggtatctctgatacttatgcatttggcttctgcttgtgatatatatgtgtgtatatatacatacgtgtgtgatatatgtttatttttcttttatgacattgaatctgcttctttctcaaatttagctgatgagatacatgtagaattttcttgttccaccctgtattacagctaatggttgcagagaagaatggaacaatccggttttatgatctaatggctcagcaggcaattttatctcttcagtcagagcagacacccttaatgtcagcacactggtgcttaaaaaacaccttcaaagttggtgctgtggcaggaaatgattggattatttgggatatcactcggtccaggtagttatttaatatgtctgttatgttacataaatatgttgttaaatgacccatatagtcattcttgtacatataggcctccatgtcctatggaaatgtgtgtctcctgtagaaaaaggagagaagtgctgtccctgtggggcctcagagtggttctaactcatggccattgttcactgtttccaactgagtgcttacttgggcttttgttaaatttattggggtccaaagagaaacacctttaaaaccttcgttcaagttcatctacttcactctaacacataatttgcaaaatgcaaactcttgtttttctagttatcctcaagaaacaagacctgttcacatggaccgagcacacttatttaggtaatgtcctgtttctgctggagttgtgtggatgctttggtagggttccactgccagaataagttcctggcctcctcttcggtgcagtttggggattgcttttcctcttttatctggctgctttataagggttgttttgctttccctactaagtagttgctttgtcttttgctttaggtgagcaggacatgtattttttcaaccacttagaaaatgtttataat

SEQ ID NO: 19178 - DNA, 1156 bp, Mus musculus
ccgcatacacatacactcacagtcactcacaaatgtaaacaaaaataaagtaaagctttggacaggctagatagcacatgcctttaatcccagcattctagaggcagaggcaagcaaatattggagttcgagaccagcctggtctacagaacaaattctaggatagctttccagggctacacagaaaaaaatttaaaaaggaagaagttaattaattaattaagtaattgattgattgattaatttcaacagttttgcccacagcccgatcttatgaaagcatttccccagttgaggtcccctcctctaagatggctccagcttgtgtcagctcgacctaaaacttagccccctgagagcagagcaggcaaaggatgaagacgagctggcctttagagtagctgcttcagtctttctgtgtccactgcctctcccatgtcccagtccaagcaggatgaggacgtgtctgccagccgctttgaggataatgaagagctgaggtactcgctgcgatctatcgagagacacgcgccatgggtacggaatattttcattgtcaccaacgggcagattccatcctggctgaaccttgacaaccctcgagtgaccatagtgacccaccaggtgggtgactttgcacgtacggcgaggctgcggtttcctgtctgtgctttcagtgtggtacagtgatctcacgatgtcgtggccctccccctttctacctcctttctgaattaacagtgtcctcttttccctctttctgaatgcccaaccaaatcaaagcagctcacctttgccctctgtgtgtgttttctgttaaaaggacattttccaaaatctgagccacttgcctactttcagttcccctgctattgaaagtcacattcaccgcatcgaagggctgtcccagaagtttatttatctaaatgacgatgtcatgttcggtaaggacgtctggccggacgatttttacagccactccaaaggtcaaaaggtaagaagagataggtgggcgcctagctagaaaatcagtagcagatgaggaaatccatgtgcatatttctgtatttgcgtattaacaagcaggcatttttgacttccaagtcagcagttaggcggtaagaggactacatttagagattgctttcccacggtc

SEQ ID NO: 19179 - DNA, 1844 bp, Mus musculus
gcatctgtgaacatctccctcctcgacaccacagcggagtccctgtgatgtggcacagaggcagcctcgtggggagaagggacatcgtgcagaccgggttcttctgcaatgggaagagagcccactgacctggaattattcagcacactaagaacctgtgtcaatagcttgtacagcttgtacttttaaaggatttgccgaaggacctgtcggcttgttgacaaaccctccctgacaagctgctggtttcttcccccagttactgcagactgagaaaccagtccatcttgaaagcaagtgcggaggggccccagtctttgcattccaaagctttccagcataatttctggcttgtctcctcctttgatccatttcccatttttttttaaaaaacaataagtggctactaagttagtcattctcacttctcaaaataacaaatcaggatgtcaaaacatttgtatagatcttatttaaataatatagaacgattacttctttagcctatctaaattattgatttttattaacagtcaagtggtcttgaatcgctaacaactactgaagagctcgagattgacgttgaaagtgctttgagcttgtttaactcattccccaagaatactgtgacctcgtgtgcgggcctgattgcgaagggctagtgtcacgtagcagtgctgctcaccggatgtaattatgtcgtggaaatgtacatacaaacaaaagtgcctcacttcagaaatgagtagtgctgatggcaccagcgagtgatggtgtccatttggaaacccatgataccttccaatgcccaccctgcttactttatacagagcaggggttaaccaacttctgtcaaagaacagtaaagaacttgagatacatccatctttgtcaaatagtcttccttgctaacatttattattgttggtgttttgggaggtttattttattttattgctttgttatttttcaagacggggattctctgtgtagctctggctgtttggtaattcactctaaagaccaggctggccttgaacttagagattcacctgcctctgcttcctgaatgctaggacatgtgcccacactgcctacccaccccccttttggggggggtgagcaactcaataaaaagatgaaaacctgctttagtttgcagctatacaaaagcagcaggcctcagccagacttgacccccggggccattgttggcccacgggagaatcatttttgacgtgggtaagcaaaccctgatattggtcatgctgtgttatgtcattatgtggtggttttgaattctggaagatatcttcagtcatgatctcagtagtattcctccaaaatggcacacattttcgtaataagaacttgaaatgtaaatattgtgtttgtgctgtaaattttgtgtatttcaaaaactgaagtctcataaaaaaacacacttattgaaactttgagtttattgttagtatttttatcttaattacatatgagtattttgtctgcatgcaccatacagatgcctggtgtttttggagaccagatgatagcttcagatcccatagaactggagttacaaatggttgggacccatcacctaggctctggggactgaacccatatcctctggaagaagagccagtgctcttaaccactgagacatctctccagccctgtgctttgagctttaagtctctgaagattggggttactgttgtccagactgaacagtcaatgggatggttgtctgtgtggtgtgtgcttggctctcaggctctgcactgaacactattaagtgtgaagtaatgtaaagaaaggttaaatataacatgctggagaat

SEQ ID NO: 19180 - DNA, 2057 bp, Mus musculus
atcccaccaccttaccttgaaaatgaagttctgtgcccttgtcacagaccagagacacagtgtttgctgtcttagtttatagctgttccgcagatgtattgactccagcttgttgagaatataaatcagtttttacttctgaattgtgcatatggacaacccagtagtaacagcagaatatagatacctggcactcaatttgactgtgcctgcttataatctcaacactttggaggcagaggcaagaaggaattcaaggccaccttcgggtacttggtgagttcaaagttagttcaaagtttgtctcagaaaaggcagaataaataaaaatcaatagatacttagtagatagtaatcttagtctttgtactctacctccattgcaaaatttatattattgccgttcatactttatactttagaagttagttttgttaaactgttgccctttgtttctccaggttagttgaaaccctgaaaagcagacagtgagcccattcacgtcagcgcctgtgagccaacgctacatcacatactcattggaagcagtcaggtgtgcttcctgtgactgctggagctgtgcgattctggcatagacagacctgcctgacttcaatatttgtaataaatataaaaacaagtatttggtgagagggttagcttgattgaatcacccaaatggtttatgtaatgtaaaatatttcttcctggttttcatgtgttaaggtatatattctatttgtatggaattcttactcagatacagttctattaaagaatgtatactcttagggggaaccctcctatttttaaattagtggttgcatcttgtttgtataaacactaatatttagctcagactctttcccccttaaaatgaattaaggctttccaaagattagtcttagcaaagtagattagaaatacagtgtataatcttcatttgcttaactgactagtttattttgttggctcactttactgacttatgttattttacagtacttatacttgtcaaaagaattttgtgtatgttgatctgaactttgtacaggaactctgtaaggaaggtggggttctgctatgttgctttgccaggccctatacagtgaggtagggtagggttcagagtcaggcttgtgggtcagaaacttgtgtcctaaattatactatctccggatataccaacactgggaacatagacacctaggtgtggtggcacacacttgtagtcctagtacttaggagacagaggtgggaagacccaagagttcagctttgtggtgaatctgaggccagcctgggctgcttgagactatgtctcaaaacaaaacaaaaaaacaaccaaccaatcaaaaaaattatgctcaagtagttatggatttcaaagtaatgtttatataaacttgtctatgctagtaaaatgataagggatacggtccacactatcccaaatggctgtttgatgaattcacaacacaatacaaaaccttcacatgaaaagaaataaaaagcaattttaataagcagtaacgagatgtctttagtgtcttccattcatttaccttcgttaataagatgtctttactatcttccattcatttaccttggtatgaaattggctaaaaataaaaatcttactggttctgtagcaaaaatattcctagttttaaagattaggtatactgtgtaggttttaagattgtgttctaaggaattttctgaacagtaatctaccacagtgagcagcatggtccatatgtgttactaacgctgtggctctttcagtaaattggacaactggcatttaaaaatatggcattgggactggagagatggctcaaagagcaccgactgatcttccagaggtcctgagttcaattcccagcaaccacatggtgactcacaactatctgaaaatgggatgtgaggacagcaacagcatatgcacatatataaaataagtcaatctttgaaaaaaaattaggcattgatagagacttgggctctagccttttcctgccatacatgtggtaagtgagtgggatccaagctcc

SEQ ID NO: 19181 - DNA, 1233 bp, Mus musculus
tttctgtgattagatcctgtgctgaagaatttatcccaggaaatcatagaattactcaagaagctggtcgggctggagagcttctcactagcctttgcctccgtccagaaacaggctagtgagaagagggctctccgcaaaaagaggaaggccctggaggtgagtgtgcggttgtaaatgtggcttgtctactggcttaacaagtgctccaactaggggtgtgctgtgcacacgtgtgcactgttccctgggagggggatgagggcttcagaggaggagtttcattaatgacacatgttgctctgcgtgtgatttggggggattcttttcacatgtactttaaaagtaatgaaagatttctggattctcttcaagtttgtaactaatcccgatattgctgccaagaagaagttgaagaaacataaaaataagagtgaagcaaagaagaggaagatagagttcctgcgccccggctataaagccaagagacaaaagtcccacagcctcagagacttagcaatggtggagtgaggtctctcgtgtgcattaactcagctggttccaccagggtgaaaacctgattgtcctgcgttagggtactgggctgaatgtccctatgctaagctttgggcggtgggtgtggtggcttaacacctgtaatctctggacttggagggctcagacaagaggattgccacaagcttcagagcagctggacagagaccaggtctcaaccaaaagaaattaagttaaaactttggcatagatttgtaatgtatattttatgtaaccatacttgtatttttaattaaaatgttttatatgctactcctgcctgaaagactatgatacaacatgacatgatttaaagccaaccttttcacaaaaatcttggtggggtgttgcatacctttaattccagcatgctggtgtcagaggcaatgatctctgagtttgaaaacatagatcctgcctcaaaaaacaaatatataaagaagagaccagggctggtgagatggctcagtgggttagagcacccgactgctcttccgaaggtccagagttcaaatcccagcaaccacatggtggctaacaaccatccgtaacaagatctgactccctcttctggagtgtctgaagacagctacagtgtacttacatataataaataaataaatctttaaaaaaaaaaaaaaaaaaaaaaagagaccagaaaccagtagccaggcagtg

SEQ ID NO: 19182 - DNA, 1184 bp, Mus musculus
acaaggtttcactttctgggagaatcacactgttgtgttatagaaaaaattcagcagtagaaagactcgggttttctctttttcagataggagacatgtctttaagtgacaatgccagcatatgcttgacaagtatcatcaaaaggctagctgctctgaatgtcacagagaaagagtataaggagatcattcaccggacactcctggagaaactgaggaaggggcttaagagccagacagaggtattggaaccatgacgtctcgttactactgtctacaggtgttctccctcttctgctgttgaaaagcagtcaggtttagtctaataattaaaatagttaccaactgtcacaagttttctgggggtaggtttttattttacacagtttttttcttttcttacagtggaagaaatggtttacttaaaatgtaaatggctttttcatctaccttatattatctaggaaatggataattcttttaaactactttcatttttgttttccctcaatgtgatatttgcagagtgttcaacatgactataccctgatcctttcctgtttgattcaaacttttccaaatcaactggaatttaaggacttggtgcagctcactcattgccatgacccggaaatggacttctttgagaacatgaagcacattcaggtaggtgcagctgatttcctccgccttgagaatagcagctcatacaattgggccttctgggaaagatggatcttggggtttcaagaaggcttcagggttctttccctggtcttcatgaccagcaggcaaatttgcatgtaaggtgatcgtctcccgggggtctcgttcttggtggcatcaccaaacacaaatcctgatagtgtcaacttcctttgttttttttctaagagaattcaggcccattgttaagtgctatggattatatatgtgagagcaagccaagacccagctatctgctctcgtagtggccatgctcttctagatccctgcctttaaacttctcatggaaaaagcacttggggctgaggcaggggtggctttaggagagcgtgtgcagttgccactgcatatttcctctcactgtctagatccacagacgagcaagagccctgaagaaactggctaagcagctcctggaaggccaggttgtgctgtcttctaaatctcttcagaattac

SEQ ID NO: 19183 - DNA, 1176 bp, Mus musculus
gaagtaatatagcagactaccttctactgatagtgattgacttgtcagtgagacagactgaaggaaagagaatactagtgtaggactggacaaatgactcagtggttaagagccctggctgctcttgtaaagaccgaagtacagttcccagcacctacgtggtggttgacagccatctgtaacttcagcccaggggatccaatgtccttttctgctgacctctgttggtaccaaacacgtatctggtgcacagacataacatgcaggcaaagcacccagcacatagagtaaaataagagagagagagagagagagagatagagagagtgtgtgtgtgtgtgtgtgtgtgtgtgtgtgtgtgtgtgtgtgtgtgtgtgtgttcgttcgttcgttccagtgtgccataggtacctttctgatgcacacactcctcactgttgctctcacctacgtcctcttacagcaatgagtattatccagcagatctgcaagttgctcctactcaggatctacgcaaaaaaggtcgaggagcagtggctgaggaggaggaggaggaagaacctgctgctggggaggatgaggaactggaggaagaggccgtgcccacagaggacgcgccccagaagaaaaagacgagaagggctgcagcaaagtgagttccccaccacaggctgagcatggagctgtgcttgtggggagagcagtacagtccttcctgtctgcctgggaaatggcttcatgaaagatggactcctcagataattattgatatactgtcctgagattctctggacagttttgtcagtctttggagattcttactctgaaacatgctggtgccaggcattgagaactgtctgtggtgttctgtgacatcaaagagaaaggcagacagacccagaatgatacaagtgacattgatggggatctgctggtattgatgctacccaggaacgcacttctgtcggtgtggcccagtcagttgcatgttgctatcttggatctctctgcccttttctttagtctcttggccaccgtgaagattgctgctttgttttggaacaattgctgactaactttcttgtgtcaccacagaatctgagtacatgaggaactgttgacgtggctcttttttgtcatggttcctttacagatgagagcattgcaggctagggc

SEQ ID NO: 19184 - DNA, 1240 bp, Mus musculus
aaataacctgacgactattctctgcacagacactggaccatgtatgcccccactcgttcaggcacatcatatgcatgatcgaataacgagaaataaaattcgtagtctgtgcaatgtaggcagtgtacaaacaacagatttaaccgtagttgattgttttacatttttctactgggatatttcacacttaagaccatgctgtatcgtgtattttatgatctttttctcttagttctcatgcctatggaatggaaaacaagcaattctggaatgtctgctatgaacatctagaaaaggcagcttcccatgccggtatgaacaggaatcttggagggctgggacaccgtatttatttgtttagtttgataaagttctgagatggtgctgttctctttgtgttactagaaagcacacatcctgtcttaaggccaagcagtggtctacaggcttgagagtgacacttttctattgcagagaaagaacttcacaaggatgtgagggatgaagagtctacaggagatgaaagttgggagcaaacccaggaaggagacgttggggatctttaccagcagcagttagcattgaaaaccgactgtcgggagcgactggaccacaccaacttccgattcttgctttggagagctttggccaaattcccagagcgagtagagccacggtccagggaactctcccctcttttcctgagattcatcaagtaagggctaggactctacccctggcacagtgtaaaagcgaggtatcagcctccttactggctgggcattttgaattttttgtcatgtttcaaaccattatcatgtctgcaaagcacttcctccctcaggcaaatactaaaccagttttgttcaccatttagttatatatgaatcaacatacaaataatgctaataaaaataggtcaggttaccacaaaggaggggccatgctgagtttggtcagtatacaaaggccttgctctttctttccctgttcattgttttcgtacttgcctgggagtgacataaccatgtctgctgttcgagtctcaatgctaagggatgtactcttgaagaatagtaagagctcctgaagccttgttttgttttgagtgtgtaagtctgagagtcttgagtgctttgaacggattgctttgaaaggatgtgttgtgtaaaacagaactaaataataagttctagtgtgctttgtcacatgggaaggaggtatggggttagattgagta

SEQ ID NO: 19185 - DNA, 1179 bp, Mus musculus
aaaaaggaacttaaacagaagagagaaaagttctctaaggtagaaattagactttcaatcaggatagttcagaattcaacattaggaatgactagtcctgctggctcttacctgtaattccaggacttgggaagaagagtaagaaaagaatggtgtgattttgatatcagcctgagctacagaaggagactctgtctccacatgtagctagataaagagacaaacaataatcaaatccagcaaccacctttagattgtgtctgtgttctattagattagcaagaaggaagggtgagggagatgctgctcatgtggtttctgatttagaagtgaaagagaaaaaccatctgtcccttgagaatttcttctcatagcttcctataacattggtattctactcaggaagagggagcatggtagagatagatgttaatgtggggagttgagcagattcagcatcacaaaagaaacactgaggtcacacaattaataactgtaggaattgaagccacaactgaccctaaggttcatgggacctagagagagagagagagagagagagagagagagagagagagagagagagagagagactgagagactgagttgagccccagaactccaaagggaagaagctatcctgcctgttccagcatgcaagggacacagagaagaatcctgtttgagaaatgcttgtcttagaaagctggaatctggaggggggggggggtaaagaaagctagaatctggattcaatgtctatttccaagttgaagatattattgctagggcagcatcagcaggaacaggtaggccaatgagcaggagtacctgcattattctcttataatctccatgtagtacccacactcaaaaaacaaatcacagcaaagctcgagggaagtctcagagatatcttaataaacagctcactccctaatgtccataattttgtaattgagactttcattgtttgagtgaagccatcttggttaaaataaaaatgtctattgcaaagataaaatttttaattcaattctttatgtattccccattgtaaataatttaaaataaactttaatgggaagaagagctaaggcagggatattctcaatatacctagaatagttagagactgccttgaaaatagcagaaaaggaaaagatggaaacagagtga

SEQ ID NO: 19186 - DNA, 1843 bp, Mus musculus
tcgattttaattagtctccagattatgttcatcttcattagtaaggccatgttgtgctcagttttccagtgcccagcagacagtgtaccttctgttctgtaggcagattctcgtcaggaatatccaatgatttcatgacagcataaacaccttccacccacagggatacttgtaaatgatttatgtacaggcttgtcactatttaaagtttattaatgtactttgggaacttttaagggtgttaagtaactatggtattaccagttatcctaagttgtaggaaggaaaagcaggtctaagaggtacacgcttgtaattccattacttggaaagtggaggcaggaggatcagaaattcaaggtcatgttcagctatgcactagagacacgcctcaaaaaaaattgtcactttgactcctcttttataactcagatgccctccctttaaaatctgctttccatcctcctcctcttcctttcttttctttgtgagactgaggatctatggtgtcttacattgatagataagcattgcgactgagcttcctcctcggccccttcaaatacggtttctaacacaaacaaaatagttgacccagacctgccatcattgaatgagtgagcatcgtggctggctgctggcattctctagacctacatacagcaagagaaccttgggtaaagaccactggatctttacccaagcagtatgcataaaatcaaagatctactcaggatcccttacaacagaaaaccaccaaaaacttgccaaacgttccggttctgagcatcactaatggcaatatgtacatctttgaaagcacctcttagcactcaaaagagatgccaggggcatttctgtaatcaggaatatctaacacacctttcagagaggaaggattgtagctttagagaggctattccctcatagagagggccgccgaaactatttctagatcagtaacttctgagaattaaaagaaaaatataaattacactataggcagactaaacctatgactcagtacattgtacagttttataaacattatcttttgtgctgggtaatcaagaataaagatattctcagacacctggcacaaattcccgaattaactttaggattatttatttaagataaagattgggttttttgtttttgtctgctgttcagtagcatttctccaactgtagtcatatagggtgaatttctttgtgtgtgtaccttgtctttcctaagcataggttgtatgtgaataagtaattcagttccatgggaactgagagaacactcagcaactcagaacacttggtattcttgcagagaacctgagttctatttccagcactcccggggtggctcacaagcatccagaactcttgtttcagggtatctgatgctcgcttctggcctccagaacacaggcaccaggcattcatattgcacacatacaggcaaaacattcatacatgcaatcaatcaattagtaaatatctttccctcccaaattaaaaaagttaaattctttctgatgtattttggtattttctaaaggagctgataaatctttgccacaatttaaaaaacaagtataatgcagttgtactcacttctttttactactagtgtgaaattacataaggtctttttgtgtttaatatttaataaaccaaatattaagcataaaatgctgatgtacctggaagacacatgtgtggtttcttaaaaatagaatgtttttgttttggaatgctttgctaatgtgtaattatataaagctgaacagggacgggaagggattttttttttttttttttttttaagatttatttattattttatg

SEQ ID NO: 19187 - DNA, 1135 bp, Mus musculus
tcagagtaagggtgtctgccggaatccgggacctggctcttcaaagtctcctggccgtaccccgctgtctattgtgactgttccccaatctgctaccaagacagaaactgtctcgaagtcagccaagactgccatgaagggccagtactcagctaaagggcctcccaaaagcagcaagccaccaacttccttcagggacccaccctcatctggtaagggggcagacagcggagataaaatgcccactgccaggaagaaggaagaagatgaccattattttgttatgaccggaaataagaagcttaggaaataaatacacttgtatcgtttcagcaaatcagggtgatcaatgaatggcgagccacaaggatcaccaaagatcttcctatttgtgtctgtccggagagctgcagacatgaagtcaagatgggatgaagctgggtcagggaaaggacccatgcattttgtgtatcaatggacaaatgtgtgagttttgacctgtatcatcttgctaatgatgtctgctgtttgagggaagtgtaaaagtccaagaacactactagaattttaactattggtggtatatttttgaacacaggttaactgtggaggttatctgctaatagcaactccgatactcttaaacactagttactgtgctcagccacaaagcaatggtttgcttggcgctagtgtgtgcctgtaatcccagctccgaaggctgaggcaggggtacacagtagaagccagcaaggttttgaaatgtgctgtaataggcacctaatttattggtcaggaatcctggtccagcaatcctaagtaccaatggctcctgctgtttactttgatattattctggattaaatggaattcttactatttaaatctctataatatttccgtatcagaagggactatttggttttttaattaaacttggctttttaatactgtatcattttataaccaatatttttgataaaaagaaaaaaaaactcaaccaagtaagttaacttattgaatcataagctgaaatttagtaagaattaagttttttaaaaaaaaaaaatatatatatatataatctagacactttgtatcttatatttttagatgaagtctgtgcagtgtgaca

SEQ ID NO: 19188 - DNA, 1190 bp, Mus musculus
gcttccctgccagcccgcataggaggtgtgtggatcctaataggttgaagtttttaaagcatggaggattttctccctattacgaacttctcttcaggtttttaaagatccagtccttactagtctcaaagtgcgaaaggacaactgaattatcctgaatagcagtttttaaatcagatgttttattttggcttgtaaatcttcttattaaaaatcttgagttgatgataactggaagtccacctggtacctgccttcctgttcatttgtcttcattgaaagggaagagcctcaatgctgtgctagtttgggtgcttttgtaagacagtggcgctggcacgggaaggattgggtcatttgcttttccggtcttatttttcgaagaaatgtatgcttagtaaaagcacagcaaaaatgctgcaaaattatattaatttcattggtttaaaacacattaaccattttaaatgcaaactaatcattgtaagttatgttttagcatgatctgcctcaaatagcaatgtatttttctgcctttacttgaatatatttaggctcactttcttccctgttgtatcgcagaagagctgtgtactgatctgtacagaagacagactgagcactctgacatggtattctcaactactgccttcatacttgactttcagttcaaacttatgaggttgcagcatatatgaattacattttcaaatggagatttgtaaacaaaataattacactatatttaatgaataaacttttgagatttctgccatattgtttcaagtatagtaaagtctaaaaatgagcaagccattgggtaccaacaggttcaaatgttagcttgcagtggtgtctgacctcgctcgttactactactacagtttcttttctagaagtcccagaaactttgtgttcagacattttagtatctgtaatcagtcactgttagaaaggaaaggaggaagggagggagggagggaagaaggaaggaaggaaggaagggaggaaggaaggaaggaaggaagggaggaaggagtcagttctaagaggccacacctctgatgtctgttgttaacttgctgatcctaccacagagccttatgctatagacgtcatttgtatttttaaaaagtatattccactgttatgtgataattataaaactccttaaaaaactctgtatgtat

SEQ ID NO: 19189 - DNA, 1176 bp, Mus musculus
taagtgagcttccattaggttgagcagaactttcgactgtttagttcgtaattgacatttgctctatagtcagtgtctgggttcatttgtgtgatctctgtttcagccccatcacttactcctgggaaggtgggaagttgatatctgaaaacgatgactttgaagatatggtggttacaagagaagattatgaagaaaatggacatagtgtctgtgaagagaaatttgatatttaaaagacatttctgaataatagtcttggaaagtttatttcaaagttccttttataggaggctaagacctaactatgttacttttcattgtaagataaagtttacttatgtaaatattccgagtcatggctggtatgcacaggcttcttatgtgggttattacagtaaactaatcagccgtggttcattacttagttagatactaagtaatacttatactgttcctgagaatagattctttttcatgagaaagtgaaagagcaaatgtttaattcttcatacttgaaaacacaaactgaaatatctcacccatcagttttccttgggttttcactttgtgtagttctgactgtgcttaactaaagtatttgcagactgttaagattctgtttagaactaagtattttatttaaagtttgttattcttatttgtacataataaaatttgaaatatcaatattaaatatatctgtttaatgtttatcttttatttaatgtaagtctgaaaaagtacagatgtctgtatttatggtcaccactgttttgcaaaaatgtactactttgttttcgaagttcttttatgtgaccaatagcaccatactaagataagatgcttagtgactagctgggcgtggtggcacatgccttcgggaggcagaggcaggcggatttctgagttcaaggccagcctggtctacaaagtgagttccaggacagccagggctaaacagagaaaccctgtctcgaaaaaccaaaaaaaaaaaagatacttagtaactgtactcctgtcaagcatgctcaaggccctgtgtctgagttctgcatttccaaagcaattgcttttcaatttaagaaatgagttggtaatttccttgagttaaaacatggcatcttggagggaactcaaggagaactaaaaagaggctcatttagactcaaaaac

SEQ ID NO: 19190 - DNA, 1194 bp, Mus musculus
cactagccagtacctcttactggctttattctccctatcgtgcattgtgttttgctttgccttgttttccagtgagtacggctttgctgagaaggttgttgagggaattactgtttctgtcaactctatcgtcatcagaattggagcgaaagctttcaatgcttcctttgagctttctcagctccgtatctacagtgtcaatgcacagtgggagcacggagacctgagatttactcggattcaggatccgcagagaggagaggtaagaggcttcttgtcttactaaaacccattttagtcagtgataaataaacagagacagtttcacattacatctgggacctgtgaaatggctcagtggtgagggcacttgctgtcaaatgatgacctgatacattcctggaacccacgtggtgggaggagagaactaactccccctgaggcacgtggatgcccacgcatatgtacacatatccacgcatgcacacaattagtagagcaccgggaggggtgccctgcagttggagtacatggtgctattgcagaaggcctgcatgtggttcccaggacctacactctgagcctcacagacacctggaactccagcgccagggttatctgactcttttctggcgtctacaggcacatgcacacatggtacccttacatacgcttagtcatgtgcatctatggttgccaggaatcatattctagcggattgtttttcttctggacttacaagtatcctttgatattaacctaaattattgaattttaatgttttactatataaatctttgaccttatgaaaataatgagtcctactttgtgtgtgtgtgcatgtgtgtatgtgcatgtgtttctgtgtgactgtgtacttatttgtatctgtgtgtgtgtgtctgcacatgcatgtgtgtacatgtatgtacctgtgtatgtgtctgtttctgtatatatgtgtgctcgtgtgttggtgcacgtgcaggcatgcgtgctcaccatggcatgtggaggtaggtcagagaatgacttatttgcgtgggttccaggggtcaagctgaggtcggccaatcccagagagctccgttagctcctttgcgttttactccaccactgttttagtgatgattctggtgctccttgttggtgatgctgttttctaaatgaaatttccaggactcttacagatga

SEQ ID NO: 19191 - DNA, 1912 bp, Mus musculus
gactctttgctaggaacactgattcagttccctcttgagaactatgtcataagtctgccttagtctcactgtctcagcataccctgcctgttctccagagtgctacgattacagctgtgtgctctcttgcagcctggaacaacaagtcgggtgacatctgtctgtacagttgctgtcattctttcagtctcctagaacacttgggcttaaaagtagcttaacaaaactatcgaatatcgctttttcacacttagtgcttttttgtgtgtgtactcaaacatttagtaagtaagagatggctcagtggttaagagcactgactgctcttccagaggtcctgagttcaaatcccagcaactacatggtggctcacaaccatctgtagtgggatctgatgccctcttctggggtgtctaaagacagctacagtgtactcacatataataaataaatctttaaaacaataaaaataataccaagtcttttgtatttttcatgatgtagggatttgtaaactgaactcaatttttttccccttccagtttgtcattccttctgaagtgaaggcaggttgccatcaagatcagcctcacacggtgtctattcagagctctgaaatgatagccaccaacacgaggcactgtccgaactgccgccattctgatctagaagctttgtgtcaagactttaaagagtgtgacttttttagcaaaacttatactagattccccaaatcctgtgacagttttaatcttctacatcccatcttccagagacatgcccacgaacaagataccaaaatgcatgaggtttataaagggaatattatccctaaattgaataaaaacactcttaaaacatctgctgccaccgatgtgtgggcggtgtacttttcccagttttggatagactatgaagggatgaaaagcgggaaggggcggccagtaagctttgtagatgctttccctctgtctatctggatttgccagccaacaagatacgcagagctacagaaagagttccagacttgtgatcaagtgacccttaatacctcacaaagtgagtccagtgatctggctggccgaatgaagaggaagaaactcttgaaggagtattacagtacagagtctgagcctctgacaaatggcggccaaagaccttcatcagacacatttttaaggttttcctcttcctcttcagatgcggatgttcatgtcttggtccgtgttcataaacatgtcagtatgcagatcaatcactaccaatatctgctgctgcttttcatacacgagtctctcgttctgctttcggataccttgcggagggatgtggaagctgtgattggaagccccgcttcccagacttctgtttgcgttggaattttacttcgcagtgcggagcttgccctgctgcttcatccagtgaatcccacaagtgctctgcgctctcctgcttctgaaagtgggagcccattgcttcctgacttcctgccagcagaaaatggggggtttttgtcttcaaagagaaaacaaggtggtagtggtatacaccgaattagaaatgctactctcaatcacatgtcagacaacaggtcaatgagtgttgacctcagccacgcccctttaaaggatccgttgcttttcaaatcagccagtgacacaaacctgcaaaaaggcacttcttttctagactacttatcagataaacatttagggaaaataagtgaagatgaaagtagtggactttctcacaagagtggctcaggagaaatgacctcagaagggagtcacacaaaggatgtggcttccacagactcagatagtgtcttaaactacagagatggctcaactaggctttccctggatgatgacggcaaccataacccaccttcaaaccctgtaactggtaaggg

SEQ ID NO: 19192 - DNA, 2776 bp, Mus musculus
ggtggggaggtggcaaattgaaagaactggctggtataggcaaaaagatggaggcttatgacagagaaggaaggtcagcgcatctgaagacacagaggccccagtgtagtacggtgacacagtatcactttaaatttggaactgagaagttaattagtattttcaattactgggtcaaaatgtaggaacacggttacttgcatagtaattgcttcccagttttcagctcaactggaccctcaccagcactgggtggtttaccatcccaagtgatgctacataaaatagttgcatttttgggaagtgattaaaacctcttgttttacaaatgtcatttcagctcatggaggaaaacgaatgtctcaggcagagactagctcaagctaaaatggagctcgcggaggctcactcggccagagatgagcttctccatcaaatgaagaggatgggcctgtagctgccgtggccgtgagaaccggggctagagcgctggagaaggacggctaggtttaacagaaggatgtaaccagttagtgggaagttttcctttacatgaaataaagcgagtggtgaagtggcggctgttccaaaccctgtggaggaaaccttgggcgcaagcggtacagtcatctgggtggccccgtgaaggctgcgcacactgtaacacagttacatgcctaatgagaaatgtcagttcctaacttcagtgtctcatcaaaagcattttttacaagaaaaacgaagacctgttgtgctcatgcagattgctgaatttatttctctgttaataatttactattatttacaaaaaaaaaaaaaaaaagatacttttagggctaatgtaaaagaaaagtaggcttacattttagatgttattaaaattatgtacttaatctataattatttaattgttgtaaaaagtccaatcagattaataaattatataattactgagtttacaaatggaaaactcttgaccctaccgaacttgtgaagcaacttgaaaatgtgaaaggaaagtcaccttaagtgatggggaggcttcagtgaggcactcgtgtaaaatcaaagcacaaatacagggcactgggcaagtgacttaaagcattcctgtacattccattaaatgtgtgtcattagaagtaaaaaggcaagttatcttgcgatatttggcggtatttgtaactataaaaattttaattaatactattttaataattctttatctttcctctttaaggagaatgttttcagagaatttgtttttcacacatgcagaacaatttcataccattcctgtagcatcatattacacatgtgtttgctcatatgaatatataaagccagttttgattagatttctgtgatgtatgtctgtgtgtgtatatatgtgtgtgtgcacacacatacacacacagtcttatatatgagtcattggtaaattttgaaatctattttctatgggataaggttgaaaacaccatgagagaatcttaattatgaaataaagtacatgagtattttaagaaacaggtttttgaagacagtatatttctgatagaattaaagtaagtggtgtctattttaaacttcacattcctcaatagaactatatccagataggccatgagacagctggactgttctttctttaaggtacttgggaaccctggcccttgctatgacactcatggtgctttgcatgttggccggaattacagccatccctgtatctgaggacttggcagaaatcacatccttcattacatcacacgttggagtgatttaaattttattgtgaacagtatttgccttccttctcctcacatcattcttttcgggtgacatcatttgataaaaacaggcactgtttgggagccaacatacagccaagaacaaattaaatcgttactatattacctcagagtatttacaacaccatgtgaaaactttgttactctaagctgtatgtagccttagatgaagtatggaggtctaattagagtttcagaatgcacaccttgctaacctttgatgtctggtatggattcagcaagagcagtctcacagaggaggacggatgggacatgaacttctgagctgacgctgtttctcaggactgacctgttctacataaacatacaagttttctatggaacaatgttaaactgtttaatgttactagacactgaatgttttctttattcctttaagatgtatttggccttcccatgaaatcgtataaacaacagagatgataatatgctgagcattcaatatactttgtccgattggtttttcctttttcttttttcttcataaaagtgctgttttgatagtggtttacgattaaggaaacatctcccaaaatattgccgtgtacccccacaaacacaggaggtgggtgtgattggggtgctagaaatttgagaggaaagagacctttgatgctcaaaataagttggctagagccacaattagtgatgtggctttgatttaaagtgcatgattataggttttatctcagcacggtcatccgtttgcagactttgtcaaggcagtggtaaagggacgagtcactgtcttacctgtttttctttaaagaggacttttaatttttaaagatttcatttttacttttgattgtgtatatgtgagggtgggtttgtgcatatgagtatagtgcctgtggaagccagaaggggctggagttagcaggaaattgtcagcttcctgacaagggcactgggaattgaatcttctggaagagcagtac

SEQ ID NO: 19193 - DNA, 1184 bp, Mus musculus
agcgttaatgtagttcagctccttaagtttgaattggaaaaaaaatctaaaccctctatatcaactttttataaagctgtgaattgtactgcagtattgcaaacattacaaaagtgtttacagctgggccagtgctctgtatagttgggtgaatcatagtatatctccacaaaggaacatacttttactctatttttttaaatatagtcatcattgttattaacagtttgtccttaacatgcaaatgaaatgtaaatatgtaccttgttatgctattggtaaattctttgatgcattcaaattggttggcaaaattagtgagaatcatttgaaggccttctataggttgatgctgtcattatgtaggctatgtcccaaggtaatggtggtcagttttctgaaccacacttactcccagggggtatggttttccaaataaatcatgcttatttgcactctttaaatttgctttaagatattgtgtcatggtgcaagcacagtctgcaacatttctcttgttaactcagtgagtattggttttcaacagttcttcctatgagctagtcatgtgttagagagatttctctctgtagctctgtgtttagctggactctggctgtcagtgtctgtgaattgggcaccaaccaccttgcactcttttagttgtttcgtttataaagacagggtttatgtagtcctggctctcttggcactcagcatgtacaccaggttagccttgaactcagagctcagcctgcctctctgcctcctgagttctggaattgaaggcgtgtgccaatagcacctctctctctcagttatactcgactgagcttgacctcttctaacttcttctccatgcttaggtgttagtcagccagtgacgtgtgaagcggtaacacatacttccccttttacctgtacatcacccatgctgttctctccacgactttcaagagtcgcagaaacccttccccaaaaccccctgggaaatgagacatttgcccatgtcttcctgggaaatgtgacctcattgtattatgcagtgattgtgatcctcctgcatcagactcctaagtagctaggagaggtgtcttttgatgcagaaaaagctttgcaacatcagtatctagttttgttttcaatcttcttttaggatctataattgaagcttaagtttaatc

SEQ ID NO: 19194 - DNA, 1211 bp, Mus musculus
tgggggggtgggtatgggggacctttgggatagcattgaaaatgtaaacgaggaaaatacctaattaaaaaaaaaaccctctttttttacacacttcacttcctcacagttctcctatactataaagatgcattgaactctgggaaaatgccaacatttacatattttaaatgattttttagtgtttaaaaatgacaatttcaaatggtccaacctcagcagctactgttttttgttctggatcctctcagacatacaagatgggtactggatgctgtgattcttgtcttacagatgtctactctcctaattcccacagttttcctaagtggcagagcctagtgtgcccgtgtaaacctctgaatgaattggtccacatcattgccaccctgtctctcctctagtgatggtgactcttccactcttctgagaaggtcccaggcacacaatttctttttgctttttgagggcccatttttccccccaacatacaggttaggtttctagaatcttcagttacagcaccatcttctctattatttcaattgggcaaataaacacccctcctccgcgcaggtgagagggcggactacagaagcgacacagcttttgggacaggcagaagcgacacagcttctggggcagaccctgtttcgggctccagacatccggcaccttccctgccagaggagaggtgtccgcccgggagggctctgccggagcacctgtgggagccatcttgggtcccagatccctcacagactagtctgcccagcacaaaagccaatcaagagtcagacatagtgccaatcaaggtgatacacaattgcagtctcagcatttgaagcactaaagaggaaggacttggagtatgtggatagcctagctacataggattaacatagcaaaaatggccattttatgaaaagtaatctaaagattcaatgtaatccccaccaaaatttcaactcaattcttcacaaagatagaaacatcaattctcaaatacatctggaataacaaatatcccaggataacaaaaactgctctcaacaataaaagagcctctggggaatcaccatgcctgccctcgagctgtactacagagcaatagtggtaaaaaccgcatggtattggtacagcgacaggcaggtaaatcaatgcaattgaattgaagacccagaaataaacccacacacctatgttcactt

SEQ ID NO: 19195 - DNA, 1700 bp, Mus musculus
gtttctcacaacttttctgtctcctgctcttgcagccagttggtaacataccttcctctcccaggtttttggggctctttttttttttttttttaaattcagacaaccaagttcattggaagtgtatgtaaaatagaaggtaaccttcctgcaggagaaccaaggggctctcctgtgaggtagtgccacgttatgaaaactatgaaaactgaaaagtatcctcccttttgcaaaggttctaagctgtgttacagatacttacaagaggtttaagatgtgagtgaacgtgtccctattgtgttctcatttatagccttttctatgaactggtgatgttttgaagtatgagtttatgaagtctctttgtgaacctggacttttatttctaaagtttgaactgtgtgacactagagtttactgaatacaattaatagatgcttaaaataagaacatgttgggcctgtgcctattttaaagataaaataacatagcaataaattgtgataatgacatatttacatcattattttaaagattctccaatgtatgaaactaaatttgtttcacatattaattttttaaaaagtagggctggagctaagtacggtggcgcacagctttgataccagcactccagaggtaaaggcagtcggctctctaagttcaagatcaccctggtctacatagtaagactgtgtctcaaaacaaaacaaaagaaaaacaaaaattaggacaaggagatagttcaataaatgagaggcttgctgtgtaagcacaaggaccaggatcagggtttaatacccgacactgacataaaaagctgtgtcttgccgggcgtggtggtgcacgcctttaatcccagcacttgggaggcagaggcaggcgtatttctgagttcggggccagcctggtctacaaagtgagttccaggacagccagggctacacagagaaaccctgtctcaaaaaataaaaaataaaaaataataaaaaaaaaaagctgggtctagcatcccctgcctataataccagccctggaaaacagagacatgagaaaactattgaacatgtgtgtctgtgtattcctttgctaagaaatttgatgtctcaggggttaagagcactggttgttcttgcagaggacttgggtttgattcccagtgcccacgtgatggctcacaaccatctgtaactcagctcccaggagacccagcacagccttatgactcctgcaagtaccatgcatggcgtgcacgcggtgcacagacacatacaggcaggccactcatatgcataaaataaatgtattttaacttcctgtttaacaaaatcgtcattgtagattaacgtttaacgaattttcctttgtttctttctttctttgtttcgaagggtttttttgttttgttttgttttgattttgagacagaatctcaagatgtagcccaggttagtcttaagtcaccatcttcctgctcctgcgtttcaagtaacagggaccataggtctaaatcatggcacaggacttcatattgttgtgctttatggcaaattcccagtattataatccacactttcgtatctctgtaattgataataaattttatatagcagttagcatatagagagtactgtccatttatttaaaaaatttcagcacacacaaaacagtttatacccaggcatggtggtaggtgtcta

SEQ ID NO: 19196 - DNA, 1599 bp, Mus musculus
taatattttttattattacgtattttcctcaattacatttagaatgctatcccaaaagtaccccataccctccccccctggtatgaattatttagaacacatcatgaaattatatgcaaattatatcacttccattgttggcccctttgtgaaggaaaatttccaaagatttgggagcacttttatctgcctgtttttatgttctgccagattctacatactcttaattatttccaaaaaatctttttctatagttaccattattattattcatgttactgtcatgcttgaaaatgcatctgtaactccacttccaggagatatggctcccttttctgatctttgggcatacaaggcatgcatgtggtgcacatacatgcatgcagggaagacactcatgcatatagagtgagtgaatctaaatgtaaatgttttggataataagctaaagccagtgtggtggtacatgctcgtaatcctagcactgggaggctgaggaaggagttctacttggaggtatcttgatttttttttcccttccctttcccccagctggagtcttctgtgcgatcgtctcccaccctgctgactctgtggtctctgtgctgaataaagagaaaggcagcaccgcgtctcaggtcctgcagaggctgggcttcagaggtgagtcaggctcccctgagacagcagctcactgtgcgcgtggggaggtaggtggcgctcgggcactcatgtctcctctctgaaccaggtgtgtggaaggggctcttcgcccgaatcatcatgattggcactctgactgcactacagtggttcatctacgactctgtgaaggtctacttcaggctccctcgccctcctccccctgagatgccagagtctctgaagaagaagcttgggttaactgagtagatacatcaaagtaacatggactgaatctgcttgttgatcagtgttgaaagtgcaaaggaacttttatatatttgacagtgtaggaaatgtctgttcctgatataattactgtagtacccttgcttaaagcaagagtttcaaacttaatgctaaataaacccatctattcctgatgtctatgagtttgttattttaaaaactagtattgaaaaaagatttagtcctaaaacaaaaagaataattaaggtattcaccccaggaaaaaagtgtaaactaagtaaaccattggtgctattcctaaattgtcccctcacttaagaaactcctgtgtttaggaaatagtcttgggttttcaaaaacatggtttattaaatatggataaacactgaattgtagttttatttttttgacaagctaattttagtatagcaaatttttgtctcatgttcactttttaatgctagtgggcctattggtctgtgtttgtaaaagggcacccagattaggctcattcttaaaatgatagttaaggaccaaagcaggattgctaaaaagactaaggtgacctacttttcacacaaccagactggatggaatgtcagcagtttgcagttttgtttttatttatttagttttttatgggaaaggctgctagacaactgagcgaagctggagatgcagcctcag

SEQ ID NO: 19197 - DNA, 1131 bp, Mus musculus
gcaatagcaaagacaggatgaaaagcaaagtgtatttcataagattctagcttctcaatgtactatgttatttctaagtaagtatgggtggtgtgtgtgttagtgtaagagaagagtctggggtttctcttatgtagtataggattactgtatgtgtcccatctatattcagagtatataccttgtattagttatgaggttgagagacaatataaacttaattctgacacagtgttattcatggactgtgtaataagagtagttcagacaagtcaggcagggtataatgtgcatctgtttcctagcatttgggtatattgtgatttttgtagccagattgtcccatataacaaggctagactaggatagactgatgaagttagatcttaaaccagaaagggggagaggagtaattttagagtctctgaaatcacattgtcatagaaagttagattgagatggccacgtgacagcggtttatatctgttctgtatattgtcttttaggaaaacacctacctgtggcgcacatcactgtatttagcttcttctgccagtgctgaattcttcgctgacattgccctggctcctatggaagctgctaaagttcgaattcaaacccagcctggttatgccaacaccttgagggaagctgttcccaaaatgtataaagaggaaggcttaaatgcgtaagtgcgtattctcctaaaacgagtcactggggagaacctaaaatcaagtcctgtctgtctgtctgtctgaaaatgatacttgtctaagtatctattgactcaggaggatgggcttgttaggacatttctgctatacacagtttgcatgtttcagatgccaacatgcttccttagatccacctttgtggatgggtcttggactgagttctacctgtaaacttcttgtttcttgtggttccagtccaagaaacgtccagcaactttgttggttgtatagtcgaaggtgcttgagtcattggcatgtgagactaatatacctgcatgctagtcttcaggttctgatggaagtgacatgcgtgatgctgtcatgtgttactgtcaggactcgactggtgtgcggacacgtctgtggatggtgaaagaaaatctctgctaaatca

SEQ ID NO: 19198 - DNA, 2881 bp, Mus musculus
gatctttgagtttgaggccagcctggtctacagagtgagttccaggacagccaagggtacacagaaaccctgtctcaaaaaacaaaacaaacaaagaaaagcatgtgatacgtcaatcccctgcttttatctgacgattttctgctgctgcattttgcagtgtgcttagaaatcacactaaggtttggttgttgacttgaatcatctggaattctgtttcactttgaacagtgctagctgccgcagaccaatcaaaggtgctgcaggccggccgctcgagctcagtgacttcaggatggaagagtcgttctcatctaagtacgtcccgaagtatgctcccttggcagatgtcaagtcagaaaagacaaagaagagacgctccgttcccatgtggataaaaatgttgctgtttgcccttgtggccgtgtttttgtttttggtctatcaagctatggaaaccaaccaaggaaatcccttcactaattttcttcaagatactaaaatatccaactgaagaaatcatttcggcacattcaacttgatctcctgtttttaataactgtagaaaaacatttgtgtccacttgttgactgaagaactaaattgtgatttcacctcagtaaagttagtgctgcattgaaaagcagacaggatgcttacacggatctcatttcaatattttggaccttggagatcacattgtgccatatgaataatttttttagctccagaacttttttgtaggctttatttttttaatgtggacatcttatttcacttttggggaaaatgcattgttttgtgtatttgaaaaataaggcaaaacatggtgatgtaatgtgaagctacacattaaatacttggaattcttacggaaaagatttatgacttattctctgctgagtaaaaatgttacaaatgtgaatgaggttcagtatgagaaacggccacgcagttgtgcttcctgtacgcagcgtttgttcatggaaggtacagcaataagctcttgtgtgactcctgtcatgtggtagtgctggtgcggccttaccataccactcgctagagtatctgtcatatcatggaagtcctacttcattaaaaccattaagtacgcttggctttccacagggaccttgtagagaagcagatacctgctttagctggctgtacaattgagggagctgttagctacctctaaggctcccattgggatcctgtgctttttatttacagtaaagcatttgtcccatccatccagattgttagcaaaatattctttaggtaaatgtgtgagggtgtttgtttagaagttagaaactaaacactggtcccctctgttttacttggatttcattgtcttcttttaaccaaaaaaaaaaattgtttcagccagggatttttgggttttttgttttgggttgagtctgggtgttatttttgtttgttttaggcatataattcccgatgtaatttgatttaaaagtataactgacttgcttttaaatcacatatgtagtagctaatgcttaatttgtaatttcaaataaggtgggcattatggttttgtatactcctgaaatgattaacgatatcctgatggttgtcgtcttttttttagctgaaatttacctcatgtatggcttagatgaagttgccgtcaatttaaattttagtaaaaatcaagtaaagcataaacatttttaactaaatcattaagttgcaattttacagtcattgaccataaagcacactaaaaatgtaaattatttttaataacatccaaaatgtaaagacgattttaatttttacaaaggaggaagccgaatatgaatatttagaccagcacacagttttgacttaacatttactgtatttagcttttagatatttcgtagacattttaagtacacttctgccactgagaccagaacatgtaggtctggtcttccagggcatgtggggagctgacttagatctcaagtgcttgcctctcagagtcacagtgtcttttttgagatgagccacatgggcatgttttacccaactttcccaccctaccgtgacagccatcttccttcctttgttttcagacatagcttctcatattgctttcaatcttttgtttataattaaaaattgtgagaagccccacttgatatttaaaagtgtgggggtataaatcagacttcacatatatgtaaggccggtcggtctgggatcggaaagtatggtccagtacagcaaaaggtaggaccaggtaaaacatgccattttttaaaaaaaatgtgtacttggtcttttgtctgtgtctgttttattccactagagtaaatgtgtccttgatgtaaatgcaaagcatttattaattcgtagatgtagagtttacaatataattcaataataaagtaattaacctctagttttgttgttgaatacatgattttcagatagcataaaatttaagatttctgtatagcacttatcatgtggtatttatttatagactaagctttagttctcattttaacctattctgctttctaattattgtagtagttggggcctgttagagaaaagcacccagaaccccaccccccaagcacctcttccttcctgtaataccgtgattttccaaccatacctctgtgtttgtggtcgacccccaccccacccatctttttttgaagaacttatgtagcactggctagcttcaaactcacagagacctgcctcctccgtgcctgtcacgccggctcctgcttaccatcttaagtatgtacatgtaactgtcggcagttggtcttcagtgtgactgcaatccatgtcgcagcctgtgtttgtgagatgagggtgctgtttgcgtctttgtcgttcatgtgtc

SEQ ID NO: 19199 - DNA, 2121 bp, Mus musculus
gtgaggatgtctgcctgtgccatggggtcttctaccatgggtcggcgttatctgtggttgaaggattgtaagattagtccagcttctaagaataaattgactgttgccccctttaaaggtggaacattatttggaggggaagtacacaaagttattaaaaagcgtggaaataagcagtaatgaggttaagaacaaaggcagaaactttgacttagagaatttgtgaacctttctaagactttagtctcctaatagagctaatttcaaggtgttacgctaccactcatccagttacagtataattgcatatgtagaggcctagtacagttgaagctccgtaggtcacatctgtcttacatgatcgtacagcttcctgtttcatttaacattttagatatacaaggaattcagcaactagaatatcagtggaaccctcgcttcctttagtttgccattcgagtacttcctgatgcataggtcggagttaaacattgttagtcacttgaaacactgattttttttttccccccctgctcagaggagtttaactttgagaagtctcgtgtgtagtatgtcgagtctcacagctcctgtgattccagtctgctctgccttctgctgcttgctttcattatataaataatattttgccatgagtccttttgttgtccactcattacattgcaggccatctcacaagtgacctttgtactgcaacaaacctcataataattctagatcagtgtaactcttttaagtgccagtgcacaaacttgctgcttggctcgcagacaagcgtgtgcatgtatagaagggaaagaccctgctgctctgtgtgtgggaggatgcatgcacttggcgtgcacgtgactgagttcagagccacttaagaaagtgtaataagagtttaaatctagagatactttgtaaacaaataagaggtaaattgtatacctgtatgtatgtataaacacaaacacatttatgcacatttttaataatcgaatagacaaggcagtgtacagttttatgtctgatagaggaggtagccaacaaacaattcctagttatacaagtacatggaccacacttgaggaacacagcaagggatggtaagtggagttctggtatacctcatcttcactcaacatggctattttgttagataaacaagacactacaaaggtggggcttttttattttctacatgtatttaaaggtattttatatgtcctacatagatctggatgctaaaaccaacaagatgttttctaaaaaccttaagaatttttactataccctaatgtctgtgtctgtatgaagcaatgtatcaccctgttttcatttgtatggttgtaaggtaaggaatcctagctgtcgagatgctgtggaaaacagtctcaggcacaatcaaatacggtctcggtgtccatgtctaccactaccatgttcttaggctgcacagtccatcgctacagccctgttacttgtctttaaaatgtacatgtatacatgtacctgtgaagtgctgtgtgatttttttttttaaagcaatgtatgcctgtagaatgcttctacaaattcaataaagttgttaaatttgaacagttttgtgtggtctccagaaacatgttttatgtgtgctttattcttggagtttgaacaagctgaatatatgtggatgaacatgcctttgccatttcctcatggaaacatcccagtagtgacagggaatattctacttaccacatgtcctcctcactatttaaggactatgtatttaattgtctgtaaaatctaaatttggacaagaacttaatttgtagccacatagtttgtctaatcaatcagtttctccttgctaataggtatttatttatttactttgctctatgttgtctgaggtttcttagattcttctgagttaagcaagaacaaaagtagcttttataatgcagaggagtataccaaatgcagatgacagtcatagatctggtgacagtgttggggatggagttggttgcttggtcttcattgacctgtttgaactattttagttaaaaatcactatccagagggagggagaatggcaggtatatatgattaactagggttagactg

SEQ ID NO: 19200 - DNA, 1119 bp, Mus musculus
tcccattatgacagtgaaaaaggagaatttggaggttctggttctgtaggtggaaaaactgaaatagaaatcaagatcaaccaagaaggagaagtaaacagggcccagtacacgcctaagaacccttgtatcattgcaataaagaccatccagtgatgttcttgtttttgactatacaaagcacccttctaaaccagacccttttggagaatgcaacccagatttgcatctctgttgacaccagaaggaaggttatgggctttcttggaatccaaatctcagcaggacacttacttagtgcttcagatgaccataccatctgcctgtgggacatcagtgcagttccaaaaagaaggaagagtggtgggtacaaagaccatctttacagggcatacagcagtagtagaggaagtttcctggcacctgttctccaagtctctgggtcagttgctgatgatcaaaaacttaagatttgggacactcgttcaaacaatacttccaagccaagccactcggttgatgctcacacagctgtagtgatttgcttatctttcaatccttatagtgagttcattcttgccacaggattagctgacaagactgttgccttatgggatcagagaaatctgaaactcaagttgcattcctttgaatcccataaggatgaagtattccaagttcagtggtcacctcacaatgagactgtcttagcttccagtgctactgattgtaggctgaatgtctgggatctaagtaaaattggagaagtgcagtccccagaagatacagaggatggatccccagagtttatgtttattcatggtgggcacactgccaagatatctgacatctcctggaatcccaatgaaccttgggtgacttgttctgtatcagaagacaatatcatgcaagtgtggcagatggcagagaacatttataatgatgaagacggtgaaggaaatgtgcatccagcaagacaaggatcctagacgtgtctgcacttgtgattttagactctccttgttttcctctgaaccctgagatggatttaacattcagttgaggcatagactttgttcagctactcagctacaataggtgccaccaataacgctacca

SEQ ID NO: 19201 - DNA, 1249 bp, Mus musculus
ttgatggacaaattgtattccaaatttttttaggtagccaacttttaaaacctcggtataccttctattttataaagaaataattgtaaagtggcaattggattttttcacagtttagtaattattttgttaacatgatgacatcaggtatgccttatttatttagtgtatatgtaatacatttttgaaactttgcattgtacagatacatggtacctttgttctggttacctaattttatatatatataatttttttaagggtttggaagattcaagggctatatatctgctgattgtctaatgaatttactatgtgcaaaatcattactataagattttcatcactcaacttaggatcagtgaaattttcttatactaactaaatattagaatattgttgccattttttccctcacaagtaacaggcatagattatttcttctgtgttgtgtatcattaactttctctaattacagtgtgctgtgaacagcactttctatccttagccttaccataatatttataaaggttcatcatgcagagaatgtacatgttggcggagctggccgtgttcatctgcctgctggaacctacactttgatagggctggactaggggctactcaccgtttatattcttgtcgcctcttgcccaaagatctcaactgtgtactttatatgtacatctgttccccacttttgctttccaggatcaagatgtttactaaaatgtagcttagattgataactttaagtgtttctaaagagatagaatctgtaagggtgtatttaataaatataaacctatgaataattatctccaaaagtggaacaggagtaagacttttccaagtgactcagaaagtctgtttgtgtgtcaagtttctgtggccttttcttggcagctatggccgcattatgacttgtaacaagtccccttacatgtcactcaaacaacgttaaaatgcagacgtcttttgtctatatactacattttaacctattaatattttcctatttccttttttctataggtgtatatattgtgtattaaaaagggtctgatagagcatgtatataggtaaaacacttgtcatggatttaagcactgagtacaataaattttcacattcaaaatgtagacagtctgagcttgaacctttcacctctagctgaaatggagtaacaatttaaccttccctctggaaatttgaaagcaaaagacaagattgttactaatacacagca

SEQ ID NO: 19202 - DNA, 1126 bp, Mus musculus
tgaggagccgcttacttttatagcaaatggcttgccagagctaaacagcacttttctcttctgatagcctggctcttctgaaaaaccatcaaatatgatgcccttttaaggtgatgctgctgcagatcagggaagtgtttgtgtacgtgtgtgtgcgtgtgtgtgttttggaaggagaaatcagtgacagggtttgcttggttgttacaacagaattttataatcaaactataggcctccaaccaatgaactgctgttattcaaagttttatttgtagtgtttattttcctggttctcattgggttaaaaactagttgatgttttaaattgaacaatgaacaatcaaattcagaaaatagctgcaagaggaaaagatgtcattttaattggctttaattgcttggtttttctttatagcaagacccgttccattatctgtaagactgcttttcatttgtttctgtagctgttcctgtaccaaattctccgtggtctggcatattgccatagaagaaaagtgttgcaccgggacttgaaaccacagaacctcctcattaatgagagaggagaactaaagctggctgactttggtatggagagataagatattcattattacttccaggtggctaagcgagaagaccaccgttgtcacagagtgtcgtcaattttctgtgtgttttgacgtgttctctgtagctcggagatgtgtgatggaatttaggtgaatggtttattagtgaggaacacgcacgtgtttcctagcatgctgagacctctagaacttctaagactttccatggcgtctaaagataaattcacactcagaattactgttctccttgctttttcctggttgcaccgaggactcaacaccaagtaagcagtagagtcgctggttccttggtgtatttgggggtatttagggcagggcatgtgtagtcttcactgctgacatgtttaggggacaagtgtcagttatacctgggatacttgatactgcagtaaagtttattttcctagactataagtcattacaatatttcttgtgataaaatgaagaataagcataaaacacattgagctcacacagaaacaacagtaatctaaagagaaagattacta

SEQ ID NO: 19203 - DNA, 2088 bp, Mus musculus
tctggtaacttggtctcaagcccagctccagcctttcttatcagccatggactcagagctgaaggcagtcatttcttgtgctggacttgggaactccgtgtgtcagcactgtcctcttcccagtggagtctttttatttcagacctacagattgtttttatatttgttgtcacagtgtgacaatttttttttttgtacagttggttttaaggtcttctccgccagtagagccagtaggttacagctatcaatgtaactgtagctgcagatttgtgccggactgagaaacacagtgcattatttatttgcggaatcattgctgctaaataactactgtctgtttatttaacacaacagttgaatgcctgaagaagttgcagtggctttattatatgtgaacgcatctgtttctcctcacaaattgtttgactgctgcattttgttgttgtttgtttgtttgtttgtttgtttgttttttaaaagattaaactgcagtgtttcctggaatgtatattttagctttgcttagcagtagaataagtgagccatcgtgaacactcgaagtccgtgctacatatcatttcttaggcgcattggccaatagccaggctgagagggggtcagcacagtgtgtttcgggagcatgcaatgtgagggttgatgcaagcaaatgagtagcagacattttgggttctcatgtcaaataccaataaactaaaacacggagttatttatttttacctattcctcctcttagaaatgtctgcatatgtgtatgctcctacacttggttagctctttctcactgtgcttttagttaaaatttagccacataagtcattcaaacaggaagggccttgccgctgttcatcataagcacatttctcttattagaggatacttcattttgagggaccgtttctttcatttggggactgtgtgtgtttcaataacgttcacttggaatgagctgaaagctgtgctgtgtctttaaatggagccacgatgaattagaaatgagaaagaagaacccagaggactgctttagtgttgtgggtattatctgctcatcagagacactaacagtgtaacttgaattatgcatctccttgaacatcacagacacttggtgttggtaatcgtgtcttaggcatttgcgctcattgttaaggactattggttagtgcatcttacaactataaatcttaattggttatagtttgcaatggtcatgtgtttgccttatatcatgaaaatagttataacttaatttttgtcctgccattcactgtaaacattcagggtcctctcatttctgttcaggaaatcctgtagtttattgtttgttatttaacagtattaagtgagtttttgtatatttcattttaactttatttgtgaatagtgattgtggcatgtttggggatgttattttaatatttcacaatactgaaattttaatttttttttaaaaaaaaagaaagttctggaagaaacagattcatatgtaatggtgaatattggaccactgctgctttcacagttgtcagctggttttatgttaagccctgtagcctaactgctgttatttctaactgacagacatgtattaatattgtactttgaaggttataaatattatgtgaaaattccttcatttgttttgaaatttataataactaaatctctgtgttatataaaatgtgatttttgtggagtcactgttctttattggggaagaaagctgtgcacactggggtcatcctccttctgggttatcattgtcaggtgacaagatgtcactgtgctgaaagtgacagccacgttaggtttgtgccgaccgtttggttagtctcttatgggatctcctgagatattattctttacttatgaagtatcagatttgttaatttgatttgcagattggccttagtttgtcagtaagcttgattcgtacatataaagaatatacaggcattatttaaaattctttctagggggtctagggtcttacggttaagaaatgtgcatgggttgcttttgtttgttgacgtttcagccttatcctgatcctggaaactgcagaga

SEQ ID NO: 19204 - DNA, 1202 bp, Mus musculus
caaactctcaaggggactttccaggtttgtatttaattttgagactagccctgctctcttcatttcctacaaccacaaccatctggtatctttgtcactactgggagttaaggtttctttagattcctggcatgacaattaatatttaaaacctaatgttttagggctgaggatatagctccatagaatgtgtaacctgcatgtgttgaggctgtgggtataaaccccagtaacctgtctccctgtctctccccaaaaagggcgtggtgggaaacaaactaagaatgttttggaagatgcttacagatggtgaattcaaacaaagaaatgtttatatactaccagccatgtatagagatatttcctgtgtgtagatataatttttgatggattaaatccaatgcattactaagagctggaggaactgaaggccttgcttctgaggatgagcactcaagagccaccgctttcggtagtaatgatgatgagaataaagggactctgagaaggggagacttgtcaggatctccctctgaaacggatgcagcagctcctcagatgctccgcagggaaggcttcacgtgctgagtatggcttccggctgtgacgcgagcagcctctcatctggtgagaccctgaaggcagcacacctgtgcttaaggggaagttctactgtaacactctgaaggcaaggcactttaaattcaagatcaggtgagctgaaacaccactcatctataagtattaaacaaacaaacaaacaaacaactgcaatgtgcctctacagactagatactaaatagaggattataagggggttaaaaaaacaaagctcgtgcaaaaaatttgaattttaaacaatctaaaattatgtttagatacttacacattgagacttactaccgaagttgactttctttctaaggggcatgtgtctttactaaggggagaaaaaaacctctgactgtaaagccatggagacagctccaagcccataaatagatgccctgccactccctcacggcgaagaataaatgtgtactaaaataaaaaggagctggttcaggaggctgtaattaccgaacacagtgtcagagctgggaggggctttgagagtgctggcttccagctgttctctggtcaagacaggcacacaggacaggggtggtgggggtggagaagctggcctggagctgcctggg

SEQ ID NO: 19205 - DNA, 1215 bp, Mus musculus
cctgtgagttcctctacagatgtaactgtcaacagtgatgaacagtctatgtaacgattcatagggaattgggagggttcacgggagttaaggaagtttgcacgcgtgagtgcgtgcatgggtgtgtgcgtgtgcatatgcgtgtgtgtacacatgtggggtgttgtttgcatgtgcacgggagccagaggttgacatcaggtgacttctccagtctctttccttctaatgtttggatacaaaatatctcattgaacctggatctcatcgacttggctagactgacaagctagtgaggtccagtgatccccctgcctccacctccgagcaccaggattacaggagtgtgccttaggactaagctttataaaaacaaaacagtgttaaccaaaaccaaaccaaaaaaaaaaaaccaaaaaaaccaaaaggaaacctcgagtgcatccagactcaggtcctctgcctctcccgactgatttattcagtgaaccggcttctcagccccgaaatcagattaccttaagcccacggatctatccttgctgctctaaaagatcccgagagattcgaagactctattattctttaggcagaagctatgtaaaatccgtggtgtggctttaatgatttctgtgtttcttcatctttttcccttttaggccatccactgcagggccatcctcccttgccaagacactccttccgtgaaattaacgtacaccgcagaggtaagcattacagagtgtagccgaattaaataagtaaatgtggagtgataaggggagacaagtcaaatttcagaggtggaaatactgtacttaatacgtttccactgagcctgcacatctcattttggatctctaataaaaaggtagttttaaacattctaattatgaaaaagggaaaccatcttgttctcatttcgaaaaagatattaaaattcaagatctaaagatttaagaatttaggaccattgtttttcctaagagtaccttctgcagccatgacgcctgtgtacggatgtcccgggcagcagctgttggacttgtctgtgtgtccagttcctctgtcactggtgctgctcggccctttggtgaaggttggattataattacagagtacccttccaaaggctggggctccttagaccaagcaaatgaaaggaagaccaatgtttattcatgggatttgctttcttccccagtttctctgtag

SEQ ID NO: 19206 - DNA, 1198 bp, Mus musculus
ttctgtcttgtatcacaaactaatagccatacttaaagcgactaaccctacatttcatatacttacccagtttatttgccaaatcgtttcactacacttggtatttttattctcactggatgaagctttcagaaattccttttgtaagttagaatgtttatactcttgaatgattgattagcataaacttgaaaagattatttttttaaagacaaaataatagaggtctgccctctcatgcaaggtcagtatttagccaatcaccctccacactgctctgtaaccgctgctgtcccctcactgtgcctcctctgtgtagctccctccaaattcctgtgatctgctctctctgggccagcatttgatgcagagatggtacaggaccatctggttttacatgggtgacgcttagctgttccgttgtgatctttaatttaaccttagctctgacgtgatatctctgctcctctctccatctcttcccgatgcctctcctttgccctttgctctgcagggatctcgctgccttcgacaaatcccatgatcaagctgtccacacctaccaagagcataaagccagcatgcatcccgtgactgcgatgctggtggggagagatctgaaagtggattaaggaactgattgttgctgatttcagaaaattccttttttttaaaaaaaaaaaaaattgaacctattaagaaatacaaaattttagctgtcattgtattttaaagtgtcatttttggttttttgttgttgttgtttatttgtttttaaatcatttttcatgatttcactaatattctctgccccttacaaaccaatgtggagtattcatctgccatgagatgtggatatgagagtaatatcctcccccaccctccctcacctcctgtggccgttgggataactgtccctggggtcatgagagcaaatgagctagccctgtcccttgctggctgcagcactgcacctagcctggccagtacagtggagctggccctgatggcagaggcataagtgagctagccccgagggtatgagagcagatgagctggccctgcccctcactcacctgggcagcagagtatggctggcatggttgaggggcgctcgtgagcaggccccaagggtgagagcacaggatagccggccccatcacttgtctggtatgaggtggcatgggttggaagatga

SEQ ID NO: 19207 - DNA, 1138 bp, Mus musculus
aatctcttaaatcaagggcggggatctagtgcggcttttctgggcatgcttgtaattctagcatcagcatagttgaggcaggcacatcatgactttaaaagtcacctgagccaccagtgaaattctgtcttgaaaaaaagaaattgtatctgagctacaagtgaaattctgtctttaaaaaaaaaaaaaactaggggtctggggagatggctcaacagttaagagtactatctgctcttccagagatcctgagttcaattcccagcaaccacatggtagctcacaaccatctgtaatgggatctgacacccacttctggggtgtctgaagacagctacagtgtacttacatataaataaaataaatctttaaaaaaaattgtaggctcctggtggaacatacctttagtcccagcacttgagagtcggaggcaattggctctctatggatttgaggccagcctggtctacatagtgaattccaggacagccaaggctacagaggaactgtgtctcaaaaaagaaaacaaaccagggaggatctaaatatccacacgtaaaactgcctcttccccttgacaggcttctcttttttacctgaaggtcagttctgtgtatgctaacagatttttcctccgcacacttcagcctcacagactatgatggtgttttgattatacatgacacttgttgattgtgtcatttgagggcagactcaatctaactatcatacatctattcatctgtccgtctatccatccatccatccatccatccatccatccatccattttgtactcctatcacagtccaggttacctactaacttgggggaaagcccctatttccaattgctgaacttagtttttaagtgacagaggcaagggggagggcactcttttgccttcttagtagcagaaaagtggtttgaggtttctctcacgttcttaagtttaggcagaacaaatctgggtgccagattctaatgtgtgtgtctggtgaggaagatgggagaagacgctactgtatgggctcagactaatcaagataggaaatgaatcacgtgtccaatttgttctgagtgatggggatcagtctagccacgaagccaaactaaattagtgacaaaccagaaaata

SEQ ID NO: 19208 - DNA, 2999 bp, Mus musculus
ggcgtgcgccaccactgtccggctagatttgacttttataatgggtaaattggttagttaactcttttgccaattgtcttcacttttctccccttaggcttccaagaacaaaacacttgttaaatgtcatcaacgaaaacttcggtacccttgccttctgccgaaggtggctggatcgcttgggagaaagtaaatacttgatggctctgaagaatctgtgtgacttgggcattgtagatccatacccaccactgtgtgacattaaagggtcatatacagcacagtttgaacacactatactgttgcgtccaacctgtaaagaagttgtcagcagaggagatgactattaaaacttagtccaaagccaactcaacgtctttattttctaagctttgttggaacacattataccacaagtaatttgcaacatgttgtctgttttagcagtggacctgtgtaataccgttattcatgtttaaaggagtttgatcaaaggcaaactgtctacatgtaattaaccaaggaaaaggctttcaagactttaatgttaactgtttctcccgtctaggaaatgctgtactgctcactagttaggaattactcacacgttttgttttgaagacctaagagatgctttttggatatttatattgccatattcttacttggatgctttgaatgacttcattcagttctgcacctgtgccctctggtattgctttttaacctccctggaatccattttctaaaaaataaagacattttcagatctgagagatacattttaatgtgtatggttgtaattctaagcagaaagaggcaaaagtatggataatgttctttatctgtctttatctggactgtagatacgacagataacctcagattctcttcatggtggctacaagctcttcatgtgtgtgaagcaggcagaaaggagtatagttgaggaaggttttgctttttttttttttttttttgttaaaagcatatttaaaatgatttaagcatcatggaaaaaccttgtgccaactggaaaaaccttgctgtagtaaatgtccctcaagggttcatatttacaggatatgtgttccatattagaaaaccaaatcaacagtaaagccacaagcaaaagaagtttcaatcttgtcctaattagaacaattatcttgggattgggctttttccttcctgagccaagcactgaacatcacggcctccagtaagttagagatcccagcatcaggttactcaaggagatgaggttcgagacctttcataaactgtgtgttaatttgaacataaagacacattcgactttaggctgggcccaataatcatttagctgcttaaaatctttgtatgatttgctagaaatggtccatcttagttccaaattcgtcccttgcccaggtaaagccttaatttgtgtataccttgacacagtaatgctgtattgcttccggaatgctaaatcaatttttattttgcttgacattgtctctgaaggaaaggtagacttagggccctggaccacgggctgcttgaagttttccgggaaggctacttttgactttgtgagctgtgtcttcctggtgctgaggggctccacgtgaactcacacactcacaggccctccagctgcctccttgggttctgcattcatggtcttggtttttgagcagcttgacctctaagcccaggatattgaaaactgacccctaaataaactttagggttttctaagacctttcctgcagtctccctctttgtaaggtccaaacttatctcagagtactactgttgggagcagacatccttgtgtcctgagtggccggaaggagtatggccttataaaggaaagccaaaacaacacaaagccaaaaccaacacttgttgtttgcttagtagttatgtagcccttaaagtcattgttacatttagtgatgtgtcttcctgtgatggttaacaatagtgcctttagtaaattattttacagcctaaactgttggttttttgcgtgggtgtccaccttgcagatctgaggtatttaataagaaactgaagtttctttgcatcatttgggttttgtttagtttttttttttttcagtgtaatcttagattcacaacaaaatctagtgggaagtacaacagtctgctgtgtgctagtttaatgttttgtttcttttaaatgccagtaaaaaaaaaaaaggtgctacaatgtgttggtctagaaaaaaaaaaggttcttgaaattaaaggctagatttggtaacttttatcacatgaatctttaatgaggtatatttaacagctgatgcaacaatttgtatacgctttgggtaagtgacctaatatcactccaaatattactccagctgtatttttggcacataggattctgtcttcggttgatgtgtttttgttgcggtttgttaataagctgccccaggcgacactcctttcagaagtctgtgctaaagataactcttcctggcttagatataagctgtaaattaagtcactttctttaggaagaagggggaaaaaaaaacctctcccagtggctcacaggttccttgggatctgtgggttggtggagccccatttctgagcaggttgggtggcggtggccatggccatggccatggcagcagcagagctccatccataagacctggaaagctttctttagaacacagcgaaaggaatctctcttgcttttagttaattcaagtttagaccacttctagtgtttttaaaaaggggccagggccctgagaaattcccagtggtcacataatcctagcaagagtcaggcttagggtacttcgagaaaaacaagatcttagatgtaacagcccaggtgccatgctcgaactgtcttctctctgccttaaacatctgcccctatgcatttgcccctatgcatttgtcttactcctttgaactaaaaataaaaaataaagaaataaatctcaactacttaagatatct

SEQ ID NO: 19209 - DNA, 1179 bp, Mus musculus
tttatatacaattatactcaaatacaagatattggaccagggctgggtatatatagctcaatagtctgacattcagtccccaatatcagttggtggtgggagctggaaaccaggcatggtggcttggtccctttaatcccagcacttaagaggaagaggcgggtggatgtctgtgagtcaaggcatgtctgaggtctagaactgccacggccacacaggggaaacccccacccctctctttaataaagggtacaggtttagtggtgtccactgtgagttcaaggcctatccgatctccatagcaaggtcagccagaactacatagtaaagctctgtcttttaaaaaagaaaatgcgcatgagttcagggtcaccctaggctacctagagaattgatgccaggctggaataaatgagactttaaaggacaaacacttgtatttgtagagctttgtttggtcagtatatatgtttacttttctaatttccctaaactaatgtctaaagtaccttgtgaatattatttaacaggcaagaaagtgaatttaggttgaatatttacttgagattttaagcttttgctaaaatgggtcagtgacactgctgagggctttgagacgatgggttttctctgctcacaccgctgtattttatctctgtttattggtttgtctgagagggagcagtgtatagtaactcagtacaacttttattgagtcactaaggagctgctgcttttggcctttttgagtctaaataatctctggggacttgaaatactgccttcctgtgagcccacagttctctttttaaccacggttaatagaggaacttctggaagcaaatatgtcatttaacagttaagtaaacttaaaggtggatttccttctcttgcaggtagaataatcgattgtgcttttactgttacttttaatcccaaatatgacatactattaacagctgtaaaggatgccactaatactggaataaaggtatgtgtgctataagcactatttaacaacataatttagagtactcatagattgttttaaggcctgtataggagtttaggtgatttatattgcctataaaattggctgtttttattattgttaattttttttgttgttgctattttgtttttagaccggttttatgtttgtagcagaactgagctgaa

SEQ ID NO: 19210 - DNA, 1160 bp, Mus musculus
gaatatttgtatctcacagcaaaagttcaaacagaccctccctcagttccaatatgtgacctgtatcctaatggtgtatttcccaaaggacaagagtgtgaatacccacccacacaagatgggtaagaatcataccacagcttcccgtttgactttgactactgtagcccagtgctaaagccacttgaacttctcgcagaaatttcaattttactaaaagtttttgacttgttgcaaagaaaatacagtagaagacttcttacccaaaataattgggaccaggagcaggttggtcaatcagaacagtaggttagggtgggtattaaaaacaacccgaagtcttacaaagttggcttacttgtccctcttagtcttttacattggatttgcaggagatcacactttttcttctttataaagtgttcataatgcttttatctgttcatttcatcttgggtttctgggaagatgagcaaagtgatgagtgactatgtgtgtgtttggtatgacatctcccctgaaaacatgtatagttggtgagcatgtgggggggtgggctaggtatctgtctgtctccttgaacctagagcttgctgttttggtgggtaaccattgatcctctgggcctgcctgtctgacagcaccctgcagcactgggctttagcggcacaccaccacacacaccgctttcttacttgggtgttggggatctgaactctcttttcacacctgactcagcattttagctactgcgccatctccatagctcccactgttattccttttttaaattaaaaacctatgtgtttgtgtgcatgtatgcacacgtccctatggagtcagcccccttccacctttatgtggaattacctttgttactatcctgcttgcttcccacagttctcccctgtacttaatttgataagaaaacatttttaacttttctaagatatatttattttattatgtgtgtatgagtgtcttgcctgcatgtatatgcaccacatgcatgctggtgtccgtggaagtcacaagagcgctttggatcccctgaagtgggaattacaaatggtggtgagcctcctgtgggttctgggaactgaacctaagtcctctgcaaacagcagcagcagtgctctacctgctgagccagctctcca

SEQ ID NO: 19211 - DNA, 1156 bp, Mus musculus
tttcagttggatcacataaccgttttccacgtgagcgtctgcatagcgtttgttgacataacctgtatagatcggttttccccgacggcccttgttttctgcagtaagaagcttgattccttgagtatttactgatttttttttctaaacgatgtcagacacccccactttgatttctaacacaatggaatggcactgaggaaaacaactgggaagtatgtttttgttaggcagatacatagtaggctgtggagggatggaggagccttctattcgagaacctaatgtcatcgccatatgggggtatgccttaaacgtacttccactgtgctcactgtagtcaaaaatgctggaatttccagaagtcaaccctacctcactgcacgccacgatccttaaggatagataccatatttattctctgcatttctcctggatctttgcagctttagttgaatacattgaagacaggcttcccaaaggggttttgccttaagtaagaatctcactgttttcccaggacagctcctgctgacatctccttagggtgtcaccctgcctgactcagtacaatacccagctacccctgatgtcgtctccaaagcccccctgatccactctctcctcaccgcccttcaagcccacatccagggcaagactagcacccagctttcttcccgttcaagtctgttttcttcaggacaccacctggacctctgggatcgaactctgagtctctcttgtccttaccatcttcattcttccactgttacacccccttatgggtgctacagctttccctctgagctgcagtaacactcacttgcctgctatgcagtgctatgtagaaggccctgggttcaagcccttatctaggaaaacaaccgtgttttgttttgtttttccttcccgattacaacccctctttctgtgtagtctatttcaggcattgcaaagcaatctgcattactgtagaattctgatttaatcccaatgcctgtgaacttcagtggcattcccaatggtttggcctgcttcagcctttctcacaccagtcagcccagctctgccccttgttatgtgacacttcccagtgatgggatcctgttcttctgtccttcagactgtttgtgctcttttccctggttcctgtagt

SEQ ID NO: 19212 - DNA, 1304 bp, Mus musculus
aattgaagacctgtgtagaaagcattttctccagcaggaccttcatgaatttcagtctgaggctttgtgaggcagagtaacctgcgcataagttctcacactgacttacactctttataatcgactctagagtaacatctttacatctagtcaggatccatggtatacacacactgtgttataatttcacagcagttttttctgtatttgtaacacgtaaaataatggtgtaactgaaaaaggatggtgccttaaattagagagacttagtaaggatgatgagggagagctagcaggtgctgagtacctgccttcagttagagacttagtaacagtgatggggaaaagccagcaggtgctgagtacctgccttcagttagagacttagtaacagtgatggggaaaagccagcaggtgctgagtggctatgaactctgctgcagtctgactttgaccataactcagatttctcctcttcaggcaccgctggcttcactgcatgactgacgaccctccgacgactaatccaccgactgctcgtaaattcatctggacaaaccataaattcaatgtgtctgccactccagagcaatacgttccttattccaccactagaaagaagattcatgaatgggttccaccttcgacaccttacaagtgaccgcagtgaagactgttcctgcacttccaggctagtgcaggaccatcctagcagctgaccatgaacttgattaaaattgtttgacctagcagtgtcttgtgcgttcacaccgtcattcatcccctgcaaagtagaagctcgcacatgagggagggaggtgactgacatagatctctggggcgggggatgggagtggggggtctgaagtaaagttcccagttctaggaaatagccccaggggacctgtttgtgtttcatgatcttccccgacttccatggctggttgataagggcaggctgcattccaacctgagccagacattggtaagcttcgtggagagacacaaacaccgagtggcagcctggctcagactctggtgtggctctgtatggaggaggttattggagatgtcctatttccttccccaccccactccccctttggttttttgagataggatttctttatgtggctctggatgttttggaactcactttgtagactaggctagccttgaactcaaaagatctacctgcctgtgcctcccaagtgctggtattaaaaggtgtccactaaaaccaccttgcaagatgttctatttcctgggtaattgtttgtttaatctgtgttttcttcacattt

SEQ ID NO: 19213 - DNA, 1219 bp, Mus musculus
cttttgctgaccagtattaacaggactgtggaaatacaattcctttgtgaccactagtgtgagggcgataattgtacacctgacttaatataagcattgtcctctgtcgcacttaaaggaaaaaaaaaaaggattcctaaggatattgttgactctcatgtttctattacatactcatgatgtataatagcactagaacagaagacaattatggtgtgtgtatacaatagaatactcttgacccattaaaacattcgattgcatatgtccatggaatctgggtcatatttgtccaaaagaaaaagcaaaatacagatcacagtgtacagaatatgaatgcatatatgatggcaaatatgagtacaaaatctaaaagaatatgaagctgctttttatcttttggatgttttaaccttgtttaagttttttttaatttgtgaatttattattttatgaaagtgagatcatgttatgttttttaattataagatgtgccagggaaagaagcagctgactgccggcctacaccagtgtgcaaccttgggatcttgggattttttgttgttgtattgccataaattctacaaacttgtagacctgactactgactcaccacatatcttgattctgactttttttcttgaatgccctcctgtattctctatgttcttcatgatatttttcaccgtatcttgtaattccccctacccctggattatttttgctctttctgtacatatatctttctggtatgtattacacatttcctttttcttatctatcatttgtttatgtatttgtaaactcacaaactattctagtcctagtgctaatagaactatgttgaatttaaagagatacttgggttacttatgctagtaataactaaaatgaaacagaaactgccatgaggctggagaactcacatttgccattgtgtgtgagacccagtggaaggcaaagcaggagctgacacagaaggaataaaacattcaagtaactcagtacagaacacattgaatttatgatcaaaacactgacagggaactccaggcacatacggctgtactaatgaatttcatcaataccttaggtaaagcgttccggtgctaccctgtttcagaaaaacagcagtttcatgagttcaacataatcttagtaccaaaatatgccaatagtgttttataagaaaatcacagaccaatattcttcataaaca

SEQ ID NO: 19214 - DNA, 1203 bp, Mus musculus
acaaataagcttttgaagttggctggttacagtatcttaccagaaatttaccagttaagtcgtcatgcagtagaaagtatgattgtaagaaaataataatgtaattcagtgtttggtggttgattgctaaccactcaaatacatatcttcttcctttcctctttccctgacttcccctgtttttctctaaatcataattattgagcttggcatgttgccagggctctgaagggtctgctcccagctgcacttcaggttctggcaaagtgtcaaaatgtgacatttattctctttacaaatcatgggatggctagccaactgcctgtagagtgcctagtgcagagttgtctttgggtttggagtaaatttcgaatttctgtttgtaagtgaagcaaatgcctgatgagtgttatcactagactttttaatattttgaaaaacaacaaaaacagcattcactttgggggaatgaaatatttaaagtattgttttgaaatgctcaaaggcatagagcatgtgctttttaatgaaatgtatttggaagctttccataagcatcagcagctgtgctttttgaatgtcttgaattgccacacttttgggcagacattgtactattcattgctttaaaaagttgaatgcctgtgtaggagaagatgtaatatgtaggtctgtagatatggggtcagtcaaaagtggtcataagggtgcgtgtgtgcacttatatcgttgttagagttgtaaagaagggacaaggaaatgtttggttaaaagttggtgttcgtagaactaattgcctttcagagacattctgtagacactaaattactaagatgccttatttttttcttgttatggcttaaattatatgcttattttaaaaggatcttttaaaaaattttatgtgtacgaatgttgcctgcatgtatacagtgtggtgcctgcagaggccagaagagggcattgggtttcctggagctggagttggaaatgattgttagccatcatgtgagtgctggaagctgaatctgggtcttttgtaaaaacaacttgcagtgtgttatcttaactgctggaccctctctccaacttctgaattatgtactttaaaaatttgcattatggatatatttagttggtaaactttttattatagattcctatgcatgcacgtgtgtctgttttgagtgtctaataaatgga

SEQ ID NO: 19215 - DNA, 1212 bp, Mus musculus
tccttctcagtactggggcatacagaaagctgggaaacctttgaagaacaggattatagtgactcttctcatattcatgcccgacaatttctgaattctctgagagtagcctttctggtagagtagctaatctaatgtgtgcttcgggaaaacaatgctctctcaactgttttttctgctggcttgcttttaaaatctcttctggtagagaagggaaaggctttgtaataggagactatctgccaatgttttcttcttcccaaagcacctactccccaaacctctttgcagtgctcatttggggatgaaaagaaagaaatcagtatctaagttctatatggtatgaaatactgtggttatagtgagaaatgcccccagtccttgctattcattactcacttacagggcaccctgcatgcctcactgggagagacagtttcatgaggagatactctgctcctcacatggcttgatggatatcttagtgtctttctgtttttcctttttcttttaagcaaatcagtcatttgcagatccaagtgacctcactgacacagtcggagaacgacttactgaattcaaaccacatgctgaaggacatggtggagagactaaaacaagaatgccgaaatttaaggagccaagctgagaaagcacaactagacgttgaaaagtagagtttgctctttttttgtatacaaacttttttctttctgctgtataaatattttattgatgattgaaacattgaatgtatttgtgggaagttactttctccttctatgaaatgaacttttactccttaattgcttctaaaaattttaggaatggacaaaggacctttaaaattatatctgagcacagtgttctcaaaactcttaatgagaaacctttattcatttagcaaattaaactatgattccccaaatctgtcttgaaaaccagagaacagaatgatttgggttgtgaggttgctcgctctctctgtctctgtctctgtctctgtctctctctctctctctgtgtgtgtgtgtgtgtgtgtgtgtgtgtgtgtgtgtgtgtgtgttgcaaacagacacagagttagaactcaccgtttggatttctcttgtgaaaagttatctacttacttatattctttataccttaaaatgcactgctggtaaacggtaaacggtatggagaatgctctgggtatgctcaggattttat

SEQ ID NO: 19216 - DNA, 1636 bp, Mus musculus
actgagcagtacaaaaagaccggaaatagtcgcctatctgccccgccccattctcaagtcttccctatatgaggtgcttgctttattcaatttcctgttcttttcctcctcaggtgactggatggccggaatcccctcacacatcctcagcagctcgccatcagaccagcagattaaccagctggctcagaggctaggcccggagtgggagcccgtggtcctgtctctgggactgtcccagaccgacatctaccgctgcaaggccaaccatccccacaacgtgcattcgcaggtggtggaggcctttgtccgctggcgccagcgttttgggaagcaggccaccttcctaagcttacacaagggcctccaggcagtggaggctgatccctccctgctccagcacatgctggagtgacctgacccccccccgcgccccccccccacttgctgtgggggtggtggggcgtgggttcccaagtcacactggctgaaccggacttttctcagcaggtggctttgttctgggcttttcagtgatctgtttacggaaagagatcgtccaccactcactcaaccatcgattggctttaattgcttgaagactgcgctgttgtaactatggtttggaactttgtggctggcctttaacaggaggccagaaaaaacacaacacccaccctacccaaccccccaaaaaatcatgctacagcatcgaatgcaggtgtcctgcatacaaggcagctacacttgtgttgcctggagactggattgtgcatttagctcttcataatggtgatgataataaaaaagcaaattgtgatatagaatgtgcctctttcaatgagagagtattatatcacacacacacacacacacacacacacacatacacacacacacaccactcttctgttgcatagacggagggtgtaaaaatatgggagtggagcaagattgatagcagtcatgtgacgacggagataaataactcaggcaggatgtatagattaagcatgagacaccgaagctccctgcagaggccagggagagaacggaagaccttcatcttaacaaattgtatgaggagtctctgtccatttgttaaaggcattggatcagagacaagagggctcagtgtttctcttgaggcctgaatggctgaaggcggtgagttcccgaggggcgtcatgggttgtccagcctttcattaactgcacatagtgttagccagacaggtgtacgtgtttgtcatcccatctaagagactgaagcaggaggatcacctgtacatgactgcttctttcaacattttaaaatgtgtaacttctattaaattctctcagtgcaaataaagtgcgtgtccattgtgtcctttcaaaaacctaacaatagataagatgaggagaagcaagagtctccttgtactccccgcagtcagtcagctttgctctgctctgccgtcagtttcttagttaagcccgcccgcacatcccttctgcagctggagcaggattgccctgtaaggctctttaacacttggcttccttgccttaacacatagcacttgttccaatgccaaaggcctttacaacatcctttgctcttagagcacacttgcaagagctatcgttttggc

SEQ ID NO: 19217 - DNA, 1147 bp, Mus musculus
gcgtgtaaggaggggtccaggtggaacagtggacgacttgatttcataaaatcgttgctgttgatttattggacagcagtaacatcttcattattcagattgcctcatggtcctttttaagttgcagaactgacaaatactgaaatggtcttcgacactgctctagagtcttggcagctgacggttctggagtcggagacaagggctgtgggacccacagctcttcttgcagggtcttttatcttctcgttgaatcggaaaatgaagcaggggctggtgactgtggagtacgctaagtaaactgtgatgcagctggccagcaagtgtcatacagatgctgtggcacatatgaccgcgcctcacccttagcaccgctgcggtcatcttggatgcttagagtccctctcaaacttcccttggcctctgtctctggcacactccagttcctccacctttgcatatgcggttcccttaggaggggctggaccaccctctttacccagcattctcttttcaggagctagctttagcttcttcgctccatggctcacatccagttagaggtccccctccccgccccccgtagaatgtcagtgtctgtacagtggcacagttacagccacacacacactggcactcttcagaatcctgtttagcaagtgtaaggtcaagctctccccagcacctactcctacgctgtaggcttggctgggatggtgagacagctcgaatggcttctagtctcttctcccatcacatcttgcctctatggcttgtttttttcctcagggagaggggatgctctggcttcctgcttctgtaccttctattctgggcgatgttttatattgaggctgccaggagagagaagctgtcagtttggcctcgagcccctccccacgacccttcaaggggagcagcactcacagcttggagcagcacactgctggcccccaggctggtattgaggggagtggttttcagccagagctcttgataagatttctgacaaaaagagacaggagtttaaaaaacaaaaacaaaaaaaaccttgtgacaaaatagtgtgtccgtgagcatgatacatgtttgtctgtctatatacacaaggaggcagaattaagcaactatccatggatttttcttc

SEQ ID NO: 19218 - DNA, 1243 bp, Mus musculus
catgtgcttagcagtgagctgagatatcccatcattactgggatgagatccccatcattactgtatttctcaaacagataaccctgggggtggttttagaaacttatcgattttatgggaagaaaaacaacaacaacaacaacaacaacaacaacaacaacaaaaaaccccaccacatatctccaaatcaataactaaatatttctcataggacatcaagaaatagaaattaactcatttctgttatttaaattattagtggctccttataggccactacagctttgggtaaaatgagcttgtctctgtagtcaagagtagtaaatgcagtgggtgttttcacagatggcattttgcacatgctctgatttgctgcaagcctaatttataggagtatttggccatttattttagattttctgcagcttgatctgccagttagatggactcatacgcaaagacctcaagccagcggtgccctagacagctttgatcctttttcttttttttcctgcaggaaaggaaaagcatgggaccttgggagtggatcagtcatccaaattcagataggtgctgttgtctgttgtgattctgttgggctctgttcttctgagagatcctcagaggtttccaggaactcaggggctaagaaatatcttaccgagaatttgaaaatatctcggcatttaattttgtgtgagtgtagagtgttttatgactctttaagttttgaggaccagcaaaatagagaagggtattgtgttacatagtgtgctagttacaaatgtttgcttttattgcacatgatgtaaccagagtggaaaaaaaccacagcagtaataatcgttgatataatcttggcttgaaggtagggggaacacggggggcaagggaacagcacaagagagaaaaatatctgttaccaattacagcaaagttactacatagttaaaaagaagttgtacatatgaataagaataggatgctctgctaactcaatcaaaagggaaccgctcgttttccttaggtacttgatgagggagaattcttcctgcacgatttgcttgaagagtggattattttgctttgtgaacctcttcagtccggtccttacagaataccatttggctaatttgaaacggttccagttctgggcttggttgaacactgccagccaaaagcctgcctgtcgtcttccattcgcatgccttcctgccctcggtgcccccaacccctatcctgc

SEQ ID NO: 19219 - DNA, 1213 bp, Mus musculus
atggacgtttacagtacctaaacacacacataataatacttgtgagtgcttttcatgtaaactctgatttcagccttggagaattttgaatgtactaaacataactactctagatttcaattttcagtgagaaaaccgggtctcctgacttccctgtcattaatgagcttgcagcttcttgtttgtaaggcaaatgtaaatgctttcttcatttcttagaggtctgagtgcctctcacatcttactaggcttgcttttatattttaatttactgtttataaaattggattactattgctttataaattctatttttttctttcagaaaatggtgtgtgtgtgtgtgtgtgtgtgtgtgtgtgtgtgtgtattttaggcaagcattttactgctgagtcaaaaagtaattagcttcatagtcacttgaaaacaggaaaattgggtttctcttgaacttgtcttgttttgaaagaaagacatttggttctttccttctgctgaaaaggttaactataaattgcaacaaaagtcataaaaacatagttttggcagaagcttaaatggacagtctgacagactggaggcatctgacaggatctctctctctctctctctctctctctctctctcgtggtggttctgttggaggtttctctgacgattctctgagaacaggaagcaagacttgatttttgttttgttttgttttttttgtttttttgcttttggctttctgttttgtagaatgaaaaactttagcaaggaaaaaaaaaaagaagttttctcaactgtatacttaaacaaaacaaaacaaaacaaaacaataagaacttttcagcccaagaacttatggtattccagagtttattttcaagttacatacttgatattaaggatatgtttttctcaaggaaataatgttgtctataaagtattttggattttcaataaacccaaaattcaaagaagttaaatctaaataaacacaggacttcaattttgcacccagacccttgtgggacctgtctgtgatgtgagacctgtctgtgatgtgggcaggtgatgttggctcttgggaggttaaggaaggaggattgctgagttcaaggccagcctgggctacggtggtaggttttaaaacagcaaacaaaacagattctgctgcattcagatcttttttaaaggataatatgtgtgtacagcagttgttaca

SEQ ID NO: 19220 - DNA, 1231 bp, Mus musculus
ctgacacaaagacaatctcttaaggtggcagattttctagaaagaattttattttaaggaggaaaagaaaaaaaaacaccattgaaaacagatgttgttcttctacgtcatctaaccactggcatcttccatggagcaaaatttggcaggaggttttggttctgggttccccaacccccagagcacaatttccaacagatgctatgcactggaaacaaaatttaaaacagggaaacctggcttgtcaaagttcaaatctgaggttttccaagtttgtgttccagatccagaggacatacccaaagaggaagccatttgcttgattcaggcccagggtcagttgagccactcacctttggcagcaaaacccaccaagatgtcaaaaatatttataaccaaagatgctaatttaatgctgcattaaaaaataatgttaagaataattgtgatgagcaaatgccatatctaaatttttattcttaaatttttcaaaagtgtataaagtgaaatatgatcatatcccctgctactttttcctccaatttcctcaaatcacccagcacagccagaacccaatttcatgtctttttttttttttcttttttaataacccacttattggaggagggtctcgtgccccgtggtgtatttagacgctgacttctgtccctcgtgatctggttacattcgggatgagggcattgtcatgaatattgaaaaatctcctgtatcaacgtagtgtaaagactgttccccaactacctctgattggttaataaaaggttgaacagccaatgactggccagaggagattgaaaggttggacttccggtcccagccaggggtctcagaaaagagccaggaggagccccgaggcaggtgaggaggtacaggaggcaggtagaagaagaggaagaagaagaaaggaaggagaagggggaagggagggggaggagggagaagaagaagaaagtcagcatgaggttggtgtgaggtgcagtcactaagggagttcgacttgaggactctccgagggagagccctttcccttgtctatgctggaagtttggctggcttaatcttactcacgtcttgtgttggtgactaaagtcaccctgcgttcatgagctctgctcatgtaaagaccagaagcttgcccttcacagcattcctccccttctctggctcttacgttctttctgcttatcttccacaatgctccccgagcctt

SEQ ID NO: 19221 - DNA, 1183 bp, Mus musculus
cattggttaatctccacaacagccaggagcattacagactccttttattgaaaataaaacagatgcttgaagatggaaactgtagcgcccagcaatactgccctacgactaggagtctgtacctgtatggagactatggaacacaacgcagggttatagctatgagtgacaccatgctctcctctcctcttagtctgataaagcattccttacatgagagaactggcttaggcttgtgctgtgtactgtccttctggactccctgggtggtaggacttagaggtgaagagtgagagatgtgtggcgggcaggcaggaagcaggtgcctgggagaggagtggagaggcagacaagatgttcaagtttgtcaccgggctcagatttgtcccagatttgttccagattaatttggagctctgggtctggaagctttctgtttgataccagcttccactctgggcgagctgagccaactctgccttttcaggaaagcagggagcagtggcacagtgggtgccattctgaactgggaatgggaagagactatttctagttgctttgtcttggaccaaacgccgagcttcttagaggctcagatactacatgtgtagaatgtagagcttgcagtactgatgtctacagtcagtctctttcaggaagttaccctcacctatgagcacatcaggatgggaggagacagaggggcaaactctatattttgttgggtggtctcagattgacttaagttttagcatagatttttgcctctatgctatcataggctctggcttatttggggaaagagattctctctaccctaaattgttttttcccttttcacagtcagagtcagtagactgtttttagtatggtaagaggaattttatgttgttttctgagccatgaatctttgagccctggcctgtattcagagtatagacttgggcttttagatcctggctgtgatggaggaggctctgatgctgggaaccgaactgtggccccggtcctctgcaaaagagcagcaagtgctcttagtcaccgagccatctctccagcccctaaccatcttttgtatttggtggtctactccctggctccatcaactgatactttgtttctggcctccttcccagctgggactataggtatacaccatcctataccactgatactttgtttc

SEQ ID NO: 19222 - DNA, 1231 bp, Mus musculus
ctgggtcaaaagtccaagctccataggagagaaagaaaggcttccatttccaggaggacagctgaaggagggaaagaccctggctgacccaggcttcagctccacttctagacgcctggggttcagtctgtgttagaacctgttatagtttgcatcctgatgtatctagtaggagttccgttaagctgaccatgcttgtatttatccctcgtcttatgcaactaatcaaatcaaccaaaaaaaggaaaaaaaaaaaaaaaaaagaaacgaaaaaagaaccatcaccatgagatcctgtatttgtctttttttactacacgtatgacctcccccgtgagtgagtactgtagtcctccatctcaaggcagccttacttcagacacatttcaaactggtgcaaacagaaaagacttctctcttttcttctgaggctaaagacaagaatgtcacgctatacaggtgcaactcaatccttgaaaacagaaaccaatgcagacagagacattttaccccttgatgtagctgtgagtcccaacctagtgccattgtttttatttttatttttatttttggaaatggctttagaactttccaagttatccttgaattgtctgaccacggacatcaacagctgcctcccttctaccatgtagaatcctatgacttaacttttcttccagatatagaggggtacctgcctgtttttcaaagtgtttatttactgctgttactatttgattagaatgtatcaaataaaaacaaacctgacttttacaagttgcactcattactttgagttgtaggtgtacatttccatgctaataaaaggtcgccataaaaactcattatcaagtgaaataaactaagcaatcagctcagggtagaacattaactcgcttgcctccaaataaggcccacacctgctctatgtgttttagaaagcatggttcacaggctaggaatcgtcaagacagcctgatcatgtgcaggccggatgggcacaatccttgtgcatttcaaaagcaatggtttagaagcgataaaagttacgtcagggtctaaactctaacaagttccgcagccgctttctcttggccacccagtctcacgactgctgtagcatgccatcttctctagagtctagacactatgcctcttgccgccctgtacatgtttcctggccgggccgtaggttcctgtgtgtccagggtgaaaggagaacctggggcgt

SEQ ID NO: 19223 - DNA, 1160 bp, Mus musculus
ttgtaggctgtgggcttaaagcattacattgaggctgacaagtaattgcccgatgactttgacagacaaatttgcctatcttaagcatgagcttttaaatgggagtgggaaagagagaaaagcttgttcaaaggaaatagcaattaaagatgttcccagcaagttgggaaaagctaaaggaaaaggcagaatttgtgaccacgatgtctagagagctatttgtaaagatttagtttgaattttgtgtgtgtgtgtgtgtgtgtgtgtgtgtgtgtgtgtgtgtgtgcgcgcgcagagccccaacgaagccaaaaagagagtgttgaatccccaagagctggagccccaggtaattgtgagccatcttatacaggtcctaggagccaaactctaaagagatctgtgtgttgagtgtatgtttcacaagaaacatactttcatgtttgttttagaatttttggcatatggatactcacgtacttgttgtctgggagtatattaaaacaaaacagaaaagatttgacttttcccaagaatattcctagtaatttctggggaagccaggtgttgtggcttaggcctgtattctcaacattctggacgttggcagaggttgatttagtttgtttgctttttagaattccacgactaagccaggaattgtgtttgttgtttattgatactcatttcttttgcctgcctcgattaccataccattgcagcaaccagacctacagtgtgagagcctgtctcagaaaacaaacagaaaaacaaacaaacaaacatcttttggagaggctgaagagatggctcatgggttaagagcacttgctgctcttgcagaagacctgggttcagttctgagcacctacctggtggctcacatccatctgttactccagttccagagcatctgatccctccgggcaccagggacccttagtattcatatatatgcatgcagacaaacactcatacatgtaaaataaatggctttaaagccctttgaacttgcacttataattattgaaatgacctctattaaaaagtaactttctctcccaacttctctcccatgtaaaatgctacctttgtacacactacatcactgttctaaaacaaatctgcttgcagctacagaactgcctaattaatggact

SEQ ID NO: 19224 - DNA, 1208 bp, Mus musculus
gtattaaaggcgtgtgccaccatgcccggctagccccagtttttatccccttgaatataactggtcctgggaatggccctcagcggtaccttctggagatactgaagcatgcttccccatccacgagtgctggataggctattaagactcagtagtggggctggagagatggcttagcagttaagagcaccggctgctcttccagaggttttgagttcaattcccagcaaccacatggtggttcacaaccatctgcaatgggatccgatgtcctcttctgttgtttatgaagagagcaacagtgtactcatacaaaataaaaataaaaataaaaataaaaagttcattagaagcactgggggtgcatatctttaatttcagcactcaggaggcagaggcaggcagatctctgtgagtttgaggccagcttggtctataaagtaagttccaaggcagctagggctgtacatagaaaccctgtctagaaaaacagacagacagacagacagacaactcaatagaatggcagtggacttgacagaaaccctcccctcacgatgtctgcctgagcttcttgtgcttctgttccttactgtgagaatgtcctgtgtcgctgcaggttcaaggaaaactggagaaataaacccagagtagactcaaccccgaaggggaacccagaatagagctctccctgccgacctgcagatctcagcgggggaaaaggtgataccgttgtgagccactgagccatttctcacacagcgtgctcaaaatagaaacccggtggagaaggtatccttcccaggcagaggctgagaaatgagaagagatgttagaaaaaggccaattaatgctaagtatcgatggtcggtccccatgttcaaatccagccaacagttattaaataagttcaccactaagcttcctaattagaatccaaactggaatctagtctgctgtgtctcaaagtcctttccgcaatgggcagagaactttggagcctgcgtttgttaagctatgactgtatgttagtgtctgggtaaaacactgtcttatgttttatttcaaacagtcctttccataattctgtgctttcatttcctaacagtatccccacttttcgtcataggaacggaaacccagagtgggtaagtaactgtcagaagcagtagaggctgatgacaccccaggctcacactgaaaagcca

SEQ ID NO: 19225 - DNA, 1152 bp, Mus musculus
ccactgactaaggaaacctccctagcccctgtcatctgtgttctaaaaagctctttagattcagattcgggttgacatttgacaaccactagagagaggagcaagctgtccagagctgaactgtgatgccacgtgccccacagaagcacatgtgtgtgtgtgttattaacgtgttgttaacgtgttccctccagatgaacctgcaggaagcaatcagtgagcctggggtggccatggaggggccaaagacatatacttctgcaaagaaagccaaggaaaaaaagaactttgcttcatggccgcctctcttgcctgagtgtcagctgtttgacatctttccactcctccgagcaacacagaagaacatggctctctcagaagacgaaccgggcatcctcccaaaactgtcacaaaatggcacatcctgcagtatttactgatcccctgggaaatgctaaccagaaattgggtttgcttcttgacttgtgtcttcacagttgaaaaccttctaaaatggacctgtcgctttgccacacacagaccaggaaaaccctaaggggcaagaacttggaaagatttcggatctttatgaagcactctgactcaaattccgacttgatttctggagagacgaaggctgggagtcactgagttctcactgacctctgagctttgtgtgtgatctcagggggacatcgtttgtggcacatcccagtgtgtacatctacggctcatttcccatttatagctgacatgtgaacgtcagctactgggctggcagttgccggaagtgtggcacattttaaaaaacacggagacacagctgctaaagtcactgttgtgtccctaaaaactgaaatggagtgctcaatgcactggaaggaagaaaacatcatcctaacagccatggcctctccaggagcccccagatctctggttcttgttttgagcattagctctttccattagccagtgtaggcagccctgactctatgattgggagaagcaacacaaagtgaaaatagagatcttctgtgtgaaagttcctttgaggtgggaacattgaagcaagtgagaggtctttttgagtgtggagccccgtgcttctgaaggagtctgacccacgaagatagctcggtgtgtaggagctgg

SEQ ID NO: 19226 - DNA, 3988 bp, Mus musculus
atactagaaaacttggaaactgttctttttttatggtccacttaaaggatatagccatttatagaatcaacaaacttcttcctgctataaacatatcatctattcaaaaatgaaagaacgttttctatctgttgaattttatgaaaggtttgaagctagtctagtctatatagtgagattcttagaaaacaaaacccctaattagttgcactgttttggtagtaaggtattcagaaaactggtctgatccagtttataggagatggtatctatcttgtttggaaagaaactaacagctgcatatttgttttttgtctacagcgagagcatggactaggctatatgccatgaacaatatttaagtcgatcagatcatcgagtgtacaccacttctcctgttctgccaagacttcttcctttttttgtttgcatttaatggacacagtcttagaaacattacagaataaaagcccaggcatcttcatctttggtgattacatgcacattagcaaatctgtcttgtcctgattcactgttgtaaagcatgagcagaggctagaagtaccatccgggttgctgagagatgctgagaagcaggactctctgctttgactccttccccatcatggttaaagtacaaggcactgtgaatgaaggtagttgtcagggttagctgccaggggtatgggtgttattttatttttagggggaaagtagttttattttaattttatggcccccttccccctcccccctcttaaaggatctaattgcagtggttaaatgcagctaaccagtttttttagaatatgctctctagccaagtctaactttagacgctgtagatggacaagcttgattgtctgaaccaaaatgggaacattaaataaacatcacagccctcactaataacattgtgactttgctgtcaagtgtagattctccacccccacccccaccccgaaaagacgaagaaaaagcttgtgaccattttgtatggcttgtctggaaacttctgtaaatcttatgttttagtaaaatattttttgttattctactttgcctttgtacagtttattttactgtgtttatttcgctttcccgatgtgacaatcgtatttaaaattaaaatggatgggacattctgttttagtcctctccatctgacaaattggcaagaggagaattttaccagtttgtttcattgatgcagatctgtgttaggattctactgagtgagtatttataaactggctctgagcatgcatgaagcatcaatatctcttttttttcttaagcctcctagaaatttgaaataaatattacctgattcaattaggtgatccttggtgtccttgccatgtttgaaagttgaccatactcagcagtcacagtgaagagggcagttgcatgtcacatatggcatttgagcttcaggtgtaggttatgacttctcttggttcttgtctgaacactatatgaccattggtttgtgctattaggaaaactctagttatttgattttgctgaggcagttttgagtcctcctgcagacctaatgaacccggcaagtggtgtcattggctcttcagttcctgtgcatttgctatgtagccctggctgtcctggaactcactattacagaccaggctggccttcaacccagagatctggctgcctcttctaggatcaaaggccactgtgcccagctattccttttatcctttaatttgctcttagtagttgttttttttcctgtgtaaaacaatccctttccacattttctacatggaatttctgattcttgctattttaaagtcgtatacatgtaaatgctaaccttatggtcagaaatcttcatctccataatcttcatgcaaggttatggatttcttcataacttaagttttttttctcttttgaatgcagactattttattgtgttagaatagaatttaatagaattatctattaaaattatattttcaacatataagagcttttgacaactgataactggatccttccaaataaatgcattttgttaacaaatgtaaagtttagaataaaattgctaatggccctacctgatactgtgaaattttaaactctctaacagcagttgttacaattcttggcctgagtacatctttgtccatggctaagacagttctcactttaaaaaagcagacttgacaggacttgaagttaaccattcaccactcagcattccatcctgaaagccagagctgctcctagtcatagctgatgccttacacattacccacagtggcctggtgggcagaggtttcagttttcccagtttacattaggactcctaatttcctggcatcacattttctttgaaggttttgatgagtcccattgtttgaaatttgctctcttagccagttggaagaagcaagaattgttacttatgcctgggctgaaaagaaacaacaggttgaggtggaggttgaactctggtaactacacctggcttatggacctgttttcgttggccaggaaaatggttggttcagagctgttaaatgatagtattgcagaaactcgggatagtgaataagacgtagcactaattagactgatgatcattgtgtggacatctcctggcaggagctgagtagcagttaccactggatgacatgccattctctttttctgtttaaagtaggtcggaatcattcccagcctacctgtttctgtatgtgtggttctgttttcttacaaagttttgactttgtagccccagcaaaagaaagacattcacttaacaaaagcatattaacatttgcctgctgcttgctggtttgaggatgtagatgtgaatgaatagtttgggcctttcctttgaagggacagcataggcgtgggaacaacacaatagttgcagctcctcttggaaaggctaatcttctggactcaaatcagacaaacgcctccaacctccagaaatctgcacatgcagagctcagagagagaagaaaaccaacttcttccaaattggcatcttgaagtcagttctgaagccctagagtataaatgtgggctttgtggtttgaagtttttgttctcttttgttgtctattttgctgtgattcacttctactgtgagattagttagccttggttcactcagatcataggcattctgtatataatactgaatactcacactagaccaggaatgtacttgtaagataaagttcagtgtaaatcgatatattcaaaccacaggggtgctgtgctcagcatttctccggagggtggggaagaccatctggtgttctgtaagagtgctcccagtcagccaagtagacctcagtggtgtcatgtggacagttggttggctttgtttccctggtggtttaggtattgttctcttgactaatgtaataacatcagtttttattactgcagaatcggaagttttaggactacataggagagctatccacatacaaattacgaagtgagatgagaaattgggtacctaacccactattccgtaagaaatatgtaatatttcattggaatgtattctggggctgggagcaacatttcatttagctatgaagcatgccgccttttaaggagctatatcagggtttatattttaagtaaaaggaaaacatgttgaatgtaatttcaaagaagtataaacaataaaaacgtataccgattggatgtgatgatttgactggtctgtttcctgcactgctcactcacctccacactcatttcattatcactaaggctgggcatctttgctctcagggttagcctttccctctacacacttctgttactagggattgaaccttttcttgtgtgagttaggcaagtacctccaagatgatagtcatctatcttagctggaatcgtccaggaaggtattaaaaaccagggagaagctgggttagggggcaaaatgactttaaatcccagtattaaaggctaagtaatc

SEQ ID NO: 19227 - DNA, 2953 bp, Mus musculus
aaaaactaaagctgggctgttctccgaccaatggaaattcctcggtcccttccctcccagataacaatgccttgtttgtgactgctgcgccgccctctggggtgccatccagtataagatagagggttggggtccctcccccatcatgtgatgcacatgtcacaaggagaggctctttcacttctaacacacctgactgctgctggcaaactctgtatttgctatgcagggatttcaaataatttgcatgtatttcatctgctttcaagtcttttaaaataaataacaaaatagcaaaaaatattttaagatgccaaagccatgtggaattttttttaaagccttcattgtaccccattcctttggttttcatttttataacctttttgacattttcacttttgtccacttaacattctatggtttgttttgacagatcaactggttattgggtatattttttgcccaatttttttttttcttacagtatcaaaatagacaccaaatctttgttgggaattaatgaaaaattcttggtatttaaagaaatctatccaccccaaaacttaaagagagtcatattctccctttgtaaactgcagatttgggccgtgtttgtatgggccaggagcctttgacaaagcacttcagcttcctgtttctgagaatttgttcacaggcagaattatgtcacggtccatgtactaggaccggttcccctctgccacagtgatttgatgtgaaagtgtgccgtcttttagggaaaactgtcagtacttacacgtggctctgcatagctcatcctgaaactggttatagaaatctatttagcacgctcagctgctatttcccttctttgacatagactctattaggggccacatttccctcaagggtgagtactctttaaatatattttcagtttctgatttagagacattgttcaccactggactagactaaccttggatgccggtcagtgacgactttgtcacactaaataagatggctgttctaggcctaagacactgtcttgagggtcagtaagtgacgagtcagatgagttaactgtggggaaactagaacattcgagccaagaattattgtacctcgcctttgtgctgactcaaaattggccatcccatgaaaaagtaccatgacttcatggaggaagtgaagggggagaagaggaaaagatctttagccattattaaccttttgtaaatactctaactggcaagcttaagacagtgaagacatttgttctgtcgcttgttaacctttaaactgtaatagtgctgctgacaagggtccttgcctgtaaggaaaactggcaccgtttccataatgagatcttgggccaccgatgcagcagaactaaaagcattagattccaaagcagaagaactcagccagtagtactcattctaaattatgtagtgtaaccaagcgtgatcgtccagaccttttatatttttctttgtacagaggtcatgtactctgggtgttttaaaagaaacattttaaagaaacccacagattgtcattctctatcttgttttctcacgattctctgcaattcttccctgtactaaacacaacagagaaactggactgttttgtatagaatactgcttccagcaaataaaccatcacaagtgcttgggggtttgtatgtacacgatactctcagaggtaataatgcatgaacctattttatatgtaaaatatgtacagtattcatgtcaaccatctctttaaaagttagcctataaatattgttgtataatttctttggtcagaaacatttggactaagtcatgtcacctgggtcaggatttctttcagtgccatttagcaaactgtctttagtctatgcaaatagcaaagatttacagaatgcaactgaatgcagcttcactgttaaatttcacctgagggctcctcattattcttctggaacccagaacttgaaagatctaaaggaaattgaatctagtagagctcatgtctaccagcccagccgcctgcagcggggagactgctgtttgtgcttatctgtgcaggcgctgaataaaacggggcagctaaattctccagttccatgtgcctcctaatgtttaaaagaaaaaagcaaagtaacttgttaaaaattgacttgcaaaaaagtagaaactgttgggtggtggtgtaaagaaatggcattttcccaccaaggacaagccatccagttgtcagtcacaccgtatgaagcagcaaaggtgaaggagagaaaagggtatgtgtacaagagttgctttgcatggtctcatctgagatggttgcattcgaactgttgtaagaattgtaagaatcttgacttttttacgtttggaaacatcaaataaaaatggaaacaacctctgtatgtttatttttagtttaagaagagcctgttttcatctttcaggtacatgcttttacagggggctagagaaatggcttaagagtgtttgctcttctttgaaatgatctgacattggttccagcacccacagaggttcacagcatcacacacacaggtttcagagctatgcctttgctgtatagaatctgttccctcagctagatttatatcatgtgcagccattctatacttccatgtggcattctacagtaaaactcacatcagacttcatacacacacacacagctcttgtgcacttcgactaacttggattggtggcttaacgccatgaagtttcctaataggttaataaccaaaactagaaaaataacaggacattccttactataatttccactcaaacatgtaaaagaactagaagtttcagagcagtgattaaatgcagtagtttgggctgggtaagtagtaataacacatgcctttaagctctgggagacaaggagagcagcactgctatgctaatcaatcacaggttcaaagccagcc

SEQ ID NO: 19228 - DNA, 1181 bp, Mus musculus
ggactctaaaggaggagttagctcttacagctgcccatcacagactctttagaactttggaggtggcaggctggaaatctgatcaactggggaccacgtggtgttacacagtggggttttgtatgttttccttatatgtacaaaagaattgctgctgtccatgacccatgcggaagcaaggaaatggcttcctctgtgtgaacagttctgggggtgaggatcaaatccatgtacgtgataaaagattgctctgtcactgacctaccccttggcctttcatggtagaatggctgatgctgaacttactttctgtattgtgaaaggagtctggttgtgtatttatatggcacctttagacttttaattaatttattttcttctattgcttatttaatcttggaactctctctatgcagcacaacctggtcttggactaaaaatgcagttttgatcaagaagaaggaagactaaagtgtggatacttcagtccttcttagaatggggaacaaaatacccatggaaggagttacagagacaaagttcggagctaaggcggaaggaaggacaatccagagactgccccacctggggatccatcccatatacaaccaccaagcccagacactattgcatatgccagaaagactttgctgacaggaccctgatatagctctctcttgtgaggctatgccagtgcctggcaaatacagaagtggatgatcatagtcatctcttggatggaacacagggcccccaacggaggagctagagaaagtacccaaggagctgaagggttctgcaaccctataggtggaacaacaatatgaactaaccagtacacccagagcttgtgtctctagctgcacgtgtagcagaagatggcctagttggccatcaatgggaagagaggtcccttggtcttccaaattttatatgccccagtacaggggaatgccagggccaagaagtggaagtgggtaggtaggggagcagggtgcggggagggtataggggacttttgggatagcatttgaaatgtaaatgaagaaaataactaataaaaaattggaaaaaatgcagttttggaggaccgaagagatgactcagtggttaagaggacttgctgctctttcagaggtcctgagttcaattcccaacaaccatatggtcgtgcacaaacc

SEQ ID NO: 19229 - DNA, 1213 bp, Mus musculus
ttgtgttgacctcgtaggaaacatctggcttttctttattgaactgactccaatctcaccgaatagctttgcagcatgttataggcgatatggaggtttgcgttacagctctggtggttggaaagtgtagggagagggccactgaggcagatcagctgagctgtgccgacaggacatctgattcctcctacctgccatgtgcatcttccccagcactggcacaggggaatctcacttgtgtcactttatctgtttgccgaggaccttacaggccctcgtttctgcatctcggcttttgagcaagcctatttagatcacacatttgggttgcagaatcagaattgtggtgtttgagaaaaaagtctcccactgcctttccagaagaagcaatatgatttatagctttggcatcttaatttcagtgagtaaaatattattttgtactacttgtataatagcttctccttccctattttttcttagcattctgaaataaaagaaaaggaagcgggaatgaagaaacacgaagaaaacgaggctaagcttactatgcaggtcacaacattaaatgaaaacttgggtactgtgaagaaggagtggcagtctagtcaacggagagtcagtgagcttgagaagcaaacggatgacttacggggagaaattgctgtcttagaagcaactgttcagaataatcaagacgaaagaagagcactcctagagaggtgattgatgtctgatgaaattagtatttgcagggcatcgtggtggttgtggtggtggtggtggtagtgtaggtccacctttaataccagccctcaggaggcagaggcaggtggatctctgagtttgaggccagcctggtcaacagtgagttccaggactacacagagaaaccctgtctggaagatagatagatagatagatagatagatagatagatagatagataatcgatcgatcgatcgattgtatctattataaataataggaatattgtcattctaccttttcccactcgaccaaaaattgaggaaagtgtgtaacccctgcaggtatgtaagcagccattaaaaaagtcagacttaaaaaaattaaatagctgaattaatgtattttgtataaaattaccaaagtattcctttacctctattctagaaaggtctttaataatttcctaaatattaactttgtgtgtgcaatctgttctgtaagg

SEQ ID NO: 19230 - DNA, 3382 bp, Mus musculus
aaatgtaaataatctttggacagaaaatagcaatgtatttttttaaatataatttaattattcacaaatgatgactacaattccttagcttcttcctctcagagtaaatgtacagaatgtctggacggctcctatcatttgttgcggttttgttgcacaacgacacagtgattctattctcttggtggagtcatgcacaggaatgtaacactttctgttttttcctctataggtctgtagctcaattatgttgttgtgttatacatattacttgagtgttctaaatgcagtgtatgctaaatgatgtgttaaccatgagtttgcgtgtgggttttgtttgggcagtattgattaaattctcaagtagatttgataaactcctatgtaaaatttatggtacttctgggattgtatttatgaaatgagttaatttgcatttctctatcttatttctgacacccacacactgtcccctaaaacattgtatgtaacttccctttctgagctggagggtgagtagtagagccgtgtggtggcttggtcttggtttttgctggtggaaagttttctgaagtgatctcacagcgcagcctcactccctcaatttcagcatctttaggaagtttgctttccagccttcataaatgtagctcagcctcagtgcagttgtgcttgcagtagggcctttgtaaagataggaacggacactgctaatgtcgcatctgtacctgtgaagactaagtcaagtggtaaggaaatagtagccttcttctcggtacttcctctaaccaaacaggaaagactaaatacagcgacagaaagctggcgccatgtctctgatgaggggcccatattaacttgggatcttttaactttgaaaaaatagtgctatgagattacacaaccgctacagagcagagtccgtacagccccacctccatatacctaggagctcctaaatgatgataaaaaggaaaacactggctgctgctcgaccccttaaaagtcatttgtctaccaaccaataaacttgttcttagaaagcatcagaagactgaacttgccacatactagtttttaaattatctttctgtagaagaaatataaagttacacatcgaatcattacagtcatttagtgataatagcagagaaagataagagctaatatttcatttgcaagaaagaatttatattacacactgctgtcaggagtatgctggagtcttcatgtttttatgacatacttacaacattacacaaacaagagactgacatgtaatttttaatcatttagcaaagttaagccctgctttcagtaatgactaaggacactgattacatcccaggacttggataagtatatccttgagcttatatactgaagtgatacaatggctctatattaaaaataatagttgggtaatatagactgagctgtttatgctttttatataattgtgaatcctttccggtagtcctaattctacctttttggtttttgcatataaacactttgactatgttaaaaatgcagatattcacagcactactttgtgaaaattctggattaaaatatttgttcatttcatcctttaattgaagacactggagactttctttttgtgcatcctcacttcacaaaaaaatagaagtggctacaaagaaaacccgtatgtgtttatggtaggtttcctgttcccccaataatcttatgccacaggtcccaaataatgtccctatcacacgccactttactgatgacacaatgaagccaaacaaaccaccgttcctcttaactattaccaattcagaatggactggacacagaaatgtaagattttttttttctcgtttaatgaaaaagtcttgtgaattctttttggctgtacacttagctgtttgctagtagtattgtactgtcagtgggctggagctgccgcatacagagtcccaggtcttggctatcatgcacagttggcatcaggtgttggcaaactgcacaccccagcacagaaatgggagctgaaatgaggttgtgctgggttgtgcacagtaaactgtatgtagagagtgtctgtagtaggcagcaggggaagctgctgatacaggacttacttgttttgaagaaaggaaagaaggagacaaacacacaaacctcagtgcagtgtacaaataaacattttgttcaactacctcttaaagtggagttagctagtgtaatggtttccttatagtaatagtcaatagcaactgccaaatttacgttcccatgcctcttaaaaggtcttcatgattactttctatagctttgaggtccttccttgtggctacttttttactcttgcatttgcataagatattaccctctaagtggaaggcaaatgacagccgtatattttgatatttgtgacctgtttaattatagcagtttttttaatgcactttggctataaaaactatgggtaacttgatctataagatttaaatgtgccatcaatttagtattcctagacataagcttgatgaatgatcttctataattataatgtgccacatttttctgtgtcttaattgccctttgcctgaatttcaatgatcaaaatgttattgttgcacatgtgaatactgtgtataaaacttcctaaatttatgtaaagttgtataatatagaataaagaaatcccactgtgttctctctgtaagaagtaatgaacttactgtaacatggtccagccacaagtctgacattttatgctctctgaagtggatcatatatccatagcctctgtacatacttttgcatgagtattttctctgttagtttttgggttcattatttatattgtgtttactacttgtgatcatgtagttgtgccttatttttgtgaaagagtttagctcagtaaatactgtaatttctaatcccagtgattagaaagttaccgattataaataaataactgataaattataagacagcatttaaatctgtataaagaacaatggaaggatccttactgaattgccacttctgttttttaatatgttaaagatgatattaaagaccatttctttctagtagatgttatccaatgactatgattggtttgcttgctttaaaggagaacatgctattagctgttttttttaaaaattcaccaagtattagggctttgcccttggatacaatagtggccatgttttaatgttatataccttaagatagtaattaagttcctgatcccaagagaattcattaatgccattttggttgaaatgtctcctcttcatccttcagactaagtttgtagaaaatgaacaaaactaaaaagaaatattaaaaaacaatcaatccgacctttcattgtatatatacattt

SEQ ID NO: 19231 - DNA, 1240 bp, Mus musculus
gctttgggtgggctcctcttggggatggattatggaatttaaaccatgtcacagctgtgaagatctggcacaagatagagtggtaataatttttttatttctttctttttttttttttttaatttagtgacagtgccatagtttggacagtacctttcagtgatttaaatagcctgtgagtccaaggaaaggatcactttatttgctagggagtgaagtcgaagggtggtttcagtttctcccagaccttatacccaatttgtcacagcagtccctttaaggaaattctgtctttcaaagaaccctctttcgcagtcaaccttgcaggggaatttgcactattacacttgaaagttctcagtaacttttttggcagctcaataggaaagctcaatgttttaagcatggtagtactggaaaaatttttacacggagacttttacctagcacttaaaatgtataaatgtacataaagacaaacttagtacgcatgacctgggggaaatggtcagaccttgtgtttttggcgttgagagtagggagcgaccaggctctgccatggcagcaggctttgaaaagacccttcaaaaagacactgtctcaactgtggttgttagcaccagccagctctctgtacatttgctagcttgtagttttctaagactgagtggagtaaacttcttatttttagaaagtggaggtctggtttgtaactttccttgtactcaattgggtaagagtctttcccacaaaccaccatctattttgtgaactttgttagtcatcttttatttggtaaattatgaactggtgtaaatttgtacagttcatgtatattgattgtggcaaagttgtacagatttctatattttggatgagaaatttttcttctctctataataaattgtttcttatcttggcattttaatcaatctcttgtcatgattacagaggttcagctacaaaatatttttctcagacgtcttagatttgtaagctgtgtggatgtcacttgcacactggtcacacaaacacattgggagaggtgtaattagaaactaatcagaaggaactagaggaaggcttttagattttttaactcaggttaaaagcatggacacattcacaagctaatgatctcatgaggataaagacagaggtaacatcttccaaaagtggcgatgcccaaaggatcccagtcactgcttcctggggaagtgaagataacaatcctctctgg

SEQ ID NO: 19232 - DNA, 1200 bp, Mus musculus
aaagtaagctgaaaacctaagggaagaattcaccagtcgaggtcactgaaggatctaccggggttcatggagaaaggcatccccactaatgggtgtctggaagccatctgttctactgcatggatgactgcgtggtccttgacctcagtgaaggaaatgactaggtagaacgtgactgacttaggactaccggcctgaacatgtgactcagttgctgcttttggatgagcaaggaaaacagcgtcgtgaggtggaattggcttgcgggtttagaatattatgggtatcgagtaataaagaatgagaggattgatttcaacctcagaagtgactcttctcctgttgataaaatggtccgaagcagccttacatgctccagcacactcatctgatgggacaagcctcatttttggctgctgctgcttcttctttttttttaacttaccatttttaattatttattttatttaaggggatgataaataattacatcctttctccattccttttcctccctccagacctttccatacacctgttctctctcagattcatggcctcttctgttattgtggcatgtatgcatgtatatgcatatatatcctgaataatacaacctttagtcacagccccaggaaggcagagacagaggcaggtggatctctatgagttggggccagcctcatctggctgttagcagcaaactccaccacctccaaaacttaggagttgctgaaggctcagatgatcattggcagcctcagccacaaagctgtttatagttacagtgtgtgcacttgagacttcacactgctgcatactttgtaatctatatagtgtggctatcgctggcaggcgcttgcaggctggaaatctgtataagttgagatgctgatttaactggatttgcctggaataaagcactagatactgtagaggtatgtgtgtaacttcttaggctgaatcctgagtttctccgtgtgctcactcgtcactggcaacctggaccgccttatatatcctgagtttgtaaatcttaaaggcagggaacttgaaatggcagagcgcagagcgtaccttggtagagggatcaaaatgctgagtaaaattgatcgggtacaaaaaagaaacctgaaaacatccacttggtattttaaaattgccactttttgtttctttccgaaaagtttgtggagaagt

SEQ ID NO: 19233 - DNA, 1111 bp, Mus musculus
gttctgtagtgtcctactaaaatattcatttttttacagtgtattgcaagttccactgcattacatgcaaattcgattcactcatacctagctgtttgtggattcaaactcataagtgaaccattactgtggcgaagttcctggcgtcctgacatctctctgtgttttgtgctgtttacagatccgagtggtgaatgcatttcgtagttctttatacgaagggttagagaagccagaatcaagaagttcaatccacaactttatgacacaccctgagtttaggatagaagattcagagccgcacatcccccttattgatgacactgatgctgaagacgacgccccaacaaaacgcaactccagccctccgccctctcctaacaaaaataacaatgctgttgacagcggaattcaccttacaatagaaatgaacaagtctgctacctcttcatccccaggaagcccactacatagtttggaaacatcactctgattgtaagatgaatggtaacacactagctgcattgtaaagaaacaaatcgaaactgagtcttttcacatattgtgacggacaagatagtattcttgtctctggacttcaacagaagacacacttgtacgaatgtagatttatttttttaaaaaaaacaaaagcaaagctttctgccagactgagggtgcttttttggggtgtgggagaaacgaactgacagatgaacagcggtgactcggcaggagtggcctgtgggtcgtcagtggtacctaacgttgtcctgactagcagagctgtggtttatctcagttcttgatgggagggagggaggagtgacgctgggtgagacagagagccctggatcattgagtgaatactttaatttctgctgttggctgttaataatttggattatttatgtttataaatgatacagatctgtttacaaggtttgtagatactttttttgttcttcatagacgggaagcttccttatagtaatgcagagaaaaattagtccttcaaatactgctgtattttcaggaaaaaaaaggggggggtgtttctattgaaactgtactaaatttttgcctacaatttatcttgttacatatgtag

SEQ ID NO: 19234 - DNA, 2487 bp, Mus musculus
gaaaaaagaaaacaagacaaaaaaaaaaacaacaaaaaccatgagcagtggtgttctaatgaagttatggcatctgtcctaattagtttcttaaatacatttactacttaatggttttgaaagaactgtttaatttttaaattttttgaaaacttgctaataaccttttgttcagaatttagtagattgtttattgcgggacatcaaatacacaatgaaagatgcttgaaatgcctttgttatttcaggccaatcaaattaaactatcaaagtacaagagaaacctttagtctttttttttttttgtttttgtctaaatatgttagttcagtgatgtcttagtgaactgtgagtgactgcattgatttttctaataactgcgtagagaccttcacacagcatagagggggctgttggcattttgagaaaggttaatagagagaggcatacatcgtttccttttgtttttgaaacttgtttgtaaacataaataaatatgcccttttattaaataaatacacagcaatggttcttcagacagctcagctccttggttctctacgtgtgccgcattggcctgtctcctctaaccacaactagaataaatttcaagctggtggcagcctcaggaagggctgtttgaatcctttcttggtcaccccatggagtcgagctgagacagcagttttgccacctagcacacccttcatagaatctacttttatctaaagtaaagtagtctcgccattttatacgaagtaatgaccacagttgtctgatgtatttgttttttattaagtgtcccagtcacagattagattaaagggatggcgcatgaagatttgaggaagcggctaaacacgatctctgtaataaccaactctatgccgaactctatgctcatctctgagacaattgaatttccaggctctctgcttcttttctgtctaccttcttcctttgtctgcctctcgtcttgaccttttagaaagtggtattgtttcagggcgcagatctcgccagttaaacaatcctcaggctgacctaaagtttacgaggactactacatccaagaatgctgacctagcaaagaaacatctagttgatggtgcttgatatatatatatattttttttttgggcgggtgggaggaatctttttctccccatcagttgcctgcagtaactctctgcaagtcttagaaacacatcggctctgtcccatcgatcactgtacatttttactcatcaggtgtttgtagttattcatactgtaaaaagaggtagcatgatatgctgggacgcatatttagaccaggagcccaaggtggactcctcgtcttgaatttgccattaacgtgctgcatgatcttggggcagtgactcaccctgacggagggtgggggactcctcttgaagaaccctttcaactctaagaattgaccctatccactgaagaagcctgtgaggcatagggaatagagaaagggaaatgttctcagctttcttttttattttggttatgcttaaatatgaatgtaattaccaagagaatgagacctgcatgtgctctggagggtttgtgtctagcttttccggttttttttttttttttccaaaactcaaggcaatggctttttaccccacctctaaatccataagtgggtcttaggacatccgtgaagtcataatagcaaaacacgctcggtgtgcgtttctctctttgagacactgtaatttctaccagaaatgtccacagcattatgtaagtaggaaaaaaaaaaaaaaatacaagcaagctgttaaagatcttggatcccattctatagtgtgtatacctaaatcaacatctgtaattcacatttttctcttttattctctaaccaaaatcagaaagaaaaaaaaaacttgtttaattttgcatcccaaatgtttttaatctttgtatattttttagactcccttttctccccatcattgcctttccgtggttgtaaatagttgtcacactctgaggatgagttacgtcttgtcatcttacaaatatgtgatatggtaattttcataacagattatcagttttgaaccaagaaaatggtgatttgtttataagagaaaaaaaaacaaaacaacaaaaaaaaccacctggcttcatttctgtgaaattgctctttgaaactttcatttccacgtgtaagccaactgggatactaccgtgatggtgttgatttcttttaatgatgcttaccatctcttttagccactgagccttttattatttgtctatttgtaaagtttatttgtcttaactcatttaataaatatactgtttatctgtttctgaatggggactgaactttttgacccttgggatgatctgaacaccatattttggcattccttttttcctacctgagatttttgcttttaacctacgtaatgcagagtctataaaatacttggaatgttaggatgggtacggggactc

SEQ ID NO: 19235 - DNA, 1321 bp, Mus musculus
gacgccgttgtttttttgttgttgttgttgttttgtttgcagactgtttcaattctggagcagcgactgtctttgacagaagataagctgagagactgccttgagaatcagcaaaagcttttcagcgctgtccaacagaagagctgagcagggagggccgtgagcgaggtcaggtcagtcgccagaagacgggctcacacactctggaggtagccgaggccttccacacccctgccacgcactaaccgattcttcagagggtgagcaacgaaaccgaaaaggttccaggcattctcagggactgacttaaacacacaaatcaatgtcaaggatcaagttatgctcctcccaggtctaattgcagtaataaagttatgaacattttaatcaccccatttcccccctcccccatattatttgaaatgtcagcttttatttaacatgcagatccccaccaggaaagtaagcggacctctagattttattgttgcaccatcgcagaatgaccatgcccaggcagttcctgaaggtaatgaatgtgtttcttaggtgagcacagccttgaggggaaaccattcgcttgctttcagatagcatctgagatgtagaaaactgagctggctcgtagttctttcaggtcaaaaagagtctgccttgaaaccatgctccctccctcagtattgccacagcaagaatcagctgcttgtgattagcaagcgtgctcacgtgacaaggcaggcgttttccttgtctggtgggaactgcatgggacgtgcgcatctctggtgttacaggtgaacacactgagtggtctgggtcatactgaacctgtggccacagctcacagagattatgcctgtgtgctttcagtacgctaaaaagccaaaatgatgaaaaggatgcacacatgaatcacatgtattattgcttaaggtgattctggtggctgaaataagtgcatttttatttaggaaaaaaaaaagtgcatcgtctattttagtttaatgaattgtgatttgaaatgaaaatgggtcaggcattctaaaagatcttgaacacaagttaagaacgtttctctatcttaaacaaaatggaaatcaaagttaaaaaaaaaaaaaggcaaattcaaggcagctggctctgggcacacagaacaaaggccggcacggctgtgtagcaggggcagatgccatctgtgtacagaaaaatggagaaacaatggtgtgggaatggagaggttgttctccaagcggtttcggttttgtgcctctgagctgcttttctcttctgtctcctgtgtgttgtaagtgccttctctgtc

SEQ ID NO: 19236 - DNA, 2219 bp, Mus musculus
attactcaccaaggctaagctgaccccatttctcaaccgactgagcctcttggaggaacgtttattacgtaatcactacccgtggaagaacagagaccgatctgagcctcggagggctcagacatcaggacatcagcatcccaagtggcttcgttcctttgaaaaaattgctgtagcacttagcagtctgcttaaaggagggagagaatcacactttgatctctgataagcgcaaattcaagtccttgagctcagcctttcaacatcactggcggttggcgtggtctccatcacagtggcggccattccgaactgttgtcgctgcagctctctccctttgatcccatcctgccaggtctcggagttcgcctgccatggctctacttactgcggcagcctggttcttgggaaccaaaaacccaccctgccttgtccttgccgcccggcatgccagtgcttcttccacgaacttgaaagacgtgctgaggaatctgatacccaaggagcaagccagaattaagaccttcagaaagaaacacgggaagacagttgtgggccagatcactgtggacatgatgtacggtggcatgagaggcatgaagggacttgtgtatgagacatcggttcttgatcctgatgagggcatccgtttccgaggctacagtatccctgagtgccagaaactgctgcctaaggctaagggtgggaaagaacccctgcctgagggcttattttggctgctggtaactggacagatgcccacagaggaacaggtatcttggctctcacaagaatgggtaaaaagggcagctctaccttctcatgtcgtcaccatgctggacaattttccgaccaaattgcaccccatgtctcagctcagtgcagccatcacagtcctcaacaatgaaagcaactttgcccgggcatatgcgcagggaatgaaccgaactaagtactgggagctcacctatgaagactgtatggacctgcttgccaagcttccgtgtgttgcagcaaagatctaccggaatctgtaccgggaagataggaatattgaggccattgactctaagctggactggtcccacaattttaccaacatgttaggctacacggaccctcagttcaccgagctcatgcgtttgtacctcaccatccacagtgaccatgagggtggtaatgtaagtgcccacaccagccatttggtgggcagtgccctttctgatccttacctgtcctttgcagcagccttgaatgggctggcggggcctctccatgggctagcaaatcaggaggtgcttgtctggctgacacagctacagaaggaagttggcgaagatgcatcagatgagaagttaaaaaactacatctggaacacactcaactcaggacgggttgtcccaggctatggccatgcagtactgaggaagactgaccctcgctattcctgtcagcgagagtttgctctgaaacatctgcctaaggatcccatgttcaagctggttggtcagctgtacaagattgtacccgatatcctcttagagcaagggaaggctaagaacccttggcccaacgtagacgctcacagtggggtgctgctccagtactacggcatgagggagatgaattactacacagtcctgttcggagtgtcgcgggcactgggcgttctgtcccagctcatctggagcagagccctaggcttccctctggaaaggcccaagtccatgagcacggatgctctgatgaagtttgtgaactctgagtcaggataaaatgggagacggggggaggggggggacgactgcccataagaaaacgaggataaaaatttattaaaaataaattctaatttttgttttgttccaggggcctttaagacttaagatttaactgttatatgaggcattgaaaatatatttgaagctttaaattgagacttgaaaggcaaagtgacctcctcctcccctcaccagctcaactccccctcctggtatgagctgcccagcaagctgtcggatgaactgccctgatgcttgtggtcagggttagatccggccactcaccatctctagagcaagagtctggctcctctcttctttaggtcaaagcaggttacagaaaagctgcagtcactccatggagctttcgtttctactcttccagtccccaaatcatttaagccagagacaggtcccctttatgtccatagaaatcat

SEQ ID NO: 19237 - DNA, 1192 bp, Mus musculus
cacgctgagccaagtgctagaaggtagcttctaggcaataaagccgtcccactccggactgcagcccccttgagcttggtgatcgccagacttgctcaaagcaatcctgctgctctttgcaaagcaagtgttaagctgggaaataactaaatagatgatttcgtgctggtctaatcatagacgggtgctaaatcataaatttcagtatgggctggtgatagctagagccaggcttgtaaaaataaagccgacttcttgccacatattttgtgcgtgtttctgcaattgagagaagcctgctattatttggtcttggcatgctatcgtagaactactgagaaacattgttcttggccaccacagttggcaggaaaaaaatgaagctgcttcggagggcttagtatgaaactggggtcttaccctttaccttcattttagagggttcatttctgccaagaccagaggcgtttcccagttgagtggcctgtggagatttgttggtggtcagagtcccagctgcctaatcttttgtctttaaacaatgaagggcggagtgggacttggtgccagaaagaacccctggggccaaggcaataaaagtcagccttgggcactgggcaggatacagtttatttttcacttttattgtaaaaagcagctaaagactgaaaaggaaagtctgctttcctcacaggccttcttagaaaataacctagcagagtttctctcagaaatagcaggttgtggtggtcacccagttggtattcgaatccactgataatcgccaattcaaaatcctcacaactataagactgtaatacagccagatgggtaggattttcccctgaacccgtgaatgaacactcctgggtctttcgttcacccagcagttactatagaaagaatgggcgtgggggtgctggatgtggctgcacagctgtgttccctaggatgtgtacatcagcccttaaaccaaaagatgccggagttaattgctcatcctttttaattagagtcacagttttctttgacgtattttggaaatgccttagttgtacagaataattttcagaatactcaaacattaccacgtgatctacaggctcagcttttttcttccctgcatttatttgctttctcaaaacattttatcgacacggatatttttactatatcactttttccaaataaa

SEQ ID NO: 19238 - DNA, 1201 bp, Mus musculus
catgataaagtatatcatgcatcacagagatgacatgttagcttaggaatgcatttgtcctgcactctaaactgtaaagtagggaaagtgttacacacacacactcctagtggtgctcactaatactctattctctttcacactgagagtgctctgacataagctacattaccatgactactcatgacacttgctccccaaagggttctgcttctggctttaagctttagagtaattagagtaatctcctccatcttattctctctggtcttcagttaaaatcaattttctgtttccaaactaataccttcgccattcttacctacctaagccactacactcagttttgcttaactgaaggcaacacaatgtgacatttacttttaaacactagattcctcttatggtatatattttattaagtatttattttaactactgatctttcataaaaattttcaacgtttagtttaaattgttagttcccttgagttaactaatctctaattatatcttagaaaccatacttccgaaatgttttctaagaaactttttataaataggtcacaagaaacatgttctgcattaaagacccattccttttagtttcccagaggacctgacatagatttctttctttctttttaaggtaatttaactctagcactaaagccagtgggtgttagttctcgacccaggagattttggtaaccatcaaagcagtatcttgtttcagtttttagagtgtatctttgtgacttcagatatggagtggagaatacctcatgtactataacttgaagatgaagttactattctctctgtatatctctggaaaagtttttgctgataatcactacaatgaaaattctaagtggaggacagctcagtacataaagtcaaaggaaaccttttatgataacaaacataataaaagtttgaagactattttagtaaatttatatagctagtcaagtgattaagataaatattaatatccaatagtttttatagaaaaacatcttttattagcactcataataatgtctgtcacaaagaaagtactcatacttgaatttaatttatttaaaacaaatccattttgaatagcaattattaattattaccaatcaatgatacccaacctcatttcatactagaatcctgtgggagcttttctgaaattgaatcatgcttcagt

SEQ ID NO: 19239 - DNA, 1161 bp, Mus musculus
tctcaggttgagtccatcgacgtttacatttgtacttctctaatgatgatgaggggtattttcatatagctattggttattggtatgtcttctgcccattttttcattgggtatttttgcttactaataagttgaatgtgctatttaaagtagtttttaatttaagtgaacctcagtagccaacctttgctaaaagtcgtattgctcacaggacaaatatttctaatcaggctttcataccttcagtgctgtagaaagtacagaatttaatttcaaccagtgactcacattttattggcagttttataaagtaaattctagaattagcaaaaactccctcctaatcttgctgatgtacatcttgctgtttattaccacccctgtgtggcctttgtgttcactctttatgacagtatttctaaaatcctctacaactcatttactccaagtaaattaaaaaagcctgtgttgcttgtcatctgtgttgtttaattgaacgtgctatcttctttttcattccaggcgctttgtttaatggcgttaccatttattcccgcatcaaacctgttctttcctgttggatttgtggttgctgagcgagtactatatgttcctagcatggggttctgtattttagtagcccatggatggcaaaaaatttcaaacaaaaggtgaattaaatgctagtttgttttgaaatgtaaagttttagtattttagtctgcatgtagcccagttctgtaagccatactttcagtctttccattatagctataatttaagttagaaaagctctgcccctcctcctcattctgtgttctctctgcatggcttgttacagcccagcacagtaagctgaggcagacccatgtgaaaacagtgctgcttttactgaggctaaagcccagatgagcaatttcacattcataagcagtgactaagctacactcatcccattggaatgagccatcttgagtgcttagtgtgtataaaatatgtttagcatgcatatgggttttttttttttggttgcattaccaattaaagaaaattaagtttactgtatcaataaaattgtcatatcaagcaaatttctaataatcaaatgatactaatataatactacattttgatttacatctgacttttctctatatctct

SEQ ID NO: 19240 - DNA, 1244 bp, Mus musculus
tgtttgaaaagtacaataatgtttaaaaatgtggttctctagtaataattatataatagttccttgagtagcacttatctaaaatgcacgggattataaatgtccagagtgtggtttatttttatttttcatttttttattttatttagacttttggggggttttcaggttttggaagtagtgcaggatagatatatacatgagcacttgtggggataccgttaatagctaaacactagactcatgtatgcttcatgtggccctgataggtaaaccatcaatacagtatttttatgcctgtattttgactaaaacacagcaaattaaatgtgatacataattttccacttgtggcaacataaaaagtgtccaatttgagagcatttcagattttaaagttttatttagaattatacagctattacatttcacctttaagaataagactacgctagtaatgaatagcacatgtaatatagtgcagctgtaaacatgtctttgtgcatgcttcagtatgcacatgcaatcacgggaactcgccctgctttgaactattttacaagctgattgttcctctcaggttcgagagctcacggatcttctgaaggcgaaggatgaagaggacgatccagtcatgatggctgttaacgcaaaagtggaagagtggaaggtgctgtgccacaggatccgacccttctcatttagtattttgatttgactttgattttgatccttaaggacttatatcagacaataacatgttgatttttaagaagttcattccatacctgggtataaaagctctaaagcttctgtatgtgctcctcgagcttgttcatttattagacaagcactttccaggcaagagtgatcaggaatggcatcaggggaaagatttatcagtctcatgtggaaagccttttcagaatactccatttctttgtctaacttccattttccagcctaagtccagagctgtaccccatcagagactaggattaggatggtgagatgactgaactagtaattctagtaaaagctggcccttctagcatctccacctctggccacgcccactgaacccttatctgcagttaggaactgtttgttatctgggaaggtcagatagtttatgtcgcagctgtagttgcaatgggacgaagctgcattcatcctgcaggggtcagataatctgtaaagctctagaaagtaacagttttagctgtcctgttctagccatgcaa

SEQ ID NO: 19241 - DNA, 1195 bp, Mus musculus
aagctcttaaaacaagtaagaacaaagaaaattcactagctgatgatttaaatgaattaaataatgaactgcaaaaaaagcaaaaagcttataataaaatccttagagagaaagatggaattgatcaagaaaatgatgaactgagaagacagattaaaagactgtccagtggactgcaggtaatttgtttttacgtcaaataatttgtttgatctgtaatgtataagttatggtcctccctcattttacaatatgtgccaaaactatctccagttgtttgattagtttcttgagaggcctctgttatagtttctgactatagtgggacatttttataaggcacagtggtagctttcatgctatcctgatactcaatgtcatatagaaagcatgattaatcatagcctcccagattttgataattggaatatttaatgtctcctttaatattgtcatgtaaagttatatcttaatgtttttagagcaaaactttgatagataacaagcaaagtttaatcgatgaacttcaaaagaaagttaaaaaacttgaaagccaactggaaagaaaggtggatgacgtagacataaagccggtgaaggaaaaggtatgtgaagtgaacccatgaatagtcttagactaagtgaggcgtgcactgataagcaggtgatttactctgagtgtaagggcctcatacatactgtgtatgggcctaaataaggctgagatgtctaagacagatttctgtcatttagaaagctgcactccacttgaagacacaccagagagaaacctccatgtcatttcctgatattggagggccattagtgtctcctcacatcctatgtagctcgtgagtttctcatttctccccactctttaattgccagcgcaaaccctaagaaggattccatctcatgctgcccagctatttttttttaagatttatttatatttaaatacactgtagctgtcctcagacactccagaagagggagtcagatctcgttatggatggttgtgagccaccatgtggttgctgggatttgaactcctgaccttcagaagagcagtcgggtgcacttaccctctgagccatctcaccagccctgcccagctatttatgtatccatctctttctccagctagtactcaggtttccagaggtcacatgactcttggagtacattttttttt

SEQ ID NO: 19242 - DNA, 1178 bp, Mus musculus
ggatccaccttatttacgatcaccaaacccagacactgttgtggatgccaacaagtgcttgctgacaggaccctgatatagctgtctcctgagaggctctgccagtgcctggcaaatacagaggtggatgctcacagccatccattggactgagcataggatccccaatgaagaagccagagaaagtgccacagaccctctggatccctttgtctgcgtggaacaggtctctggggcatgtgggcaaagcgttggatggaatgacagacagatgcacacaggagaggttgtgtagaatctgaatgtaatttgtcaaattgagcatcaaactttttatacagaagaacatagagaagttgggtgacacaccaacaaggtacaaagtggttactggattcttacacaaaacagaggactacaaacagagaaggtctaacaggaaacacctgggatagaattcattgttaacaactaggatcaaaaagagctccacctaaggttcacttaatcttagaagccagggtcaagggcttcgtgcccttgccatagttcctattttagtctattgtatagtccaccttccccctaggtcattgtaaatacgtgtgtatgggtgtatctcagcaatctatagttctaagtatctactctggttcctccttaggtctcaaacttccttcttcctagatggtggtaaaatcccgtgtagggcagtgacttagcttttattcaaagtgatagtgtaataccagagtcaaatctgaatgtcactgaataggcaacattcttactgaattccaagcccatggtctgctcaaggtctttctaggactgttggaacactggtgaaggcttggctatgtcagaattcaatcttaaaaggcacttataataagataatactaaaagagagcacatggatccatacaccagactaactcgggaatggaatatgagtatatgggttaaagagaatgccagactccaggaggtgagtttccatgaaactctctgcctcgggagtggcttccaggcctctcagcatgtcaagctgactcaaccggagtgtgtggcaagaaaggacccaaggagctgaaggggtttgcagccccataggaagaccaacaatatgaactaaccagtaaccccagagctcccacagattaaaccaccaacca

SEQ ID NO: 19243 - DNA, 1099 bp, Mus musculus
gaaaatatcttcttgaattaaagtatatttttcaaagaattatttaactaaaataaaatgtgtgtgaaactcacacacctactaattaatacacttttgaaactattaaactatgaatgaccaagatctatcgtgtttttaagtcttagaaagagactttattagaaaatgatcaagaaaagatgttgaagtattgtttatatttcttgttattaataattacatttcaattttttatttcataggtatatacagagtattgggatcagatccaggatccataatagtttctcaccttgaatcaaggatttatatgatattcttctcagatttactttgtgttaaataacatttaaaatatatatttgcctcaagggtgtctttaagaagattaatttccaatgcctaagaatagcaaagtggtaaagagagatttggatgatgatgtcattgaatctgtcaaagacctcctgtccaacgaagactcagtggaagaggtttctaagaagagtgaactaattgtcgatgttcaggaagagaaagatacagatgctgaagatggatctgaagctgatgatgaaaggccagcctggaacagtaagctgcaatacattctggcccaagttggattttctgtaggtctggggaatgtgtggcggttcccatacctctgccaaaagaatggtggtggtaagttgcattcctttgctttaacgatgaattgttaaactccgtaaagggcaatcctgtatttcaggtagatcctattgttactgcattctcattagttctgaaattgtgaattccattacaaagctagggagacacatttttgtgggaagtcagtccagctctgggttcagatgaagtttccataggaacagattggcctcctacaaatactcagggattgcttaaggtaacacattcccaaactttgtccctggatactgtaaacattgctgaagtactgacaggagtttaaaaaaacatgttatgttctttatgcatgtcagacttttgggatcgataagaatctaaagccatcaacactgatgaagcattgatgttctctctgacttatagcctctgaatttta

SEQ ID NO: 19244 - DNA, 1833 bp, Mus musculus
cttcggttctatcaagcgtcacattgccaatgcagaattctagccatattctgaatgattagactttataatcattgaatttgttgaatgtcacttccatgacttactgtcagtcagagaaagcgatataatcatctcaaaattgcacatataaacccaagaccaatgtaactccttcataagagcacttagaaagactgctgacgtgtattctctccccgggtttcccaggcatcggaagaatttctgagctacccgatgtgggggatggtcgtctgtttctctctgatggtgctggccatacttcctgtcccagtggtgttcatcattcgtcgctgcaacctcatagatgatagttctggtaacttggcctccgtgacctataagagaggaagagtcctgaaggaacctgtgaacttggaaggagatgacgcaagcctcattcatggaaagataccgagtgaaatgtcatctccaaattttggtaaaaatatttatcgaaaacaaagtggttccccaacactggatactgctcccaatggacgctatgggattgggtatttgatggcagacatgccagatatgccagagtctgacttgtagctgaacgaaagcaggggttgagtttggttaatttttatcagtgagcatcggttctcctatgagaagcattgggcttcactatcacacggtgatctcaggtgtccatggctatgatctttaatcccaacagttttagacagttcaagaacagcaatcctcagtttacatttgctcagaaatgatggcagacaaagcttacattgactgaggtcatattttgccaggattttttaaaaaaacaagcactttggcatattttcaaatatttctatctcttaaaaaaaggtgttacctcagtttctaataatttctggatttaatatcattggcaattttaaaaactccctggtatatcttacaattcataattttgccttcagcataagttccagtattaccatgaacagttgtgtgagccggtgcctctcagcacattcccatgagtatgttctgtagatagtctgtacttaattttggtagcattgaaaccttcctaggcacttagttggagaaaactgcaaagtattttcttatatgatagccgcatagagcaatagtatcaaagggtaagaaggcactgatactggggaaaaggttaggtccagatgtgactttgggttccatgtggttggctgtataatttgtgtaaaataggtgtgtggaaatgattgatgggagtggctccatactctcaagaattatgcagactgcatctttcttatgccgtgtgcctaaaagtctacttaatatttattgtggttttgagatcacttatagtatatttatataatatacttgcaatgcatagagatgcctaccaggactcttaagtgctgatttgaaaacttgaagcaagatagcattttgatttcatatgtttctgttttgcttcattttatgcaaatacaaattcttttttaagtgattgttaaaactgtatggcattacattttaacctacaaataaacgaagtttaaagaacggagttcgtgtccctcattgagttttgcttggatcacctgaactggattatgcttcttacaactcctctcagctggattgttttacatttcagccagggcttaagcagtttataataatcatcacattccaagtcggattaacaaagtcacagggaggagaacacttgccagacaaataaacaggaatttaataactgccgtgtgctttaacatagtcttataacatggaagagtgcttctagcttct

SEQ ID NO: 19245 - DNA, 1177 bp, Mus musculus
gcgatgtcccatctattcgagggatgtggtttcacaggaccccagtcaatggctatagtcctataggtgttttaagtagggaatcggggatccagggcatgcattaagactgtacttccgtcctttatagtttgctctccctctgtctttcccatccccatcccccatcccccctccctctcctcttcctcttcttcttcttcctcctcctccttcttcttcctctctctctctctctctttctgcatgtgtgtgtatgtatgtatgtgtgtgtgttttggttaatttcaactgttcacacatcatatgagcataatatttcaatttaggcattgtttatatccaattgacctatgggcatgccttggtgggaggggtttatcttagttatgaatagacctagcctattgtgggtgttattgttccctggtttgtgtccctggactgtataagaggagaggagatgggtagttaagtactaagctcacaggcaacatggatgcatctgattctctttgctcttggctgtggctgtagtgtaaatagctgtttaagttgcgacattggcttccatcaatgatagactgtaacatggaagtgtaagccatataaaccctctcctcctggaagttgctttagatcatggtgttttatcacagcaacagaaaggaaagtagtccagatgtcttccatgcagctagagttacctctgcttggccctcattgtaatagtactaactttatgtgttctaaagagtacacccttcttctgtcctcgctgtacccatgactacaagttaggaaacgtgaagttctttaatcgccttgcttttccagcgatagtttcttctgctggatgctctctaactggctgtcctgctgagtcatccaaaagcatgggcagttttgggtgtgcctcccacgccttttctttattaccaaaaggagcctgggaaatcagagaattctctgttgcctcaagaaaagtcccttccctataccacaagactctgccttactactgtcagtctcaggagtaatcccatcagaccttacatcccatcccagaccgtaacaccccgtctttagcggggtgtcgtgactcacacttttaaaacccagcacttaaaaggctgatgcaagggaagctctgaaagtccaatgcaatcctggactc

SEQ ID NO: 19246 - DNA, 1139 bp, Mus musculus
aatcttctcagaaggctgaagcaggaagattgctggtcattcaaagctagcttgtggttcatagtaagatgccatcctataaaacaacaaacatatttaacacatggacttcttcctgaatgattgctggcttacccctgataatccctgcacacaggaggcttaactcaggaggccccaatagtgagaggctaagctgaggtagatggtgagtttcagaccagcttacactattttaccttaaaacaaaaccctgcttaccccttgattttattagaggtagtttgtaagactgttactacatataattcaagcaaaactgccttaacgtgcacagcaaggcattacttcagatcttaacttttttttttttttaaaccaaaatgttgtctttcaaagctagggcaaggattgcacgcacaaatcatatgcagaatcaagccaggtcaaatcccatcatggactggggagagagttacaaagtcccatatggagcttaggagagtttggcaattgatggctggggcgggcgagtctgccacgtcagacagcccatgccccagtaggtggctccacacccatgcacgtgcacatgttggcatcaggaagcagactcgttttttaaaaagtacaaaagatgcacatgaagctaggagggggaagtgcagagaagtaagggatgggatggaattgaggaagaagaaaaggtgggtaggtttgaccaataatacttgtagggatgtatataattctcaatttaaaaacaaaactgagcattatttgtgttgcaaataagaagaaagtatgtagtaggaataaaagaagaaatgagggttggtggtattttgtttttggtagattcctctgtcaggaaatagtaggtgagacaggtcaatccttggagctcattggctagccccctggtttgtggagagcccttgtctcagatatggtggtgagcagtgccttagtctccagacatgtcatccactatgcccaaacctacaggaacactcatgtgcatgaggattagaagtgaagaatgacactgtctcacactgacgttttcagaagtacataatggaagcaaaaagcccattgaatatttgaggctgggggatcaggattgtcttggtaag

SEQ ID NO: 19247 - DNA, 1196 bp, Mus musculus
gcctctcctgagtcagaacgtgggggagccctcacattgtgggtctttcatttggtgcgttggccgggaaacgcgaccacccctcacacccgagaaccgacttggaggtatggggatcccctcttgcgtgcgtgtgtgccggccggtgtctctgttttgagtgtctgttttctgaaacgaacattggaacatgtgcttgttgtgttgggttgtttgtgtcttgttctatgtttctgaagtacggcgaagtctgagtttggatccgtctgagtttattgaacttgtgccttggttttccggttgcgagatcgtgggttcgagtcccacctcgtgctttggttttacacctggcagagtgagaaacaagtgagattctctggttttggttgtctaggtagaagtggacgacggtgtttgtagacgatggggtgatggggttttctgaaatgcgcgcgtctgtatttgcagctgtccttttgggccgtaagtaccggaggactgtggtcggcagacgtgctaagaggaccacaggctgtggccctgggggacgccctgggaggtagggagagtcagggacacctggctgtctccggagatcggtcagagggaccgagttctgttgaagcggaagcttccccctccaacatcgtctaattcttttgcctgcttgtggaggacaagaaagggtcgagtgtgtctggatctgttggtttctgttttgtgtgtttttgtgtatgtgtttagagctatgtaaaaatctaaaaaaaaaaaaacaaaagcaaaggtaattctcataggtgctttataccctgactagagatagtttacacctgagatgtgagaaaatgggttttaagaaaagtagtactctccgactatctgggggtaatttggtaataaaataaaataaacagtattaattggtctttggagccctgaatctgtagttaggaatctagtgtggctggagaagccctgctaggcgctgattataaacgctgctcttatagggacgagcagcttctcaagttctatggtaagggaacagatggctgcttttcctacaaaaatctctgtgcttgtgattattggattcatcaggtgacaaggtgctcctctcttgaaattacagctagaaaaattaagaattttgtttggtttaaatgagcaaatgtatacggccatttcatttttgt

SEQ ID NO: 19248 - DNA, 1158 bp, Mus musculus
ccaatgatggtgatgtataatgctcaagtattctcctgcttttttaccactaactgggaactgggtttggccttgattcagacagccttggctctgtctggacaggtccagacgactgacaccattaacactttgtcagcctcagtgactacagtcatagataaacaggcctcagctaatgtcaagatacagagaggtctcatgctggttaatcaactcatagatcttgtccagatacaactagatgtattatgacaaataactcagctgggatgtgaacaaaagtttccgggattgtgtgttatttccattcagtatgttaaatttactagggcagctaaattgtcaaaaagtctttttcagtatatgttacagaattggatggctgaatttgaacagatccttcgggaattgagacttcaggtcaactccacgcgcttggacctgtccctgaccaaaggattacccaattggatctcctcagcattttctttctttaaaaaatgggtgggattaatattatttggagatacactttgctgtggattagtgttgcttctttgactggtctgtaagcttaaggcctaaactaggagagacaaggtggttattgcccaggcgcttgcaggactagaacatggagctccccctgatatatggttatctatgcttaggcaataggtcgctggccactcagctcttatatcccacgaggctagtctcattgcacgggatagagtgagtgtgcttcagcagcccgagagagttgcaaggctaagcactgcaatggaaaggctctgcggcatatatgagcctattctagggagacatgtcatctttcatgaaggttcagtgtcctagttcccttcccccaggcaaaacgacacgggaacaggtcagggttgctctgggtaaaagcctgtgagcctaagagctaatcctgtacatggctcctttacctacacactggggatttgacctctatctccactctcattaatatgggtggcctatttgctcttattaaaaggatagggggagatgttgggagccgcgcccacattcgccgttacaagatggcgctgacagctgtgttctaagtggtaaacaaataatctgcgcatgtgccaagggtatcttatgactacttgtgctctg

SEQ ID NO: 19249 - DNA, 1154 bp, Mus musculus
acagtcagaaacataggttaggacctccacacacgccaacatgcatgttcaaaccatacacaaggaatatatgatatgtggaaataatattaatatagaaatgtataaattctatacaatcaataaaaactcctacatggaagttgatgttctagaagtaaatagaattttttttctcaactttttaacttgttggcaaactataaattatcattttagctcttaatattgattttaaatataaaagcttttattttgctttgttggcttattaaaataattctttacaagtatgtacctattgtctcttccttaatatcaaggataatacttttcttattggaatttctgttaatgcacaatgattagaatatgttactagcttgatgctgtgcaggtttaagtgtttctgccactactgagcagtggtgtttgttttccattatgaccctgcctgacctcgttgtttcttgctatgaaatcaaattaaaggctccagcagtacagagctagatcatgttccccgttctctatcagctagacactcgggctttccatctgaacgatggaaagcatcatcagttctgtaccagctgccttcactactagttccaccaaagactaaaagaattaggtctgcaaaagcaattcatttaaaacagctgagaaaaaactgcagcgagggggaagtaaatcaagccatgttcttgctagatctgtggcttcgctaacttgtaggtatattgaactgatgttcaagcagcttgttctgttcccttgctttgacacgagctcctacttcccagtgtctcatcactgcgtccttggttgtttccagctgctctacctgactgagctgctttcctgtgcttgcgtcccagtagtgaagccagagcccgtggggagagttacagtgttcagtctccttccgcttcttagtgtctttcagattgcatgacagtcgtggttatgtgattggtacgtgtggctgggtggtagaggtgtgcagtttacattggaaatttttctctgtgtataggccacattttacttgagttttcattctctatgagctgctgtttgcaaagcagagtcattaatgaaaggagaaaatgaaaagaaaggttagtaagggaaccccgtttctaactatt

SEQ ID NO: 19250 - DNA, 2553 bp, Mus musculus
aacttccagctctcacagaagacagttagtcaacaggtttttttgttgttgggttttttttttctttttctttttcttttttctttttgatgtgccacagtttctagtttctcaatatttaaattgtttgctttccatctgagtttgggtttgtattttttttttccttctaactcttcatgtgtcagagtctctctatgttcacagccttctcatttacagaaaacttggctcttctgagcgtcttgtcacgtgttaggctgacgtgttctctcccacctggaactgaattgtggtgggacacttgctgtcactgtttgtgcaatacgcatttatttcttacatgagtgctttaacgtccattgaaatttgatctttccagtcctatcttctgccctcatctgtcactttttgttttttattgtagtataagatgctagatgctgtacttttcacattcattttagcaggtactgagtgacgctgtatatataaataagtgtattgttttgatttttagaccaccacatggcatgcttgactattttcttaattcagatgtctgcagtgcacagtgggctactccataaaggtctttagagcagagctcgctcacagtgggcaggaggacctgaaagattctgcggtttatgggacctccccttccaagcttttctactgtaaactgctttgctttttttttcattcggtagtagtcagacctgattacaaagtagagaatcgcttcacatttcacacgcctatatttatctgagtgctgtctgaaactgttgtgctagccacagtagtgctaggagatcctttgcagacttaaatctgtgagtggtgttaagtgcactgttattgccatgtgagggggcatcaactctgatcccaccaccatgttcagaccgtttttatacatttcagtggcctttttttaaggaaaaaactaagcaaaatgaagtccataatgaaagtggcttttatttggacaaataacttttatattttcatcaaaccatgcaaaaaatatatatatattacatcttcctggcacataactgtctccttaaccattgaacagttcagccattcgaataaattgtacatttaaagcgtatagtagctgactgtattattgagtgtattgtatactatattaaatgtgaatttgtacccttccattttaaaaggtcattgtgttctactgcctattttagattacttcggggatgggaaagggtgttttggtaagtagaatttaagtcctctctcttgattggttttatgaggatataaggttatactcttactaccaagctcaggattcttttaaaggtacaaggataggtgtgaggatttatttttggttatatttgaactgtatgaatggtgggtctgaaaacagagtatttcacggtctagtgaggaggtaaactatgcggctagttgatcagtgtgagtgactgcagcgtgttctgggtgcacaacagttaggcatgctgtggtttgtatctgtgaagtctggatgcctgagaagaatgagtaaatgcgtgtttctaatattttagtgttttgtatttaggttatttattctttgtatctaaagttgaacagctactgtgctatattgactttattggtaggactgagcagaccttatttctgcatgaaactagttgcaaaacccactattttggaaataaaaatgtattttgacatatacaaataaaatgaataaaactattttaaatgtgtgaacttttaatgaaaacagtttaaatcttgttctgagatatttaaattctgcatgggtattttttcactaaatgctttacttggataacagtttgaataatttttgaaattgtaatattgtgataatttgcacagcaatgtacatgctcatctgtaaatgcgaacttaactgccatatttatgcaatctgtgtaccaatttggacaaatgtttatgtattttacataaagctgtctgtatgcagaatctgagagctagtttttttatgccaagtggacaaaaataatggtaattaagattcaagatagttgctttgtagcatgagattccatttccataaacatttgcagtgtttaaaaactaaacttctggttttttccttagctctagactcaggcataagaacatacacaaagatactattccactgaaattttaaatcctttccactaccattattttccatcttgggtttctcgagggttcagtccacccgcacagctcgaggtggctgagttgcgcttttaacttctcatgtgggcctttgggcaggaacctgaagtaaaccatgttcttttctctggatttccagcactttgtgtatttttgttcacagcattgtctgggttgctcttgtttttaaaatgaagaaaaacatttcagatacgactgtcttgaaagccaagggaaggggagagagaatctgcagacgcatctcagagaagatgcccgtgaagagtgatgtgggggtcgctcatcactgggcttcttttacccaaaactctatttcca

SEQ ID NO: 19251 - DNA, 1174 bp, Mus musculus
gcttccttgcagagcgtcggtccggcagcgcgctcaccccgcgcagtccccagcgcattctcgcttcccgggcaggcggcggcgccggcgggagacaggagtcgcggcgtgaggggcgcccccgccggcccctctgggaacatggcgaccggcggctaccggagcggcggcagcaccaccacggacttcctggaggagtggaaggcgaagcgcgagaagatgcgcgccaagcagaaccccgcgggcccggggtcgagcggcggggatccagccgccaagtcccccgcgggatcgctgaccccgaccgcggtcgcgggaacctcggagctcaaccacggccccgcgggcgcggccgcacctgccgcccccgcgcccggcgccctgaactgcgctcacggctcgtccacgctgccccgcgcggctcccggctcccggcgggcggaggacgagtgccctagcgccgctgcggcctcgggagcgcctgggtcccggggcgatgaggaggagccggatagcgcccgggagaagggccgcagctcgggacccagcgccaggaaaggcaaggggcagatcgagaagaggaagctgcgggagaagcgccgctccaccggcgtggtcaacatccccgcggcggaggtgagccgggcggggcgggccggtgcggggctcggggccgcctcccgagtcttccaccagggagctccctcggtccggggcccggagttcccttccactctctgcagcggggatggagttttacttggagtaaatgattgctgggaagttaccccgacccagaaaagttggacacgtgctcttttttccgcccctggaaccggattattgctttagaatgatagacagttggtattccccaggatttggcagcctagacttctgtctgtctgtctgtctgtctgtctgtctctgagtctgtgtgtgtgtgtgtgtgtgtgtgtgtgtgtgtgtgtgtgagagagagagagagagagagagagagagagagagagagagagagagagagatcaagtgttagggaaatcgattcgtggaggtgatgacgtcttctgatttcccacgtgtccatctcgggctatcaggttgttttatctccacttccctagcagtgtttacaagcaaaggcacctttaaagaaagcgtagccttagcaata

SEQ ID NO: 19252 - DNA, 1187 bp, Mus musculus
ccaaaggtagccaggaagaggctctctttcactactgggcagagcttgagcactagaggacctcagagcccacccccacagtgacatacttcctccaacaaggccatgcctcctaatagtgccactccctactggccaagcttttttaaacctccactttatgctcccataccaagcactctcttatttcctgtaccatctcccatctcccacctttcacctatctcttgagataatctctcaacaaattgagaaacttgcctttttgggggtgggtgggggggtgggtggggttgacagagctgtctctaggtatccgcttcctccaccagcccagtgctagggtcacagatgtgcattagccaacccagtttttagttgggtacttggatctgaactcggctccttctgcttacataacaagtactttatctatagatccatctctacagaccatttattatgacagaagtgatcagaaaggagagaaacgattcccaaaagttgtcctgtgaccaccacatgtgtcacatacaggcacacaaataaaaaaaaaaagtattaaataaaaaaaaattgtttgctgggcagtggtggtgcacaccttgaatcccagcacttgggaggcagaggcaggcggatttctgagttcgagaccagcctggtctacagagagagttccaggacagccagggctacacagagaaactgtctcgaaaaaccaaaaaatcaaacaaacaaaaaattgtttgtgcaagatcaactatagattaaaatttaccagtttgatagattttcttttttacatattaagttttatatatatatttaataagcatcctttaagtgtgatattatatcatgaatctttacttttttcatatttaaaaatgttttagatttacatattttatctgtctgagcattttgctgtcatgtatttgtgtgcatttggaacctttagaagaacagtcagtgctcttaaccacggagtcacctctctagctcctaagcaggaatttcacagtgttggggaagtcctgatcccattttttaggtgtgataatggtttcctctgttttgatgaactgtgtctgcaaatagagtccgtaaataaatgaaacttaaaattgagactagtgatggacaaatgagggcacatattattatcttctctactgcctatg

SEQ ID NO: 19253 - DNA, 1196 bp, Mus musculus
aactcatggagatctgcccacttctgccttctgagtgctgggactaaaggcactcaaaagtcactacagtttgctgctgctgttgttactgctgttactgctgtttctcttcctcctctcctcctcttcctcttccccctcctcctcttcctccttctcctcttcttccttctccctctcctcttctactactacaaatatggctactaaaacatttaagattatatgcatgacctccctcctaccaccctccttcccttgggcatgcagctcttttgtccggggtcccatgcatgcttgctaagcacatgctgtactgctgagctataagcccattgccttggtcatttgcttctactaaaccccaatgatttagagacaggaaagccatagtagccgtatacagcgtttgatactttgacgatagaaagcattatgtggaaggcaaaaggcagtctggatagtgacatgtacagtgtcataaacagttaacaaaaatcagtcatcttgtcagaagtgactggcatatatctttcattttattttattttttggagacagggtttctctgtgtagccctggctatcctggaagttgctctggagaccaggcaggcctcgaactcagagatcctcctgcctgtgtccctgggtgctggaatgaaagtcatgaaccacctcttggcagcacatacattttaaagatatggtggcagagaatcttctgtaagtgtcagctataaaagtttctttcctggacagggtaagcaggggaaagacacccagaggcccaccagttatgtggcccacatccaggggacggccagtgtgtggcctgccagccaggtagcccagtagccacaggagccattgtgacgtgcaagtatgtggtggagagatggaagagacgtagaagaggtaaggtctgggcattatgaagagaggtggaactagagacttgaggattgaaaggaacagccagttgtgagtagcctgccttgccaccttgaggccatggtgaagacctagtaaatgtccctggctcatattaccacaaaaggccatgcagatgtctctggtctgggatgccaccagggaccatgtttatgtcctagggctgcgcagagctggctctgccccatgcgcctgcaccttgcatctgggtagcacagtagacatggccctggtggcaggggt

SEQ ID NO: 19254 - DNA, 1186 bp, Mus musculus
tgtgacatgtggtttctaggatacttataaatgctagctacacgaaatttgtaacctgacataaaattgaagcaggatgacagtatgagggtgggtgggggagtgtttgaagcttgatcacacaaccttgaaaatggactttgtagataatacgctgctaaacgcctgggcttggctgcatgcttgcaggtggctttcctctcagccttggagtatgtcctcaggttgcatatgctggtcagcaccctagactactgggagactctggcctgccccacaaactccactgacttcctgggtcttcctggactctaactttcataactcatattctgagctgttttcttgtgcccattagtgatgagaggtaagagtaggcccaaggttgggtggcattgagggttaccagttagaactactgtagttcagggtctgcttaaaaatggagatttttaatgtcattttttactaaactggagattgtctaaagatctgattcatatatcctcctacaaaggcgtgtttttggttccctgtccttggacacgtaagaatcggaggcaaagaaacgtggtggatttggaaaggtctgggaccagcttgccccctgcaggctcagaatcaaccatcccacagaagagtcagaaagaaaaatttttaatttttttttaaaatgtaaaaaaatagatctgattcatagttcatcaaacatctggacaactcagtggaaaactaataaaaggcactgtgactttgatatcaaattatttctgcttccataacttttccctccgagtccatcacccggcaccacagcaagctgaaggagagtttctggacaggaggcagaacaacccccactgaggcactcctcttcccctgggggcctgaaacactcagtgtttgagctgctccccaacaaggaaagccagcgctgcagacctttggtcacgtggtaaagagtaacacatggcttttgtataggggacagaagagctgtctcctgagccattgtcttagaactgatgtgaaacgtgcccctgcagaagcatgcgcctactctttttaaaggcacgctagttatatcctgctcagttatcctcagctgcagcagtagtagtcgtcacataaccttggggttgcttaatccgtattatctccttcttttggtgcaatagtatttgta

SEQ ID NO: 19255 - DNA, 1302 bp, Mus musculus
aaaaagacaaacaaacaaaaccaaaaaccaacaagaagcccaaacctatcttgttccctagtagataactggttctctagagccgagtagttaagttttttaaggcactgcattgctaggtatgtggtgtggtcccttcccattcctccccaccctacctctgtatatcttttggctgaaggtagagaagtgacttaaagtactatgtcttgggagacagataaggccagcacgagaagtgcgtctccagccatcagtacatattcttagttcaaattttgtatgattcgttgctttcctggtgcgtggaaaaacctaagtgtgaaaacttacgatggagtagtgtgcgttgtttggaaggaacttctttgtcaagtcctagatccaaaccctgtgtgtgtaagccaggcttctttctgtccctcactcgctaacttaaatcctcccaggaatgcacagtgcccctgccaaaggtcttcagctgctgattgataggaagatctgtggccaaacacgcgttcttttccaagacgtttcaggcataggttaatactagaggttggaaaattgagtagcttcatgatgcactgtgtgttttcatccgtcggatgactgagctctttccaaggatcttttgaaaggacgtgcacgctcggaggctgcgatccgaagccttttcacggatcgcagttggaagctgttaattaacgagctcaagttctcaccctcactttgtagtctgtagtgcaaggtacatttagccaatgagactctctgaatcggtaaattaaatatttaaatattctacgtctactatggaaagactttcagggtctttacggcggttgtaagcttaactgcttccatgctttcatttttgttgatgcaaattaaacataatgtagaatttgccgttcggactataccattcgggcattgagcacgcatgcgtgttgtacagctaccatattgtctgcagaaccttttcacacttttcaaacggaaactggggatccatgaactcaagaattttgtgttttggggggctcccagccccactctctggcagtcactattccactctgtgtctctgtggatgcgatttcccagggtgcttctcgcacaagtgggacaagtccactgtctgatcctctatttctggcttgtttcatttagagcagtgtcttctacagttgttcctatggtgatatgccagaattttccttcttaattaaagctttttgtcttcaatgttttgtgttacggttcacccatgccatccatgggttgggtgaacacagg

SEQ ID NO: 19256 - DNA, 1227 bp, Mus musculus
tcacgggacctcctttcactcagtctcttctccatttttgtccctgctgttcttccagacagaaacaattctgggtcagaatttttgactgtgggatggcaataccatccctctacttgatgtcctgtctttctactggaggtggactctacaagtcccctctccccactgttggccatttcatcaaaggtcccgagagtctctcacctgccacatctctggtgctttctagagtgtccccctaccttccaccgccccccccaaggttatataactttaaattgtgtctgttcattgtgctttggtcatttaagtgattgccttttcccatgcctaccacactagtccaatatgtctcttgagtttgggtacttctgggattttgctctttaaggcttttcttcttctatcactgtgttacagaagggccacactttacctctcagcttttgacccgctgttcttcaatgtgatgccgtcaagaaagcagacttgcttgtttcccacctcacttgcttctgcttctcactccttcttttccccttcgttttggcagtgattcataatcatgtgcacatttgagggttggagcctgcagagcccatactatggctgggatttgtgacttcctgactctggagcattttcttgtaataactctacactgctttttaacaatgaccctgtagtaataacacatatatacttcagcagttccagtgcccaaagcagtcattgtgtttactgatgtaattacagcattttaggactatgaagttgcaagttcatatacttgggaggacaaaagtcacagcgttagcagtttgattcttaacctcccagcctagaccattctctacattttattattatgaagttcattgtgtctagatcataatttgaaagtgacatgcatatcattattttaataatcatacaggaaaatatatcctaaaatatgtttgtacttttagtgaatcaattctacaatgcaaatattatctaatttttcctttattttgggatgcaaatccaaacactttataaaaataatccataatcactactgtttatttgttttccttcttataaagaagttatttccatatttaagaaatattcagtaatatctttaaaatattaaaatttaaatatttaaatatttgaaaattttaaagtaaaatagttatattctatgacttctcttcccccttgggaatgctgaca

SEQ ID NO: 19257 - DNA, 1148 bp, Mus musculus
tatagcacaatctttctggaataaaataggctagctcatatacagatgaaaactatcattttatacctttagactattgctgtctgcttcaaaaaattttaacactcccctactcctttaggtctgttggcatcttattctaatttatatcttagtgtgaatagtttgttattcatgactgctgaatccagtggcccctttctttttgttccagatttttaaaaacaggtttttttacttagcgtatacaatgttgagtttccttctgaaactcatgtcaatggaccatgctcatatcctccctgacattactcccaaatcttgtcaatgtctttccatcccctgagtagttcttctgccctcttgttttatctatatttatgactctatgccaaagactcctttcttcagcctatgttgggtaatctttaggtacccagcatgtggaatagttggaacatttttcctttatcattacataaagtgaccttgctcagcatctttttgtttatcaataaaatcaattttgtgtaacgaatgtctataagaccaggaccttgccctctgcccccatgctttgaacatatttggtttgaacaggtatatatgtgtaggaggtaatttaaggtgggagaactttcccgccatgggccagtatctctcaggatcaccgtaggtatcattaaacacaggaccttggtagacaaatgtccaatatataatagagtttgcaaatcttgtgatgatactgcactaggtcaacagaactgatgactgcttttattaccctaattattagtgacttattgggggaagtgagaaactggcaaacaggcttatgtaatgtaatccttttaaagattatcctggcagaacagtagaatttttaatgcttttcaccatttaaaaaaaatatatatatttgttttgtgcaagcatatgtgaaggacacagaggatgtgtagaagtcaaaggaaaactagcggaagagggttctattcttctatgagggtttggggactgaggttggcaacttggcagcaagcacctttactcaatgagccatcttactagtcttactaaaatttttgaagcagacagcaatagtctaaaggtatctatctatctaactacctatcatcccatct

SEQ ID NO: 19258 - DNA, 1127 bp, Mus musculus
tgtggtaaattcatgttacaatgatttttttccctccctttttagcatctgcaaacagtcgaaaagataaatctttaagaattatgagccagaagtttgtcatgctgttcctcgtctccaaaaccaagattgtcaccctggatgtagctgccaaaatcctcatagaagaaagccaagataccccggaccacagcaaattcaaaagtaagagccgtcatctaatccacgtagccgcacaaaaagagaaggcggcagatgctgaaataaatatgtacagaagagggttttattgacggtgctggtttaggaaaaacgtattccttgtgctcacaaaagccctctgtgctttaagaggtcaatcatctaatagaacccccaccaaacccagacagaccccttactccatacctccgaggttaccgtggacagggaggcagaacgcacccggagagcgcaggccagggagggtgtgatcgctgtgcatttctctatgctgacactacatccaagcagactgtctgagtgttctttcccctttcttccccctcccccgcctacttctctgaagggtggagatgaaagttgtctacaggtaagcaggcaaggaacgctcagggttgggggaccgggcgggggtagggctgtcttggaagggagagagtctctcagtgccacacccacgcaccttccttcctctgagagccttgcagcagggttcgtaagtgctagtgaattccccagtcaccttttggggttttgctagaataatggccacccggtgggtgagatggttaagataaattccagccctggcagctaactctacatcaagtggccatcagaccctttattcatttcttgaatagaaaagtaggcacgctatcttgtcttgttttgtttgtttgtttgtttgttttggggttttggtttttttaatgagcctcttctgtctttctgtgtctccccactttcatacgtgcaatgtccttagaatgcattcagatgcccccatgcctctcccccttggctagggttttagtgagcagttgctgttttttcacaactatacctcgtgaccttgaatctcaggcattctgtgtacccagaagtatggcttcactggttgc

SEQ ID NO: 19259 - DNA, 1235 bp, Mus musculus
ctgcttgctttgacgagccctcgtgggtaggaatgtccacaaagcattcctattaagaaatccacattttgatacgaacttttcctcttctctctctcctggctagtctcatttatgttaacctttgttgctactttttcttattgttatacttaattattctgtttgtgaattgaccatattcacctcagagaacttgggattcttggggtgggggtggggggcgtcaagcagttccatccatggaaaacaaaagtcacttccatattcaggtcccacggggtgtagcttctggctcttccggaagactggtctttgaagctttccagctagacctgagtgccagagactgagatggggaagcagcagtagtggcttcttgttgaatgcaagaagaactaactgttaaaggagggcatgggctttgggtcagcactgaggggatgtgctacctcaaaccatgccatccggggtttccaaaacccttgcattctggtacaagagttggggaggtataacttatacttgaacctacctgctaagtttacattgctcaatgtaaggtgctatttctgtacggaagtgactgtaatgtagagctgcttcctgcttatctcgttgcactgctaggctgacgtagatgttcatctattgctgcttgccgcttcgttgtcccgggtttcggctctgctctttcctcgtggctatattatctatagccacctacttggaacgctactactacgtgtaaaccaatctttccttttagaaaaaatactaagctttataaaatagcaatggaaataaatgtatttagtaagacgtgtatgttatattacttgtaaaacattttcagtgtgtgtgtctgtgtctgtgtgatatggcacatgggtggaggtgaggggaaaacttgtagcagtcagttcacccctcagttgtgagtcccagtgatcaaatccatcggtcagcttcaatgacgagcatctttgcctgccaagccgtctcgtagaccctggttctgttctctcggctgcagtttattgttaagactgccaacagcagctacaacagccacatggatgctcgagtgctttttactgaggcctccctgtagttcttgcaggtatgcacacacgcacacacagcatctggctgatccgaaagcgtgggaaggcaaaaggagttgggagcgcggaagcatgctcttggccttgtatctgaagtccaactggaag

SEQ ID NO: 19260 - DNA, 1177 bp, Mus musculus
tgtatccccaagatggaagactcaggatatatatagtcacagcctgaacaaagcaaaatcaaatgggacagttagtgtgaagagctcagagtgacagacatcaggattcctcccaaacccgtgggctccttcacaggcttttcacagccatcccgacacatggcatcttgtctttagttaggctggcttcacctcagcctgctgctgacccatgcctctggcctccctaaagtgctctaggacacagtgccaaggctcagttgttctctccgaccccctcatgccttcagaaccagttccagctgcatgactttacactgctgagttcagctgccagcgtgagaggtacctcggcccctctgggccacagcttctgtgtgctgaccctgaggaagtactcccacatctgcatcctcgatgatgctggtctcttcttacttactgctcatctcttaactagccagccaacgtaaatcattctagagaagcagagattttacttcagtggtgctaatctcttgtaaccacagccaactctttagctccagttgaccagactgccgcttcttcaaggcctggctgggtcctctctggaaggcagtgattgagcagagtgtcggtgtgggcaagacttggtcttgcaaaagtaaacattgcttagtattaatagtatttactctcttggattcttagttgtattggggccaaaagctgatgacggcacttttgcttaacaacagggcactaggtaaaggatttcttgctagcacttccttttctagccagacagccagaagcccttcactgcctagctttgtgaaccagagagggaggaaaggaaaagagttaagatactttatgtaggtagatatacacagacatacattcctacattctctctttggcggggcccaaccgtctgcctcagtcaactccacatgtattcatgaatgcatatgtgcatacacatatacctacctacctacatacaaacaagcaagcatgtacatttggatggatggatggggcagagctccccaagtctccacagcacaccacaccacctttctttcttttctctggcctttctatagacaaaagttcttagaaaattacctcacagataaaatgttatacaaaatgggagttactaagggatgctgatattaagttcaaa

SEQ ID NO: 19261 - DNA, 1194 bp, Mus musculus
ttgaccccccctttggagttgttagaattctcttaaataatacagtcggcttcctgtgacaatcacagtcgttcctctggattcaccctcagatacagatatgagaaaaaagttacatgtgaatcagtcaagtcaacacattttgcatggttaaattaaagaaataaaaatacttgcgctcctcatatgtagggacggaataaaaaaacattcttctcatcgcttattgggggagctaagtctgctcacctaggctacaaaagaggttgaggatcttcaccatagggtgatgaccagggacacacaaaaaacgaactctgcacattgaaagaacagtttggatttgaactgcagttacagtttgcagtcatgttctaagatccaacactgcagggcataaagaaccttgagtagcacttccaggagccaacttgctcccttattgctgcaacacccacttgtgatgctaattgtactttgtggcccatggaccatggcttttgttacaagctaatcttgaacagttgctttggtggcaacagtcaccaccaattccttaatcatttaaaacgtgttctggattgactctagtgggtgaaactagtcttgtagctattggcttttgtcttttaaatacttgttaatgtccctcttcaaaacttagggaatattagtgcctgcaagaacattctttgatgataccctataaaatgaattctaaattcttgctagtccgtgtaaaagacacacagtccaggtcttttatttacaagctgtgagcttagactgggcaggtttcagagctgttctaactcacatcccagccaatgtacctcatggctatgtgctcacaatccatcccctccttggacttctttcttctcctctcctttctatacctgtgacctccagccaggtatctgaaagccggcctaccttatactgcccaaccacaggctttatagccttttatagcccaaagagctttgggagcagggtaacataacataatatgttgtatgggaggattttgtcaggggccaaccagatttgggggcttagtacttagcatttgaaaatatagcagtaccagaccagtctcctaaacaacatttttttttgtagtattgaacagaggtttgaatataaaaataaatataagagcgagttaggaggagaagagatggttcagta

SEQ ID NO: 19262 - DNA, 2239 bp, Mus musculus
atattaaaatagaagaaatatttctggatcattaaactctgatgactatgtttgacatggaatcatacagtaataagcttgatttagtgaacttgcagcatcctagcctgaagcctggcactctcagtctcagggctgtagttgactgagctggttactttaggtaatataactagataccttgtgacagtcagataacattataatcgtgatgttttatggtaatgtttctaaaaataattataaaatgtattgttgcttattttgcagaaatattatggctcttcgaaatcatttactttcaagtacacctgctacagattattttctgcaacagaaagactacttcgtcattttccttctgattttgcttcaagtcataataaactttatatttaagtagaagttctcaacattgaatccatgaacaagaaagattagatgtgatctgggaccattgttcaaattggcttgctctttattaaagcatcacaacaaacaaaactaggagataaatgtagaaatgtctacctacttttcacatcttttatccttaacccaaaacaagagctactgtgtttggttactacaatgggctgtgtgttaagtgccagaacacttgtatgagactgtgcctacacgtgagtatcgtagacccacgtgtgtataaagagctcttccctgacagcagttcctgtgttctacagtgtgctgtgacgtattctgataccagtgttcataacaaagatgccgtcactcctataaatacatctagggtcaactattgtcttcagaagaccggcatataactttcattagggaattacagtgggaaaatggtagataatagacatattatgagtaatgtcaatacattatactgttaaaaccatctccaagttacctagttcagttagtcttcttagatacaccaagaaaaaatacgtgagtgatcagaattaatatattgtaagggacaagtagaaaatttttaagagtttacacaagattttctaacccctagcatttaatgttacagatataggtgaatacatagttatgtgtgtgtgtatatatatatatctcactattaaagactggtaagcagctacatggatctatatgttacaatcccaacttaagcacttgctgaaaaggaacggtcagaggtgtttaagtaggttatgtgaaatcctgatgattcggtgttttctttatgaaaaactttttagctttcatttagacacaagagtactcaaggagtaaatagaagagaaaaatgtaatatcttacttcaaaagtcaaaaaaggtggtaagaacagattgcagtggcctttaaaacattaaaataaaattgcttaaatgtgcaataagttgagcattggagaatgtcaagttatgaagtttgtcatctcctcccatcatcctgtggcaagccagttctgtacaagtctttctgctctgctcaggcagatttgttcctaagaggttttgcctatttattcagtttaataattgtgtttttacataaatatttattattatcaaaaacacttctttaaaaggtagttaagttttgaaacatcataaaatgtagattgttcaaactacaggttttagaagggtttgttgagtgacaactaagaaagagctgctgttggctgcatcggccttcagctgagaagagattgagctacaaggaaagctaactctgctgtgagaggacagctgcagtgctcacactgaaagcctcttctgatgaatacaggtgtccttatgttcctatgaacagccttttacagtgtggtgttagcaaaacaatgctgtatttcatatgaaaatattttaaacttttaacagcataagcaagatgtacctgtatccagtatttcattatggagttttgggttatatttcatatttgtcaatatattgtttgtattcatattctactaccaatattatgctcaactgcctattcattgatgtgatattttgtaaatattgtacaatttgatctttatatgattttaaattactattaatttatattatatataacttgattggttgatcacgaaaagtcttttcattgttaaaccctgtaatgtaaaattgttggtgacatgccttagagctctttctaaatcctttgtgttgtttgtgatctgaacagtgctttatttgtgttgatatccacgactggaaaggtaattgttgggtttttttttttaattt

SEQ ID NO: 19263 - DNA, 1206 bp, Mus musculus
tgaccagttttgtttgttttgtttttcatctatccaaaacttcattttctcacataaaaatttagataaccacaattattgacacagttgttaaatgtctttagttttctgccatttagtgagatattgctggctaagacaagacaataacaggcatgtgtggtgttagtgtgctgcagcaatcgatttaacttgtaattcctaccacttctgtctctagtatgacttggaaagcggcagtggtcatctttgtcacagctcagttgacagctgcattcccttaaaaagttggccttgtgagatacaatcctcatttaatatttcatgcttttgtgcctttaaggaaatatttttgttagttttttgttacagaaccataatgtgttcaaagtgtttgtagcttatttgtcataaaagggtcatttgtctgggtcactgtgtttccttttatctagctgaagaatatgtaaacagtaatgccgtacttttataagggtttgtgtagtaactatttcaaatatattcatactcagacatcaatgaagtaaacttgtcagatggctctgagtattgtagacagtgcctttttgatggaattcacactgttttcgggtgtcaacttgtgccatattcacagaattttgtggaaggcagttttaactttttgaagaatatcgtcatcaaaattttaaaaaacaaatgtataaaacttcatcttttttcagtgtttagcatttctagtcagcagtaaatagtctggttttgcttttgtttttgtcttatttcaggtatgatggcatacgtacgcgatgagccatacacgagactgtagactattacattaaatataaataaagaacatgttcgtttatacaaattttccgatttgacccagtgggagagacctttcataattcaataagtttacatttcaatgtctttcatatttgactacatataaagagattctttaaaatgtataacctgccaccactgcataatttggtttcattttgttatgtattgtgtgggtttagtatatccaatttttgttacaattaaaggactattttgttacagtttttaattgaagatggactgttaacattgtacaggaccagtgtcttattaataagattaacatatttagtgagagccacaggaaaaccttgacaaaaatgaatgtgactatactttatgaagtat

SEQ ID NO: 19264 - DNA, 1181 bp, Mus musculus
cctaaaaggcgtagaggcgccccgagttagaagcaaaaccagccgaagacgctgccgcggtggtcacaagaaaagagttgttagttctcagctagagtgggaaaatggtttcagaggagaagggggtggggagaggggagaggcgtgctgggattaggtctggatgcggatgggaatcctagccaggatactgcaagcctgccactaggctgtgtccctaacccaggcgggcaaggagaaccaggagcgggacctatgggtcgtcgctgtgggattgggatttccatcgcagcgtagaagggagaagagatggcgagcacaagaccgccacaggcgggaagcctaaggtgccggggaagaaggacggctctgtaaccaggcaacaaggcccaggcccgcctcccgctcccgttgctacgcaacgccgaggccagggggagggcgtcggagcagccctacgtgctgacgctaattgtatatgagcgcgagcggcgggctctcgggtcttttttagcgccatctgctcgcggcgccgcctcctgctcctcccgccgccgccgctgccgccgccctgagtcactgcctgcgcagctcccgccgcccggctccgcgtccgagcctcctggaacggtaacggctgggggccgggagggccgggtggcgggggcctgcgaggtgtcgggctgaggccgcggggtgagcgctccggagcggccatgcggcctgagggaccccggggagcgccggcggctgcggggcgcgcgggacggcgaggccgcgggagagcggaggaggaggaggaggccacgccgcggggcgccctgggtcgcccggccgcctctgcctcggtggagcccaccgcgagggcaaccccggcgaggcgggccgcggggatgggggacatggaaggaacggtggccgcgcgagttccgcccgcagggaggggctgtgcaggccgcgcggcctcggcgcgcaggagccggggcacgtggggaccgcgccgcgggcggccggagacccctgccggggcccacccgacacctccgtcggagttggaggaggaggaggggtcgccacgagtaccagtcccgccacggtctcaccggctccctgggtcttcctggagggaactgtgctagcggatgggaggatggaggggcgagcagcctccaccgccaggg

SEQ ID NO: 19265 - DNA, 2094 bp, Mus musculus
gagcatagtcagcctgagtttctaggacctaagacttctactagcttagactttaacccagatgttaaatgaggcccatgtccacctatcgtcccagacggcactctggagattgaggcaggaccgtagtggccttgtagagtgcccagttatacatggcaaaaccttgtcaaacaaaccacagaggaaatttgtccttaatcttaccccctctactgctagatggactcttatgtagacaatgattctccaagatgatgagaaagatgttagttaccttttgcctaatgaaaccatcctggttaaactttaagcaagatgttgagtcaaagatcatagtatttcttagccatctttactatgaagttaaaaaaagaaagtgtccaaagatagtacagtcctctgtaagtggtcgtagccatcagcgataacagggtgtcttggtattgttgattggtttagtgttttgagacatggtttctctgtacagccctgcttgtcctgctttgtagactagactggccttaaactcatagaagtctgctgcctctgcctcctgacgactagccaggatcctctgttgtagaactaacaccttcattcttagatttaattacttaaccttttctgggatatctcatggtctagtatgcttgctgaagctgtagtaccattttacaaggacaaatcttacagttttaaattatttgtgttgtatatagtctcactgccacagccacggctgcatggtatcacatcttaccaaaaacagacaggacaaaagaactcagtaactcactgcggaacatcaggcctataaactcaccactcagaaaggttgaggcaggagagtcagaaagttgaagcccatgttcagctacatagggtggactacataaaacaaatgtacaaaacctgcagcaagtaaataccattgcaaacctcgcatcctagttgctaaagaggctgggcattactgccctgtggaaatgaaggttcttcattagtgatgcaagaatgtagtctttggatatgggtgaaaagctcacaaactaaccaaatgcagcttgatgtttccactgtggttggctagttaatacagaggtaggaaggagactggatcactgaatttctgtactgaaagaagcatatttatttagaccgtctatacaagtttctctaatcttgttttgtaattcatacatttaaactatggtgtgatgctatgacattgtagcaaagaacagtctgaacttgatcaagatttggaagatgttgaagaagtagaagaagaagaaacgggtgaagaaacaaaaatcaaaggtattcttttaaattacttgaggagccagctatggctggcacttgtgttctagaggagattagtgggaactgtcccccttccctggacttgtccattgtcctccgtctcctgatccagtccttgagttcaggaactgtgtataggacacaggaagaaaggaagatgggagtgtagtcactgacattcctcactgctgctgtgtcaggaactgagcttcttctaaactgagaaatactggacgggttggaagtagactttacttggcaatgcttctaaactgtgtttactacttaattgtatagaaagcattgtgtgtgtctgtcctcttagacaccaaaaggacacttgatagtgtctatgtagtaatttgtccaggagtagtgctgatggagtagatgtggtccctgggtaccaaggtgactccctttcagctttagccagatgggttttaactgtgagagcagagttcctaattgatgttgccaaatgcctattgttataactgtatcatttagttactaaactagctggtctccaagaatatagctgaaaaaaaattataaatttagcttatataaattaaatgtaatcttaaaaagacactttttggccttatttacaacctgtggctattttgctatattataatcttaaaattatacatgtacataaaatctaggcacattttgttagcattaaacaacttccatataactcctttatctctggcctggtaagtgtgttgactgccctcagattactgtcaagag

SEQ ID NO: 19266 - DNA, 1128 bp, Mus musculus
ggttttgagacccgaaccctgtttgatctggcttcaggctgacgatgtagcttcttggcgtgtctagctgtcgctacagattctgcggaatctgacttaagctgtcaggcttgtgggagaagtagaaaaaaactgatctgagtgaactgataatagttgaatttcttaattgtaactacttcagtggttaggtcaagaattattttataaaaatttggaaagaattcaacctggcttaagggtatttcttgtgtttgtctggatattttgttttgtttggtttctattgatttgtcctacttgcttttataataaaaggatctgtatgtcttttgaattttagttactttaaattccttgcttcaactcagaaacttacccacttgaatgttgtatggaaagtgtgacttgtgtttttctgattttctgtaacttttcagcttgcctaaggtagtcaaaagacgagtgaatgctctcaagaatcttcaggttaaatgtgcacagatagaagccaaattctatgaggaagttcatgatctcgagaggaagtatgctgttctctatcagcctttatttgataaggtaattatttatactgctttgtaaggtaactcaggagacaggcttggtacttggatctctcagtggggggaggaggtattagaggtgtctgagagcagcagtggccaggattaaaggctgtggtaggtagttactaattaacccagaaaccaggagtgtcagggtttgggtgctaatgttcttacataagctgtctctttattttagcgatttgagatcattaatgcaatctatgaacctacagaagaagaatgcgagtggaaaccagatgaggaggatgaagtttcggttagtaccttgtagtttcctgtattttagatgctaggatggaccataaccagttgtttgaagtagcatttataagcaactttgtaaatactggggataagatgagctattcctcagcctggcagtgcctccttttgcatttcaagcgtctcctgtagtttcctttgagcttttgaggactgttggaagagcatgtgattttcaggtgaaaagctttgctgtgacctacctgcctgcagtgaaggatgacggcggtga

SEQ ID NO: 19267 - DNA, 2011 bp, Mus musculus
gttttctttttagagttttgtcttagaatttcactttgaacccaatgactatttcacaaatgaagtgttaacaaagacttacaggatgcggtcagagccagatgattctgaccccttttcttttgacggaccagagattatgggctgtacagggtgagttgcccatcctactgtgtttgtgattgtaagtagaggtacaatcagtacctctgtgtatcctgtagggttcttaggtagtcagacgctttggtctcccattttcctctgggtctgactatcatgtacatttacgggaaggaatagactattagtcactttattatatcatgttaatgttattgcaaatcaatagattttaaagttttgtttaggaaatacccaaattttaatttggcatgtaaaaatcttgtatttgtaaaaatctagctatcaaatgtgctaaaataattacatattttgtttcttaaggtgccagatagattggaaaaaaggaaagaatgttactttgaaaaccattaagaagaagcagaaacacaaggggcgtgggacagttcgtactgtgactaaaacagtttccaatgattctttctttaatttttttgctcctcctgaaggtgagtagtgagtagtagctcagtttctgttgggtgttggtgtgtgctgtactgtaagctgggcttagttatcatttttctgatgtgcatttcttttaattttgcagttcctgagaatggcgatctggtaagttgagttactaaaagactcactgtgacattggttggtcttgagctcagatccacctgcctctccttccccaggcactgggcttaaaggcacggcctaccatacctgctaaagactcagcattgcttgatgcgtggtagtgtttgccagcatgtatgtatgttccatttgtgtgactgatgtccgtacaagtcagaagaggacagcatcctctggaatggttctctggttttgtggatgctgggaactgaacctggctcttcttcgagagcagacaatgctgttaaatctctgaaccttattaacctgctgagccatcttcctagccatatctgttatttccaaaggaatgccttcgtgtagcagggtttcttttatgtttttctctttaatcgcaaagtcttagatgataaccagtcctaacttctatgtactgcagtttttctcggtgtatatgctggcctgctggcttattgttaggtattaggtattaacagcatgcaaatccagcagttttagatggcttacttgataagtggcaagtaggcaggattggagctttgtcacaagctgactgactgacaattccctctgataggatgatgatgctgaggcgatactggctgcagactttgaaattggtcactttttacgtgagcgcataatcccaagatcagtgctgtacttcactggagaggctatcgaggacgatgacgatgatgtgagtgcatttaagtcctgcagtggagccttttgtcgggtgccacagtcagaattgggaagaggctaggttggctgtagtaggacatacagggctcatggtgccgctaagcccttggacagcttttcgcttttctcagcaaatttgaagaagacttctttaggatagtttcatttaaagttgggttttgtttttctgttagaagaatgattctgaattactaaaacgtggttacctttatgtttagtttattttgatgtcattgtcatgaaacaaccagaactcttatgttcatggcagcatttatacgggtaatacagagtctgcaaagaaagggtagggagatgttgtagcctgtagctggcacagagcttggtaactgagagcactgagagcatttctgctcaggtctttgtaatacattttagtgttcagatggtgggtgttaataatctgtgcttgctgactttttctcactcacactttcacttgtcttttcagtatgatgaagaaggtgaagaagctgacgaggtaatgtttaccaaa

SEQ ID NO: 19268 - DNA, 3054 bp, Mus musculus
agaaatgctttgaactttggattctccaacgactattaaaattatttgattcctaaaggtcccagtttataattcttggaattttagggttagtaaaacattgtctcttcaaagtttgtaataatctccaggattcattcgaaacctaaaatttcctttattttgttcatctaccatttgctgtaaaacactgggaagatactttaagcatgtagaagggaagttcagagtaagctattttgatagatatgaattaattagtgtcactataatcagtggttgttttgaggttataggctatcccaggaagtaatgcttcattaatgtacacttcagtgactttgagcattagtttgtcactatcctgtattttctgccttcactgtaattttttttacaagatattatgataactaaagtacttgtgtaaaaaatgcatcacagtcggtagaagatagattgacgtgttgttttcctttaacagaaggatcagaacccagccgagtgcaagcagcagtgagcagtgactggccttgaggacggccgccctgtaatagcctaaacatgactcatttacttacagccttatggttttgtattttcttggtagaatcagtaagtttttaagggaaaggagattgatatttgaaagacgagtttgttctacctagcaccctagctctagctctgtcagatacgttaatgcatacatcctctctaatgcatgttcatttattgctgcagtttggttcttctggagtattttcatcatttagctattggaatacaattatgaaaaccaactgttgaacatacttggagtagctgtttctttcctaaagaaccaaagttgttttcagctaatagaacaggttgaagtccgcctgcattagctgtgttttccctcatcttgttagagggatgcacagggcacggtgacatcatttccctcatgttgttagagggatgcacagggcacggtgacatcatttgagggaggaaaattgtcgttaagaatttccagtaagatcaaacttaataactgagattatgaaagcatttttatgttttcgatgatataaacaaaagtcaactcgtttatagcaaggtgaacaaaccctaggttctcttgaagttgatagtatttaatgtattttgaaaattaacctccattaattaaatcttttctttgtggtagggcctaccttctgctttcctggaaaagatgaatatacatcatatgaacctattttgagtttttctgttgtttgtttgcctaattttgtttttatagcctaaaataaaaatatgacacagttttagctctcatgggatgctgtctcggtttgtactgattgaggctattgcagagggttagttggaattcaggggtgcctagttttctatattgaacaacgctggaggagctaatacacacgtgctttaaaaaaagtgatatgctctagtttgagcagaaaggtacagttgtgcttgttagaactgaaacctttgtttggactttgtttattctgtcctcaggaggatgaggagtgtcgggagccatgctgtttatttactgtgcataaccaagaatgggtgggactgttgattcaactacctcaactctgttaaggcatattggggtatatctcacaaactctcagtcttacttgcaaaatgctcaaaaaattgggcctctataccatgagtgtgatattcagcattatattcacaccaagctttgatgattaaactggagaatgaagtttaaacacttctattctagatctgagcatgtggctccaattttagtgggaaggaatgaaagtagtgtatgatttcaagagattgaagagttttgggatttttgagttttaccccccttcagatatttcaagtgaccacattataaaacaccctaaggtggtaacgaggcaggggaggatggcatgaagttgcattaagtttcagaccactgagagccacatttaaaatacctcaggctaattactgttcactttggggcaggagtaggttttgccagggtatagtaattggattgcactccaaggaaagttcctattgttaataaaatttacgtagaggagaaacgtttgtttgaggtggtagttctttctgtgaggttttagtattcgaactcttagaatgtgaacacattcgagagctgacttcttcctgagagttttaactactggaaatccttaaccaattatattttctttattttgagaatgatttggttgctttttcttagatggtttctgctattttctgtaatcatagttcatctaaacacagcctattttcgtgaacattgaagtttgtaacggaaagataggatctcattttcagtgaacttccagactagcgcactcttcccttccctctgtaggaagtagctgttgccaaagcgaagaggtagctggctcttgtataatgggaaagtgccgtgtggagcttcaggggtcagtgtttattatgacatctgtcagtccccaaatggttctattctctacaagtctgaaatatgtaatctgaaatccttaataaaattggatctaattttataaaatacactggtgatatttgaagtttttataactatacataactttgaagatgggagagccgctaattctgtgcttaagccaaccactctgacctgttaaaacttgaagagctttagcaagttaaatctgcgataccacgagaagaaaaggatcctgtggtctagcacatttcattgtctacagacgttccagttccgagctcacactttcattgttagagctatgacatttgtgtgttttcctccaagaaaccatggaaaccctgtacagttcttttcctctttttaaaaaataatgtgcattggtgtgacggtgtcacatcctttagaactggagttacagttgtgagcttctatgtgggtgctgggaattgaacctgggtcctttggaagaaaaagactgctcataaccactgagccatatcttcacacatgcagttcttcataaatacaaaatcttgatg

SEQ ID NO: 19269 - DNA, 1589 bp, Mus musculus
tttgagatgcgaaggttttagctgagtcagactcaggaaatcatgaccagtttccttctgtttgtggccgtatgctctgtaaatataaatacgtaggaggtagatgcctacgtgtacattgtgcccaactggttccaggcaagttttgcctagctgttttaggaatatctgttattttaaattatatagatttttggaatgagtcatcaaatccaatgtttgttgccattggttggtcttcataatactcagaacatttggttttgaggaaaatacgtgcaaaatttccacttaatttcttttattattttactccaggatttaaaaaacaacaacagaaaatccaaggcctctaaatcaaatctgtcactgttctgagtgaggaaatggtaccaggaaaatgtatatgggtatcttaccctgcagtaagcatgtgggtcccttctcccactgaggccagaggagggcatagactccactggaactagaggtgtaggtggtagtgagacagtgtggggactggatatcagacactgggctttgcaagagcagcaagaattcttgagggcaattggatttagaattatcaacatgagtattacagatctggaaatctgagatttcctgggcgtgcgttactcgctgcagtccttgctatggcaacctggtcagtctgtattcgtaatgccgaaagacaagttaactctgtagacttagaagaaattcttttgactgagattttattgaaaagtttttaaatagccgcatgtgattcagttgtcccccaaccacagctttagtccaaaagaaccaagttaggatatttgtgctttacccagatggtaattataacagacagtaataggagaaccgacttagcaatgagaaagagagatgtgtatctgttacgcaggtatataggccagtctggataatcgacagagtagtaacctgtgaaacgaagaagagtggactcagtttcccatgctgtgctaacccagcctgcatagtgccccgggaaaacagcttaaggtttgcatacatacgtgagacctggtctcgtcgtgggttaactgtaaaaccagaattaagaaaaagttaggtgtaggggaagctgtgtttctaattctttacaaccgtgaccttgatttggctttaagtacaatgattttcaaagatcagtccagttttggctgcagtatcaataagatatttttcagtctttttatatgaacttgatatgtaaatttttgtacaaaagacatattaccaggatgattgaaaaaaaacatgccacaactaccagatgaatctggttttgagctatggttgaaactaaagattaaaatatgatttgtaaataatgcaattaaagtatttcttttaattaaagtagtttgtttatgatgaaggaggtagcagtttctcatccaacccagcaggacaccaaagtctcagccgggtatctggcttatcagatgatgtctccccctcccttctaagcagccctacccagcctggcttctgtgagccaggctgctacagaggtggcagcaaagaaccatgggattggcagagctgcagtcgct

SEQ ID NO: 19270 - DNA, 1206 bp, Mus musculus
cggtgggtctgagtgtcagtcaactcactgctcatgtctgatggttggtcatcaggtctgggttgtgcctccagccatagatacatcactctacgtattttcataccctctgctcataagctctctgagccagtctcatttcttgtctggtgaagatcacaattaatagaggaaaacctaccctgatccagtatatctccagtttaattttattaattgtctattaaaatatgcttcattgtcatatacatgaacttgaaggtcattcattcaacagtttttgtttttgtttttgtttttttttgttatacacttatagcacccaagaaatatttcttcttttactgtttttaattttttattagatattttctttatttacatttcaaatgttatcccctttcctggtttcccttctgaaaaccccctatcccctactctgtccccttgctcaccaacccacccactccctcttcctggccctggcattcccttatactggggcattgagccctcacaggaccaagggccttgcctgccattgatgactgacaaggccatcatctgctacatatgcagctggagccatggctccctccatgtgtactctttggttggtggtttagtcactgggagctctgggggtactggttggttgatattgttgttcctcctatggggctccaaacccagtcagttccttgggtcctttctcctccattggggaccttgtgctcagtccaatggttggctgagagcatccacctttgtatttgtcaggctctggcagagcctctcaggagaccgctatatcaagctcctgtcagcaagcatttgttggcatctgcaatagtgtcagggtttggtgactgtatatgagatggatccccaggtggggcagtctctggatggtctttccttcagtctctggtccacactttgtctctgtatctcctcccatgggtattttactcccccttctaagaaggactgaagaatctacactttggttttccttcttgagcttcatgtagtctttgtttttttccttttaaaaaattgagccagagttctccatctgtagccattgctagtctggagttgcatcctgagctggccacagtcctcttccctcgtcctctgtagtgctggggttacagattcaagccattccctcctgtgtcttcttattttattttgtcctct

SEQ ID NO: 19271 - DNA, 2946 bp, Mus musculus
ctctgaaatcctgggcagaagaaggtccagaggcgtcgtgctgtattttgagctgtataaaatacatgtggatgtgcaaggaccctgaactgtcctcggtacacaggtgagcagctgtgtacccagcctatacaattctatttgtttctcagattctgcatctgcctgatgtcatgggcctccttcgaagttttagatggtgttgatggtcaggccctgatcagtcagcttcggtggactgctcctctgatttctaagcctccaattgggcctctttgatacaaatagaagtcaggtatgtgacttaaatactaaaaatattaatattcccgtttgaattcgatgggaagcccttgtgcccttgtcttcaagaagttccaaatcacctgttttccaaaggtccagcattttgtggggacaaggccttgcctttggctcatcagaagacctgtctttccatcctactgagtggcaaaggtttggcaaaggacaaggtggttttcaaacagctgaagattttcttttgatgctatgaggatgaagtgtacctccgcgactgcacatcatgtccaactggaagactcatgtcttgaattacatactgcggacataagtttggtgggacggttttttcctacttttgagttactggtgatgtaaccagcccatgggtctgacttgatcattatgacaggtcgctgccctccagtggtaccactgacctacagaaggacatcatggcagagcaggaggctgtttaaaaattgagccaggagggaacttttttccatctgccttcaataatgtgaatgagtttaatgctaagagccctgaaacaggcctggtttacctggtatggttgcagaattccttcatcaactgggcagtcagacctctgctgtgctgattgagactgtctccaccttctctgccctcacaaacagcagttcatcacttggtcctcagaacctccttccagcaggggctgtatatttcttgatggaaagttggaggcagggttagaagtaaaggggaagtgagtggcatatcaaaactggtctgtttcagtccctaaaatggggggttatggagggtgggagtcctgaggtgagcagaaaagaaaggtgctgctttatttgaaatgttttcttacctcattctgtgccccagtaaagggtccagcctcatctgtctggcttggccatgttcctgtcactgctccactgcctctctggtgcagctcatgattccaggtgctgcttgccacactaggttttctctcgaccaatttcagctcatcttccagtgctgctcctccgaagcctacacaagtttcctttttccttttgttgtcgttttcgttttctaactttaaatttttatgttgttttgttttacctgtttttatggaagccttagaggagaatctctcatggctccctctgtttggattggaatgggaaaataacaaaaaaaaaaaaaaaaaaaaaaaacaacctttttttaaatttacaaggcagtgtcatgtctaagtgtttctcttatataaggctgccttgctagtatatctccctgcctgtcatgagttctttcttcccattgctacttggatacggcctcttaggacttactgcagagccaggaatgctggcatacacaaggaaggagttggttctgctccacatttctaatcctattgtgtatgtatcttccttctcccaggagctatttgaagtgtgtggactaatttggattatactcaaagagttgaggcaattatagtgcttgagccttgagactgtctgttgttgccttctcagagttttgcagctcagggttggggcctagttacagtttggatccttagtccaagaattttgagaacgtgagtaaaaccttggcaggagctaaaaaatacttaaaagataccttgctacatgagttctttaaaaaccttcagtgaattgtggaaaaacaaaaaagcagtgtgagattcctgcttatataaagtacttgggaaacatgaaagggagaaaggccatggcccactcactcttgccttcagatagggagctcaaatgtgactttagttttcttgccttttctggttagaacataaagatgtgggtagtagtttggggtaatgggtttgctcatattacttcccttcttgttactgcttttgttttctgtctccaacattttcattagggctgtagctccccactctgtgtagataaaaggtgggttcagtccagctattattgccctgagggaacaaactacttttttgggagcaaatgttctccagcatatagttgacagtggttaggagccctccccttcccctgccctcctgtaacagcagaatcctatccttcctcttctgttcattgtattgaccaaccagtaatcctattatgtatctgagtgtgtgtatagggggaaggggttctttacattttctgtggtttgtgcttttttcttcagtaaattagttcccaccatcgcatgcccaggggccactacctggcattatcgcatgctgggatcattgggggagggtagtttgaaattcaccactgtcctttgttttggagattcttattttttaataagtaatccgtcctatacaaatagctaattaactcttgtgttccccctgcccatatggctgctggtgtaaataaattgcattttcccattgctaaatgataataaaatttaaaagaaatattttgactcatcttcttaatggcatgtttcccaggggttgttggcatagcaaaatattttaccactcttgaatctaggtacttgaatgggaggtacatcaaaatccacagaggaactctgtctagcttttatttctcatataatccttcaaatttggctgtctattaaagaaaaaagtacataaagttccctttttcatatgaggtaaga

SEQ ID NO: 19272 - DNA, 1196 bp, Mus musculus
tttatgaaaatgtcagcaaaatggcaattgcatacttcataaaattgggattcaaagctattgaaaaattagtaagattatctaaatataaaataatgatttgttataattttgatttgttttcaaatcacaaataaatggcattgttcttcatactaccatcaaagtgaataatatttgctattttcatgtttagaactaaacatttttatatatcagtaaattttgagaacttatacctaataattttgaagaatattaaggaagatcactgtgtgtctaaaatgccttgttcaaagaaggacactcttggttttctctttctcgtggttttctacctcgtactgtcatgataattctgtggtaaactaggaattccatgcctcccttccacacattattaaagggataatttaccagttgtttgatgcaaagtttatgtgattttctgcatgctgatatctagcttgctgcatatgctagtttttcatagagtttcctctctttgtttaaaacactgccactcttaaccatgtctcatttatagaaagacaactgttttgatgcctatggtaatcatctctttgatcaaatgagaaatgagaaaaatttaaatccctgcaacgtctacagtttccctcattttgacacctatctaaagatgatgtcaatacactgttacatatatttcttaaatgcaagtttctttacattatacttgtttaggaatatatttacattcattccagtatgtgtgtttgaattatgcttcagtctttcaaaaaaatttctcatttttattaattagttattttatttctttacttcccaaatgttccccccctcaaaatatcccctcaaagagttcttgcacccacaaccaacttcacttcgcctctgagaaggtgctcccaccatgtatcctcccaccctgggcatcaagtctctatagtattaggctcagtctctatcactgctacctatgtgcctggagcttctgagcttgtgtagactctggttggtggctcagtcactgggagctcccaggcatccaggttagttcacactgttagtcttcctatgggaataccatcacagtcattttcttcaatccttttcctatttctaaagggtctctgagcttaattcaatgattggatatgaatatctgatcctgtctcagtcatctacttgta

SEQ ID NO: 19273 - DNA, 1105 bp, Mus musculus
gtgatttgtaagaatctgaatggattttaaaaataatattcactggggctggagaggtggctcagtggttatgagcatttgctgctgtttcagaaggtcagaattagtcctcctctccagctccggcgccgtagccatcatgaatgacacagtaaccatccggaccaggaagttcatgaccaaccgtctgcttcagaggaaacagatggtcattgatgtccttcatcctgggaaggcaacagtaccaaagacagaaattcgggaaaagctggccaaaatgtacaaaaccacaccagatgtcatctttgtacttggattcagaacccacttcggtggtggcaagacaactggctttggcatgatctatgattctttagattatgctaagaagaatgagcctaaacagactcgcaagacatggcttttatgagaagaaaaagacctcctgaaaacagcgaaaggaacgcaagaatagaatgaagaaggtcaggggcacggcgaaggacaatgttggtgctggcaaaaagccaaaggagtagatctgtggtgacttgatgttttgctgtgatgtgcagatttctgagaggacaaataaactaaaaagcttctaccaaaaaaaaaaaaaacaaggtcagaattatggttcccagcacccaggccagggggctcataattgtttaaaactccagctccaagaatttagataccttcttggtcttcatggacacttgcactcatgtgcacataaccatatgcagacacacacctagatataattaaaagtaattcttaaaatctttaaaaataatacttatctataaagaattttgtaacgctttctttttaggattttttaggggctgagagatttctcagaggttaagaatactggctatccgtcagaggacctggcttcaattcccagcacccacgtggtagttggcagccatctgtaattctagttccaggagatttgaagtcctcttctgtctacttcagatactgcctgaacatgcgcatagataagcatgcaggcaaaacacccatatacatactctaaaaacaaatacttctttttaaaaaatgatgtcaggtcaggcagaga

SEQ ID NO: 19274 - DNA, 3242 bp, Mus musculus
cagatcatcgacgacgagcctcaagctcagagcagcggagggtgctgttcctccggctaactgctcagcctgtgaccctcaaaacataagagaactgtggatcattgccctcaacatgaagactgccatattccaagtcacatcattttaccaatggagttatagaattaacagtattttcaattacgtttataacactgcagagaccttaagtgctaaacttagtggagtttgtgaccagagaattggcattttctacaaatgttaacaaagcaattaccaatggcctttttacatattttttctttaatgaggaataatatgcatgtagaaaagacctacttaaaggcttcatttatattcttttaaatcagatctttatttaataacttatatatgatgttggaatggtatacatttttgcagtcctttgtattttgtggtagtttgaattgtatcacttctaaacagcatactgtttttgtttttgttttttgattagcagatacgtgaagttctatttttgcagggtttgcacaggcccctaactgtctactactttgatataatctataaacatcctgtatgctgagctggtaaaatacattgtaaattacatattaaatattttatctgcttttacaagcgcaaggtgcaaaaatatatacaattgtcatcttgatgactgtgaggtgaattaaccgttggtgataacacctaagcttttgactctgttatagcgctcaccaccccttcccttgtcttaacgtggaagtgcgcacttacgtgttcacagacttacctgactcgcttacttaccggctgctgtcaccttccccttcccctttttctgtttcttttttcctttctttttcttttttcttttctttttttttggcctctgtatgtcccagtgatccaaaagcagcgtttgcctttttattgttattaaacaagtttccttctgccagtgttgttttagaatggttaccttataagaatttgagtgccgcttgccaagttttatttctgcaacgactcaagttttctgtaggcctttccaggagatgggctctgtggcctgagaagagggctcctgtagtagccactggccaaggcgtctttatgcagagcatgagtggtgatgtacgttcccaaggcagcattcttgggtcccttgtgggttattgcttgtcagaaatgaatatacaaagttgtatatcactttataagagttttcctgagtttctataggaagaagcattttgtaatgttgttacagcagactctgggaagattctattataaaatcatattcttgtttattttgtaattagtcccaccttagttttttttttttttctttagcattgtactgaaatttgttcatttagaaaagaatcaggcactgctcacagaaaaaaacagattgtggaaattaacataaattgttcttgttctaatatatatctatatttcccatttctgtcatgcttggaaaactagtaaatgttgtgtgtaagatgagacgggacggtccctggatttccttcttctaggaagtagaatataaacgcagttagtaagcattgctgaaggtacaccgagcgagtgcttccagagcactccagaggagtcgcttaaaccttcccaaagaggctggaaggtcaatggcttccaccttccaatctaaataacaggaactgaacttagccttgtcttctctgagccctccctgtagatttacttgtttacttattggccttgccaaatgcaaactgctgacctctgtgctgtgtgcctcgaaatggtcagagtggaaagagtcaggagagtgagctgcggtttgtggcccgttatgagacgactgctctgtaccagcctgggtttctggggaagttggtgtccatccatgcagaggcttaaggggcagcagaaagtgtgagtcgctggagaatgtattcctaccttctggccttttcaggagtaaagactgctgccaatcctactgttgtagataggaaatagactcttctcatcacaatagaatcctgtttctaaattagagatgaaatgaaaataagttaaacttgactgttgaagagctagactggagtttttcatgctcggttgtatcagattcacataggatcctctgctgtgtagtcgcaggtaatgattgctggggtagaaaacgtcctctatgttgtcctgttcttgctctgtctctgtctgtctgtctgtctctctctgtgatctatgctgattcaataacaaaaataagcaatcaggtgtacctgctgtgctatgaagcatggaaggttttaaggcaaatgaggtgaaaggaaactggccaggaccagtcccctgcgggcacataaaagggaagacaaagccgaggcagactgagggacagggttctcctggtactgtcttccttctgttaacatctctgtgttcctatagccatgctccgaagaaaaggcacaagacacactgcgggactctccacatgtgtatatacctgtcccatcacttaaagccagtttaagacactcattactatcgtcggtatgttaaaatatgcagtcactgttcctgtaatcaggtcctgctgcttggtttgctctgtgattatggaagaaggatgcttttaaaaatgtattctgcaacagtttgggggtaaactgatctgaaaagaaacgagtatcatgttatgaaatacatgcctgttgtgtttgtagtgtctcctaagaataccctaaaattatgattattactgtattgttatcttttttttttacatattagctctaaattattgctttttttgttcaattttctttttttggtgttagagaacaatagtatttcttctctctctctctctctccctccctatctctcccttcttctccatctttctccctccctatctctcccttcctctccatcttcctccctccctccctccctctctccctccctccctctttccctcctctctctactttagtttccaataataaaagataacattgaggaaatagaatgctataccccaacaatgtttataatcacattgacattacaattattgaagtttctagataaggcaaaatatacatatgtgccaaataattagagcattttcaaaaagtagatgtgatactgtttcttttagtatatagtttatcattttctgttttataaatgctgtcaggcttctacaccatgagtct

SEQ ID NO: 19275 - DNA, 1164 bp, Mus musculus
cagcctgggcattaaatgagaatcaatatctgtctccctgtgtgtgtgtttctatgtctctgtctttctgtctgtctgtctttctgtctgtctgcctctcccccccccccccccccccaggttaggactatagctccgttggtgtaaaccaattgctttgtacactcaagttctggctttcacccccacataaaccaggcatgctatcacatgcttgcaatcccagcactgggaagggtggagatgagaaattcaaggccatcctcaactacacaagaagattgaggccaagccagactagagactgtttctcaacttgattgaaaagaaatatatgttttacattttaaaattattttcattctgaaattttgactgggattgacatacctgggattcagggacttgcttgcttgtgctgtttttaatcgtggtatgagccatgcttcagtgtcttagtgttgctgtccgagatctgcttcttggttacttagcgttgtcaagtaattatgtacattctctggagcacttgaattcatggagtctccaagctttcctgtgtgtgtgtctgtctgtctgtgtctgtctgtctgtctgtgtctgtttaaatgatttgagtcttcagtgaagttggcatagactttgggtaaaagagaaaaattatctttttttttttttcccctatggactatattaagataatgccattgactctgaggaattaaatttaggaatttaaaaggtgcgtgcgcgtgcgcgcgcatgcctgtgcccttctggagagtacaactttctggaatcagttttctcattccacagtgtggattctgggagtcagactcgggtcatcagacttggcagcaagcacctttactcctgagccgtcttagcagctcaagaactgttcttattttgtacctactgtgtgttaaacattgtactaactggggatatgaagctgagaaggtactgtactggcagccagctttctcttctttttacaggactctgtcatttccacggtactcacccgttcccgtggcaattacttctgccttgtgtgtgtctttgtgtctgcactcctgggtaactcttttccttttttagttgtaccctatgtgtcctcactgaaggaacttggattgtgcaccttaagtgacatct

SEQ ID NO: 19276 - DNA, 1228 bp, Mus musculus
gctcctgatggagccctcaagggttggcatcggggaagcagggcagctgaaaccattgggaaagcagttgatgggaacagaacagcaagtcttgttttcagcctttctgatttcttttgctgtttctggcagccatctgtgtatgtagggtcctggctagagaaatggcaacccccacctctactgtcgtgaaagtctggagagctgccatcttctgaccatgcagattctagggtctgttcatctgtcttccttatgtttgacttcatgagcgggtgtcatcaccatgagaatgaactgtcctggcaaccacgtcccagacaaataacaacatgccctaaaaaccccaaacacagtgtgcagcttaatcagctcacccgctcacagggtatctggtaccttaactcctgccgggtctgagtattgtaaatactcaaagtaattgttgaatcagttcggttgacctgggagtatattctgggggaagcgcttaaagatgccaggtggctacctgaatttctgagtactgtaatgatcccagcatttctcaattgtgtgaaacaacattcatgagtttgaaaccaatgagtcaggtacttactgtagcaggagtggcagactggccaagcaggacccctaccctgttctcttttccagtgcaaaagggccattctcttctgtttgccctagttgttctctaaaatgttataaatgtggacacttctattttaaagacttgttttgtttttatttatgtacctgtgtgcacatttctgtgcacttaattggagacggcagacgagggcgcctgagtcccgggagctggagttacaggcgtgaggaggcgccctatgtggctgctggaaactgaacttgagtcctctagcacattagcaaatgctctttatcactgagccatttctcggccccctgatagagtcttttaactgtttttaaaacattggtcttagaactaagaggccaggcatggtggttcacacctttagtatcagcaccctggaggcagaggtatgtagaacgctcaagttctaggccagcttggtctaccatactgagtgtcaggccagccaggactacatggtgagaccctgactcagacaaaacaaaacaaaaaaattcccaaaagattcttctttaaataacatattattttagagttgtgtgcacacagtatgtgcaggatatgtgcttagaatgttgcattcaa

SEQ ID NO: 19277 - DNA, 1160 bp, Mus musculus
aattgccaaaattatttgaatgattcttcaagattaggctgatccctggctaaggtctgtgtaaggcagacaagcattattgatcatatcaagtttcctacaatatcctatccgtaaaaccggaagcaatgaacatgaatgacactcttggaatggataaatgaacttcctgtttggcctgcttctgggccctgccagattctctaacatcatgtacgtaagtatagctcctcaaagcgactgacgtttattttaattttactttgtttttggtttcattttttactttccctacctttatgttgtgctatcctggtccacttgacactctctgatgcctgagagattcttgtttgggatttagtttccagggccgtgtttacagtaaaatagcaggcagtccttttagttcctcctctaagtctctgagattcttcatttcagggttttaaacataagcagtccatcttaaggaaagtgtaactgccgcggccacaagtctgctagttgcacttgaatgttctagcagggttgttgactgccctttctacgttctggactccttgctgagactgtttaacttgaagattaaagaaactattgcaaatgccagtgcatcagaacctaagagtggtcaaatattatgtgcaattttttttgtaaagaaattttaatttataataaagtttaacagtttaaagaacagttaatagtgggactgttttgtgttcactactttgaagtattaagtggttgtcgtgcaaaatatttttaatataagtttttaataatggtcctctttgttcacgtctcgggtgggtaagggttgaagtaggagctaggggttcttcccctgataccatcgctttcttctgcaactccttccccggtcaaaacagcaacaaaacaaatgactttaattggtgagcacaggccttctcttttgagaacagtgagcagataggtttacattaagcactgactgtgttctcaaaaacagggttaatgtcaccaagttgcagtttgagttatctacccagagacatgctggcttctgttactacataggccatggaaagagaaccggcttctttttttttttttttttatggagttgtttgtgccttgctaggatagttatgactgaacaatgcagtaaa

SEQ ID NO: 19278 - DNA, 1568 bp, Mus musculus
tgacaaattagaagagcggcctcacctgccatccaccttcaactacaaccctgctcagcaagccttctaaaaagacttcccttttcttggggtatggctgtctcagcacaatactcgacataactgcagagctgatgtggctcaggcaccctggttttaatcccttgaggatctggcaattggcttacgtaaagaaagggtcaccatttgaggtcctgccttaccaattatgtgctgcccaacaactaaatttgtaatttgttttctctactttgagcagggtctgaattttttcatttattttctttttgccagcagacagacttgggtctataaagacaagcaagtacactgacagaaattaccatttagtttcttaaatgtaaaaaaagaaaacccacaaaagactcaacaaaattagaccacaaaatttgcattgttcattgtagcactattggtaataaaagaacagatgtttgtgcatttttatgtgaagatccttctcgtatttcatttggaaggatgagcgaggtctgcttctttctttttacttcccctgtgtttctgaaaggcggtttggccaggcttactgcaggcatccgactgtagagatcgccacagtctctggggctccagggctgcgctgtaactgagcttcatccagaatgagcaaaacactgtccagtctttgttacgattttgtaataaatgtgtacattttttttaaattttggacatcacatgaataaaggtatgtatgtacgaatgtgtatatattatatatatgacatctattttggaaaatgtttgccctgctgtacctcatttttaggaggtgtgcatggatgcaatatatgaaaatgggacattctggaactgctggtcaggggactttgtcgccctgtgcactaaagggccagattttcagcagccaaggacatccatacccaagtgaatgtgatggggcttcaagacgtgaactgagacaattcactctggctgtttgaacagcagcgtttcataggaagagaaaaagatcaatcttgtattttctgaccacataaaggcttcttctctttgtaataaagtagaaaagctctcctcactgcagtgttggctttgatttgaaattgtgacatttcttcttctccagaaaaacacagaggaaaacctcaggttttacagattctgaatggtgtgacttgatgtcagtcgtcctcttcttttccgatgtcggcagatctgttgatggggccaccctgggccccttacttaggaaggtggcctcagcattagctgaggggagcattgggtaggttggagctacgttgcaagttagcacctgaccagggtgggacccaaccagaaagtttgttctgtgagaaattgatgaggaatttggtggtagaaatttgagatttatttagtcttcatgaaatttaccttcagcttgctgacctggatggttcacacttgcaggtgactgaattcttaaactgtgtggaggcaaaactgtggcttaaactgccaggaggactagagatagggaacaggctatgtggaataca

SEQ ID NO: 19279 - DNA, 1223 bp, Mus musculus
aatactgaaacagaaagctcatgttggccggctgatagttttggaaacttaaaaaaattgcatagattttatagattttggtataagcttataattgttaaagttttaataaagacattagaagcaaaagaataagcagtaaacaaaacataaatttataccaatatgataagtttgttttgttgtatgtctaggtagttgtgacttgacataaattccagaatgccttcccatggtggttaaaaaatgctgcacccccttaagccctcacactcttcaacgttctaaagtagacatagtattgacacacagtttcatatgtgaagacttggaaattttaaaagaaaaaaaccctgtgtttggaaaaattgtatttggagctataattattcatcaataagtaatttggttgtatgtggggccgtgaaaatataccatatagtcagatttgtatctttatctgagtcccatcacccttagttaatctgtttcaggatcgtagcagtacgtactcattttgtttctgtaggggtaaagtaaagccagacttccaaaatactactcttgataaaagtaatatttttgtctaggtgacaaacagcatgtttggtgcttcaagaaagaagtttgtagagggggtggacagcgactaccatgatgagaacatgtactacagccagtcttctatgttcccacatcggtcagagaaagatgtaagttacgctgtctttcctcagcagcgctgctgtgttccctgaaggaggagcgtgtgagctccaggggattgtctgtgctaagcataggtgtaggtcctggggacaaacagataaaccttgctttgccatggggaccattagtatcctgggcttcttaaacagtagtaatgctgttataggaagtactcacggacatgcgctaaagactgtaactttggggtaatctgggatttttgtttcatgataagtattttttttataataaagcaagtgtacttacaaagttaagcgagcacatttgtacgtcttggctgtaattcttgcttgcaagttaagaatatccttctccacagctacagagaccacagtcaaaagtctttggtactgtgtagattctacagcataggtatgctttggaagagtagtggatcaataattccttccacatgaaaggttattaagtttataggctattttaaaatgaatgaacttaagtcatttcactct

SEQ ID NO: 19280 - DNA, 1187 bp, Mus musculus
caagaattttagaataacatgatcttcagtgatagccatattatcattttgaatttgaagtagcacacatataatagaatgcatttatctctaaatcatttagcttctatattattaaacaaatatacacatgtgagtgacaatgtaaatttttactaggatggggtatagttcagtgataaagcacttgcctagcgtgtgctgggttcagtctctagcactcattcccccaagtgagtagatttattatttaaaaatctcatcttctgtcatcagattgctttaaaatgctggtgtcaatttacagtgacttccctacagcctctgcagtgctggggctacaggtgtgcaccacctcacccaccttaatacttaacattttattatttgattaaagtgactctctggtggacaggtccttatttgtttctttatcaacatagaagcacttgaggaattaatttcttcccaaagaatataattaaaccaaaaggtctctcatttttaagagttcactggttctgtctgtgtaatccaactttcattctgttgactgatggtgctaacgtgacgagagcagagagttaatgttgagtactcaagagaacaagagtatgtaaggagtggctaggcagcatacttgaacatactctactagcatgatttcatgaaggccaggtaagccctatccttgcatattttgggaaagtgttcagagctttgccctttttaggttgttttaataagtattttgaagcagtctgaaagatgattctggggttgggaatatgaagagataaacggagtcataatgttgatactggacattcagatctttatagcatgatttccttatttttcaaagagcagaagaatcccatcgtttatcatgttctggttggactcctttcttatcgtttgctggagtttgaacttcagagctatggtgtcaaccctgctgtaatatctcaggggagctcctagtgtggggctggtgccatggctcaccctccaacctttccttcttcacttcagcctccagctctgagctttcccatccccagagtagcaaatgttgaaagaagttgcacaggtaagtagatgcgggaaagctgggctcaacagtgctctcttattcattggtgttttgagggtgggtggggccatcttgccagtgagtcattttg

SEQ ID NO: 19281 - DNA, 1238 bp, Mus musculus
tttacatcctttagcgtggaaataatctttgtgagcgacatgaatcaatacatatatagcttacattcctagcatctgagtataggcagtggggtgggccatctagttaatgattgaatttgaattaactggtcatttggagaataaccagagaatatttaagacacacaaaaaagcttggggtcagggggtgggtggttgttgttgttgttttcttgttttttttttgtttttgttcatctatgtttcttcctgttgtgtgtaatgtctggtattgtgacaaagtagtggaagcaggtgtgaacgaacagttttcatatctgataatctctacctcagagcccagtgctagttgcctgctctcaatacctagggggagaatgggacagagtctaagacagttagctgctttttaggtttgttctcattgtattttgtgtgctatgttgaatatttttgttaatgttatgtatatttacatgttagtaattttgatggcttttggataattccactctagagggagaactggtgggcggtccttcctgtgacacgacccttgagtgacagttctatttgattgcctccagtactgtgaggaaaggacacgactctatggtgaggactgatggacatacattatctgagaaaagaaactaccaggtaagatttttttccctcccttttctccatttgtcataagtgtattgagctgttttaaagtaatataaaattgtaactaacagtaaatacaatctcctgaaaatttgtggtataagtttaaatattacataatggaattgacagcttgaaataattgtgaatgttttacaaaatgacatgtttataatgtatatttttaacaccagaacaattttctgacatatgccaaaattttggattatctgatatataatatatgatttttggctggattcaaaggcagtagttcataaagtattttacacacattcctgaaagaaggaaatgtaaattttgggttatagtttctataatagagtgatagagaaatgtacatagcattgagtaggctatagaagaaatataaatggaatctaggaatatgtgacccagatcctgttttgtcactaatatgctgtccttacaacatcagattcttgtttcgctccttacttaacacttcttaacactatccaatcttaattatgtaggaatgctcaaaaggtaatggaactgtaacattcctatttcttcct

SEQ ID NO: 19282 - DNA, 1183 bp, Mus musculus
ctttcagtagtaaattttcttgtagcacctttgtaaggccagatatgtagatagtgctcaaatttggttttatcacggaatgtcttattttcttcatctattgtaattaaaagttttgctgggtagagtgttctggactggcatcggtggtctattagagtctgtagaccatctgtccaggccctactggattttagagtctccattgagatgtcagatgttaattttaataggtctgcctttttatattttacttggtcttttttcttgcagcttttactatttctttgtttaggttttttgttgttgttgttcttttgttttccccaggaatttcttttctggtccaatatacttttatgttccatatgtttatacttcgatatgtagctcctttaggttaggggaattttcttctatgatttttctgaaagtattttctctgtttttgatctgggtttcttcttcctgtattcctactgtttttgatttggtcttttcgtcatgtcccatatatcctggatattttgtgtcttctcagttcttaagctgatttagttatttccttctgctgtttgtgctttcatgggtatttttttaaagggacttattctttttctctgtcaggacctctgtcatattcacagaggctcttctaaggtactcgtcttgcactgcagctgtgtttcagtactcggggcctgctgtggtagggttgctgggctctggtggagacctcccgtcctggctgtcactgattgtgcttttagaatggcatctaagctgtagttctaagtgctgatatctggactttgttagttgggtgctttgttctttggtttctgtttctcacactctctggttcttgggaaaatgtgtagaccgtatgtttccagatatttttatgggatcctgctaggtgtggccactagggggttccaggtcaaatgtgtttctaggtgtaggtagctgacacttaggaatgggaaacaactaggaggtggagaggaaggttgaggggggtcacaggagggaggaaagcagggtgttccatcatgatctgcttagtcccttgggaatgagcacagagaataaacagaggccacagcagaaggtctgctatagagctgggattagaatggggattggatgtggagaatggagtgagcagtgaatcttgttt

SEQ ID NO: 19283 - DNA, 1210 bp, Mus musculus
tcaagtgtctactttgacctgcgttcaacatggcaacactagtgaccattgttagtgactggtaaagctgggtgcccacggagcccgagtggtggctgacggtaaagctgggtgcccacggagcccgagaggtggctgacggtaaagctgggtgcccacggagcccgagaggtggctgacggtaaagctgggtgcccacggagcccgagaggtgcttggtgttaggcgtcaggtgctgcattgggaaatgccgagtttgggtttcagccaattgtacattttcattgaaacttgagcagtagttgagatgacacgttatgacttacatgtctcttctctgtttgcgcagtcgatcagatgttttgggaagttatgcagttgagaaaggagatgtcgttggcaaagctgggatatttcaaagaggaactctgatgccctgtgtgcggggccgtgcgtgctgcccctccctggaccactgaaggatgacggaacatttttatggttactcaatatttatttctaaggagaggccacagacttccctcctcttgcacactacactgagaagtgctgtgatttcttttaagctgactgagctgtatcccttagtggagcacactatgaagaattgcaggcgctagtgatggtaattcaacactgcaaatcaaaaccaccaaataaatatcagacggagtgcgtgtgtctttcttagctctgactcggcatagagagttgcagaagacaatagtagtcttccctttgttcccctgtgagaggcaaggaaggagccaggtggacaggactccttcctgtctgtgtgtatgctgacatccatacgaaaggttttatttattattattctgtccgctgtaatgtagtgaatcccttgatcataatggtttgctaagtgcaataaatgaagaacagtgcgcgtgcttgagcatcctggcttcatgttagcactgagcatcatcatggaatagaaggagtgttaagattaatggatgagggcgtggtctagacggatgggatctgccagctctgaagctgatactcacggagagaccaccaacatcattcgcacaagtaaaataggttcgtgtgcagacatagtgtagggggggcaaggaaaacagcctcgttgactccactatgatcactacgctcacgtttctggagaatagccttggacttcagatatttcctacgt

SEQ ID NO: 19284 - DNA, 1151 bp, Mus musculus
tgaggagaagagggtagctgtatttgaattgcatataatagactttcagtcaaaacttgttaagagataaggtcattacataatgacagaaggatcagttgattggatgatgcaattaagtatttccccaataacaaagcgcccagatgtacaaagcaactgtcagatctgaagggaggaaagaagtacgggaatagagatgtgttgctgtgattgctcagatagaaaagcgagacgaagtagcagggtggatcgaccatatgcccctagacgtacacagaactctccacaatacagaagaatccacgctcttctcgtgtgtacatgaaatattgtctgggataattcctgttacatcacaaaattcattataaatttaaaaagatagaagatccccaatgctttttttccattcttctcagatatattcttccagtctacccacaagagaggtctgggaaacctttctgccacagtgaaatttgattagaaataacaataacacagtaaaatacacaagtatgtgtatactaaaacactgaattggggttaaagacggaaccaaaagggaatttgaaaaacttgttgagacaagttgagaacatagcataggagatgcagcaaaggcggtactaagaatcacggtagtgagtgcctacaggggagtacaggagggcacgcgcttgaataccacaccttaaggaatttgaaaaagagcaaactgagccccaagttagcaggaggaaggaaataccagagtgtaaaaggagcagagacaagaaaaaaagagaaaatatcaacaaaactaagagttgtttttgaaataaagcaacaaccaggatcttactgacctgagggagagataaggctttaacaagatggaagcagagcacagggaagacactcaaaggcatagagtcctttaaggaaaaacatactccagtcagaaaccactagaaaagaaacggagaaattcctagaaatgcacttcatcaaaatggagggaagacgccatggagagtcagaagagacctgtgacaagcttgtcagtgatggatgtggccagaccaaagagagcggttcagagctggatggcttcacataaataaagggagtgtcaccagccagcgacacaggataacacacatccc

SEQ ID NO: 19285 - DNA, 1329 bp, Mus musculus
ctgtcacttgtgtgtcactggacagtgaggggtgattgtcagcatgctgtgctctctcctcactctagcttagccgtgggcaacctgagtaggttgaaatccaggacccctgagtcgttctttggctttggtgtaatgtgaatttggtaaactttcctaatccttacattattcaaaatcatgccgtaaaccacgtgtggtagtgcattccttagaggctgcggcaggatgcttgcaagttcaagtctagtcttagggtgtgtggtaagatgtgaccttcacaagatggaaagaaagcaaaaaccaggctagcctgttttgggaagtgtattgtttatcgagtagctgtttgggtcaggcactgcgaactgctgagtacaggcctgcacactgctgaattgtcctgtgtcctcctaatagtgacagtgattgtgtggtgttccgtcctcatgggaagtgggcctgcagtgactactgagacagaggttctcgccgtatttgtagtcaatgaaaatatagttgaaaccatacttgtcattgtttacttttccttaatagtgtgggttgttttttttttttccccttacaggaaacgtgtccccgatcaccacccctgttaagcattcccatttgctgatgaactctgggccagttcatagcaaagttgtacttggaagacttcaacctttaaagaagactggtggaattgacctgtccatgatagccttaagtttgaacattagctgaccttctgtgttaaacatgggtctaatttatttactgtttcattttccatacaattcagttgatttacaagttcatttctcatactgtgtattaaaataaaaatccagttacttagcccttaatgtcttactgatctgtatatatcctgtttgaaattactcacggaagcagtcgtacctctgtagagttgtttcagcctaatcaattactgactttaccgtttaataaagtaattatcttagttatgcatacacacacacacacacacagtcaggcatagcttttactgaacattaatttggagtagaagtactgtaaggtagagttctgacttagtttaatatgagtaccccttattacattagacaacctttttatttctgaagtaacgtttaaccatccacagctctctctctggtgccttaatagggtagcattttcctatcctaagtgtgagtgttagatgtcataactgtcttgttagggttttttgttttggtaaacaggaaatgagcataggtatgtattaggtttaatttacagttgacacagatgtggaagttaatcagaatattgaagcgt

SEQ ID NO: 19286 - DNA, 1169 bp, Mus musculus
tagctgtgtgcaggtggccactgctgctgacgtcacgggtgcactgggcatctcaggtccagaaggcagcatgccagagcactccttcaccccttaggttccttctaccctgttctgtggtgctctcagagacctggttagggccgcgcactcgggcattcgcttcctggacttgggcccgttaccagactccccatggactctgcccactgcaggcagccctgccccatgcgtctacacaaaaccccttaaaagcacttgtgtgggctcattgtcattttgtttagtttcaagactggctgtcctggaactcattctgtaaactaggctggccttgaactcggagattagcctgcctctgccgccccagtgctgggattaaaggtgtgtgactccactgccaggcctaacaatttttcttgccagttttttcttaaaatagtgcttttgtagatggatctagctaaatcaggcagtgagatgcagtaacagctttagttttattatgagttattaggaatgttttaatgcctttaataactaccttttcagatatgaaggaaggtaccatcggcgatatggcagtactgggtataacagagagttttcaagtgaagcgacaggttcttctgagtgcggctgaagcagcagaggtgatcctgcgagtggacaacattatcaaagcagcaccaaggtaccagagtgctcgtgctcctagggaaacacaggccggagtccagggagcttgataattgtgtataatgggacagttccgtcttagtagacggttacacaaactatctaaagtaagtagtcgtagttcttagaaaggcataggaggaaactggtttgggtagccaggggcacactcatactggaagggttaaagagccaggcttctgaaggtcaggtatcagggagcgtgtgggtatctggtggttttaccaggatgagtcaggccgcttgctttcctggatatccttataggtgcgtgtgtgcctgacctggtgggtctgttgttggagatggtcttgctgtgtaactggggctgccttccagttcagaaccctcttccctgagcttgcagtgctgaggcggcaggcgccccgcacgtggctcacaaacatgctcaaggctcctttccacgttcacgctgtagaaggtgactt

SEQ ID NO: 19287 - DNA, 4090 bp, Mus musculus
tcagggtgatgtggtttgtgtctgtactgatgctgtagcgttgcctgtgtgtattctcttttttagttgtttctttgctttattaagtttatgggtcctttgctatgtgtatgcctggtgcccgtggagcacaggatcccccagaactggagttactgagggttgtcagccagcacgtgctgtgcaggtttactaatgcatccttaagtttattaccatctttatgtttgttgtaggttttcttttggataaaaaaattggagtaaatcaaccaaagagaattgaaaatgctaaaattcttattgcaaatactgggatggatacagacaaaataaaggtgcgtggctacatttcttgacaggctgttgctggtgctgttaacgtaggagtcagttacaccaagcagatgagacacctatatacactttgaagcgtatgttcgtagaaacgctgaagtacgtacggtgtattttaagaggagtgaaccttacactgcctttatgtcttcaatcttagatatttggctctcgggtaagagttgattccacagcaaaggttgcagagatagaacatgcagaaaaggagaagatgaaggagaaagttgaacgtattcttaagcatggaataaattgctttattaacaggtgtgtaacctaaagttacttttttctcataaaaattgtatttcctatcaagttacttattgttagaaactgctgcacacggttttacttaagattgcagagtgtggcagttcctccaggctgctgctcggaggactgttagcttccgggcaggtctctgtgttctaaggttcctcggtcctttattttcactgtcctcagcctcacacggagtgcttgctgtggatggagtaaggctaacatcatgcaaagccccatgagtgttaacagtgaggtaacagtgatctaatggaggtgacgccagacaggtagaacatactggggattcagttatggaggtcaggacaacgtgtgggattgcagtctctatcgtttgagactcaaggattgagcatagatagtgaggctggattttttatttccggtgaagtaaaagtgcttgcaggtttgtgttgtaatgtaattcagcttgacaaggagccattttgagcataacatgtattttattttcagacagttaatttataattaccctgaacaactcttcggcgctgctggcgtcatggctattgagcatgcggatttcgcaggtgtggagcgcctcgctcttgtcacaggtatggaaaatgcataccttaggaagtgcagtttccagtacgttactgtgcagtgcactgagaataggaagaacccccttaaagagttgagagtatatactttgagttaggcctttaatttccttacattgtttgaagacttagattgattgattgattgtgcatgtggatatgtgccctgcttcaccagtggagatcgtagcactaatgttttcctcttcctgtgtgggtcctgggtctcagctcaggttcgaactaccttgctggctcctctataccattacaggcaattctctctgtacttgagtttctcagatttttgggtgtggagtgtagtgattgactgtgtatgatgaaatgacatagggtaggacccaagtctaaatatgaaatacatttctgtcagatgtgtatactcacgcagagagattgtcagatgtgtatactcacacagagaggtcgtcagatgtgtatactcacacagaaatggtttacgcagcgcttttggttgatatgcagttttactggcctttcacctgggccattttcattcttacagatgcacatttggggtttccgtttaggaatgcttaaagtgtatgccagattttacgcgcacgcacacacatgtgtgcatgcacacaccacacggtttgccatgactctagagtgatgtttcaagacagtccattctttctcacagaataaagactttactttctgggcatgagcaaatctgagcttaaaagaagagtctcgagtattaaatcttaagttaaaccttagtttgttttgctgaatgcttagctccttatgccccgtgtgaggtaaagtcagtgacctttaatgacgacatcgtgcccttcagagcgggtcaagtatgtaccttgtgcttgatttgacatatcttttctaagtttctaatttacaaaattacggtaaaactatttaaatgagtgaatcaattctgtaacagcctcaaacccacagatgtgtttccggtgatgttcgcaggtggtgagattgcctctacctttgatcacccagaacttgtgaagcttggaagttgcaaacttattgaagaagttatgatcggggaagataaactcattcacttttctggggttgcccttggtgagtgactgtaaatcttggcttaaggacctaagtccttgccgacctctggaagtgggaaaaaagttgtaggactggagagatggctcagcggttaaggacctctggttctgagttcaaatcccagtgaccacaaggtggctcacaaccatctgtatgagctctgatgccctcttctggtatgaagtcagcggcagtgtactcatactacataaagtgaaacttttttttttaaggtttctatagcactgaaatagatatcctatagatagataccctatagatagataccctatagatagatatcctataggttgtcgagatggctctgagtggaagtgcttgaaacttgaagaccttagttccctttctgggaccctcatggtaggaggagagagccaactctcaccttggacttccatgcatatatgcacccacgcacatacatgcatgactaaggattattaagtggactggatatatgtgtcttatgagggcaaatataaattttttttaattaggtattttcttcatttacaaatataaattttgagagagcctattttatgttctgtttcagtgtcttaaagtcaggttgatacttgctgccttttgaaatgtgtacatttagcatagaatttttttcttcatcactcagaacatttatgaacatggatttttgcagagaagcattgctaccaaagcccaagactagtcgagtcgttacttactaagtcgttacttggagtgcagatgatgctgtggtgagtggctagacggtcactgattgacgtttctccttaggtgaggcatgcaccattgtgcttcgtggtgccactcagcaaattctggatgaagctgaacgatctctgcatgatgctctttgtgttcttgctcagactgtaaaagatcctagaacagtttacgggggaggtaagcatttcaagaatgttacatactttgtttcttgacagtaggtccgacttagatgtgaacatcttggcttttatagaaacagagacggcagagtgcataacaagttctgggttacatttgtaggctgctctgagatgctgatggcccatgctgtgacacagcttgccaacagaaccccaggaaaagaagctgtagcaatggagtcgtttgcaaaagccctgagaatggtaagctatgaagagagaggtgaacatacatttcatgggcttgattttaaactgaatatatttttgtgtcctagagaaaaatttttctctttgcctttacaaaactacagtagtccacaatgttttatattttgattctacattttatacgtaatcatgaatcattattaagaaacaaacagccaagcagggtgtggtggcacacgcctttaatcccagcactcgggaggcagaggcaggtggatttctgagttcgagaccagcctggtggtctacagagtgagttccaggacagccagggctacacagagaaaccctgtttcggaaaaaacaaacaaacaaacaaaccagacagccaggcatggtctttacctataatcccagcacttgaggttgaagccagatgtgagaccagccctgtctgtaagagcttgtctttaagaagagcaacaggaagcaggctttccctgtaattcagctgtctctctaggttagaggcagtgtggtccttggtggttattcatcactttgt

SEQ ID NO: 19288 - DNA, 1096 bp, Mus musculus
ttctcctgtgttaccatccccaatctcacatccctctccagtggcagcaagtgttaccatttacaaaacttgctggtatttttcttttcttttttctttttttctttttcttttttagatttatttattattatatctaagtacactgtagctggtatttttctgttcacttataggtaagtttatcatgttacatatttttgcaacacatttttaaagtaacatactgttttttgtttatgtgtatctgcttttagtgtgtttaactgtcatatagtgttctgggatatttgtttccattgctgtcttgtgacagtgtagcagagctagtttgtattgcctgtatgtctaagctttttacacattgaggtttggttgtaggatacatgcatagaaaacatttagtagccaactaactatccagaggttttggtatctgcatgtattcttgaagaagtacttagaccttaatttgacagaaatatatttcttttcaggacaaaattctcctaagcagtggacgagacgccgctctgatggtgaccaacgacggtgctaccattctcaagaacattggtgtggacaaccccgcagcaaaggttctagttggtgagtataagatttgcttgttgttattttccaataatttattccctgataggctgtcagctacttaagtgatggccattggcatttatcgctagtcagatgagtgtcagaagtatcattgttacccatagtccacggggggctgctgccaccacaatttttaaatggtacaactcagtctggctgaactgccaagtccaagtgggccctttcttggtgagttctcttgctgtcataatgtgacaaaaggcctaacttggtgagacagaaaaagattaggggttaatttacatgaactcgtgaggcacattcaagctaaagtatttaacggttaaaggtcttccaaaattttgtcaggtgcatattactaatggagtttacgcttgttgtggaagttttaagagaatttagtaatgtggagaaataatttcactttttcctagatatgtcaagggttcaagatgatgaagttggtgatggcactacc

SEQ ID NO: 19289 - DNA, 1223 bp, Mus musculus
tcagtgtgccctgcacagactagtgccctgccggctcgctgcctggttcccaaccctgcgtcctcaatgttcagggtgtaacacagttctctcatagcatcctatcattgaaattgtctgacagttggacaatgaagcctggaaacaggctggtacagtgtacaatagtcaccaggggccgagtttgcattagtaaatgcaaaatagatgttttataaaggacagactttgtgttatgtttctattttcattacattgtataataatgtaagattattgtatgttctaatttgcattataaatgtttttttcctacataaaggcataaatatagcaactttgtataaaggtagcttattagattttaatttttcttttataaaagttgtctacagtgggactaccattgccaaattgtatatgagatatgaatcttcccctatggttaatttcttttctaaacattccatatttctctaatgaaagacgtgatactgtactatgcataaattgtgttttaatgctgtttcatatcagcaggttaatcttgggttggcaaacgtaaccactgttattacaataaaaccttgtgtgtgtaacggcgtcactggccctctggcccctctgtctttgttcttgctaccccatcagtgccaatgtcagacaccctgtagcatggcaataaaacagaccgtctacactgaggccgagtgtggctttgtggaggaagtgtgggtgggaggaccaccccacagttgtcatagtgtgggcctcttgccatgtcagccgtgttgtcaggcataaggagttatctacgatgtaaacatgctttaaggacaagtgtgcgagtgcttggaagctttgcttttgatgtaacaggtaataactagttgttaatctttggaaaagtcagagtccttgaagtacaatcaagcctttattaactggagtacttaaagaataagctaataatggaattttgttccacaagggctaagcaacacttttaaaattctcttacttattgtattagtatactttcctatcctaaaattagaatgtgtaaaatgtggctccatcttagactgtagcatctcgcgaggccttcctgtcagcatccgggcgtaaatacccatgatgggtacaaggtgatactgaagctgagctgacacacactgaccttcagcgttcaggaaaactgctctgtggaatcaaatctgatg

SEQ ID NO: 19290 - DNA, 2589 bp, Mus musculus
aggcactccttagaacactaatctcctgatagctactcactgtccagcagcaccccattctcacagtgcctacttaccacgagaattgaagtgaatgccgtgctgggtgacctgtcctcagcatcctgggggatgcatagctttcatgtctgagttgtggttggcgtttgaaccttttataaagtctcttgataatgcgcattgctaacataactctgggccctgagaggaaccctcatagatcactgttcacagggtatggtcgccagcatggaacgtgaggattttatttcattagttaaaggctttttgtcttgggccaaattcgtgtcaaagaacaaggagaaccacacttccttttgtaccagtcagcacctctgtcttgagtgtgctgtgattggaaggcagccaggagacagctctgtgtccccacctcctggtgtcatctgaagggcgtgtccagatagcatcttactcagagttaggatgggcttaggagtcagtctcaggtcactttacccaaaagcatttgaaagtctacccctgatctctcggtgtgtctgcggtagattactgacagcacacatgtgtctgcagacactcgtgccattcagtcccatggagcttcagtttcccctttggtctttgggttgtcttaccttgtatgtaatgcttttttcaatttacaacacaatgtttgtgtatcgtcttggaataggattgtgtgtttgctgttactacttaggctgcgtttttgttgttacggtcctgaaggtccatttgggactgactgttattctctagctgggttgcccttgtccagtatttatttatctcctgcttgcttttcaagttgatgaaaaaaatcgacgtttgggttttaaagttcatttgtgtccatgggtgatctctttagtagctgagaaggaaaggaagagactcttaaacatgtgagtccccgaaggtcctgtcctcgctggggcgccctgcgctgcactttagcaggggttgtctcagctccatggctgcaggcccgctctccctgctctgctgtcctcccacgtggagctgggctctgattaccctgtgatgctggtgagctgttaatattgttgccagcataacaggaacagggaagtcttaaagaggcgccgttatgtcatagcgtgaagtgaagaaaggccactcagactgatgtgctcccagaccgaccactggacagtacagggaggggcagcctgcgggataggttatcttttctctaaagttggagacattcctggttatgatctggatataccaggtcaagaaaagggttcagtcatcggcaggcagtgtatttaggaactcatccagagcagcggctggatttgcagaacagtagtgcggggccataatatctagatgtttcatcatcttcagcgccattgcttcatagcatagcagacgcttcctttcctttccctctgcgaactaaaatgtttgctgttctcttcaagagaatagtggatacatgtgcagtttacatatttaatacactgttccattcgtcctttcttctgagtagcttgctaattgtgccaaatttcagtggtggttttgtggtgtggggtaaggacgcttatgggaagggcgcaggtccagacagaattagccctccacctcagagggctggtctgcgcggccgtctgcaggctgggtgctttgttctttctctgtactcttcacttttcccttcagatttgaattagattttatattttttagctgactaatatcatcattacagctatgctttaagtagtatatggcttaagaatgcaaatgggaccaatttgtctgctaagaatttgattttagggtacaatatgaatattaggaagaggtaaacaggtgtgttaatttctagatatcttctggaaaccacctttgtttctgtttaaccagtcctgtagaatccctgtgtcctttacagtcgtctcatgatgggcatttagctctgtcctggaagaatgtacctgctactatttggtgaattttagagtgagatattttattggcatatttgtagccatatgtctcagattttctgaatcaaacctaatgtcagatcattggttttgttggttagaccatgttaccccactttctggttttggaaatataatccttgctccctccttttctccccagataaaaacccttgcttagtccatatagtccatatagatcctaacacttctacagaccagggctggagactgatagggcatcactagtgtttcctgactgttgtgtcccagtttcatcttcctttgaaaagtgaaaatatggtgccttccctccctcccttcctccctccctctctcccttctttctccctcccttcctctctccctccaagaagacgggcaaatcgttccttgttctcccactgctgtggagtgatgagacacgcactttactcttgaagactcagcaaaaagactcacttctcagcatatccataatagaccacatttcggacttaggaaactttgccaagcagtctctgtcattacagatattaatgttgcctcccccaccccc

SEQ ID NO: 19291 - DNA, 1178 bp, Mus musculus
ctcttgcctcagagtctgccacctctcggtaggcgccacagtctggtcactgtacccatctccccttctttaggttctcagcccactctgttagttaggctcccccctccatgcttcctctctgtgctttaaaaaaggaaagaaaaaccctttttctgcccattgattgaagatctgcttctttaattacgtgacacctaagacggtggtacgtggtgctcttcgtccttagaagacttgagacaggacagttataaagttgaggccagccttgccatacttacgtgtgtgggcttgagtgtatgtatgtgtatccatatgtgtgtgcatgcacgagccctcagaggtcagagggcagtggatcctggacctggagttacttgggcttgtgggccatcatctgagtgctgggaaccagacctctgcaaaagtgctaagtcctctcacgtgctaagctgcctccagccccggctctccttcacttaatagcttcagtggtccatggagtctgctttctaagctcctccctcaaacccatatttccatacttagctctttgtttgtagcctcaggttaggattgtcgcagctgagtccgtctgcaccagaagagtccccagcacctacacagcagatagaatagacccttgcttccggctcctggggacagtcagccactcagcactgttggctgtggctctaaagccatgactttcttcctcgtgctactgctgttgtgttgctaggcttttatcctagttcagttttctcactcaagtgtatcctgcgggcaactaaattttaaacacacacctgagtatctcccctttgtggttaaaatgaatgagttttaaggagggtggggaaagaatgctatataattttaagattttcaaaatgtttccatcaattacatcttttttgtaaacttaaaaaagtttacaggctggagagatggctcagcagtaaagagcactgactgctcttctgaaggtcctgagttcaaatgccagcaaccacatggtggctcacaaccatctgtaatgagatctaactccctcttctggtgtgtctgaagacagctacagtgtacttatgtataataataaataaaaaaaagtttacaaaatttaataatttagcccttcttggtaaaaaaagaacaacacatatggagca

SEQ ID NO: 19292 - DNA, 1177 bp, Mus musculus
agaagattaggaatagggcagttggggtggaggtatgtcatccaaagagaaaaactcatttggccccagaacttgtaagaacatttagtgttactgcgtctggagaacccctagagggctcgaggtatacacagccaccagacttgttgccgtggaattctaaatgtttcctgcagtgtgatggctaatttctattgtcagctatctagaattattttgattaggttaattacaatgggatgacctgccgtttgtgggtggcatcagttcccagcctaggattctgtctgtccgagaagcagaagtgcgtgaggtccatcctctgctccttgacagtgcttacagtgtgaccagctgtctgcagctctggggctgtgactccccactctcttggactgtgatgccaagctctggcacacgtaaaccctttgtcccttaagttgtttttgccagggtatttcatccctgcagcaggagaagtaactaaggatgggatatcttgtaaatgctagtggtgggcacatgaccagtcatgccttcaggagcgaaccgaagtgttctggaggcagaggagctccactccagctcagggaaaattggtcaggacataggggaacagtagatggaaatgataaagacagagaagattcagaaagtttacaaaatagataaaacgttgctattctgaataaaataattactttgaaggttttttccctttggtcctgggggtaaaatccatggttccccgcccgccccaagcgagacctgtgctgctcatccagacaccacaggcttggagatagttttctttttctttttaactagtgatttcatgttatttttaacccaacttcttttaagatttatttttatataggtgttttgtctgtacatatatatatatatatatatatatatatatatatatatataaatcttatataaataaatctttactccagaagagggtattaaacctcatgggactacatttgcagatcattgtaagccaccatgtgggtgctgggcttgacctctggaagaatagcctgttctcttaaccactgagccatctctccagcctataaccaatgatagttcttcaactatcattataagcaaaagcaatattgaacagtataacttcatatgggatcacataactgtattggaa

SEQ ID NO: 19293 - DNA, 1361 bp, Mus musculus
ggcattccttgggtgtgtatgctccttattccaaagtaatggtaagtatccagaggataccaacaatgtctcaaagtcaaccgtgagttagcagctgcagcctcagcttggagagagcagtgtggcttctccgtgggagtttagacttcctccccgctccacccaccctgttcagtgctctgtctccatgcaggaagcggtggccttaggaagtgctgtttgtcctctggtgtcataagaggatgggctcactcagctcagctcttcttcttcagttgcagaacttgaagtgaaaaccagagaaaaattagaagctgccaagaaaaaaacaagctttgagattgcggagcttaaggagagattaaaagcaagtcgtgaaactataaactgtttaaaaaatgaaatcaggaagcttgaagaagacgatcagacgaaagacatttgagcaactggcggtaagtcggctgcagagccggggcgccgcggagggacttgccacagacgctgcggtgtttctgggaggagctgcgagcgcggtccccagccggccgtggctttctcagagaggactccaggtacccacactgtcaggctgcctcccggggcacatgtgtgctctaagactcgatgctgggtagcattccacgacgttaagcacaacttttaaagtgtttgttttgttttaaattgaactctatgtgtagtttatcctcctcaggcaggcgtagcggttgtgttgtaaagtctaacgtgtgcgggttttgtacctctctcctaggtaggattagtgactggtatgtgtgtttagttcttcaggtccacatctgccccggtctacctcttttgtatatgatgtatctaggaagtgtttaataaatgtagtttactgctcctgtgtctgcctcttgtgacttctccaatcactttaccgccttgtgtttgcaaataaatgttattctttgagaattttacacagtgtgctttgatcatattcgccgatgcccctctccttctcccctcccagctccacctgacctacctgatccaccaactttgtgtcctccttttcatttgaatttaacccacccaccctctgggagtggaatcttggcacagccttagaaagctgacaccccttagcccagaaaccgacatctgtctgtaacccctcaggtggggctcctgggaagacttcctcctaacacctagatcatagtccacagttcacagaaatggcccagcagtgatgtgtatgaaagactgaagacccaaggcgcgtgccttcctctgtcacccaaaccctgcaatgacaggcttgccccaccatgcccaacctgactggctttttttaatattgagga

SEQ ID NO: 19294 - DNA, 3732 bp, Mus musculus
tcagtgtgaataatgaaaatttataattacactgtcttcatggctcaaggaattgtgtgtgtattcctgtaaccttgttgatctatgcttgattagagttaatcagctgatttttttttctttttttttcctttctttcatttttttttttaaaagatccagccttaataaaaggttgtattaaaagcacctggctagcatgtgttatgcaaaaaatagcagagacagactgactgtcaatttgattgcctatttttataggaaggtaaaaatctgaattactaaagaaatttagataaagtcctaaagctaatttgtgttaaatgttttaaagatcttattacctgtgagagatctgtgcattgactttttgaagtttacgtaaatttaagagcagagcttaaggtctgtgccataggttgaggtaatgagcagcttgagaggtttgtacttttcttcagtgttgtcttctctgcttttaaaacactcagaaatatccataccactgccagttcattttaaagcatctgtgagcagggtattttttgaaaggtatcattggtgtttaccacaactgttgttagctctcagaaatgatttttcttaagtgtttaatcttgttgaaatgcaattaccttttaatttgggagttgtatcaaaatctattttcttgttttgtatataggtcttgtaagtttttgtcattttttagctttttttaatagttcaattacaatgccctaatgtgaagctgtgtggacatacatgtgtttacaagggggattagttaatagtgagattaacaggtaagtacaatgtccatagatagaatttctctgaacattttaaaaatggaatcaaaaaatacatatacttgaaatgaaactggagattttgtactaattttaatcctttattaccttttattttttctttttaaaaaaatcagttggaaccctttgtttgctctccttatgtcacacttcttgcttggcctatttcactcataagcgactttggatgcagacagtgtattagccttgcttgctgctgctggtccattactttaagtgttgttaggaaaaaataaaatagctttggtttgtctaattttgcagtgtctcctacctgataacacatgaatgtatagcagtaaaagtaaaaattacaaaccttgttatttgtcaaagcccttctgttgtctaggagccagtttcatttgaaaactggtttttaatgtgtaaaagcaatccaaagagatgaaattttacagacaccaaaaaagagagagagagacaaacaagtcagagagaagaaaaaaggagttaaacacgtgtagttcatatagagaggcagtgacagcttgagcttgtcttgagtcccagcgtcgctcagtgctgtgtagtcacattccttgcagctagtagtgagattccacaaggtatttctcctgacgtggcactttgaattcaatatactgctttgagggaaaggaaatagatttgtagaaaggattccttcagtgtaaatttacatgtgtttatgttttgtcagttttcatcagcaagatgagcaagattctaagtgacttgccatagttgttgatcatgtcaggccatttcatgtctccttaacctataatcttaagcagttaactacaatttggaatttacaaatagcatgtagcttaaggtattattttaatttgattctcctatggagactgttgctttagtttttactagtttaaagtcagttctaaaaataaacatggacgctttcatgaacattgtataatattttatagtaaagggggggaagttgtttaaagggtaagactttatctttccctgtgttgacacgtgccaatagcctgagtacattctgtttcatacaacaagatgccactgcaagactcttccactggagtgctcatgtcacttcagttttgctacccaagtggttgttgcagtgtctatatcttgcaaggtggccccaatattgtgttttaagcttcagcttcagttattttaagaggaagtttatgctctgattcttcactgagaattcagtattgagattcttgctattacacagatagactgatttctaaattttattcatgaacttcatttgcatcccatagccctctgtaaatgtttcccccagttgtatgtacttactaaatgcatgctttttcattgtacatactagacattttttgtgctaaaatttattaagtagggtttttgtagcaaagcattctatttttatgttcttatagtgtatgtgttaacattaatattcagtttaaacactggtgtatttatttttagcaacttgactcctagaagccttagactaatttttaaataaacattcaaccaaaaattatgaatttcttgagatgtggccttatacgtggtgttttctgtgttcataacgtgaaatattttaaatttagattttatttaaatcaagatttagaattagtttcattttaagtcaaaatagaaaatgtattaagcgtctaggcttctgggaggaagttcttaacactcttctttcttggcattagaaagaagcaatatgaatttatgaatattctaaatattcaggccattgtattgtgttcagattgctttaggcttgttttagcccagtgtttctttaaagttccaggtggttggcattcatgaatatacagctactgtggtttttatatgggtgtatgaaatcttggttacatataggcagatttctgtttttaaagaattcctgctacattaattatactgtatcaggaggcatttaaaatattaggtaacatttaattgaagtcacacaggtcttggatggtattcgtggatagtaaatactacgagcagtttttcatatcagagagtgagtaccctaaaactccaccatgggagtaaattaaaataatttcataattggctatacccttcattttagtaaaaatacttcattttgaaagttatttttttgccacactgtttactgcgtaacacttctcagcatttctgtatgcaaactattttaaaatacagtgatcaattcgtgtttattttttacttcggaaattgtagtactcaggtggtattcaatgggcaatgattctttgatgtgaatcataatgtattttgaggactgcaactataacacacgactttagccttaagaaaaggtctattactccttcctttgcatcccatggtatattagcaaagtagtttacagccctgcacagccttacaaagttgttttacaatttttttatggaaaacccttaacaagagaaaattgtatcatattacagtgctgatgagttattgaatgatcaccctttgtaaataagttgtctgataccagaaggccaaagaaagtcttgagattttagctattgaatgtggtgacttcataagatttctgtgcaaaaggtaaggtgagattccattcagtaggcattctgttgatgtccatgaaaactagacttccatattagcttccttcaaaaggctcattcccattttattaaaatgtttgtacttgcaattttgtgtttaatgtttactttgtcttttctttctttagcatttaggtgactgttcagcagttttctatatggccattgttggcctaaaactgcgctagtaacaagcatggtatttatcttgtattgaaaataaaaacaaagttttggtaatactt

SEQ ID NO: 19295 - DNA, 1114 bp, Mus musculus
cagcatatgttaattatattgatatgtggatgaatgaaaaatatctacattcaaatccaagcattttccaatttattttgtagtgtgcatattttagacaatgacttacggttgttctcatcatcacagaaacagtagctgtgtattttcatttgttactgtaatcttattcttttcaaaattatcatattttgcacaaaacagtggtcctcatgagaatcattgaatttcaatggaagtaatatgtgaaaagaatatgagaatttcttactttgaatttgtaaattcagtttgtaaacatgggagcatttctccaccatgtaagcagctactgtttgagttaccttttattttgtgctagaatccctaacagtgaatagttgcacgacatgtgtatgtatagctaagccaacattttttttttgtgtattctggggaatagcaaaatctacatcacaaattttgacacattacagctgaaggaagaggaacaccttccaagacaaaagagtcttctcgggggaaaagtgacgcttgtccagcagtttgcttcttgtgattgaactgaacctgtaaggcttcatggataaactgaacaggaatagatctgaataaagcaaatctgcataaatggtaaccagtagctctacttttattttttatgttgcttaactgttttatttgaaggaaacctgtgtgatttaaaaagttaatagcttttgcaactttattactggttatatatatttggccattataatgtgcaagcaattggaaaaaagtcaagtaaatgcttgtttttatagtagtttgttcttgttaaaatgttcctatgataatgtctgtaaacagcaccgatttgattacactagatgtagtgttgtaataaactgtttatggggctgatgtgtaaagctgttcacgttatttgatgtttacacctcagggaaaggcttgtgttcagcaatatctaaagataatgttactatgacaacatttttactgtcctttaaaaagcattgcaatagcgtgtttggatatgcatcaatctaatcttgcgttcagtgaattaaacatgactaattaagtgtctattgcccttgattttgatatt

SEQ ID NO: 19296 - DNA, 2199 bp, Mus musculus
aatgaagaaagggcagacacacttagatacagacagaatcaggggtctgctactcctgcaacttggaacttcgtggatgggtgcagtcagctagtctagataggaggtctctctagagtaccagttgctgttggaaaaacctcccagaggaagtcgcttctttcgttctttctgcacaccgatcttttcttcataaacactcatactcagattcctctgtgtagctagcctcctctgtatgggaatcctctttgccagtgttcaatggggttcagttaggtagggccttggagttcccacagggccatggcaacaatccgttccctcaccattcattcattaggcgctgccgctactcataccctaatcagaatggcataagattatttctgaaattttacattaatagtttttctactggtggcttgtagctgaaaccatagaaagtaaaactagcggtaaaggaaagaaaactgtattaaatatcttttgaagctgtacagttaacggacagcattaatccagtaatttcttttagaagacgtgaacgatcaagagaacgggaccatagtagatcacgggaaaagagtcgtcgccataaatctcggagtagagatcgccacgatgactattacagagagagaagcagagaacgagagagacaccgggatcgggaccgcgaccgtgaccgagagcgtgaccgagagcgagaataccgtcatcgttagaaggtgggcattcctttttattattttatttagtatgtgtgtgttattaacagcaattataactccaaggctgttgtttatacagtaaatatacctacattttaagtggtccaagtacttgttctgatttaatcttctggaagcatctgaaaacaggtaagccatcacaggtaaaagattttgaccttttcccctttgaatattgtattcatgagttatttgtgacttagatttcagattgtttatagtcttaaagcaagaacaataatcaagaggactcattgtgtacttctaaaatctggaaattgggattcttgtaatcacatacattgtttgcatgtgattttaaatatttatctaatatttaagtgcttggatttttaaaaataattttttattcttccttcctagaattaattctatttgtccctgaaacttttaaagaagatctaatactatagtaggttataaatcaaaaagatgtttttcagctgcgaaagaggatttttttttcccttttagaaattacttttagatgagaattgctagcatttgattgtatttttaaaggaacactatctttttaatttgcaaagaaggcagaaagtgggtttagggttcatatctaggaacttaaaactgtgccaagccatacattccaagttagaaatacgtggaaataattttctttgatgtttcattcataagccataatcattgtctttttttttcctgtattttaaatttttcttgtgtacatttttcataaagtaggatgagttgtctgtttatgcttcatttttacatgtagtttcattttatatttgtgaacagtgtttactcatgaagagtggggacagagcactgtgaatcttttgaatgtggcaggttatcaattctgtaaacacctttgctccatatatgagttaaagtagacttaacaaatcctttataagtgtacttataagtaaatattttacaaaaatttactaaaaatccagttggaaaattgttaatatttaaattgtaattggctttatcatgtatgtaattctgtggctagcagtttctttaatcatcacatacataacacatatacatacaaacacgatcccttttgaaaaagaaaaaaaatgtaatttttatgaaatacaagtttcatgacagtttttgaagtgaggaaacccattttaatagcttgtcttacatcttgaatatttatcaaaacccttttactagttatatgttatactaaaattttaattctcaaaacatttctcttagttttaaaattactaaagttggtactgtttggatataaactttggatgttgtatcatataaatctaaataatttttaaatgaagttcttttagtcctagtaaaaatcccctaaggtagattgggatcaagttattacttaaaatgtcgaaatatctgttttgataaagtattgatttttcaagtggta

SEQ ID NO: 19297 - DNA, 1078 bp, Mus musculus
ttagagaggtagcttaagagttacactggctgctcctccataggatcaagggctgattcccagcacccatgtaggtaggggtcacaaatttgataacttcagttccaggggatctgacatcctatctggcctcagtggacactactttttctttggatacaaagacatatatgtaggcaaaacacttggacacatgaaaaagatataaatattagctatggtatagcttattctttgcaaaatagtaactgtctctctacatgacaaagcaattaattgcattgctttgttaaaatgagagtcttttccaaattccaaaacactgaacaaaagtcattgtctctggttatcttaaaagacaattttcaggtcaggtcgaggtgacacatgctattaatcccagtacaggattcaaatttctgagtatgagaccagactggtctgtagagagagttctaggacagctagaactatctcaaaagataatttggaaacaaaagtttgtttaatgattaaccttgttttttttttctcctgcaggtgattatgggagtgctattgaaacattggtaacagcaatttctttaattaaacaatccaaagtctctgcagatgatcgttgcaaagttcttattagctctctgcaggattgccttcatggaatcgagtccaagtcctatgggtctggatccaggtaaaatgttcctgtctcatgaatttttaaaactgttagttaacacacaaacacacacacacacacacacacacacgcgcgcgcgcgcgcgcgcaacttctaaaaaaatagaactgtgattttatttactgtgtacctagcagtatttaaaaaaaaaaaaaaaaaaaaaaactctgaatgatatattgaaatcccgagacgcaaggaactctgtcttctctttactcttaaacatctgtgtacattcaagcacactgcgtgatgtcatctctcctttgattctcataactcccatacttacttactgttccctagccaaatgagcccttctcctggacacatcaagcatttggccactttactgagttttatgcttgatattcc

SEQ ID NO: 19298 - DNA, 1225 bp, Mus musculus
aggcccctttccacctcgcccaccaggtccactagggcctcccctcacacttgctcctcctccacatcttccgggaccacctccaggtgccccgccaccagctccacatgtgaatcctgctttttttcctccaccaactaatagtggcatgccaacatcagatagtcgaggtccaccaccaacagacccatatggccgacctcccccatatgataggggtgactacggtccccctgggaggtaagttaaacatgtcgtactgaaactctttagtcagtaaaagataaagtactgtgaagtcttctatattttagaaatgtagtttctgtcctgtagaaagatcagatttctaaactgcaaaagatttcagccagaagacagtgaagaagggaatttgatctgaaagggaaaatagcattctctaatctggaaaactgtctctaaagcaaatgccaaaagctgcttatgtggagttgtttacattgttactaacttgagaacttttaagtaacaacttatcatttctttgtctttttgtagggaaatggatactgcaagaacacctctgagtgaagctgagtttgaagaaatcatgaatagaaatcgggcaatctcaagcagtgctatttcaagagctgtgtctgacgctagtgctggtttgtatatttgtttcagtcttgaatcacactaaatccaggggctggagaaatgacttagctgtttagaactggctgctcttccagaggaccctggtttgactagtaaccatctgttcattacggttcctggggatccaaggccctctctggcttctgcagcatcagccatacttatcatgcaaagacaaacatacacgcagtcaaacccatacacatacaatttaggactaaaacaaaatgcaaagcttaaatgcagcttataagacaattttcttaactccgtataatccgcatagttagtctcaaatcattatctgtcacttaggtccgtgtcccgtcccgtcccccccccccccccgtccccccacacacacagggtttctctgtgtagtcctgtctgtcctggaactcactttgtagaccaggctggcctcaaactcagaaatccgcctgcctctgcctcccaagtgctgggattacaggcgtgcgccaccactgcccggcctgtcacttagttttaaagtaataaaggaagatacatgtcagtgtagtgggaagaccaccaa

SEQ ID NO: 19299 - DNA, 1154 bp, Mus musculus
ctggcattcttgtcctgccactctcatcttggagaacggaagctgcattctaacccttagaggtggagcctctctatgtactataccttctgatggggagaagctaatgaagtagtcactgacttttctgcttgctcccaagacctttactacttggtagaataaatgtagaaggaaaggccttgttattaatagaaattcgagtggtttttgttttaatttttttggcatttaagatttaactgaaaaatttattacacggcataaaataatctcttattgaaatgaagatttctgttgaaggttttctgttttggcctttgtagagtactggtattttaaaagcgacttgtttatttctcagtagaaatacatttaaacttgactattttaagactaagcgagtatttaaataaatgtgaatgttttccttgccaagtactttacataggtctgaggcatccataaattgatgaatagtatgaagaacttagaaatatcttctaacaacagtggttacaattcaggaaacgtttaataagtgctacttatgagtgtttggatgtttgcagctacacagtcaggacagatgtctggggaagggaaagccggtcctccaggaggcggttcacgcgcagcgtttcctcaaggtggtagaggacggggccggtttccaggggctgttcctggtggggacagatttcctgggccagcaggaccaggagggccacctccaccttttccaggtaaaacttttttaagtttatcatggagaaaaacatgtctgcctaataccttttttcctttctctctttttcaagtaatgcattattaatgtgactcactctccttgttatgctatttttggaacccaggaaatttgatcaagcatcttgttaaaggaactcggcctttgttcctggaaactaggattccatggcatatggggcacagcatagaggaaatacccatttttggcctaaaaggtctttatttttctccaaacttgcttgactttatatatagaatatttacatccgtcttattttcttacctcttaaaaaatcctttcaagaccattttccctgtttcactttctagcttggcatcagagtagactgtaaggtgggtgagaaatgtgtatggtgaaagat

SEQ ID NO: 19300 - DNA, 1172 bp, Mus musculus
gagaaaccctgtctcgaaaaaacaaacaaaaaaaaaaagaagaagaagaagaagaagaagaattggcagcctgatatggtggtgcacatcccagcagtggggaggcagaggcaggtagatctcttgagtttgagggccagcctggtctacacatcttgtttcagagagagagagagagagagaaagagagagagagagagagagagagagagagagagagagagagagagagagagatttggcatatgtttatgttttgtgaatttgaacaagctatttatttatgaaaacagtgacttaggtaagagctaagtgtctgatcagaacctacatattggtattagtcacctactagagtatggtaggttgccgggcagtaactatacttagacttgcgaaaaataaaaaataattttctcttaccgtttgttttcctttaaacattaaattcagacactaaaacctgaatgtttaacactaatacgaggaaatgtcttgcagtggacaacagatgaggacctaactgaggccgttcattctttgggagtaaatgatattttggagataaaattctttgaaaatcgggcaaatggacaatcaaaggggtaagaatttaatttttttcctaatgtaatctgatagtgattacaatttacaaattagttttctttaagtttaatggtgataacacacatgtagaacacacgaacacattagcactgacaaagtggcttaggtagtaaagatccttgctgcccaaacctgacaatcttagttcctaggaacctgcatgagcacactagagggaagatcttaggctgaggttcctacttgaattttgtattgcttgtcttttaaaaacacacagaagctgcatgagatgggactgtggacagactaggtctgttgcctgactactgagtatactcgtaagattgaaataactgctaagaagcattgtttttgttgtgatttaagttagggaagagccaggtagtggtggcttaaacttttttttttttaaagatttatttatttattatatgtaagtacattgtagctgtcttcagacactccagaagagggagtcagatctcgttacggatggttgtgagccaccatgtggttgctgggatttgaactctggacctttggaagagcagtcgggtgct

SEQ ID NO: 19301 - DNA, 1501 bp, Mus musculus
tatattttaaataatctccgcttggaaggactttggaagtgtatgtgagaagtcctttccatctcctgcagatgatggtggaccttcctcatcaagggctacagaagtacttgatttctgttttttttgttaataataagaacatttaatttatttagtgtctttcatgtaaagagttaaagactatgtgaaggattgtatatttaagttattgaaattctgaaactgtagtaatctaaaatgtgtgagttgtgggctgcagagaagactcagccagtaaaggcacctgctgtgtacacccactgacacacatttgatccttggaacccccaggaagagtgaaccagttccacaaagttgttccctgatcttcaaatggatgcacgcatgcacgcacacacacgcgcgcgtgcgcacacacacacacacacacacacacacacacacacacacacacacacacacagttttaaaggcatgaattgcatctggtggtatgtaagtgaaaacacacgccttattttccagcattttcagctttttgtcataggggtgtggcacaagtgttgcagtttgtcccaggttgaaaagcctgaggctggtagaagcgcctttttgcctcagctccgtggttcctggtggttgcctatgtttcaggcctgtacttaggctaggtttagaaaccagcccattcagaaagactgaatcagaacatggataaagtgaactcattctaagatgactcgtctatccatgtagattaatctcctggttcataataggcctcttccctttgattgaagggtcacgtctaagtatagaaaacataaaactgtaaggtagaggaagcgaaggatagctttgtattaatgttgcgttaaagcttcagagacaagaacaagaacactcctcccacgtgacagcatttgaataggaggcggtgggtgcggcagcctgggcagcttcagtcccgatttacaataaagtaccttgtgtgttattagttcttaaatgtttatttagaaatggcattgatgttatttatttgcaaataaatggtttattgaagaattgtgaaagagatttgtcttacacatttttttgtcagtgattttgtttttaaagatttgttcattatatgtgagtacactgtagctgtcttcagacgcaccagaagagggcgtcagatctcattacagatggttgtgacccaccatgtggtggctgggagttgaactcaggacctttggaagagcagtcagtgctcttaaccaccgagccatctcagcagcccccatcagtgatctttttataattcatttttattttatgttcattggtgttatggctatatgtctgtgagggtgacagaaaccctggaactggagttacagacaggtgtgagctgccctgtgggtgctgggaaattgatccattgctctccacctttttaaaatttgtgtgtatgaataattcgtccacatgtatatgtattgtgtgc

SEQ ID NO: 19302 - DNA, 1148 bp, Mus musculus
tatagaactgcttgaataactgttgagaagaataaccttgtatgtgactcagctgaacacgcatggctctgtgcacagcgaccctgcactttactgtttgagtacagaggagtttattatgttggtgtcagtcacaggaactgtttgcgtgttcatgatttctcacatactaatccttcagtctggagtgtctgtcctatgctaacttcagcgtaggcgattccagaatctgtcctgatagctcttcagagcccctcccccacgtctactaaacatttttgtttcccctgctagtatatcttaaaatttgcttattttgcttcataattcctgttgaatttatatctccagcatgcaaatgactcttgatacaaatggttaatagttgttaaaaggttagattttgtattgggcatgtgttagactggtatatgttgaattcttgatttctttgttttgatccactttttactttctcttacaatcttcagactctggcacatcgctgagtgagagcagacgtcagcctgaaggtgggagtgatctgaaggtaatacttgcataaagttcttactctaacacacttttctctttaaaatatcctgtctgtaagtgtgggtgtgtgtatgtcctccagccaaaagaaagaggtgatgctcacctggagctgagttacaggtggatgtgagctgccccagacatgagtgatggaaaccaaacacaccccagcaagaacagcacatggtcttcttctctgagccaccgctctagcttcatgacacatagttcttgaaaattgggagggttacataaaacagggtgtggaacagccaatgtttaatgtttattttgcaatattttactttcttttatgtacttaggatcctttgcaagcgccaccagaagagaaaccttcatcttctgatttaatttctagactgtctacctcatctagaaggagatccattagtgagacaggtacatagggacattatgtgacatactaaacagttgcttggtgtttccattttgggtcaaatgaccctttgacagaggtctgagacctaagaccactgaaaaccacatggttgcattatgattcatcacattagcaaaactatggctatgaagtagcaatgagaatagtt

SEQ ID NO: 19303 - DNA, 2087 bp, Mus musculus
ttagacagggcaggagtgcttgagcccaaagcccgctcagcagcacagctctgcccgtgctagagggagcgtctgcagactgacagtctcattggtcttctcgcggctttgggctttgagtgagttctagatactatatatggagttacaggaaaacccatctttaaacggctcaaagcaaagctgtagagggccagcaggtagagccagtaaccgggtccctgcccagcactcataggtgggttcgcagtcgtcctggtaactgcttccccagcttgcttaatcctttcatcccagtgttttctgatgtggcctccctcctgtactccctgcctcccacatcctgagcagtagataaggagcgttgtatgtattggaaaaactggactgaaccaggccttgcagtttatgtggcaaatcagagcaaaggctgcccaagttctaggcagaaacttggtgaaaaacaggaaagatatgaaagacaggtagaaaactagctaatatttagctacttgtatgaggttccagaggaattgagaaatgtttttagttgagatgtagacagaatacatggggctccagcaaatagagccctgggtatttaactgcaaaagtgtgtgtctgccttcaggtatcttgtcgttttgccattcacagcagccgctgatgaccgcagaagagtcgggtctcttggaataataactttttctaagcatacacttcctgtgagaaagcagcttaagacaaagagacgtgtcttgtgataatacatcttatctggaattttcttcttcacaggaagaggtaacttttaatatattaggattttttgttggtagtggtagtttttaggttttttttttttttaaccaaataaaaaagcctgggttgtatccccagcactgccaaaacaaagccttttcaagtcatcaggccacaggagtgctgagctcgaggagaagacacacccctaggtctcaaggttgggcagtgagtcagggctacgagttccttggccgtgtagaccgcacagacttccagggcagcccaaatcacatactgagttctgttaaggggaaaggaagggtgcctggtctaggactttttttttttttcctggcctcactaaatgtgtattttggagaatggcattgtctgctgtgtatcagtccatgtgcttccgtgggtctttgttttaaatattgtcctcagtttacagagttgtgttattatgccaagaactgcagaacatgccgtcttcaccatcatggacctttggaatcatgctcaagaaacattttctgtgtatgtttaatgtttaacagtttcccagaagctaacggaaagtcttccagcacagagagcctcaggtttctgtgcattaggaacaacggagttgatttgtactgcgtacaaatcctagctgtagataagccctggggaccggagttgatttgtactgcgtacaaatcctagctgtagataagccctggggaccggggtggtttgaataggtaggtgggtggggtatgataagtggctggtgtcagtaggaatgagggacagagtgggagtatggtgaatcaaggcgtgtttatatacgtgaataaactctctactattagaaccatacaggctgataagcagttttttacaccctgaagactttcatctagttgaaaattcctaaggaaaacacactgatgccctggagcaagcacagtgaccacaatgacagacactaggcagcactgtctttttgttgccaatggaactgaatgtagtttttaatcctatgtcaaatggctagacttaaactctttgctaaaaaacgataaggaccctctgttctcacttatgtcttgcatactagagcccatgaagaaagtgggcctctgcatatgtggaagtgctggtctgttctgcttgcaaacccacagctccaatgcagcaaaattccaagtcccttgtcaactaatggaggggggtggggggcgggaaaaaaaacaggcatgggggactgttcgggcgccgtgggacggtcaagggggtctgcaagagagagagtggggactgaatggcaagag

SEQ ID NO: 19304 - DNA, 1235 bp, Mus musculus
ccctcgactgacgaagatcctttctttgccctaactgtaacggtagtccttcaaagatgccgtctaagaccttgattatactgttctaggagtggcttcggggggatgtcatcccctgtgatccgggatgcggaggtgacgaggactgcccggaagcacagtgctcacaaaagagttctaagtatccttcgtgtcaggattgcagagtgcagggtgccgtgaatcagggctgtgggattaaacattagctgggatagaatttggcttacctccattggggtttacatatatgtttacatacacgggacatacatgttctcagtgaatgtcagtgagctaagatgcctgtttctctgaaaagcatgttgtctcactactggtatgccatagtagtcaaaacttattatctagtctctatctgagaatttaaatgacaggtggctttaacagctgtacagaaaaggtggtgcccataaaacactttgttcttgaaagaagtgtgctcatgtatctgtgtagtaaatccttgcttgactttaatgatttttcttttctctacatggaaactttccttaattcttcctaagttcaggccaaccaagaggacaattttggtactgctacaccaagaagccagatcattcctcgaacgccaagctcctttcgacagccttgtaagattttgtttgtgctttggaagtatttaatgaagtagccagctggcatttgtataattttcattataaaatatttagctacaatatcaggaagtaagcataaatagtaatgattacagttatctgagctcttatgaacaaggacctgtactctatatcagtacatagtaactgtgacatactgtatctgctatcctctatatcagtatatagtaactgtgacatgctgtatctgctgtcctctatatcagtacatagtaactgtgacatgttgtatctgctgtcctctatatcaatacatagtaactgtgacatgttgtatctgctgtcctctatatcagtacatagtaactgtgacatactgtatctgctgtcctctatatcagtatatagtaactgtgacatgtatctgctgtcctctatatcagtacatagtaactgtgacatgttgttatctgctgtcctctatatcagtacatagtaactgtgacatgctgtatctgctgtcctctatatcagtacatagtaactatgacatgttgtatctgctgtcctcta

SEQ ID NO: 19305 - DNA, 2556 bp, Mus musculus
gacctgcacagagcttttttttttttttttttccttctatttttggcctagggttttcattggtctggcttctaggacagcagcagtatggagtgccatcttttttggaataaagatacaaaaatgtcttagctgccattaatatgaagactagaaaacagcaagactttatcttgctgtttcctttcgttctttattgtactgtttctgttaacgcgtatttttccccttccacaggtctgaagaactgttgcccaattcagcagtgccagcattccaactttgttaaacctaccaacatcttaaacggactttcctgtggtggtaccctgagaggcggatgaaagctactctgtcagtttgcacattctaatcactttccagtatcacgagagatttttacttatataatagttctagagtatgcagctggtaaaaccagaggctacatccagtattactgctaagagacattcttcatccaccaatgttgtacatgtatgaaaatggtgtactgtatactttaacacaccccatactttgtattggagagtacaataatgtaaatcctaaaagcaccactattttagcataataaaagaaagtccaaagagctcctatatagactactccagataactttgcttctttgatacttgtagcttattgtaattttttttaaattcaaggtcattatcattgtattatacaaaataagcgctttgattaacacagctatatagtttttttaatttttcaaaaacctgtggagacagtgatcttgtctttaaaatatgatagtcctttcagtataatgtcttagattaaagacgttgcctttaatatctgttgggaaggaaatgtccagacttttcaaatctccttattatatgtttccttttttgtttacatagggaacaatgtttatagttgtgtgtacagtgggggtctacaacaagaagtgtatattttcaaacaattttttaatgatttaacaatttttgtaaatcattttcaggcttctgcagctgtagattctcactgtgactcccttgcttgctcatgcatatgtgtgtctgcaataccaaatatacaggtttagtatctgcctgttagtgattgtttcccatgtgtaacgtttcggttgagatgttaactggtggacgagtactgtggatgtgaatgtgggatgtcattttaatcatgtgtaactggtcacaaggcctaatttgcagtaactattgctgttttatttaacaatgccttgttgttttgtatgcataaatgtttgggtgtaaagattgtgtgtccatccaacagggagccacagtatttaaattgaccaacctgatgttacaacgactttgaggtggccaaatgtaaactaaaagccttaattaaagtggtgcaattttgtataacttagcatccgtagttcaataaatttggattgccgtgcaagggcttgcattatagttacttgccactgaatgtgttttgtgtaatgttttaacagtgctagtaaataaatatgggtttacctttttaaatgtaataggtgttattttacacagtgtgatttcataatttataccgtataggtaaatcagactcttaattccaagaatgatgaatgaaagatatcagggttcagttttggttttgttttcttttcttttctagaattgtttgactatccacataaaaccaccctttgaacttttctttgagaaagaatgttataaagcaagcagtattacttagggacaatgcctttggctggtgttcagtaactctgtggggaaaggaggaaggattcaaatactttgggtactgcactatggattttcttttttctgatagaatacaaatctttggggaattaatacacagaaatttccaccatttatgctcaaaatattactatggttatacaatttttgatgtggattcatgctacttttcttttattatctctgtcttatgtgtgctatgattgaactctgtgaaatttataaagaagctcttaaacgttttcatagtacttgccagctgctggagcaactacttagtggtaccttctagtttgcaggtgtgccagtcctccacacgtgctgtttgaaatgggacattaaaggctttcgtttgaagacggtcgtactcgttatgtatttaaattacagggcggctgcactgcagggcctgaagtcagtgttgttcttcgtgctctcgggttttagtcctcgagacatatggtttagtaaagcctgggctgttggggattttttatatatataagcatctggggatgcctgatttcactttactatcttcatccactggcttagcaatagtaagtgcaacaaccgagaccaacccaagggccgccctcttcgaatccatgcctgtaagattgctaacctgggacacttgacattctgtgctgggtgatgtattgtggggcttaccctatgcatgtaaaatcctaaactaacacccactagccgtgataacccagttagagtgaataaaagaactgcagacatcagatgtgcc

SEQ ID NO: 19306 - DNA, 1228 bp, Mus musculus
ggcagagcagactgctgcttttatgatttgaggtaaattatgaaacttaaagattggcaaacttgcagaggcaggagtaagttatcatggactgcagaatggaagaactgtagagctgggatcttacagtgtggctcaggttagcctcaagcctgtgtcttaagagttctgagattgtagggatgcgccatcgtgcctggatgctgtgtttccagttctacatgtcacagtcatttttctagaacattgtcccagggaacagggattttcctctattcgttgagtatatgcctgttctcagctacttacagttgatagttgtatgtggttcaggttgtttactgttgtcttaagatggtttgagaaaagaggggtaggtatgtcatgttagcttgtaagtcgtaaaaagctcttagtgatgtttctcagccaccaccccaaccctctttttttcttctccttttcccttggatattctaattgaaattattattaatgcttgcttctagattcttgggtcttaattagtaaattgaaggaagtgcacatagattgcatactaacaagggaaaagcagagcaatagtacatgtcaggtgtgctgcagagacatgagtaggctttcaattaggaggacccagggctccaggtcgttgtcccgggccttgctttatgggctcttggcaggagaggaggcgtttgactgcaaagggaatatgaggctgtggggtggggtctctgttttgcttggctggttttgctcactgcctttctcgtgatgcatccagttttaatcatatacaatgcccagctatgggtaaacataagatggtacttaggaattctctaaaagttcactgagcacagtttgccttactgcacaatgtcccaaaactagttcagggcagatctgccctctcatgctattcctaatgtatctaggattattctctgtccatgacacagggcttcttgagacttgctaggggagatttaaaaacataccctgttgtttgtggtggagcgtgcttgtagttggatgcaagttgtgggtctttggatgctcacagttgggggcgaggggagtcttagaactccctgtggctagtgcctgctctggtgcaggtcaagaagggtatatgggtcgcctaaacagagtggtgtcacatgcccataagctatttactatacttctctgccccaaaaagagggaactaaaaagtattgtc

SEQ ID NO: 19307 - DNA, 3071 bp, Mus musculus
ttcagtctttttatatatagtaagacttgtgtgaactagtcccttactaggagacaactggtgtcttgaagtttgatatacccgcacttgaagtgtcgtgtgctttctgggcctgtgagggagtagcaaaattcctactcactaggaactttctcttcatgcactttgttctgttatagcatgtaacctgagttttctttgtattgcaggtaaaggcaaactctgtaaagcaggagtttgaaaagcaagatgagctaaagcggtctgccatgagggcagtggcggctttgttaaccattccagaggcagagaagagccctcttatgagtgaattccagtcacagatcagctccaacccggagctggcagccatctttgaaagtatccagaaagattcttcgtccaccaacttggaatcaatggacacgagttagatgtgtgcgccccgtgaggaccattccatgtgaccgcacaatgcactgaacgacaggttgaccacagccacgggagagaagtgtccagagcttcacgatgttccactttactttccttcccgggaagtttgtttggctttcttccattgttgtttttgtagcttttacttcagaagtctgtatttccataagccagaggttgtaaagccactgatgtttttagtggttagggcaacatttgaaatgggaacttaaagcttggatttatgaaatgtggaaatagggtccagtatctgtttgccctgtaatgtgtaggattaaaatgttaaaactttatgaccatggatttcttggttttgtaaattctctcatttaaaatcaattctgcaacacgaagaccatgtttctttccttgtacaacctcttctttcagcgacataaaatgatttttacctggcagatagagtattcatttaagatatgttatatttcagagagattggcatcttagccaagatgctgaagcaccacctaagtatacggcctaacaatatccctgtgcacactgacttttgcatgaacaggtttacaactatgtcttgtctgtaacagcatgtacagattcttcacaatacacattaaaataagcagtagtgcaatttttcagatacttttgcacaccaaatattatctggtgaaagaggagttaatgttgaatctggttttctaactgccagtgtgaatttacggatgtttccagcaaatcaagtcacagcaattcgcaacttcttactattataaattacctcacacatttatggttttcctctgttccacagtgtccgtgcgtgttctcaaagccagactgttttattcttgttgagtatctgcagttgttactggaggacaaaaacctcacctgtgcgtttaagtttttgtttttaagaaatttctcaagttgctcatcactggttttgttagctaaagctttcttagaattgagtcacagctcacctcccccagcccattggcgagctaacttacctattgtctttggtaagtgttgagtatttgctgggccagcaaagcttttgcaattgtttcccttgtagttgaaattgtatccaacattctgtgagctccttgcatactgcctccatctttgaggtgttcctggaagagctagctattccaaaaataagagcactcttctttctgtgcacacaacgtagtttacatgtattggagggaggcagttgttaaattgagtggtcggtttcaagaactcagcttgaaagctgcaccgttggactgccgtaaggtcgaatgcacaattgcttgttccggtcagagcagactgtggctgttggctttgattgtacagtgatgccaaccaagggcattgactggtgctggtgaggctttggattatgcactggcttattctatgaaatcggtgccatggcaaaataaggcaggtgataattttataccatagtttgcacaaaactaataggaatttattttagtatattctgcactatgcattgctatggtatagatgtggataaagttcggcttggggttatgtgatgtgctctcacagtggttacagcacaagctctgggactgaacagattttgacattgttgtgttccatgactgtcttagttaattacctacagttaagcccctaaactttcattggttaccccatggttacatgttacactttgtttttctgagtcttgcaagtcaactcattttcctacgtcactaaattcttgtacgaagaaaatcctgctttagtggttaaagtatcacactacctatacatacagagccgaggaactagacacgtctatacacaggccatcagaagaaggctcaggggctccagtgctgagccacactgatgctgtggtgatgtggtccacatctggactggaagcagcagacccaccaccacacatgctaggaaggtcgagcttctgcctgcctgccagttctcccaggcggttcctagaagtcagtagtgcgagggagcaagctggtggcgattcttaggaatgtgctgagattactttagaactatatggagtttttaaaaagaaagctcagtatacattgcgtttggggtttagactgtcttattaaacttagacatgaagaagtctaacctaagaagttatttataaagttagtaggattgaatgcaactattttaattgtatattttattagtgatatctaaaggctgcttaactgctagcagttagaattcttaaaagattggaatatgatggttttgttaaatgtttgtatatttacataatttaatcataattaaacaaccaaatgagtcctccttagtctttacattccttgggtaaacaataacacagggaaataattctatgggatgttttgatatttttgtatctagctcagcctcagacatgaagccatgattgaagttcaaaatattgaagtatagaaaaccctcaactgctgaggttatttaatttcacctaatttgttcctatgtcttcagagccgtgttagctacatgataaagtgtataggaatgctttgtaattggagtaatattttctgcccacatcaaatttgactgct

SEQ ID NO: 19308 - DNA, 1164 bp, Mus musculus
tatttccatgctgttgaaatatattttttggcctcatttaatcttgtctgatttttcagtgacaccccccccccttttcattttccttgaagaaataactgcgatacccacaataactaagacagtttagagaagaacactttgtgattgtgttttaaacttggcatgactgggttgtttctcttacaatttttcaggtgactttctaaaaactttggaagacccagatttgaacgtaagaagagtggccttggtcacattcaattctgcggcccataacaagccatcactgatacgggaccttctggactcagttcttccacatctttacaatgagacaaaagttaggaaggaacttataagagaggtgagtgtgctagattgcatcactcccccgcacttaccttttccttgccacacgcttgcatgtcccttcttgttttaacaggtagaaatgggtccatttaaacacacggttgatgacggtctagacattagaaaggcagcttttgagtgtatgtatacacttctagacagctgtcttgatagactggatatctttgaatttctaaatcatgttgaagatggtttgaaggaccattatgatattaaggtaagatgtttgtgaatgttggtaaaatgatttaaaactttgatgaaacaacttttatgcttgtaatttacttagctgtataagaaaaattaattcatcttacaaaatgtatgtgcagaagcagacaaaagcagttgcattggttaatacacaagagaaagccaaaacctctttttacctaaggaagggatgtagatcccaaatgtttaagattcgtttccagcctccttcatgaatagtgcttacccatattctttgccttggaatcacacacatcctttcaggcccattttgatgagtagctagccaccagttttcttactttccctttgatgtcatgaaatctcttgggctgagtattaacctttgtttacctgctcaatacaagacgagccctgttaagcaggagttgtgtcagaggccaacctggagccctgtcctttcagatacactgcagtctgcagaggccttagaacagagtcatgttgcttcctaggtttagagctatgtcttgttttcctgtttatcctatttagttatgtttgagcaaa

SEQ ID NO: 19309 - DNA, 2435 bp, Mus musculus
gaggaagtccctttgggtcagcacactaatgacgtgacggtattatgattgcaggttcccaacattgttaaagccctgcacaagcagatgaaagagaagagtgtgaagacccgacagtgttgctttaacatgttaactgagctggtaaatgtgctgccgggagcactaacccagcacattcctgtactggtaccaggtgcgtctttgggtacttattattcattgtttgtttgtggcacttacagaagcttgaataaatgtttcacttacaagagaagtttgtgataatttgtaccttattttgaccattttgaacacatgaagttagatccttgtaagaaaagggatttaatattttctatagatttttatgcttctcccacgttagaaataaaatacagatagaaaatttaagtctttgaagggtggcttttaattctttgtgaaaagtgcatagaaatgattagatgttttattggcttttcaggaatcattttctcactgaatgataagtccagctcatcaaacctgaagattgatgcgctgtcgtgtctgtatgtcatcctctgtaaccactctcctcaagttttccatcctcatgttcaggctctggtccctccggtggtggcctgtgtgggagacccgttttacaagatcacttcagaagcccttcttgtcactcagcagcttgtcaaagtgatccgtcctctagaccagccctcttcgttcgatgcaacgccttacatcaaagatctcttcacctgcacaattaagcgcttaaaagcagctgacattgatcaagaagtcaaggaaagggctatttcctgtatgggacagattatttgcaatcttggagacaatttgggtcctgatttatcaaataccctacagattttcttggagagactcaagaatgagattacccggctaacgaccgtcaaagcgctgaccctgattgctgggtcacctttgaagatagatctgaggcctgtgctgggagagggagtccccatccttgcttcattcctcaggaaaaatcagagagctttgaaactggggaccctctctgccctggatattctcattaagaactacagtgacagcctgacggccgccatgattgacgcagttctggatgagctcccccccctcatcagcgagagcgatatgcacgtgtcgcagatggctatcagcttcctcaccaccctggccaaggtctatccctcctccctgtccaagataagcggatctatcctcaatgaactgattggacttgtgagatcgcctctactgcagggaggagcgctcagtgccatgctagactttttccaagctctggttgtcactggaacaaacaatctagggtacatggacttgctgcgcatgctaacgggtccagtttattctcagagcactgctctcactcataagcagtcttattattccattgccaaatgtgtagctgcccttactcgagcttgccctaaagagggacccgccgtagtaggtcagtttattcaagatgtcaagaactcaaggtctacagattccattcgtctcttagcactcctttctcttggagaagttggacaccatattgacttaagtgggcagttggaattaaaatctgtaatattagaggctttctcatcccctagtgaagaagtcaaatcagctgcgtcctatgcattaggcagcattagtgtaggcaaccttcctgagtatctgccctttgtactgcaagaaataaccagccagcccaaaaggcagtatcttctgcttcactctttgaaggagatcattagctctgcatcggtggcaggccttaagccatatgttgagaacatctgggccttgctgctaaagcactgtgagtgtgcggaggaaggcaccaggaatgtcgtggctgaatgtctagggaagctcactcttattgatcctgaaactctcctcccacggcttaaagggtatttgatatcaggtgagtaacaagaattggtcatctctaagtttcttgatagttagttgccttgaaagatgcctaatgaggaattaccatctgcttttttaaaacatgtttaaagccatgtgtgtgatgagaaagcacttacatgtgttataatatggagtgatatttggaggtactttgttcctcagagcaatgaagtctaattgggtaatgtctaaataagtgctatctagttctttatgctagctgcattttaatgttgctggtttttttatttaaaatatagaaaagacaactcttgaatttaatatgaagatcttggatatacttatatcgaaattgcaaaaattattgagtttaaaggcaaaaaaaatacttttgacttgtcagtgtttagccaattagaataaataggtaataattcataataaaagagttaaaatagtgtatttaacattttgtgagg

SEQ ID NO: 19310 - DNA, 1153 bp, Mus musculus
aatagatgtaaatatttgtgctatgtgtgtgtatgcatcatgggcactcatggagtcagcagaaagcgtcacaagctgtcatgccagcttttgaaaattgtaaatgttgacatttatttctgtccagtttatgaagaactacaaattactcctttaattttgactctgtgggcatatatgaattttcattgattctcagcatattgtgagagaagaccatgctaaatgaatgctcagtaaaaattttactattcccacttgaacaatatagttaaaataggtgtatggtacatgtgtggaatgcatatcctaaaattaaatattttttgaaagataaatcttttcaaagatgaagctcgtgggacagaagttgtggtgagataccactttgctattactgctaataactgaggcaggcagggaagcacagtttgcatgtgtcctttaaagccgttcttatctttatatttagatgccctaaagaagtttatcctcatgtttctaccattataaacatttgtctaaaataccttacctatgatccaaattacaattacgatgatgaagatgaagatgagaatgctatggatgctgacggtggggacgacgatgaccaaggtattcagatggaacacgggagctgccctgtgtcctgagcgaagtcaggcttagggtagggaggatgcccattgtaccttggttttgttccttaggggttgtcttgtttgtgatgctcaagcctagaatcttggacatggtagtgggcaaccattctactctttatatttcttataaagcatttggttttttaaaaaatgatctaaaggtacctactcagagcagtttgcttagtattgatagatcctgcattgaggccctgattaatgctcacgaataatgtaaacatgtggttaaagtcagactgcctggtaggaatgcttcaaggggatggctacactgtttggtttggaggaattctatatctaaatgggtagattaacgagtatatgggttggtaggatgcctgttattctttttttggtttttcgagacagggtttctctgtgtagccctggctgtcctggaactcactctgtagaccacgctggcctcaaactcagaaatccgcctgcctctgcctcccaaatgctgt

SEQ ID NO: 19311 - DNA, 1190 bp, Mus musculus
ctctccagcccatcacagacattttttgattctgaaaaatgttgtgatttatctttttttcttttagcagtttgtttattattgttccatccattcacctgcttaagtgaagaggtgccttactggaagtcacaagtctgcagctaagcacatgccaccctttagaagtcaggtttatgctgtgtgtttggggtaggagggctggattctgttcatttgttgctcttctgctttctatggcagcaagctgaggaatagatttgagctactcctgagaaaataaaccttttagggctcttcgctttcagtgtatccttgtttctaataatgatgagtccttgtgggtagtatttaaagttaatttaagttgaaaaatagctaagcactttgatatagaaaaatgtgtgtatattaaatatctgcagtgaggggctctcagtaccctgtcatatagtatagagtacttagtagatttctgctctaggagataataatggaaaggccagaatcaagactaagtgaagctggccgtggtgaaccagtaaaactgggtatgagatggacagaaagaaccagagagaagaagggagaagggatgctaggcttttggacgtgtaggcattcggaaacaagactctagacaaaacacattgaagtcttggaaggaggaaagtgacaagatcattgtgtgtttggttttatttggtgttttgccagccatttggttagctggcctgtagtagtaatctgggcctcactcctaggggttatttggggaaacacacctcagatctatccatttagcttaggattttgcaggggatagtgagaatttggcttttctctttcattgtgagttctgatttctctccccagtttgtttagagtctagacatactgctagtgctctggcatgttacacttacttgtttttgtttgtttcttttcctttaaggcaaggaggactgcttgttaatttccacccttcaattctgacctgtctgcttccccagctgaccagccctagacttgcagtgaggaaaagaacaattattgctcttggccacctagttatgagctgcggaaatatagtttttgtagaccttattgaacatctgttgtcagagttgtccaaaaatgactccatgtcaacaacaaggacctacatacagtgtattgctgctattagt

SEQ ID NO: 19312 - DNA, 1167 bp, Mus musculus
gcctccagaagcagatgcgatgttgactcagtgtgttgatgtctctggatttgtattttttgagttggaagaagtatcagagtcaggggtgtaagggggacggctcgggacctttcgggagaagccttggggctaggaagtggagcagaacccaggtgggcagattaatgacccacaggatttagggagcggccgggagagggacggcagggcttctcagggctgatgtagatggaagacatttagtggtgatgtcccatggaagtgttatgacatgagaacagttgagtgtgtatttcctatcactgtgatgatctcagtatagcaggcagaggtaggcagccatccagaggtggcgcaccaaccaaccacccctggatggctgctcccatgaagtaagcagtctgtcaaaatgcaaagcaggctactacgtttttattttatgtttgaacccaggctaataaatcccaagcagttgacaagtcacttagctgcgtccagcctctggtcccactggcacagtgcaagcgttaacctttgtgtggcgcagctttaaatggctcatgaaaatttcagacagaccccagtcacatttgcactgactgtgtccgatgaccaccacagtctgtatgttcctgtctatcatcactttgagaactcatgttgtgggggaactgggcgatgctttgatgctgaggacacggcacattctctgtgctctcagagctaaaggtctcatggaagggagtgtgccatacatgcaactcagacgcctacgtgtaggtaattcacagaaaatgacgtgaggtgtgctgatatccggagagtcgctgcttagatggtgcctcgagagaagttagtttccagtttccatgtaggatctggttggatttctgtcccttttgttttcctgatatttttgacgcccggttggcagcctcacgtcactgctgacctctcctctctgtgggatcttatattccagcaaacacaccacgagcacttatttaaatgcctgatcattggcagaaatgcagctgtgttcattattgtcaattctgatttgtatgatgttcccatccaaacatacctcagggtacatttgcgcatctaattacagcattaaaactaataatagcccgataaagcgctgctcagacaaatgtc

SEQ ID NO: 19313 - DNA, 1140 bp, Mus musculus
ggaggagacagtcaacagggcataggcatttaagatgatttgcttgcgatctgagctctttgcatcataacctccccactgtaaagaactgtacctttgtaagccaaaaaaaaaaaaaaaaaaaaaaaaaaaaaattctgagatgtttggtcttcattgagtagcactcagtggaagctctaatctatctccactgaggaccaacaatagacagttgtacactgatgtttgggagcatccaaggatgtttgcagcactgatcatctccatgtcactctttgcatctatattttaggaccaactaaaacccagtcggcatccgtccttcacataactctctgaatggtagtgggaagactgtggtcttgggggaatagattccagtccacagtaacaggagaaggtggtactgtcttctcccatctttgactgtcagatctctaaataaggaagcccaattgcagatgagctgcatgtgcgccctctgtcaaagttaattgaaagataagcatcttcctccaggtgcttagcaaatcaggtgaagcccgtggctaattactctcaaaaagaaagtagaataagcccctctgtgcaatcttcagcaattagataaacaatatcaaataaattacatttttcatgattcttaaaggaaacaatacataggtaacttgatctgggaacacaagaagatggagtcttttggaagaaaataacgaaagcagcagtttttccttctcttgggttatttcagacagaagtctgggctcgtaattgctctgcccaattgctgttttatcatctctaagttgatgtgtttctgttgtttattaagtcaaattcccctttgaaagtaagcagaaagtaaagaatgacatattgagtagccttccgtgaaaatgagctgagagatttagaagtcttcaagatgaatcttgtgtactgtatggcaaacagacctcaaattgtggatgcaaacacatttttttttttaaccccagaagcaatgcttgtttctgcagattttggtttttatttctttttctgtttggtgtgtaatactgcctgttgagtgttcagaggacagcaccctgtattctctgccctttatcgcccatgggcagaggcatcaagaactgt

SEQ ID NO: 19314 - DNA, 1614 bp, Mus musculus
agtgggtttgtagctccatcctggagactgtcaattgtgtggtcattggaaaatgcctacgcagtgtgcggtgcatggtaacttgctctttccctcctacgctgggttcatctgcctcagattcctcctggtggatggctcatactctaggcaggaccatcagcgctctaacaacaaataatggctgtcttcaggcttagccttttctcgttttgttttgttttgttttttgttttgttttgttttgttttgttttgttttgttttgttttgttttgttttgttttgttttgttcctccctgctcccgagcagcttttctcgctcttcatccttactccatgtctttggcaatacaatgtttcttgttgctgtctgctgccttgtttcctttctctcccgctttggcttttcatctcactgccctttcttgtctgcaggctctcaagtggtggagacaatatgtcccggagtcttggcaggtgcagcagagatccagatgtggcagtagctcatggcctgctgtcaaacaggccaaggagaggattggttttgaactccagggaaatgtccctctgtgctccagctttgcttgagaattcgtttttggaattcctctctatgggtaggtccctaggtccagtgttgaatcttaagggggtggggcgtgtcactgttttccgtgaccattcttctgtctagggattgctgggtgcctcatcttaggtcttccgtgggaagcagggaggtgaagcattgccacaattggctgagatgtgacaggttgctgctatacccaccttcctcctgctacatgtgaggatcctgctggtgaggtagaagtcctttatgtcaggtttgggatggggtgtggggttggggaagcaagagctcttttgttggtaaagtttctcttctgttcgtcaatgctgtcaggaaagtggaagcgatgtgtgtgggtgttacttggtggaagcctatgtccctttgctgtcttttccaatgagtcaggctctacctgctggactctctgttgtcagggaagagtgggtgctgagttgggcttggctcttgtatttgtttctgtcacaatggacgaactggtaaggtgaaggctgtgctgatgcaggggtgacttagaagagctgcctgccagattccaaggcctcacacgcccttccttggttttcttcttgaaaatgtttattcctttgattcacatctctaacaaccttgttgaagtatagctttcacataccacactttgtttaattggaatatattacttgaatgtattcattcaaaatgttctatgcagtgatttttttttgtatatttagaattctgaattgatcaacccaactcatttttgaagaatatttttattgctgcaccaatagaaatatcaataaaaccccaaacatatgttagccttggaaactgctaatcaactcatgtctttgcctgctagaaccatttttacatatgtgcatttgacagatatgttgttatttgtgacttgattttttccccttagcatgtttttgaggtttattcacggggttaactgtatcaagccttcacttgtattggccaagatatcctatgatatggtt

SEQ ID NO: 19315 - DNA, 1132 bp, Mus musculus
attgttgaaaaaactggtttgtccaacttattgtcttgtgctcttttgctcagaaacgatgattactcggtgacataacttctttataaataaacttttttatgaattgtttttattttactgttacccttcaaattattatatatgaccactcgattgtataagcactcagctctgtgggagaaatatttcttgtccccaccctgtgtgacaatgcattctttctcatttgcaaaaaggtcgcgtctctaattgtcactaatggatcatttccattagagactttttgttgaggccacatacccgacgttagaatctgattaaccattaggatagtttgtcttttagggatcctgtctcgagggctgtttaatgttatatttagacacacgtgtgtgcggtagaaaagccagacattgtgatttttcactctcggcctgctcacgttagtgggtgatcttgattgagcaatcacgcagtttccctgggttctggtaggtatcatgcagagtggtagtgtgtccttctgcaggtggtcacgagtgttaaagatctgcatggctgtaaagcacctagtaagtgcctgggccacagaacacttctcagtactcaggactcttgtcattcctgtctttctaagcggccggtgagctctgcttcgttcttttcctttattaggactactaattaaacatggtacccagttacatgctcagctttgagatttcttttttaacattggttttatatgaattacatctgtgttctacacacctgacctaggcctccaatgtagtcagaacactttcccctcaaaacaactgtaactcagctataaccacatcaacaaaaattcccaacttccctaagtttaggactgttaaacattttaggcagttattgcatttattcttgttctgaccttgcctattaaagagttatatttaatatgttgctactgtggggggatgctaaaactagcattattatttatctgcatcccatgtaaccttagaaataaatataactctgcaaatgcgctttgttttcccccttagagcgtatgtttgcttttaaatcccttacacctttcttcccggcctccgtctctgaagcggtcaatagagctgac

SEQ ID NO: 19316 - DNA, 1185 bp, Mus musculus
tctgacggtctgccctacagctttcacctaccctcatctcctttccctcagcagttcttactgtatgtaatcctcacaagtatgagttcgcagacactacttgctctcttctctaccccttagagccttccctaattacagtcctccttaaatcctcacttccattttactgctgtcctttctgaattctatcgaaaactctgccttatttcagactacgtcttctctgctctgtcatctagctgctgccctgtcctgtgatctcctccatatgggaaaaaacggcttctcttctagtgggtcttggtagaaacgtcacaaacagtgcctctcctgaatgcctcagtcttcgcttagctggctttcttctctttcactctagagttggtattgacgtctggatcctgcatgtgccttcacgaggctcacatgggctctgtgcatccctccacaagagcattagtcggcttctgcttctgaggcctgcaaaccctgcttccatgctcttatattgataatagagtaataagcttggtaataagcttcaagcaatgtacacttagcattgaaccatgaagaaatgtgtgtgactgaacggatcttagagctggtggccattcacgccattctgctgtgccctgatctgacgtttacgaccactggtgtctgtccactctcacaattctcacctttcagcacaagtttttactccttatttctacaggagcactggtagtgtgcaggatgattttgaatgcaggattttgagcctagatgcttaggtgtggagcgtctttggcatggattgatatctgtgcttcgttgttcacgaattggcaacaaaatcacagcaccctcttcatacaaatatttagcaatactatctttaatggcatttaatggcattttatgaccaatataataaacataaagattttaaaaaccaatataacatcttgacaaatacaaaacaaaataacaataaagtaatacacacacctgcatctatcattatcaatatatggaaatctcagcatgactctttctgaacacatgagggaagggttaaagtacttacttgtgtgcaggtcatcactaattacactaataaagtcattttgcactggtaaagagtagagatctaaactttatcgccctactgttttttgaatgaaatgcttcctc

SEQ ID NO: 19317 - DNA, 1156 bp, Mus musculus
ctgcttccacactctgtctctgtgggtatcagacatgcctggctctcatgtgttcaggaagagaaaggaaagataaccgtggagaaaattgtcacagcatcgactaggtctgtttgtttgggaaaagaaacagaagcgaataagaaaactaccacagcgcctcgtccttcggaggtgcatgctgtaggtcccatgctgaagcaaaagccacccacgtctggctagtagcagcttcccaacctgttgtcttgtgtagtcttacctcagtgctgagacgatggccattgagaggtccattttccacataaaaagagcctcagaagggtgatgtttatagtcaagaccacacagcctgtaaacagtaaatgtgcagcattgcgagcaaatcccgtattctcacgcactcctgttaaggtgctcagcaaagcacagcagttcagcctcatgggacaagaccccagggcaacaggtctgcaagcatggatactctgcagcctttgggacatggctgactccttctgaagtgtggtctgcaaagatggtgcccgtgtggattctggccctatttctgaattgtgttgtgttgtcggccatgcatccaagagtctcttttacccaggaatacaggttgcctttagcctattggaacttcatctccatctctttagttttcgtatccatggctacgtttagccaacctcataagagctatactttctacacggagactagatgcattgggcaaaactcagaatagccacttaaaaacatagaactaaatacaattcatgtcagctcacattttaaacacttatagtatatcaagctaaatattctgtagtaagggcatctttcccctcaaagagatttaaaaaaatgtttaagggagggaggtctgtctgtgcatgactttgtcaaatatttcttcaactttttcttttccctacccttgatttgcagcctgagatgaaatcaaatgaacaggtttgcctgtgtccatcaatccctgtatgatttctttaaaaaaatgcccttttccacccttcatttgggaatttggcaaatacgtgcatatttgttctaattctcccctggaatgtttagttcggctttacgcttatcaggtttgctctccagcaggagagagtgaagattc

SEQ ID NO: 19318 - DNA, 1155 bp, Mus musculus
gcacaaacactgacatctggcttctgattccgccaccctttaaagtacagttcgggaaggtgattttaatttttaagcactaaccatgggcgctgttgttaccatggaaaccaaatctcctctcctgagacatggcagcggtgatcaccccctgacagtccgaagacctgaatttcagacaatcagaggcagagcaatttgggggccccgttcatttagaattttctcttttgtgatttccgggaagcgtagcgtggcccgtcccaatttgaggaagcaaagaaaagcctgtgaattgagagccagctgccaactttccgcccaaggtagcagtcccaaacacgtttttattattctctgggaaataaggtcataaaaaagtaattgctgacacaaccttaatgatagcattttaagtatgctgcctgtaattaaaatagggattttattacggtagaccttcgagagcccagcctgtgagccattcacgtctccagatttacaaagcaagcaactttgacgcctgctgcttttgctgtgtgggctgcacacttcctttgtgcctctcctggttgccgcttatgtacaaaaccacctctctcctggcaaaaagcactaagcatctgtgtttccaacgatgccccgcagcgatggcgcctcggcttttccgcagacttcctcgagaaatgtcacgaaggagcccctctttctcctttgatttcccttccagaataaaactttcatgtactgcacaatgaggttaaaatcctacaaggctttctgattaaagtttgaagaggactctctcatttcaggccatgtcagatccatttctcccgttctttccctgatgggtagactagatgctgagtgcagtcgtggaggataaagaccagagatgatggctttgacagattacacgatgccttccctttctctcctataaagagaactgtactggcagcccacatagagagttgctggtcgccagtggggcccaacagcctcatgcttttgctagtcgacatccttaacatgttgcctgaggccccgacagagctgactgggcagcagacattttatccaagtctctgagagaaataagagcaaagagaagactctcatccagccatcttccctctgtctgaagaagct

SEQ ID NO: 19319 - DNA, 1186 bp, Mus musculus
cacagacaggcctacatgtcaatctgatggaggcatttcctatgtaggtcaagttgactactgagattagcctcacacaaattgaagtacctggtcattttcctacattctagctcagtgctatgttctgacacctttctccatacaactgacttagaaaacaccctatctgggatgatttttgtggcaacatactcttgggctactgcccactcaggctttaggttaagaataaactcattgtagattaaccccttgtttcatttggcctttaaaaggatgtgtgcatccctatataattttgaaatttgagtctttggagacagataattctaacttttgtaaattcgggagattgctattgatcttcaagttggtagtaaattgcaaatttgaacttaaacaataaataatgttttccaatcattgccactgcccttggagtgttccagtaagtttcattacatggttctcctctttgcaatcatagctctttatgagataattttcagtactttataaaccactactagccattagcgatagaagagttcttgtaataagagttcagagtggtggaattgtatatggtgatgataagtactgtatatgtaactgtacaagtaaaaccattattgtgttacaagtgtattgaaaattggattaaaatagaatagctgtactaatttcacactttattcatttactctacagacacagcaattatacttatatgtatatgtatacataatatatatgagtctgtaggccatacagtgttattatgattaattagaggcagagttttctagatatttatgtagatagaaaatgacaagttggagatgtataagcataaaatgtctattttcagaatgcctgtgacttcccttaaaatgtgtgctgcaccaaaggcagccatggtcaaccttgagtcatagcatgaaaaacttgagtttccagtctttgtcactatcctgtactcaacttaactaccttcttcaagcctccattctgtatatttgaaaactcccttgtccatctttctaggccaggggttctcaaccttcctaattcttcaacccgttaatacagtttctcatgttgtggtgacggtgacccccaaccacaagattattttcattgctacttcataactgtaattctgctactgctgtgaatcata

SEQ ID NO: 19320 - DNA, 1123 bp, Mus musculus
gtcctagttacacaactatcacaaaaacttctgtcatctaaatgaattctgttctcttgattaggaaagctgttacattttagttgaagctagaattctgcagatgaaatttaccttcgacatgaaacattaaaacaaatgtttataaatatggattagccaaaatgatcatgattgaaaggaaaatttactaatccttttcattattgcaagcaataatttagatccaactttaccactggaaagaaatgtgtagccttcccggaggctaaaaactcaaactaagacctcaagcagttttgaacctctcttaccagcagttacttacataaaacttaggaattgctgggctggagagatggctcagtggttaagagcgccgactgctcttctagaggtcctgagttcaattcccagcaaccatatggtagctcacaaccatctgtaatgggatctgatgccctattccggtgtgtctgaagacagctacagtattcacatacatgaaataaataaataaatctaaaaaaaaaatttaggaattgctgaacagtgtagtgttgagtgcctttaatctcagcacttgggatcgcacctctgtgtttgaggccagtctggtctacatagtgagttccagggtcaccagagctatatagagaaaccctgaaaaatcgttttaaatgctttaaaaaaaacataggaattatagtgatctaatacttaacataatgattaatagagaacctgaagtgtctggagagatggctcagtggttaagagcactggctgttcttccaaaagacccaggttcgaatcccagcacccagatggcatttcacaactgtctgtaattccagttcccgggagtctgacacccttacacagacatacacggaggcagaacaccaatgcaaatagttttaaaaaaatagagaacctgatgtttagtaaatgcaataaaaatcaagtgctgagttaatatttcttaatgaacttttttaacagatggaagttaaaccaaatatctggattatatttgtacttaaacttttataatccttttttagatgctattcactcgattgaatttcagcttaagtgagcaatccagccataattggaa

SEQ ID NO: 19321 - DNA, 1859 bp, Mus musculus
acagctttttaaacccaccgacaatcaagacacaggtacggcaggtgtggcggacgacgccaacgatcccagcaatcaggagatggaaatgtgaggatctgcgttcatggccagcctgggcaacatcgtaagaccctgctcagcccataccaccaccaccaccaccaccactgaaaacctcaaagcagaaaaaaaaaagtttacttcatattaatcaagaaattattatttttttcctcccaagacaagatgaacattttagcttcaaagtttcaaacttcaaactctgagaagacagcattatggttttgggcatttgtaattttgggcacatgacccaaaataaaatttttatattatttttaaatctaagtttcaaaaggaggtattctaaaatcacccaatccaagaaaaccatgatgatttcagcctctgtcctcgtgagaacagttgacaggggacacagttaggggaaaaggtgctgtatgcttaaaacactcccgttttaggggctgctggatgttttgtgataatgccatgtgatcattgcggatctcctttgccagcacactgaaccagcaaaggtggactgattgtacctgttgattgtaacacattcaaggatgctgtttgtggcgacatccttgctgtgatgctgtggccatcactccattcctgtgcctggggctctgcgtacgtggggcttggatatgcctttctgagttgggagtaagtttagcatatatcccattgtagggaagactttctcttaaagcatattggtttttaaatatttattacctagtggtactgtggcttgatcgtgtcttcccaaacctgtgtgagtttttttttgggggggtgggggtggggggtggtttcgagacagggtttctctgtacagccctggggctgacctggaactcactttgtagaccaggctggcctcaaactcagaaatccgcctgcctctgcctcccgagtgctgggattaaaggcgtgcgccaccactgcctggcatggcagagtggtagagagagtttttccatctttctcccttcttttggtgctggaactgaagccaaggtctcattccttctaagaaagcactttactgcttaattttattcctgatcctaaacataacttttatatgtaccaggaagtaaacaaacaagaccagtcatgtgatgcagctgatggtaatgcttttgttatttcgggtgccctgggactgatctgcagcatttctgagatagacctttgtgagaaataaatccactattcttttacttcatcgcccagtctgtggttttcttttataataacacgaggaattaagaccgatggtaaaataaaaagtactcattggcttgacattaatagtgttgagatagaattctatacagtttacgcacttaaagagcacaattcggtagcttttagtatagtcaatgaattgtgaagcggtcatcgcagtcaacattagggcatttttgtgaacccaagcctgcaccccatcaggcatactcatccactccagctaatgggtttgtctctgtagactcgcctgtagtgcacagcccctctaagcgaagccatacagaatgaggtcctttcggacttctttccataaccatattattaagatttcacccacattttatcagtaatatattggtagctcagctcactcattgctaaataagactcctttgcatggatatattgaatgtagagtttatccctccattagtggattgacatcagggcagtttctcctctgcccgttgtaatgaatactgctctgatctctccagcaaacattttttgtgggtagatgtatattttcatttctt

SEQ ID NO: 19322 - DNA, 1194 bp, Mus musculus
tgccttgatacaggtgctggggactctgggtaagtgactctacaccgttcttgtgctgactacttgccagtatgggagtactttgaggactcactggagagcgttcaggaaacagttccttcatgtatctttgatctttgctcctagaaaccagccattctggaagcacagcctcccatctttctcttggttccctgtctcaatcccctctctcccagtctgacagtttaaagtctcaccgtcacatcatcctgaccccgtcttcgcactctagggttgtagcgttactgagatgtgattttctttgcccactcagccttggctgtcctggctagggtccttgtcttgctggaggatcaactgtctgccctcgaatgcgttcctgccacgctcctcgtatactctgatgccttgggtgctcaactcagtccctctgtgtaaaggctccctgtgccttaagtacacactcggggcttctcagtctgcacctggctctcccagaaccctgtgatgtctcacacttaccgtttaacatccttcagtctgctgtttcggtttgttagttcactaaaggaatcaacgtcttgttcctgtctcttccccttgggcttctatagtttggagatgtttaactgtccactgagtgactagaggggagaaggcaaaagggagcaatcccaaacgattctctgctctctgcctgaaacagggaaacagcagagctaggcactgagatgaaaaagacacaggaagaccttgtttgaggaaatacaatcttcctcccttcctccagcaggcagtaatgggcgctacacttagagatgaggtttataaattacttccaaacgtggtttcagggaaagggttgactgattgactaatggacctgtcgcagattcgctaggtggggttcagtagagaccagttccgagcagcatgtgctactgccccggttccaaagtgtgacactcatgtccactacccaaagaaggtgtgggacctgcagcaggttctctaagagagttcaactgtgcggccactgtctatccctttttgttttttgttttggattggagtggagatccggaggaacattttaagtgcttgtgaattgaaattcaaggaagttaccttgacctcagtgtgacggatggcgattagggagaaacgaactaataagttcctagcataaag

SEQ ID NO: 19323 - DNA, 1242 bp, Mus musculus
gatttgaactcaggacctctgaagagcagttggtgctcttaactgttgagccatctcgccagtggaaatatatatcttttagagcttgaaaatgtttaagatagcacagtttcaactatagctataaaacccatcaatatgcgtatcctttgtatgaggcatcctgaactctcttttcctacagataacctacagagaaatgaaactagtgcgctgtgaggccagctggacagcgttcagtcagtgcccctcgctgctccagctgatgacgcccctgcagaagaatgcattggtcatatattctaagctgaggcagacatgcagagaagacggacacacgtacattgaagtaaaagacttgacctcgggcttgtcggagcatatgtcattcgaggaagcgtgtcagtctctggcgtttctgaaggacattgacgtggtcatttatgagaaggactatgtctttctttctgaactgtacgaggccgagcaagacatcgcctcctccatctgcgagctgatgagcagacctccgtggcacttaaaagtggacgtgaagaacgtcctggcgtcaattagaggcgcaaagcccaacgatccaggaagtgctgaggcagtggaagggagcaagccggaggaggtggggtcagagcagggtgacagtgttttagacgcccaagatggcgatgaccatgttagaagcaatggcgaacacgtcgcaaatgcagaaataaacgacgtcccactggatcaagatcaggtggtcgccctggagacgatctgcgccaacgcggtgactgtcctcagtgggaaaggcggctgtgggaagaccaccattgttagccgtctttttaagcacatggaacatctggaagaaacggaagtgcagcaagcctgcgaggattttgaacaagaccaggaagcctcagaagagtggcttgactgtcctaagcagagcccagccggtgtggacaaggctgtagaagtcttgctcaccgcacctacagggaaggctgctggcttattgaggcagaggaccgatcttccggcttacacgctgtgccaggtaagacacctctgacagttttgcctgcagagaaaacattttcctaaagacatcttttgctccttgtccagaagtaatcagcttgtgcagtttttctttttattttcacaggggagataaaactcggggtcgttttcataccagacaagtactttatgactgacttatagttccagact

SEQ ID NO: 19324 - DNA, 1186 bp, Mus musculus
ttgagtcaaggttctttctacaactctgctattctctaacctcacttaaaaaaggcacgtgtcccaccagtgctcttaacctctctgccatctctccagccccttcatatatgttctttatcgtggtgaattggtttcttttgattcctagctaacacatgattgtagaattttatcacatggtttttctgtgtcagttgacagtgacatgacagcatttcctcccatgtctgtcattctataaatgtagtatatgacatttgattgacgttcatgtattgaaccatcctagccttccaggagtaaatcccacttagtcgtgtttaatgtactaatatgccatcgactcttctttgctgttttgttgttgttgttgttgaggactctgtgtctattcatcaggcatgctgtgctgtagtttcgatacactgttaactttgctgctcttcttagaaatgcttgaaataagacgggagctggcctatgtagcaagtactgggtagtacttgagtgggtaggactgagaggttcctgatgacatgagacagtggatgggctcagggaaggacagggacagaaggtgacagacatgacactacaggaaactatcagaaacaatacgtgaacaccaatcaaactatagaggtggtcctgagcgtgtccgtgagtgagagaggcctcggtgaggcaaggtcagacttaaggaataatttaaactattaagggatatttaacaaacacatttgatttttttccctcagcaactctgtactagatgcagagataattaacagttgctgttctgaaaacactgacttggccagcccctaaaatgacttctttgtggcaccttggctaaattctaaagtgccaaatgccaggtttagaggggcttttgggaggaatgacgcatctgagaactgaagtaacgtaaggaggaagcgggattccgtccctcggagcttacactttacctgtgaggtaagctcatggggagaggacgtttctgctgagctactccgtgctgggagcaacacaccaaatgtcaccgtgggaagcgtgcctatttaaagtgaggttaggaaaataagattgtgttgtagaaagacccttgactttaagcgtctgaagattaaacacagcctgcctggtagtatgcaggcaagctttgcctctgtgatccctc

SEQ ID NO: 19325 - DNA, 1182 bp, Mus musculus
tcaagttgctcctaggttcttaaggagaatttttttttcagtgacactactttgtatcacacacacacatctgtagtgttcaaatataagtctccaagtttgtacctcaaatgaattattgaaacaaatggacttcctgatttgcaaggaactacctccacacttccaaaggaacgaacttgcagcctatatcactcattgatttccttcccccatgtttgaaggagctcaaacctcacctctccctcattgaaacattttttttggtaaaagacacttgatagaaacacaatttttttacatacttttgcaaaaataaatgaattaaaatcaagccaaccttcaaagaaacttgaaattttgctacaaccagctcagccttttgcctaatgcaatgaaaaaggaaaaaaatagatttctaagatttgttgcctagaagaatatgcttgaccgatattttttcatgtattttacacaatgtgatttttgtaaaaaaatgtctcaagcagatttgttttggacgcttcttgtgtagagtttctatgcctttctctcctattaagtgtgctgactttccagagtgttacccactgggccaggaggtagtttctcatagtggcttgtgtcagtataagttaatactgaagccaaatgaaacaaacaaacaaccatgtctcttccagctgttttcagggaggttacttcaaaggccacgtgccgctctgagactggcagatggctcactgttgtgagtcgccaaaggagctatggagagattaaaattcaacatgactgttaacaatgcattaaataatcaaataaacagtggcttataaatatcagattctcattccgggtcttcggatgggccttacagaaacctcattttggccagctcataaaaactgaagcagcttctcgtgttggccagactcggcacaccgagcaatttccatctctgatgaagttattccttatttcctgtatgttgtacaatcaaaacacactactacctcttaagtcccagtatacctcatttttcatactgaaaaaaaagaaaaaaaagagaaaaaaaaaggcttgtgtccaatggaacagtgagaacatcataaaatttttatatatatagtttatttttgtgggagataaattttataagactgttttttactgttgttggtc

SEQ ID NO: 19326 - DNA, 1182 bp, Mus musculus
catctttatcaggatttttttttctcccttcctgggaggaggttaaaaggaatgtttcaaggaggtctttgaaacccattttcttcaaatgttcactgcatctaagatcccatttttgtcctttatttgcttcagcataccaccaggctgccaacaaagaggggcctgtgtgcccaggaattttctgcattcctctcccgagtaggcatttctctcagctagaaaggccctttggcaaattccctctaatcattggatttaccctgggttctgataggtgccattcatggagttggtctgctggttcatggggccgaggcattaatggggtcttttcatgataaacaaaacctgggtaacattaccagaggaatcacaacgcgactgttgttaggaggtgactgtgcattccccgccccctcaccctcaccccaacccccacccccacctctctctctctctctctctctctctttctctctctctctctcattcttccccttagtctttttcccctcctctatttttacaaatatacatttttggttgggtattctgtacgaccatctctggaagcagatctcctgacccagctgccgccggcgagacgatcaccaaatcgcaggcctctgttggcaacaggatgattctaaaacccatacctaatagttccacggcctgcagggagatctgcatgttcctaaagggttgaacatcattggaggaacgcagcacgaagcctctgctttatgcgtcttacctctgtattccctgccatttaactgctgggagatgctttgtagttgagatgaacaagagtgtggcctcaggagctgctcagtcagcttcgccattggctgggctgcctgtatcagacttcaccgtccttgctctggacaacattcattcctgtttctttctcagaagagtggaaagctgattagttggaagctgggttctactgtagtgggggaacaaaacataaaaaccggtgaaaaatagtcttcccattcgagataatatgagatgctgcagcatcattttttgatgggggtggggaagagccagtaccatgaagtagaacatgagtggttgggcttacatttccaggaaagtgttatttcattaatgtttctggggagggggggggtgtagttcaaagtaggctaatggttattttta

SEQ ID NO: 19327 - DNA, 1130 bp, Mus musculus
agtaaatgcctattaagagaaatgatgaagactatatgtcactttttggcctttattaaaaaaaagagagagaataatttgcatcttattaagtatgcattgtaatagaaagtaacggttcagtattagaaataaatccctacaaaccttctcaatggattgaaatctatatcatttgtgtaaaaagagtctgtgctcatctttggggaattaaactcctgtgtgtattttcctgtgttgaggtgggtagcactaaccacattctatggggtgcttcccagtggtccattcctgtcatagacaccagtgatgtagaaaagtcgtttaggatgtaattatcacttctggctgttttattttaacagggtcggactgagttgaaagagcagatttctttaacatttgaattaattgccttttagagttgagatcagtagtgaatgtttaaccaattatcccccagttgtctctaaataaccttgttatttaagtaataatacataatctgatattcctaatatgaatggtttccctttcttctatttacaaatgaactaaaataggacttttttgaaacccaaaagattctgtgttatgtttctgtgacacttagttacctgtgtcctcaggggcagtacaggtgggtcttggttggtatcaatcagtagatatttaaaatatgatgtaatcactctgaaaatgcctcatcacaatataagttaaggcatctttaaaactcaccacaaatacatgatctgaaagttaatataagaatgaaggtagattatcctcttgatgtccctgtataacactttcccttgaatgaataggtcggagtggtctcatcctggcctcttcactttaaaaggtttagtgtggacaaaaggaatggtaagacttgtgcctggtttaacatataaggaaacaaaacaaaacagagaaagcgtatccgtttccaagcttgtttggttttcagtgtctttagccagaagtatctacagctggccccactaggctgcccctcttcctgtaattcctcttgtccatacacatacttgggtaattgctagaacacaaatccccctcccctcatagaagacctttctctgaaatccttctatcttccaggc

SEQ ID NO: 19328 - DNA, 1222 bp, Mus musculus
ggtgagatggctcagtgggtaagagcacccgactgctctcccgaaggtcaggagttcaaatcccagcaaccacatggtggctcataaccatctgtaacaagatctgacgccctcttctggagtgtctgaagacagctacagtgtacttacatataataaataaataaatctttaaaaaaaaaaaaaaaaaaaaagatatgtttaagaacttgaatagggggctagagagatggctcagcggttaagagcactgactgttctttcagaggtcctgagttcagttcccagcaaccacatggtggctcccaaccatctgtaatgggatcggatgccctcttcaggtgtgactgaagaaatgtactcatacacataaaataaagaattcttaaaagaaattgaatagggtttgggtgaacagtgctagtatattggcttacccagcatgtgtatggtcccactttttgatccctagagccaatggaagaaaagtaaatgtttggagtttattaaagtacaaaatacatatacagtggatacaaattggctgaaaaaaggagttttcatgtgtgtgtgagaccctcttttccacgataagcggaattgtagcatggtgtataagatacagcgccatgcattgttatctgactgtcctggcttcagtgtgcacccaggccatgcgctggcctggcgatgacctggctcaggaggaaaggtgacacaagcatgagaacctcagtgtggtctccagagcccacattcaacacagggtacagtggctctgctcggtggtagcgggaagaggggcaggcaaagacacttgcatggggaacctcactgctcagtcctctaactgaatgtcaggtttactgagagaacctgtctcagaaagtaagggggagagccattgagcaccgtgtgtcaacctttggtctttccagccacatgcccatatatgcaccacaaaaccccatacacatgtacacacactgcacataacacacacaattaaaaacaaacatacctgcccatccctaccaattagtaagcttttggattttctataatttttaggaccttaaatggcctttatttatgaaaaatgtgcctatatttgtacctttatatataaacttatattcttgggatatttttttctttttccaggcaaggtcttgctgtgtaggtgtggctggctggctgatgtggttaatgtgttagtata

SEQ ID NO: 19329 - DNA, 3217 bp, Mus musculus
cacatctaagacccgtgtttgtgtgtgcgccaaagtgccagcggctagaaaagaagaagcgatctcagagcttgagtggaggttaagtgagggtcagctcttccatctggatgctttatacctgagactcgctcacctcccgtagcctgcctgcctgcctttattcccagcactcagaagcctgaggcagcaggttggggagtctgaggccagcctggtgcgtagcagtttccaggccagccaaggctgtgtagtaatgttttgttgctgctgttttctgaaggaatctccctcctgcttcttgcagttaaccgtgttgctctcctcaggtcacagcttgcatggaaaatgctctcggctactgaaaccacatttatgtgacagctccctgcttggtgtgtcagtccctcccggcagctctctgctgcaggatatgcctttgaagtcacatggctagcgagcattcacgtgacgtcctccctttgcttccctcaggtacaggtttgacctgcgtctcatgttcaacagtcacggcagcgtcagaacgagaaggttctcgaagcatccgctctagcagcctctgcgttggatccttgcacagccttttccggtgccgtggttggagtgggagcccacgcctcgggagctctggccttgctctttcaagtcttgtttgaaaaataatccagtcagctgacttccagtactgtgaatccgcccctgtcagaagtggctgaccctgtttctcctcagatgacaaccaccactcctgaggtctttgtcctctccttgtcccttcatcttggctgggcacagtatatgagtccccacgtggtcgagtctggatctgtaaaactcttctgataatggcaatactttagggcagagataaaaccttttggtattttagctagcccccaaatcaaaagcactgtatagcatttcacaccgagcccctcaccaaaactcacacagttgcgagaagagctgctgtctgtggacacgtagagaaaggacattcatgacatccctgtggtgtggttaatgtgcgacgtgtcgcccaagctctgccctaagaagcttcttagtgactccagccacctgagagcgcccaggagcaccagggggggccagatgcgcttcctgagctcttggatcagtgcgctgaagggccgcacttacaagtgcctgtctggagggttctcaagtgtcagcgccacacaagtcatcctgcctggctgcagttagctgtcattgtcattgaaaatcttagtgtctcctggtggaggggaaggaccggctgcctcaccccactccctgatctcacaaaagtgcgagtttccagtcctgactaactagggctccagtcagtattcccctggccggcttcccagatgccctggacggcactctgttccttaaagtccagttccaccctgacgtccacagaggcagcacggagtggcgaaactcggttccagcctgtcgtcggcagtgagcgggtttagctttacacagcctctgcccagctttaacttgtaagacagctatgagtcactttgagaattccagaggccatgttggggggacagccattgagtttattcctttacctcatgtgaccccagcaactttggtgatactgagaggccagcaggcagtagagtggacacctcggccgtggccactttagagggggaaaagtttaagttttaaactaaaagttacagaattgaatgtggataccggcttcattcacccccacttggattctaaacatgaccagtgaaatagtgaaagctgaccacagttgttcccaaataaaggtcggcagctcctaccaggtctgggattgagatgttagagtcttcagttttatagccggctcctgaaagcaggcgacatcagagtggtaacagtcagtaggctgcagtaggtgtcctacctcgaggccctcagatggaggtaacacattaggattgtgggacacaagatcctctctgaacctcctggttaaggaacgttcctgcaaacattcaagtagaccttctataacagactgcagcgtgcatggcctctacccacaagagatgcactgcaggaggccggccctgttctctgtactcagcattttgacatctcctttgaaggccaggtatatgtgtaccagtgctcttcaaagggagaaccattaaaaccaacatggaatgcagggacttcgccttataagatttccagttttaaaactgcccctcagatacaatttcaaagtagggtacacattagagtgtctttgagttcaacaagttggtactgttgcaaacaccttctgaattgccagcgcccgggtttttatgtaaaaatagagtggctatggaagttacaccttcatctgtgggaagtattctcaaacgtaggggtatctttatcttatgttttctaatggaagatggcagcccagaatcctcaagacaaagcaaggggtatcagctgatggccgcgggactgatgggtgtcctgggttctttagctcaccagcactttgcgctcaatggactttgtaaattctcatcagctgttgtagaagttcctctgcctggagctgtcatctcagccgctcccttagaaagtgcccttcaacggaccctgttcactgctgcacttctcaatgaattaaaactgacttctgttctagtggcaatgtgtcctttgtttttagtccacaggtgttgattctcacaatgtataagaaggtggctgcttcgtggagttctgtagttttgtggtgctagggtccaaattcagggctgacataaaaggatcaggtcagcactgtcccccggagatagaccttccggctgcaaggttagccaataacctagtgaaaatggaccgtctcctcctcgtgtgcgccctccgcctagaaagctcttagataccagtccctgcaagtcatctgagacctgggaagatggctcagtaactaagaacacctgttcttgcaaaggacacccccccccccccccccgctcccaatgcagctcccagcccctacatggtagctagcagccatctgtaactccagctcagaagatcaggtgcctcttctgacccccacagcctcctgcacacacacataaatattcataaactttttaaaaaagaaacccgctgataagtgacttacagcttctttgagcgacttgtaagaagacag

SEQ ID NO: 19330 - DNA, 1191 bp, Mus musculus
atgttccttccaaccaaagagacgcatgtgcaatagacaggcgcaatggcctcactttccacagcagcttgcaaatcggagagccgagggaagggtgttccgattccggaggggccttacggttggtctgcctctagtctagataggttttgttgtttataaattcccaaggaattgttaacacggtgacacccgatggaatcgtttggaaattccaaggtgccccagctcttagcctttctatgaaccgtgccttctatcgagaatctgtcccttggaggtggccctcctgacttgtcagagaatgtcgccctgtgggaggcagatccaagtgtgggttatgctaatgcaagctccctggacaatcggatcttctaagctattagaaagagttgggaaaaaaaaaagtagagctagctataaaatatgaatggcacatcttgtttaattttgcatgtgatttcttttttcgtgcatcaatgaggtttagtgacattgtcatccgacacgctgcctttgttgttcagggaatgccttcgtggttcttgtactggttttaccattgggtttgtgtatgctgccaccagccacctggtcttctgactactcctcccagtgtgcctagcgtttgtgaggcattggtttctctgattaagacactgttagacgctaaagtagcagctgatgggtatctgtgaatttttttttttttacttgaagtagactgtatgaagcagctccctcctccgtatgcctccaaacctcgctcgatggcgtgtgcacttcacctgaagatctgccagtccgaggttcctgaagaccgatgttctcgctcaaacactggttactacagcagccgttgttttaaagcataaaggaagaaaaagcataaaggaagcataaagcataagggaagaaaaggagccccagaggccaaagagatatatatatatatattttaaaccgttgttcagattctccggtaaagcgaaagccagctttgctataatgctgttttctcttcggaatgtgatggtacagggatggtggtaaatgaagggtggcgcagggaagcttttaaatctaaagtgaaaagctatatttataatgttgaggactttaagttttatttttatagggcagatttttttttctcccctgaaattgtgtctggaatggcaaaattgttcc

SEQ ID NO: 19331 - DNA, 1330 bp, Mus musculus
tagttcttattctcattattgtgtatgtgtgagtgcattttgcgggcatgtgtaccacagcatacgtgtggaggacaacctttacatctcaggggcatgtgtaccacatgcagacgtggggagctgattctctgtggggttgactaggagaggagggaagccataaaaccaatactcaggactgtgaggcaggaggatcgtgaggtcaaggctagactgtacaacacagcaaaaccttgccctggcggtgggaggggggcccaccctcccttggtttcggggagaacactgaagtgatcctgtctgcattattcctggatccagtcatggcgtcttcctctttgtccctttgtcccccgacagtgggaagctttcagcctaccggagctgcagaacttcctgcgcatcttggacaaggaagaggatgagcagctgcagagcctgaagcggcgctacacagcctacaggcagaagctggaggaagccctgggcgaggtgtggaagcccggctaaggccgagggctctccctgcccggaaggcactgttctgggacgcacaagagagtcgcgttggttgcctctcttctcagagagctgtcttcgtggcccggccactctagggtcttcctcttttctctgtagacacagttgtcaaagcctggtcacgcagcatcttgcgcctcacgagggactggcacaagggactccacaagcttgttctgttttggcatggcgatgttacctctcgcaagctgtgagcctttgggcatcaggcatcccagcgtgcttggaagcatgagctctgggctgaggccccctgtcttctactagttactttagtgacgtgattctggtaaccttcaggatgcaaagatgagctttaaggcttcactaagcaaccgctaagaccgtgttctacggtgaaactacctgcatgttttcattctctgttggagcagccctacccacctgaactgaaggacacaggaatttaggaactctgggggactgggaaaagagtttggaagagttttgacaaagaaagtagagagcaagtcgggaaggtagagggaaggtaagggcccagggctcggggaggtagtgtggcttctaagttagcgttagaggagaaaggtgtatttgtctgtaaaagagctaaaagcattcagggtcaatgttgagcttggttaaagattgcttaatttgctagtggtaaaatgtggggtcagagccaaagagccaggagctaagcccaaagggatccacaaactgcagccgacccgcagtggatttaaccttgactgaggtggtccacaggtaggtgtgcctc

SEQ ID NO: 19332 - DNA, 1206 bp, Mus musculus
gagaccctgggtcaaaaaatatttttttgtaaatcaggattaatcttttcaagcaattggaggaaatagtcaatattattttgattgtcagagacagtactagacaataaacggatgtttcttacagctctgggatttaaattaaattgaatatatgaaataaaagccaaacatgggggatggaagtggttgggaacacttgctactcgcacagagggtgggcttgaactcccagcacccacagcaaatgggtcacaacataattccagctcccggggatctgactcacaccctccagcatcatgggcacagactcaaatactcatatccaattctttttaatttgaaaaaaaaaaaaaaaaaaagccagatatccctgtaactcaccattttggaggctaagactgaagactaatctgcgtcatatggagagctgaaagccaggctgggaaggttggtaaaacactatctccagagcggaacaagaatgatggaatatatgtggttcactgttgctgctgtattgctgggaacatactgcatttcagtctaacagatactgggcagtcctacttcaagctaaccgtggctcacactcgttatttccttaacagcatacatgcaaatctcttcttcccccttatcgtgaggagaagcgcctggacaagccgagatgcagagcacctccaaccatctgtggctcctgtctgatatcctaggccagggggccactgcaaatgtcttccgaggaaggcataaggtaggtccagtgctgcctgtcaggctcatctcgacctggtcctgtcttccaacaagcacgccgaagtccaaagagaagggattttgtgggctttgtgattaagatttagcttgttttggggcggtgaacacctacctagtggtgctagtttctgagtttacagaatggaaaaacactggaagagattggacagtgtttcccacctgccttcctggtgtgacatgcagtggagggaggcatgaccgacaggcggacaggcagatgcccagagtttaaaaggagcccactggtgattcgcgtctctaaatagcaccatgcagggtggattggaggtggaaggctgtgttgtgttgtagtacgaggccgtctgcagctgtaggaatggggtgggattgaagggttgctcctggcagcatggcaacaacccccagcatcctggtgaaatc

SEQ ID NO: 19333 - DNA, 3701 bp, Mus musculus
ttttaccagtaaatagaaatcttccgggctggtgagatggctcagtggttaagagcacccgactgctcttacgaaggtcaggagttcaaatcccagcaaccacatggtgggtcacaaccatccgtaacgagatctgactccctcttctggagttgtctgaggacagctacagagaacttacatataataaataaaaaataaatcttttttttaaaaaaagagaaatcttctaaaagctatttcctctgactgctattgctcatagcaatattggttgttaccaaagagagactagcgttcagaagccttggggggaaaaaaaaaccatcctgtcttgacatgtgtgctgtttccatgcttgtcttccaggtgttcttccagagagcaaaaccctaaggactggacctcccggcccctgtcatgatcaggaactccagttcataatttataaagaagcagtttgtgtgtgtgtgggtgtgtgtgtgctcgcgagcgccatccacactggtcctttagcattgtttccatcatattgcagtgtatgtgggattttctgtaaaatgggtgtaatttttcccttaaaaaggtgtgtgacaacaagagaagttgcctgcatgccggtttaaattgtttatgtaaaaatgctgttataagacatagatttatcctagttccttaattttttttccttttatgaaactttaaagttctttataaaatgcagcagtggaaaactgactaacaaatcgaatgtaaagttgggaatgtttggttctgtgtatgcagacacatgagctgtggggtaacaatcaaaacgtaatctttcatagatagccattacatttctttaaatttttcaatgccgatgtgtattctataagagaatagcttcctaattaagtcggtttagaagaaggtgctggtgtcacacatttttttataaaaaataaattttacatagtgaaatacaccaagtcttttccggagttattacaaagagcctcctttccccaccttactcacactgattcccacctaacaatcagcagatgggagtgtgggttccttatgtcacaggctgtgccccagcggtcactcacaacataggtctgttgagtcttttttaaatgcactaggagccaactctgtccatctgtgatgggattagaaagcccggtgtttttctgtgatattagatgtcctccgagcacagcccacttggatttgtttgtttggttttgccttgagactgggtctcactatacagagcagcctgcctccccactgctgggattaagctgagaagcaccaagtctgaccacccgtgtgttgatgacttgcagtcaattaactatgtgtgctgcttcgtgcaacaggagaaagccagaagagcagcctcgggaaagacagacggaagtccggcaacccagctgtaggcgcttacactgaaatctaagtctgtatagtgaacgccagcggcggccgacttctatcccaagcactgcgcaaaagcagaggaacggaaagggaaagggccaggtcatcctcagccacatagtgagtccaaggtcggcctggactgcacgagagtctgtctaggaatgcagttagtaaaagcctggcgtctactgcagagtatgtatacttggtggtagagggcttgcttgaagacccaagttccatccctagcaccacagagcagggaggggacacagatttaggagagatttgtctttttctcctttggctgtgtgttgtccagggatatatatttcctaaaatctttttaaagtgaatttatatgtgcacatatgtgtgtgtagggggaggataagaactgaattatttgaaacaggttattatttgaaactgtattactctactcagtattttggccaggtcccagtcccgggttgcaggtgttgactgccaccaaggtttgatacgggatccaaattcaggcccccatctcgtccatcgagcactttgtgaacttgaacccacgcccccccccccccaatcccctagaatctttttctgatttttaactccaggagagatagcattttccttacattataaaataaaagcagtgaagtaaattgacagctaaggatctctatttcatctcttgaacgatgaaaatagtgacgtatatatagtacttctataaataacagtttttaagaaataggtaagtggggcaggtttggtggcttctgcctgtaatcactgcattcagagggggccaaggcctgtttcaaaaacaacaaccaagacaagcaaaaccaggtgttgctttgctatgttcctgtacactgtgggagaggtaatagcatctgtgggacacagcagaattgtacaagtgtacaattagtgtgtagcagagcacagcagttacgagcttgtataacgaggactctggatccagatttaagtagattcaaacaccacttaacaccagtaaccgattttaggaccttgagcaagttaaataacttcttcctgccttggtttccccgtcagaaatggggaacagtggtagctacctcataacttgtaaagaatccaatgaattaaaacacaggtctcagtattagcttgtattactgtactatcgagtccatacacggctctctaaagccctacagagggttcatgtgtttagacctgagaaatcaggacatggaaatcagagcatatacataaggaacttaattttaatgtaatcatgtctaatgatcctcatcttcattccttgagattacccaagtaccgtcatgaccaagaagcctttccgtcattgagtacctgatttttaaaagcaagcacccaaataattctctctagggaatctcatttgttacaggtgagaagacagagggttttatggtgcctgagttagtcctgtgcctaaccagtggagtttccgtctctgtgcttgctaatagtttcacaagtggcttgacttttttagaagtattatgtggtattttactgtgtatcacttctgtggtaaacatgtgaagtcctttggcttagtcatacttcataacttttgaacgttgggttttttgttggaagaaacttggatgaatctgtcatgtcattaacagaactgaaatattctattgtaagacgtgcatttgcggttagaatggtcttgttgcctaaactgtctaaaattctaataaaataactttctaagaagtcattggagtgggccttttaaaatctccattttgagtttgatgaaaacggattagaagtgggcagagattcagcttcagccccctgtttcagtcaacgcctctgccagcccttaaccactcccggctcccgtcctcggagatctgctcgccctcggtctggagggtgccttaggtagaaagaggaatttggtgcatcgtgcttccttggaagcaaatccttgtaaggaatgcctgcttgagcaggacctgatcatacagcagtttacctcttaagttgtcaagttcaagtctccagtgttaccattttcaaaaacagaaactgaaagcgacttaaagagtactgatggcatgaacggatacttgcttcacgcagcagccaagcgacgttgaaacacaaacccgccccatctactctgcgaaagcgatcggcggccagcccgctgtccacgggtggccgtgggcgtcacctccttgccgcacgccggccgc

SEQ ID NO: 19334 - DNA, 1157 bp, Mus musculus
tgcccagttcatgccagcttttctcagcagtttgctgacccttgaggcatccaaacagccatattgtatcgggcagtaacagttatcttaggaacctctgcagagttggtcaggactaaagtttagttcattgatctgcttgctcgctcaagtacaaggctagggcttatcttagcgcctcgggcatgaggacacagggtaccaggaagtaataccctttgcccagcacaagagttagaactaggagactttaacctctgcttccattttcagtctgggattgtggcagaaattccgttcttgtatgagtacttgatgtaagagccaatgtggtagagtgtatttcctgtctctcatgcttgattaaattaaaggagaggcactaaaacctaattttcagttatgaccaaacttccttgtaggagaacggataccagtccttgctgagtagcgacgatcagctcttcatttacgaaacggccggggcgctgattgttaacagtgaataccccgcagaaaataagcaggccttaatgaaggacctcctgacaccactgatggagaggttcaaggttctgttggaaaagctgatgatggcgcaggatgaagagagacaagcatctcttgcagacagtctcaaccacgcagtgggattcgccaggtgagcccaggtgcagctgagattgtacggctgtgtgtctgcacagcaaaagatgtgcatccgtgtaggcaggacctctagtgcgggtctttctgacatggacacactcaactgtttgcaaagccaagtcagttactcagagggttgtatagccctgtgtctctccagtaagtcagaagtgcagcggcagagagcacagagccttgctagctgcgagttcgtcatgcaggctctccagatcctctgtactctggggccgagtccttagtgtgagtcggtcttgtgtctcaggaggcgagccaaagcgtcttgtgtcccagcagccactgtgacattgggctttaacattggccttcaggaggtgtcctgacgctcgctccgtagtgttagcgtgtctcaaaggcccaagcccacctttactactctccctacatttttttattagcagcatggagattgaagtgattgctgagttatcctgggaggttgttgtaca

SEQ ID NO: 19335 - DNA, 1386 bp, Mus musculus
ttccctgtatttcatgtcaattgaatatttgttggtttctcatttatctttccagattttttttgttgttgctattctgaccattgtgccccagtgtgcttcctagcatctctctctctctctctctctctctctctctctctctctctctctccctccctccctccctccctccttccgtctcccccccaccccagccacagggagagatgggattgttttcagtttcacaaacactagtattaatagttttacaaaatgatctaattagtattatactgtaattagaatcttggtgagaaatttctgtcaggaggtgaagtgggagatgacaattgatactggtccttacagcagtacaaccatccacaggtccttttcaggtgaccctcagctccatccgcatcagtctttacctttaaagggtttggtagtcacctgtcccaagtcagcccaagccatggttcagtgtggaaagcactcagccatgtgctttaaccaagtgttttagtttctcacacattgcagttcatttttataaaatcaaaatgacggacttaatactttgtgcttgctccatagtcagggcatccggtgaggccccagcacctctgggcgtggtctcttgccttctggagatgattgacgtgcatgcagaagcagcttctcggcactgcttctcggcactggctgctctggcctcctgcgagttcacaggggagcggatggagagagaccacggaagcattgagctgttactgctgcgtttgtcccctggagctcctgtaaacgttagagtcagatcaaggctttcctcgggcttgtatggagccactgtctgatggggtgtccacagagcatgaggctcatgcagggccggggagcccctcccaggcctcctggtcaagtggggtccagctgtacaagggttcactggccaattatctgcatctccccactttcacacaaacttaagccagttgtctttaaacaggtgatagtgattgactctgcattttctccaggctctatacaaataggaacaaatgttgaccttacattgaaaaattggaaacacttggaattaaaaaccaaaccatttttcttctttttgtgttttgctgagaaactgaaaaaataatccttggtatgtatttttttgtttttttttccaccattagccttaatgatgtcgttcccagtacctaaaagaatatataggcttcagtaaaccatggagggatgtatataaaacacatatataaatatatattacttaaaatggccaaatgtatatatatatatatatttgaattgtatatttatttttaaacatattttgagtaatctaagaggtatttacaaagaacaggaggcagatgtgaa

SEQ ID NO: 19336 - DNA, 1177 bp, Mus musculus
agctggggtttgtctcgtgggagcctcacgaatgctaggtaacacacccaaccagtcttgtgtcttgttgtttttttgttttttttttgttttttgtttttttaagaggggaagatgtatttctatgtgcttatattctaaaaattattttgagttttcccttttggtggactaactttatttttaattgttagagtctgatgcttccataaactatagcaaaacttagttaatacaaaattattacaacttttacaattgtaatcaatacaaaatttatcacaaacattaatgaattttacagagttccaaacttaaaataatcaatacaattattgtattactacaattattacaaattaatacaaaattaaataagcaaagaaactcaagcatacaagcttagtctttttcaataagacacacaagcccttcctgacgaggtgtcttttttaaaatgttttttatgacctgtattcatcttgagtgtgtacatgtacccacgtggggagtcagaggacagctcgtgggctttgttcctctcctggcactgtagaagtgctggctgtgagctcagaacgcacatattagcttgttggagagcgcctctactcactcagccatcttgctgcaccgaaaaaaaggatttctgaagatttattctcacatcttctgatttccttggctggctggtcctggtcatagccacccttgtagcactggactggcaggaagcaaggctatagggattcgtgtaataggcttgcactagtctcccctggattgaattggccactaagtggctgcagttgtcccacctttagtacagttaccagctctgagtgaaaggtcccacagctccaaacctgtgttcagccagctgcactccacagtgccagtccatgggttttgagatacttaggcttcagatgtttgctccacacgaagatggccctgggttgcagcatctcagtcaacaggggcatcccatgggttcctgcactaagtgtccatatctcacagggtgcagatctgcagacctcaggtcctccccacccctacccccaccccactacattcttagccctggaagcaactcctataacctctgttaagctttggcttccattgccattatctcctgtgacacccccatagattcgtggctttgcaggaa

SEQ ID NO: 19337 - DNA, 1230 bp, Mus musculus
tactgagatgccaaagcttttcaattcagactccattttagagaacctgacctaagtttgaactcaggtagactaacaggctgataattagcattagtttccaagttgtaccccaacaaaacctgaacctagctccagtctctagcctaatccccaacaagaccagtgtctcctagttattcccccaacaaaccttcaccctaggtcaccagcccacctcttgaataatgaccaccagtgcagaggggaacagaagttaagttgaagatctgactcccagcaccaacctatcatgctaaaggcccagcaccttgccaatgagatgcctgtacatgtattttgtgcttactgcttattgtaaagccttgacccaatctacatctgtggatcctctaccaccaaatccttcctgaaggaatggtgtgccttgagggggtagtggtaggtggcaagctaggtggaatagattaaatccatgctgtgatttgcatcagattgggtcctgtatgggttttgggatatcactaacatttcccttgcaaatattactatcatcattttgtatatgctgatggttttggaagaacttcactatcttagctctgcctccagccctttgctcacttttctttgttgctgctgatatgttggaaagcaaataagaataataggaggccttgaagcatggctgggtagtcaggaacacttgttctctaagtttcagatctgaacttgatcctccagcactcatgtaacaattcaagctagtctgaacatgcatgtaatacccacattgggaacagagtcaggctgctctcttagagctggctgagcagttggcctagccaacaaacaaacaaacaaacaaaacaggcaaggcttgagtcaattgagtggatatctgaagaagaaaccacgtgataagatctggtatgtgtaggcaaatctacagaagcaatttgaaacaaccacacaaatacacacacacacaggcaaacacctctgcataacagttacttgtgcacatgtgcaacaatgcgtcacatgaactgacagtctcaggttttttgtttgtttgtttgtttgtttgtttgtttgttttgtcatattggaataggccccatccaaggatgctgagccatgaatggatcatagacttggtacaccaagaagccttaaattgattttgagcatgtggagaggccaactgaggggcctttcttgctgtcc

SEQ ID NO: 19338 - DNA, 1195 bp, Mus musculus
tggcctctagagatgtaatctgcatatttacaggtaaacatgccacagtcactgttagtctcctgctgaggaatctcctctgctggcatgctgtgctgcttccagtccagagggttcagatccacattctttctagctttgctctcctcctgcagatagtggaaaatcagctgaaggacctctggtctcttgtgtcccatcgaatccaggtagacaatcgtcttctctctcatgtaggtcaccacaaggctccagtgcatattcaggtttaccggcaccaggatcagttcctttgcaaagaggtctactgccttggtccatcttttgactgacttgtagcccccactctgtaacttggtgtaaaagaaggtattaaaggcgaaaagtgcagggtatccttgagtttggtttctggccatgagaagattcatgtaaaaattgatgactgtgtcattgagccactcggtgtccctcagagtgcgcatgtcttctcgagtaattgccatcttgaaggcacgacacaagatctcgtcttttggccctgggcctagagcactactgatttccttttgcatgtctgctgtgatcagagggcctcggtccagccctgtgctcctgtcggcatatgtaggagcttttgctttgaccgtggttattggcatttgattggggagaatgctgttgctgcctctttctgtggagatttgaggtgttgcagaagcatggatctctccatccacacagccattcagcttctctaaggcatccagtagaatccagtgagaaccaggagaatcagagctccctgagccactgggttgaaggtagaccaagaagcttgccatcattccattgtggtgattctgttcaatttcttcaatggtgctgtaaggaagatagggacctttgcccacatccacagactttgtctcactgaaagccacttctccagagactttgatacactctgtgggctttagctgtaatccagtctcttcttggggttttcttctctgacccttggctacctcttcacacccaagctctcgttcacactgctcccgtttcagtctttttagaggttgggttggctctgaagactgcacatcctgtggaccctctgcctggcgtttcctcttttggcctctacttgaatgctcacagtacactgtcccaggctgggtactaggttgcc

SEQ ID NO: 19339 - DNA, 1195 bp, Mus musculus
ctactagaggcaaggttggtattggtcagaaggaaatgtgctgttgaaaacaacatcggactgtagtggtgagggcattcacatgccccagtggtagtttggggcttccttttctggggttctggtggggagttaatcctatgtttgccaaccccagactcctcactgagcacatattcatacagcaaaggaagactaagtctgtagcctgtgtttctatggtaaaggagagaaaacaaggccacctctaggtaccttctactaatttataaggaaatgagaacccggcttgtctccaacatgtttcttgggtggtctcttctgtattttaggggctaaggaggtcaaggagactcatacatcacacacataatctcctctatgaaccctttacatggatgcatatctagtccaatcctgatgctctattaaaaaggcacaaccaccacatcttttcctagagcagtttccagaatgctttctccacccctttaaaaatcaaaatagttctaagtttgccccaaacattaagttctgagatttcttattttattattgttccttaggtttcctctctcccatctgtctccttattgttgttagatgttcacatgtatataaatacatgaacttaacctactggattcctttagtgctgctagcatgtgcagcatctgcttagggttgagcacttggacatggatagccaattagggagcatgtaccaaggagacctcactctccttctcactagtcattatatacctttagctctgtcagcaaatggtgggaggttgtgacattttaccatccatgttgacatgtcttttcgggttgtcattgtctaggacttgtttacataagcatgttgttaaaatgtaagggatatagtttccctagcctatgtacaagtcttgcagcagacatctgggccctccagctcttaaaatcttctgcccccttctctgtggtcttccttctgcctcatctgtagcagctgtgttgtcagtgtatcagctgtggctgggcatcccacagtcattaatgtctgggttttacttagtgcctttcattaatgggttctgtctgctgaaatagaggtctccttggtgggagctacagacacctgagggtacaagtatttataatgtggttttaaatcatcctgttttaggaaagggtcagtgttggcttc

SEQ ID NO: 19340 - DNA, 1173 bp, Mus musculus
ggggattgaagccccatagaaggaacatcaatatgaactaaccagtactctcagagctccttggaactgtaccaccaatcaaagtaaacacatggtggaaattgtggctctagctatatttgtagcagaggatggcctagatggtcatgagtgggaggagagtcccatggtcctctgaagactctatgccccagtataggggaatgccagaaccaggaatgggagtgggtggattgtggagtaggaggaggggagagtagataggggattttcagaggggaaactaggaaaggagataacatttgaaatgtaaataaagaaaatatctaataaaaaaagaaaagaaaaaaaaaacataagaaaaccaaacacacacacaaaagaaatgtatttggtccaacattttcaatgtctctcatatttatatcatctctataatgtgttcataattttgataattgacattaaaagatttccttcaaaaaaagactccatagaaagtaaaaccctgcatagatttctttgttttactttctaggtggcagcctcaggagacaaatgaaagccttaagaattaccaagatgctttgcttcacagtgatctcacattgtgccctgtaggagtgaacacggaatgttacaggatctatgaggcctgctcctttggctccattcctgtggtagaagatgtgatgacagctggtcactgtggaaacacaaccagtcagcacagtgctcctctgcagttactcaaggccatgggggcccccttcatcttcatcaagaactggaaggagcttcctgctattttagaaaaggagaagactataagcttacaagaaaagattcaaagaagaaaagtgttacttcattggtaccaacacttcaaaacagaactaaaatggaaatttactaaaattttagaaagttcattttttattaataataaagtttaattatgtctagtaccatgtattcataagtgtaaatagttatagtgctgtctaagctgactccatcagctccatcatgtaacagaccaaatactctcctttggctactactatgcacaagattaaagagatggcaatatttttctaagcttgaactggcaggatggttgagtggttaaaggtgcttgctcccaagcctgatgacctaagttcaatcccc

SEQ ID NO: 19341 - DNA, 1173 bp, Mus musculus
aatgtttcccttgccgattgctgccaacctcggtgtctagaaggggcttgggtaagctttgttctgattttttgagcttctggaagaagcggaatccagagatcctaaccttttattttcagctcttgcagcccttaaacatctaatgatcctaagttaatgatgtgtcggtatcattttcccctcctctgtttccttaaagctatgagcaaattgggatgtttttccaccgggaaaccaacggaatcagccctcgttctctccattcagcaccccctgccttgatgaaagcaagggaaatctctccttttgtgtgtgtgtgtgtgtatgtatgtgtgtgtgtgtgtgtgtgtgtgtgtgtgcaagcgtgcgcgctctagaacacaatatccagtagccacatgtgtccacttagatttcaattagttaaaaattaaataaaattaaaaattaattcaccaagtctcactgaccacatgtcatttgcccagtagccacacctggctagtggctactgaattagatgctacagattagagcattcatatcacgtgggaagtcctattggccagaactgaggtctgcatgttgggagagcatgagtctagtcaggctgtagcggaaggtgcagggagctgcccatcgcagcagcccgaggtgagcagtgatctagggatgcacagcacttgcctacaatgcatgaaatcctgggtttaatctcttgcacgatataaatggggtgtggtggtacatatccataatcccagcacatgggagatggatgcaggaggattagaaattcagtggatttaaggccatgctggaatatgtgagagcctaggaattgaactcaggaccttcagtagagtagtcggtgctcttaaccactgaactctccctctctctctctctctctctctctctctctctctatatatatatatatatatatatatatatatatatataaatttatatataatatataaatagattagattaattgatagatattggattagatatatagataatagatgatagatagatagatagatagatagatagatagcagggaaagccaaagggaagaagtctttatacctcatggccttactgaggtagctggggcatgggcttagctccaccttccaaatgtctagggtcttctgt

SEQ ID NO: 19342 - DNA, 1322 bp, Mus musculus
gctgtgatgagattctaatttcagtgagtcagtacctccagggcagctggagaaagcaatgaaattgtctatgcaaggaacaaacagcctgaccctaccagatctaatagagtcgtagggcagacttcagccacaggacaggattttgtgttgggagcttatgaatgtcagggctcatgaatacagagaagtattacagcctgcagaccacagcccacctctctgggcaatcttcgggtgctatgtggcaatgtggcgtcatgtgtgtgagtgtgtgtgtgtgtgcactggaactttcagaggatgctacatgggcagcctgacttcctctctgagcctcgtggcccctgtcagatgtgattgccactgctctttcaaattcaaaatgttatctgtgtaaatagctttggtatttcttttccatgtcttaggtgaagttttgttcatgtaacaaccaggtacgaggtgaccgaataaagctataaacatactgttcagttgtcgtgtgctgaagatggagaacctgggtcctccatctctcctctctctcattagatgagtatcttgtgcgtgtttagggggtcctgccgttacttcttcattcctgattcgcctctaattttctttgtttctttggaaaccccaggaggcgcctactaaggatcaattgtaagaatatgtatatggtgatctgggtttccaaaaattaccctatatatagtgaactgagaagaatctgcctggagattggttttcgaaccacgtacctttatgcctcgtgattgtgaaacattgacttttgtaaacccccaaatgaaaacctgtttagtaaaggggatatattttgtgtgttttgaaatttaggtgcaatgtcccctggaaaaagctcaagaactgtatatgctcaatggcattttaaataaaatactatatatgtatatataaatatgtatataggaaatctttaacaaaatggttttgggttttttgttgttgttgttttgtttgtttttgtcttttgtctttgaatttgttgtacagtttcttcttggtgagtcacggaatgatgagagtatcgtgatttacgacgtggtcatcacttgttgagtgcagactcaaaaatcaaattcaagtcagattcttcttcatagacatggtagtgagggctcgtagattccagccctgcctcgagtgaagcagctgtggatggaatatacagtcacacaagaagtttctagaggggaaaactattcctaagagtaacatttttcctatttgagaattccatacaatggattttaatctttcactctcccaccctt

SEQ ID NO: 19343 - DNA, 1145 bp, Mus musculus
ctggcgacggccttcttgttgatgagattgtagcgtgccttctcttcggccactgttgcctgtttactgcgctgaagtcccctaccattttaaacaacagaacaatgtgaagcagttggaggctgttgcctactgtatgtctgagtttgtgattctgctgccaagacacagaacgggattgctataaataactggattcagtagctaaacttggaacagttaggtctgcactgccgcgaacagcaaagcggtgccacttctctttagagggagtatttaaaacttgtaggcatttctgttgtggcttttgaagcagggttgttttggctttggggaagttcctgttttgggaggtaaacactttgaatgtgggtaagtttatgtcatctaaatactaatcctggtgatatgtgcactgcttgcttccagggagtgttgtcatttctgtttcatctgtgtctgcgtttctattacaaagcagtagtttggaggatagtgagacagctcagcagtcaggagcactggctgctcttccagaggaccgtagttcaattctcagcaaccacatggcggctcacaaccatctaactccagttccaggggataggacgccctcttcaggcctgcctggccaccatgcacacacgtggtgagcaggcatacatgcacgcaaactatgcacacacacaattaaatcctgtggctagcaattttgattgaaggccagagtgttttatcttgtttctgagtactcctggaatatgttggtatctactgttgctcatggtgacagactctattacactgctgggaaagatgggatccttgagtaagaaaaggaacattactgaattttgagatcattttcagttgctacaaatacaattacctaaagttttattttaaactaaaactcagtaaatagtgtagccacaaaagatctcttaaaccatgccattatttgcaaaactactgtagcctaatagcaattactacttactgtgacatttttctgggtgcaagaaagactcgaaagagatactattacagtcttactccgcttatctaagcaactaagatattaagatataaacctaaatgcaagttccattttctctgcagcttttactccctctgtgtcataa

SEQ ID NO: 19344 - DNA, 1225 bp, Mus musculus
caggaccttaggaagggcagtcagtgatcttaaccactgagccatctctccaacccgggatgtggtatttttaattatcatatttattatgtatgggagggcatgtgtgggcattctgcctcgcatgagtggtggaagtggaggttggcttgagggaattgggaagccacactgtgtagctgtcctgactgcacctgatgtctcactgtaggagtgtctggattgtagaggcaggctacccatcaggcattgtggttctgtggatgaggctcagttgtgagtcttgtgtggcaagtgccttctgctcagccattgtgccagcccatgggtcatagttttagtatgttagttcctaattttattcttttgacttctatgtcaatgtaagcagaagataaagcaactatgcttcaaagtatctgagaggatttgctcattgaatactaattgactccccccccttcattgatacaggagacttctcaagagcttgggatgttcttcttgaccacatccagtcagctgcactcagtaaaaacaatgaagtgtccctggccgctctgaaaagcttccaggagatattacagattgtgtcccctgtccgagactcagagaagcccgagccccctgccgttagcgtgcccgtacccgtccttctaggaaacctttccggcccaggcctgagcaggccgtttgtgaggacagactccattggagaaaagcttggcagatgcggctcggagacgcctgtggtgactgacgagctggaagatctgaagctctggtgggctgcctggaacacctggcacaggactggatctgaaagcacagagccgcccagctccgtcgatgagctgacctttatccccagccagcctttccttacagccttagttcagatcttccctgccctctaccagcacataaaagctggcttcagcatggccgacttgcagaagctgggcgtcatcctgcacagcgctgtctctgtccccatcagttctgacgcctctcctttcatccttccgtcttacacggaagcagtcctgacaagtttacaggaagctgtgcttacggccttagacgttctccagaaggtaatgtgatttcagtgcttgcctaaaagctgtaaggaataggattctttggatttttattttattgttttgtggtaaatttcagaagataaatttaggactttctgagattgctatgtatgtacact

SEQ ID NO: 19345 - DNA, 1234 bp, Mus musculus
gcagagcagctgactgactgtgcgctctaacagcactcagtgccttccctcacttcctgtggatggtcacagctctgtcgtcattaactcacatacttcactactgctgagaatatagtctgtgttatgtgaagataagaactggtttttgtatgatattataagttattaagtgatacaattatgttgtgatgctattgttttagttaagatcttaatgtatatcgtatagctaagaattataatgacaaaaaagaattctaatgactagatgctatatatatatcaacacattgaaattaatgatttctttctacttacacttgaagttttcataataaaaagtacaggacaatgaaagttagtgataaggcaaaataattcgccaccttttctttaaattagaggcgctgatgagggaaatgcttgtattgaatctcttctgaagcttagaacaaaattcgtgaataaaattatatttctatacttttctttttagtggaatatatcagattattttttccaaagaggggaaacgattgaaaaagaattaaataaagaagaggcagctcagcagaagcaggccgaggagaaaggagtgtctctgaaccggccgttccaccccgcgccaccgttcgactgcttgtggctctgcctctatgccaagctgggggagctttgtgtggacccccgccctgccgtgaggaagagcgcagggcagaccctgttctccacgatcggagcgcacgggaccctgctgcagcactccacctggcacaccgttatttggaaggtactggggacggtggggctgctcgttttccgctttcagtcacatgtgtacactttctaaacagtcattcctaggcgcttgtttattttatgtatatgagtacactgtagctgttttcagacacaccagaagagggcatcagattccattacagatggctgtgagccaccatgtggttgctgggaactgaactcaggacctctggaagagcagtcagtgctcctaaccactgagccatctcaccagcccaaacaaataaatttttaaagattgattttcattatttttactgtgtgtgtgtgtgtatatgcatgtggacgcatgagtgtgtgtgtgtgtgtgtgtgtgtgtgtgtgtgtgtgtgtgtgagagagagagagagagagagagagagagagatgcacacaagagcagaggtacccacagaagctagacgttttt

SEQ ID NO: 19346 - DNA, 1228 bp, Mus musculus
atctttgaagttggtgtgtatatgggatattgggaaatatggccgttgtgcatcctctaagaatgaccttgtctttcctgagctgaccgatgattaaagtttttgcgtttagattagctgttcttcactgttggtttgctagactgttcccactggtgttggaacatggtttccctgcagttccctctgaggacaagcacaaagacaatctcagtagccgtaagtgtcagggaaatactcagagtcgcattaagcacaggacagtttcctagtgcaaatgtcttatattcataaccttgatgtaattcctggagtagtattttcatccaaatttctctaaaggctagtataccatttgctgcttcctagtttaataatacagaaaaaattaccaagaacagttttcaattatttattaaatcaacactgattttaaaacaagctgctataatttacaaagaatatgtcctttaaaaaattattacactcgtatgtatgtgtgtgtgtgagcatgtgcacgtgtgcacacattcacatgcaggcacacaggcacacaggtggaggtcagaggacaactggcgagaattagtccttatcgtccaccatgtccatcctgggcctcaaactcagaccctcaggcttggtatcaggcacctttgctcaccagccttgtcaccagcccagagaatgggatcctccctactaatgtgaaaaagacaggggctgagcagggaaaaccgctctagctgattcttagctgatgcccccatgactggcagcaaccatggccgaccaaacagttaatccttctgaacgtggtaaagggcagaagaaatgactatatgtaaactttatgtttgatatttaatacagagtcagagatcatgtgataaaagctgaaaaataagaaactgggaaaatcaagtgtttaataaaaataataagcttgttaaagtgtatgtaagaaaatgagcaattgttattgtattttgtataaaaatatcttgtttgaagacatggttctttaaacaggaaccaaggttatgtaaaatattatgatgaattttaaacatagtatgtggtttgtaaaagggcatttgaacttcagtttctggcctgttttgcagatatagaacctccagtgccgatccaaggaaacagtaacagaaggtctgtcagcacgctgagaccctgtgctaaggacgcatacatgctcttccaggtactt

SEQ ID NO: 19347 - DNA, 1296 bp, Mus musculus
tacgtgctcttctaccagagacaggacactttcagtgggactggcttcttccctcttgaccgagaaactaaaggtgcttcagctgccacaggtatccccctggaaagtgacgaagacagcaatgataatgacaatgacctagaaaatgaaaactgtatgcacactaattaacgaaagtgcaagaagccataggagagactttcctgctggtggtgtctatggagatgaagttatcaccacatgaaacagaagtctgagatgaggagtttcagatacccgaatgtaaatcctttatcagattttaacttgtgcagtacttgaagtgaaacacaatgaaaactttaacagaaattgtctcttaatacatttacagtcttgtatttacaagctaaatatatataggaaatcacaaataaatcccttttaagtttgctgctgttttgatgaattatgttttctttaattttttggatgtgacttaattgatgacaaatgttaaatttgtggatgttggtcattaattttgctctaataatactgcaagaaaaccatggctgaacttagttcttgggtaatctagttcctgcgcgttaggctgcctgtctgcgccatccgggtacttagctgctgtgtcggtgtggctcaaatactgcagtgtccttggtacaccagattctctgatctgtccctggtaatcagtgtgggtctgttcccaccacgtgaggaacagtcttgaggaagttcccttttgttgtctcattaaagtgcaggccatgacattgacttccctcgctgtgggaacgaacgccttctagatttcacatgccatcagaatcattttcagctacatgtatgtatttttcactgcaattggaatctatttaaatttttcaattttgttttggtttagaatgcttatcttcactccactgttggttcaatattaaaggtttttgctattagtccctactccattttggtaatttggcaactttttagctctcccagttactgtagctttaaggcgggctggttagtactctgtatctgtagtaagaattgcatcacagttaggcgaggctttctgttcacgtactagcctttaactcatcgataactgggctatagaggtaggtctgttaactttctctgtgtgttcctgatggaattcaccatagccttacagcttttctcggaaggtaacctgtataagagaaatagcgtttgcatgttccagagtcagaaccttgcagcacatgacgcacacaaaccttgggtttcatttagcttctcaca

SEQ ID NO: 19348 - DNA, 1237 bp, Mus musculus
tttaactgtactctctaaagtttcccttaagtaactgcagctcagagcaccagccggctcagtccttcgctggctcgctccttcgctggctcgctcttgccctcccattccatctgatctatggttctcaggacatagcggagactgctggctgcagacgctggaaaatgtaactcggaatttcctacaatctcagctccactttctcccgggcgccggctcggggctggagccttgttattgtcacgtggccgcgggtgccaggcgggccaatgggcgcgcgcccgccttctcgccccgcctcgccgttccgccgcgccgggacatcgcgccccgccgcccgccgcaggcggaaaagtttctcggcgtgccatcccgttctcggacgccgctcgggctgccttcaccgtggctgccggtcctccgctgctggctctcccgctgtgcaggggcatgcgaggccttcagtgcggggactgagccaccaggagcacgaggcggcgatcggcgtgtccagcccggtctgggagtcggtgcttttgggggtgcgcgaggttgtagagctccgggccgaaccggaggcggcggggcgcgcggcgatgggtgctcccggactccgagcggccaccgcggcgctgggactgctgctgtgcgcggggctggggcgcgcgggcccggcgggaagcggaggccacggggctcccgggcagctcttggacgacgatgcgcagcgcccgtgtccagccgcctgccactgcctcggggacctgctggactgcagccggcggcggctggttcgccttcccgatcctctcccggcctgggtcacacggctgtgagtatcagtatcattccggtggggtgaaggagaccggcccgccaggggtgcgagaccagaagagtccgcctaggcccggggctcagagcgcactatacagcgcccaggccgctaccggagccctgtggggggactcagtctccctctgcatccgcgcaggtgggttcttgagtcgccactcctaggccagcagacccgacgcctgcgattgggagccagtctgcgagacactgtattttgcaagttttcttctgagtttatgtaggaaactggcccaactgtagcttctcaggggttagttagggtccctagacggtcactgcaggcgcgcctttctcttataaccccccttgctcaagcaaagccgcacagactttttctctccgcagtgcttaattt

SEQ ID NO: 19349 - DNA, 3693 bp, Mus musculus
gaaagataaggactcaacccaagtcatttgtcttctttcctgctatgctgtgagctactgagctttacagccatgaaaactattgtaggctccctcgccaaaccatggctttccctcagcatcaagacctgtgccaaggagaagggagaggccggaggctgctttggatgcccagacacacatctttcagaaaacacagaaacctagccagcagctgcagacatgtttgggaatatgagagcatgttcgcagacccaccaggttctgtgtcctatgggctacacctggctccagcaagaatgcctgccatgggcacttctctgtacccgggctccagtgccaggccagcctctcactcccaagccatagtcctactcccatgggaaaggaggtcttctctctgccctggaggaggacatatagctgatttctgttcttttaactcttaaaaatctctttctaaacttggagtggtttatattcgcccgagctccagtcctgggcctgaggtttgtgtgggaagcgctggggtacaaagaaaatgcaaatgttcaatgcaagatgtctgtctccttgcgtgtagatcccaaaagtgctcttcaggggttctgtgctagctgatgcaaggacattagctccaaaggctggggagggcttggctctccctctgtgtcttcctggtgtcccgccctggccagctctcgtctgctctcgcctttatccttctcggctgctgctcttcctctccagagccttgggagaaggactttccccggttgtacttaattgattggttgtcccaagtgttgctcttacttgatttgccaaatgcctcctgcttctcgttataggactgagtgaggtcctcatagctctgtgctctgggcagctctgagctctcagccctgttgctttcaatgtcagtcacagagtggaagtttccccaaagtggaaagctaccattgggaacacaaggggcccctgaggggcctccacctcactgccttaagtgagtcccgcccactccctgcctccctccgaggtgggcgggagttcctaccccatctctgcttcccctggaggccggccagcgtttgtgggttggttcaggtgtggtacctcccactcaggagtcaatattttcaaatttttctagtttccacacacgaggtcctgcctggggtttgagaaagcctggtggaggagtgtggtggtgtgagtggagactggctggcattcctccagcactctgcagacttcttcctgggcccgaggctatggagccttggctttcacttctgtgacaaacacatgccatttccccagcctcatttgctggtgtctgtagggtcctcccaaggtgagctgagggctgcaggtgctagccaggaacatgggagcttgactgtggcttcaggtccagaccctgatctcactggcatcccaatactgcaggaggggtcttctcacaaagctctgagggctggtcttgactaagcaataagagcctcagagttgattgaattttaaggtccctttctggcttcttggttctccatgtgaccaaagcccagtgtggcttcatgggagccctgttacttctccatgaaaccccagctctctaggcctgactgccaccagagtcctcttaccacctgcagtctgccacaaagatgccatatcaactcctctcttcccaaaactaaacaggatctatcatggtggcacggagtcagctagatgttgtctcttgctatccctgtgctagttccatgttttagaagcaaagtgatactggggaggagaggagggcaagtgagaggagccagtgcctcctgaagcccttgctccactgccaccagcccgcctgccccagtgcagactggtcttcaggagtcagtagaccaccggaccaggtgtcagcatccactccaagccatgctaggaatctgccccctgccgggttcagctctttaaggtgcctcttcagggacacagtgtgtgtctgattgggcttcgcatcaaaagcctgacgttcctgtccctcttatagggggagctttggacacaggaccagtttgataaagggccaggtaagggtttccactctgcacattgtagaggggacaccgaaggcccatgggtccctaattaaagaagttgagtgaatttgccttcgttcaaccagggacctatctcactccctcccaaagatttttgtataattgtataacccccctccccctgttaacagtggctcagaaaagctttgtactaaaagcatgggaccctcacagcaaccattcctgggagatgggtcccttataggtccatgacctgctctgttcagaggcctcttggcagtgtggcctgtttgtgctgtcctgcatccagtgtgttggcctggctaagtgaaaacggtgagctgtttcccctttgggctacttaaccacggctactccttttttaaaaatgtcctagttctcccctacacacacacacacacacacggtttgatgaatttccaaaccacggctactccttttttaaaaacgggtttgaactcctgtttagccaagagtgatcttgagctggtctcctgcctccaccccctgagtgctggggttacaggtgatagctggtctcctgcctccacctcctgagtgctggggttacaggtgatcgctggtctcctgcctccacctcctgagtgctggggttacaggtgatcgctggtctcctgcctccaccccctgagtgctggggttacaggtgtgatcaccttgctggcttgtgaggtgctggggacaacccagggcttcgtgcatgtcaggcacacactcccaactaagctacatccccagtccctctttctagaaaacagataagtccatgttcaggggagaagaggtcacaggtcaggccagctgccccatcctttagttcggggttagctcccagaactgccctgcaccataagctggtgattctccatgcctgtccttaccccggatctggctattcccgtgatgccatttggaggggagaggtctgcttcccactgtgaccaggctatgggatccttggccaccttgcttcatgatttgatacatttgttgtattcaaaaacttgaactgtaggatgccattaagagtctgtttatatttttggaatatttgtattacaattgttaataaaggctggtttaaaaacctgtgcaggactgggagctgcttttgctttccttcccttccactgacctgacactcggtggacactgttcttcctgcatgacctcgttgatcgtgaaatgatagcacctggcagagcaaacgctgggattctgatcaaggttacagaggttggagtgcattagcccctctcgggcctgggttggaaccaactccctctccccaggtacttggcaagcgtttgcttgctgtgctattgactggggtagagactgaagccctgggggaattggaggctcctgcatgtgctcttgatgctgccaaacaggccttgagattcagagcccagcatggtttccaggcacatagtaggatgacttgtacagactccaagcaacaaaagctttcctgacaccacagaattgcccagaatcatctctcagccctgaacgtccaggcacacagtaggggagctctagccagtctcctgtcatcagcata

SEQ ID NO: 19350 - DNA, 3693 bp, Mus musculus; identical to SEQ ID NO: 19349

SEQ ID NO: 19351 - DNA, 1233 bp, Mus musculus
gagttgtgactcccactctgctagtattgccctgtgggtcatttggatctctcagcctgagtttagtgtgatgaatagccgggttctgagtgcccgctctgcatgacacactgcaatgcatgctccttgcctgcgccaccttctttatttctcccagtaaccctgaaaggtgggtcatatcaactccattgaatagagggggaaaccaaggcttggtagttgataaatgccccagttcccagaaccagggaagacagaaccatgaatttggcagccagcctgagtgacagccagcctgttttagctagagtactctcagaggggctctgctcctctccctcctccttaaacacaggccgaggctggtgtcttcccatcacggtgcagatagactgactgcacggacagaaaggtcaccatccacagctcacgtgggtgccgccatagtcacctcaatccagtggtgttgtttcttgtttatgctcttttgtaggtaaactgggagagaacatgattcttaagcgagctgcctgggtgaaggtgccctctgggttctatgtcggctcttatgtgcacggagtgacgcagagcccctccctccagaacctggtgctggggaagtacggggccctggtcatctgtgagactcccgagcagatcgcaaacctggaggaggttggccgccgcttggggcagcacgtggtgggcatggcccctctctctgtgggctccctggacgatgagcctgggggggagacggagaccaggatgctgccccagccgtacctcctggatccttccattacactggggcagtacgtgcagccccagggcgtgactgtagtggacttcgtgcgcttcgaatgtggagaagacgaacaggtggccgaggctgaataggtttttggcctaagtggaaatatttaatttttatatctggatttccttataaaaagttattttctaaacctcttcaaccctcaaatttgttttttttttttcctttttagtttaaaatgaagatatataatcatgggtaaagttattaaatggtgatgtaataaagaatttttctcatttgtatagtgcttaatgtgtgagtgtgtgtgtgtttgtgtgtgagtgcacacatgccaggctttgtatagtaagcacttttacccaatctctccagtccccagcctataccagtctattatataattctggaagtttctaacacactgtcttgtt

SEQ ID NO: 19352 - DNA, 1150 bp, Mus musculus
ggacattctggaccctctttctgcagagtgaagaccccattgtggaacatctaggcagttcaactgaggaaggaaagaaagttctacgcaatgggggaaagaatttcccagccgtcttccgaagaatacaggatcccctcctccaggcagtgacccccaaccccaccctgccttagccagaccccctagaaggtgactggaaaaaagataaaaaaaaagaaagaaagaaagaaagaaagccaggcgtggtggcgcacgcctttaatcccagcactcgggaggcagaggcagaggcagaggcagtcggatttctgagtttgaggccagccagggctacacagagaaaccctgtctcgaaaaaccaaaaaaaaaaaaaaaaaaggtcagctccccaggccttcccagactggtgggactgtggggccgtgacctctccaagaagttggttggggagcagtctgtggtgttctttacccatcgctcttactgcctttttgttcctccactgtctgaagaaatcagatgaagctggctgagaaggtcaaaggactgtgggccagaggggatatttggagggctgtggatattctgttctcattgagcaccccccccccccccggagcttctctagctcgggtgaagcatgtgatgcccactgtttagttgtgtgtgtggagaaacatgtgatgtaccactgtctaggctgtgtgtggctcaggttgccttcacttgtgtttactttgcagtcctggggatgatcagggtgtgtgcccacgtacccatgtgtgtgtgtgcccacgtacccatgtgtatacccatgtgccaatgtcactatttcccaagaagggctggggtatgtatgaaatacctcctcccaacttctccctgcttacagtctgacccaggcagtctctgctgcctctattgctgctatctctgtggaagtctctgaagagcaagagggtagagagccttccttgtctctaccatgttgaacttgattccagaatttcagacctgactggcatagttgtgtctcatgaggagagggagggaaggcggaggaacagggagataagctggaaaaaaatttaaagaattatttttatgttatgtgtttgagtgtttgcctgcatatatatgtgtgtgt

SEQ ID NO: 19353 - DNA, 1715 bp, Mus musculus
cctgaaactcactgtgtagaccatgctggccttgaactcagagatccgccagcctctgcctccccagtgttgggattaaaggcgtgtgctaccatgcccggcttcaccctggttttcttttttttttttttttttggagacagggtttctctgtatagctctggctgtcctggaactcactctgtagaccaggctggccttgaactcagaaatccgcctgcctctgcctcccgagtgctgggattaaaggcgtgcgccaccacgcccagcttcaccctggttttctcatccatttgcttaggcctcatcgtccacgaagggtcttctgtttaccgcatcttcaagcgctggcaggccgtgaaccagcagtggaaagtcctgaactatgacaagaccaaggacgtgggaggagacacagggggaggggcggcagggaagccaggccccaggacctcacggaccagcccccctgcaggggcccccacccggcccccagcagcccagcgcatgcgcatgcggacgctcttgcctcagcgctgtggttatacgatcctgcatctcctcggacagctgcgaccaccagatgcccgttccagctctcattctggtcgagaggttgtcatgagggtcaccacagtctgacctggactccaggaacagggatcttaagtcaatgcatcagccagaggcgagccctcccggctgctggaggtacgacctagacaacgtgtttggggcacggtgaccccaccactgaggatctctgtggacagccgccagcttggagacattgtccggcctactgcccacagggtagagacccctgggtgacgttccagttcccacagacaccgcctcatactcaccttgaggatggccagcaggcaagcggggagaaccacttttcttcctggagagaaccatctttacctcagctttaagcctccagtcccctggctccaccatggtgacttggtaaagggagaccaatgccagaaaacaaggggctgtagacaccccccactccccaccccatggccacagggcatctggcaataagactactaaacattgacctcccgttccctgcatgaggcgggggacttccccctgctccgccccccactgcatgggggaagggcataaagaatcatttatatgcgcgtggggcctcctttctcatctggggctcttctgcagggatggagggtatgggggggggctcctcagcacgggttgggttgcacttcccagaggtgcgtatggagttggaagagggacccctcccgcccccctgcttgctggtgagtgactcaccttggctgctaggtgtcagtgctcagaggtagctgaggacggggtgtgggcttgtcacctgtgagttttatgatttagaaaagaaaaatctgagcttttttcttcctgtctacctcacagactcgaggataaatgggagacaggttgaatactatgacagagaaaactgacgggtgtataaagggttccggactagttgccaccaattactttagacagtaggtgatagagcaagttctgaaatgtggtttctgtcagaagcggcacagaactttggtgtttttgagagacaaagtagagaagcaaaagaggaagtcgatactgcaactgtgtaggacagtggccgttgtaggatcgagaacccttctgaccctccaaacaccggacctggggtggag

SEQ ID NO: 19354 - DNA, 3602 bp, Mus musculus
catggcggtggagtggaaatgttacagcaccatttctggcaccaggatctcccactaacacctcgacctcccgcccactcagagacccatagtgagactgaagatgcgctctggctcggccttgagcccagagttgagagctggttggcccggttgccatgacaccgccttgtgctccaccctctctcgcccccacacaccccctcggcagtcagggtatggcagccagtcacgtgccacacagcgtaaccacacctctgcttcccagcgcaaagtcaaggggtcacgtgggatagcaacaggtcacgtggccgtcagggccccgcccccttccccaccacacccctcccatcaaagcagcccgggttgcccactgcgcaagggtgaagatcacgtgtccagaacgtccggcgcccgccccgccccccgggtttccgcgcgcctctctggcagctggtcacatggtgagggtgggggtgagggggcctctctagctcgcggcctgtgtctatggtctggcccgaagcgtccagctgcccgggaccgatccccggtgtatggcgccgcaggaaccggctcccgggcccagataaagggccacctccagagctcttagccgagcgtaaggtgagtgcagtctcatccaggatcgggggaccagtccccgccaccaccagcaccctccagctccccacgcgtgcgcgtcgctggctgattatggaaggtggcccaatggcgggaagtggggcctttgtggtcgcgggcaagggtgtgattttggagagtgaagtgcagaatcttcggtgcaaaccctgtgcactgtgtgatcctctttgtgcctagtgcgatgtcctccgaaaggaaagaaagcattctttttcttcctccgggacaaaacgtggccggaggaggagggtttgatgggagtctttgtgttacctaaggcgcgggccctggaagtgtggaggggtgggatgttgctgatcgcgttggcgaggtcttgtgcaggagttcctttgttaccgccgggtcatccccctcctaaccgtgagagtgagtttggtattagaagcctctgtgattgtagatcccctgcttcgagaatggctgccactcgatatgaacccgtggctgaaattggtgtcggtgcctatgggacggtgtacaaagcccgagatccccacagtggccactttgtggccctcaagagtgtgagagttcctaatggaggagcagctggagggggccttcccgtcagcacagttcgtgaggtggccttgttaaggaggctggaggcctttgaacatcccaatgttgtacggtgagaaggttggattgggagtggggcggagaggacaataggacccgtaaggcaggagtgggaccctagaacgccagaggccacgttgagacaaaggggacgactagctggtgatcatttgttcttctcaggctgatggatgtctgtgctacttcccgaactgatcgggacatcaaggtcaccctagtgtttgagcatatagaccaggacctgaggacatacctggacaaagcacctccaccgggcctgccggttgagaccattaaggtgagtaggggtggggctgggggcgagggtggaccgatctttgcaatagaagttgttgggattttgaagtgatacatagtttccggtgttctgtgctttcttcttgaaaaacaggatctaatgcgtcagtttctaagcggcctggattttcttcatgcaaactgcattgttcaccgggacctgaagccagagaacattctagtgacaagtaatgggaccgtcaagctggctgactttggcctagctagaatctacagctaccagatggccctcacgcctgtggtcagtaaaaggcgttagccgactaggttgtgataggggtagctcttggtggtttcccatagcaactgaggagtcttgtacatgaagttttcagagccaggcaggtctggttcgtgaggtcgacactcactcatttctactattctcttcaggtggttacgctctggtaccgagctcctgaagttcttctgcagtctacatacgcaacacccgtggacatgtggagcgttggctgtatctttgcagagatgttccgtcggaagtatgggactagaaactttttgttgttaatggtacagggttagtcctggccgtagatcaggttggccttgaactcacagagccctgggattaaaggcatgcgttaccaccgcccgtatgggacttgaagctcttaacctaccttcagttgcacatagctttggctgcttgtcttactgtgctagaggttgaaatcagaactcacacacactcagtaaatgcttccgtgccactgaacttcacactccgtcggcccccaagtcttttacagacatgcctgttcttgaccattcgcttttgtgcatgtatggtacgggacatccagcctacccagttcatactgaccaccttgcctagaaccaagaaaccatataggcatgccctggatttaggatcttcccgttcctcgtctccacactctctagttgggtctacataacggttactcctcaattttttttttcttttaaaaatgtatttatttccatgtatgtgagtacactcactgtcttcagacacaccagaaaaggacttcagattacattacagatggttgtgaaccaccgtgtggttgctgggaattgaactcaggacctccggaagagcagtcttatctgctgagccgtctctccagcccccactcccctatttttgatataacacatactttgagtctttttctgccttaggcctctcttctgtggaaactctgaagccgaccagttggggaaaatctttgagtaagtatttgataaggaaaaggaaagacatttcctgctgccgcggagacaggagctgggaaaggcccctcctaacagagttgtcctgtccccacagtctcattggattgcctccagaagacgactggcctcgagaggtatctctacctcgaggagcctttgcccccagagggcctcggccagtgcagtcagtggtgccagagatggaggagtctggagcgcagctgctactggtactggacctgggcggggattgggttaagataagaaataccgtggcctggggaactggctcagtgggtagagttcctttgcataagtgtgaggacctgagttcaaatccccagaactcatatagaagttgtgtgcttctatggtgctactccttttttatttatttatttatttttaaagatttatttattttatgtatgtgagtacactgtagctatcttcagacacaaccagaagagggcatcagatcccattacagatggttgtaagccaccatgtggttgctgggaattgactcaggagctctggaatagtggtcagtgctcttagctgctgagccatctctccagtcctgtagtgccactcggggcgagatggacagatccctggtaatacagcgctgacagagtctccaatgagatggaaggcaaggactggcagcccagactcttgacctctgcatgtatacacgcacatgtgcgtgcccgcatttcaca

SEQ ID NO: 19355 - DNA, 1658 bp, Mus musculus
atgaactggagagaagttttgactgctgtggcttgttcaaccttacaaccctgcgcctacaagatgatacttcctgtagtgcggtaagatgaaggattagtcattcctgggacattcactacagctttttggacagggcaggtgagcaactttgaattctctatatatgtctgttaccaggtgtgcaaaactaagagctctacatgccagatgtgtggggagaggttccttaaacattcagacaaagccctcaagatcctaggaggtgttgggctcttctttagtttcacagaggtaatgactcctcatgtacacactcaagccttcaaccccatggtccagaaataacctttctctcttcctctcccgtagatccttggtgtttggctagcaatgagattccggaatcaaaaggaccctcgagccaaccccagtgccttcctatgagacttttgacctcccagatagcatctctgcagcctaggctgtttctagctagctctgtatccaaggaagaccttgaattccagaccctcctgcctcagcctcctgctggcatcaccacactcagccagcccctggatccttctgacttggctttgccatttttttgttttttgagacagggtttctctgtatggccctggctgtcctggaactgtgtaaactaggctggcctcaaactcagaaatccacctgcctctgcctcccaagtgctgggattaaaggcgtacaccaccactgcctggccttgccatctttacaaacacctaggggtggccctatggttttgttttagagaaaagaggtcccttacctcacccccaagaactggtggttggacttatgtctgttttgatgggaacacgattatggatgaggggaggtaggcctcgggccctaggagggtaactgcaccccccccccaagacccttggcttcaaggacagagtcagaacaccaagagaaaaccagttataacccagggcctcacaagtgctcggcaagcatttctaccaatcagttgtcattcccagccccacctacagtctcatcaaagcaggaccagtgaacttagaaactaaagccattttgaccgaatattcaaagaaagcatttctctctgatcttgccagccaaagagctggactgcctgcctaggtccttgcagggaacttgttttcgtgttttttttttgtttgtttgttttgttttccccaagtctcccagtggcaaagccaattggaaaaaacattaaagaaaaataaagaccatactctttgtcttgtcttgttttcctgtataaaaaagatcccagtataaatcagggagggaagaagacagatacacctgccctttagtgtagagctaggggagggtaatgggggtgaacctcgtaaggagaggtggggacttgttatttaaggcttaaaatattctctgtaaaaaactggaggattctccacagccttggggggaaacagaggctgccgcttcagcgagggtttctccaccaagactgggaaaggcagcccctcttctcactctgcgtcgctttcctccttgtgcaggtaggagtgctgcagggctcggaaggcagagattcgcttatgtgggttaaaggtcagcatttcctaaagggagaggacaaaggtcag

SEQ ID NO: 19356 - DNA, 1193 bp, Mus musculus
taggtcccagtgcaggacttcccttggctcagcccctctttcctcccaggtacagggagccgaagaggccaataaagagcgccagcgacagagtgagctggagagcaactaccgccgggtgtggggctctcccggtggtgaagacacgggggacctggatgaatttgacttctgagaccaccctgccagccctctaaggattcctgcatcttcctgaccggccggctctgcctccttacaccccattctggggccttggaggcaaaagggcagattggagcccagcactggacttgaggggcccagccccaagagtgtatgagggtgtgtggggacccatgagggtgaggagctgttgcagccaggcctatggggtccactccccaaacacaccctcctttgcccctttagctttttcctgtcccccaacttcttagcacttaaccccactctacccagagacttgatgagaccttgtgagtggtggtggcaggaacagcagggctgtgcaggtccccgaccccacctctccctatcctacctccattccctgttgctgtttgggagctgttgcccctcccttggaacgcctacttcctgtctctgctgtctcccggtacctgtgcttctgagcccagactatctcttgtcactgaggggatgggagacctttcatatcacctcacaaacaatcccagcaaaaagggttggagatggagcacccccttgttcttcagcaatcaggtttctaaataaaaaactggaccgtcaagccatcaggctctgtggggagggcaatcaggtcagagcagctcagggtgccgatcctgcttgctaaacgtttcccagaaaatgtcagtgtgcctggggtacacaggaggcgaccaggacagctgaccaatgccctacagtatggagagatgctgttttctcctgggtaagctgaccaggcaccagcctccagaggcctgggggagagtcacagtctctgctctgctctgctgtcatcttacggacctctgaaaggataaggatttggagccaggtctcagaggaccctaaaagccgtggcaaagctacaggagacctctggtccctcctctcattatccattactatcccaggggctcacatgtatcaggtgagccctgtactgctgagttgtgcccaaccagtcacttcaagcaaatctt

SEQ ID NO: 19357 - DNA, 1204 bp, Mus musculus
cacagggggaccccagctgtgcgactcctcctcatctccctctccatggcgtctccctttcaccatttctaatttgggggagccatccaccctctcagtctgttttcatcctggtcctgacgcgttcagcttaacacctcccctccccacccaaaaagcatattctggctgggttatcttggttttggaggtccctcctcatgggaagtgggaggggtctgaatttggccccaactgagccactcaaaatgagggtgggtaaggacgatcaagtccaaacgactaactctgatcctcatttctctttgccccaggtttgggtatccggacccaacctacctgactagggtgcaagaggaactgagagccaagggtatcacagacgactgagggacagctcctttgccaaggccccccgctgtcctctactaggatccaacggaagcctctgctccccccgcctctctctgcccccacaccatccttgaggggatatgtctgactggggtgggaactcagaggggaagaggacatggtcccttcccctgcccccccactggccaagtgctccagcagaggctgttttccaaggctcccgtcccctcactccgtgtacatattttctctgcccctgcttctccagtgtccttggcttttcctggtatgtaccgtgctccagtgactaagctgagaaaggacctgggtaggaaggatggggtctctggaactccagcccctgaatactgtctcaccttggactgatattagctgcctcccccagccagctgtgtgttaagataacagtagtcctaccttaacggaccctttctctcccgtgtctgtctttgtcagtctgtctctcgctcttctctgcccctataaggagcctcctcaccgccccccccccccaaatctggaattgctgccagactgtagcttttaatttaataaaaataaagtgaaatatgcaactctatgccacacccgtcttctgttcctcggacagggtgggggtggggtgtggacccgctgaggagatggggtaatggggattccttgcatgcctgaatggaccctttctcttcctaggagtcactctcctctggcagagctaacgctgggcgttgcaataaccctgcaaagccctaggccacacttggattgatggaatcaggattaagaggggtttgtttgtggttcagct

SEQ ID NO: 19358 - DNA, 1224 bp, Mus musculus
ggcagcctgtggaggctcctgcaagaacaaagtgactgtctccaagcctgtgtgggacttcctgagcaaggagaccccagcccggctggcccggcttcgggaggagcatcgggtgtccatcctcatagatggcgagacttctgacatctacgtgctccagctgtccccacagggtcctcccccagcccctcccaatgggctctacctggccaggaaggctctcaaggggctactgaaagaggcagagaaagagctaaagaaagcccagaggcagggggagctcatgggctgcctggctttggggggtggaggggaacaccccgagctgcaccgcccaggccctcctcccctccgagcagccccactcctgcccccaggggcaagagggctaccccctcctcctcctcccctgccccctccactccctcctcgtctcagagaggacgctgaagagcaggaaaccacctgccccatttgcctgggggagatacagaatgccaagacgctggagaagtgcaggcactccttctgtgagggctgcatcacacgggccctgcaggtgaaaaaggcctgccccatgtgcggccgattctacgggcagcttgtgggcaaccagccccagaacggacggatgctggtctccaaggatgccaccctcctgctgcccagctacgagaagtatggcaccattgtcatccaatatgtcttcccgcctggcgtccagggggtaagagatcacagttcctacccgttggcttcctccaagttcactgtctcttgacttaagaaaaaaaggcaatgtagagagtatgttgttagacatgttagactcttgctgtctcccagcatgccttaggacttatgttctggagctgttggggaggggccatctccttgaggccccactgttttattggcatgacccacaggcagatgtaaaactcaggtgtggccaggcagtggtggtggtgcacacctttaatcccagcacttgagaggaagaagcaggtggatttctgagttcgaggccagcctggtctacagagtgagttccagaacagccagtgatacacagagaaaccctgtctcaaaaaaccaaaaaaaaaaaaaaaaaaaaaaaaaaaaaaaaaaaaaaaaaaaaaccaaaaaacaaaaaaaaacaacaaaaaaaaaaacctgaaaccagtcatgagagaaagggttgcccactagtaccctgacttg

SEQ ID NO: 19359 - DNA, 2680 bp, Mus musculus
gctgaagatcatggactacagcctcctgttgggcatccacgacatcatccggggctctgaacccgaggaagaggggcctgtgagggaggaggagtctgagtgggatggggactgtaacctggctggacctcccgccctggtgggctcctatggtacctcccctgagggtatcggaggctacatccattcccaccggccactgggcccaggagagtttgagtccttcatcgatgtctatgctatccggagtgcggagggtgagagagaacctggaaatgttagggggagcggggtgatggggacccttgggagacagagaccagggtggtgggtggagaaaccgcttagcttttcacaacaaagttatctcttgggcaaaaggagttgggactgttgtaccctgtcctcactgctggcctctctccccaggggccccccagaaggaggtgtatttcatgggcctcattgacattctgacacagtatgatgccaagaagaaagcagctcatgcagccaagactgtcaagcacggggtgagggttccccacagcctttcctctcctggcctgactgttctctggaaagaacgcttctggggtcagagtagtgggatggctgagggaaggcagtaggagggtgaactgagggggaggcggagagctcctgtgagtgacactgttccctgttttttcttctcacaggcgggggcagagatctccactgtccatcctgagcagtatgctaagcgattcctggactttattgccaacatctttgcctaagaggctgcctgactccagggtgattgcggctttatgttggaggtggcgggttctgagaggcttaggggagctggacttggccgttacttctcttctttgctaaattcaggctgcaggctccttccatccaaataacttccttctggtggatagggttttctcgcccaccccagacatacactgtcctttctccccttgtccatttctctgccctccctccttgctcccagtaagccctcctgcttctttagagtgttattgtcgactcttctaagtgccttgatctttgaaaaatatcttgtttctatgaaataggaggagctgggggaggggttgtttgccatcttcgggacctgactgaacagtggacttggctcaagcaactgcctggatgcacttttgctgagtggaagaaactgaatgtctggattttgctgatacttttatggggcactttgtggcatgcttcctccctggtaagccctggaatggagggctttcaggatgctccagatgtgggtgcaggcattcacacatggacagtctggcctggaggtcaggtggggagtggtcagcaggctggcacctcacaaggcaggacctaagcctaagcggacttttgtgactatgcagatgatggagaaggtccctgtggagcaacgactgttcccgactgttcccgttctcccaccccaccccaccccacgtccacctctttctgtgagcactttgggtgcaggagcccagaggctagcggtgcccgagcttaggtgcaggtgtgagactcgggctgctcttcccacaaccctgtgccttgctggtgagcagggagagcagtagaggccgggacaggtcggagtgcagggttcattgcctgggtgacaccctttcttcctgtctcactactcctgggcttctttctagcagaggggaacagtaccatctccataatttggggaggatagagctctcgagtgaaggagcctccgcatccctggggcatgtgtacctagaactccccctccttctcaaaaccctttctggttggagttgttattctgtcccatcttccactgctaatgtgtctcccaggggacagatggccttctttgtcatctcccctctccgcccccagagaggagtcagagccataactcaatccacccagtcctctccaaagacagctgaatattaatgcacgccatcctcagaatggagaggacctgctaggcatcttagctctcccagctcgtgcctgtaaagccagcactcaggaggctctgagagttcaagtccagcctgggctactgagtgagacctggtctcaggaacactccaaataggtttgggtttgagcgctggagatcatagctgagttggtagtgtgcttgcctagcatgtacaaagctctgggatccacccccagcaccacttaagccaggcgtggcggtgcacgcctgcactcctggccctgggaagtagtggtaagcaggatggggcattcaaggtcatcgccagttagttacttgacgaggttgaggccagccaaggaaacaggagaccatcttggggaaaatgattctaaggagagatagattgtctttgtctctgcctaaagcctttggaagcaagccactcatcttcgctgtttggcgctctggaggtggggtgggcattgaaggcaaggagctgctttgctgtgtgtccatgaggtcctcagggagaagcccacctccctcaccaaaggaagcagcaagatgggtgcccggttggggtgggtgggacctgctgagtctcccatccctcaagcaacctttcccctgttgaatgcaataagtgactccggtcccttaacaactggggtctcaccgtgcggctgtggtcgtgggcagtgttgc

SEQ ID NO: 19360 - DNA, 1176 bp, Mus musculus
gttctcaatatgatacactgccattactgccgaatcctagagtgcttgttttccctacttcccatcccctggcagccaccaattcgccctctgactttgaatttcccagtcattaatagttcatggaattgatacaaaggagggaggagagcttcggcaagagggctcaggtgagcgaaggaaagggctaagcttctctctctctatccccctctccgttctctccctctttttctaagtggagaggaggaagccagcctcccccccacacacacacacacacttgtcctgtacttccttctctgacaggtcagcaagacaggggcagagggagccgttctggacgaggcaaagaatatcaacaagtcgctgtcggccctggggaacgtgatctctgcactggcagagggcaccgtgagtgtcccctgcccccatcctccacttcctccccttctccccgagttctaatcatgccgcaatccccagggagcagccctgccctttattatccagttgaaatcattttcacattcacggtctgctcctgctctagaaaagctacgtgccgtaccgcgacagcaaaatgacgaggattctccaggactctctgggagggaactgcaggactaccatgttcatctgctgctcgccgtccagctacaatgacgcagagaccaagtccacgctcatgtttggacagcggtcagtatcagagtccccagagggtccccggtgcactgctgctgtcccatcccttcctgttcatacacacacagacacacacagacacacacacacataccatacacacagacacacaaacacacagacacatatacacagacatacacacacacagaaacatacacagacacataggcacacacagacatacacatagacacacacacacaagcacagagagacacacagacatacacagagatacacacagacacaggcagacacacacatgggcacacataggcacagacacacacacacaggtacacatagacacatacacacataggcacatacacacacaggtatacatacacacacacataggcacacacacaggtacacatagacacatacacacatagacacacacacaggtacacatacacacatagacacacacacaggtacacatacacacatagacacaca

SEQ ID NO: 19361 - DNA, 1136 bp, Mus musculus
tgccagggaagaggttactgttgcagaaaccttgtgccagtggggagctctgtgcattgcgagcacctgtgtgcttgctcctcatgcacaagccggcatgtaccctccgttgatgctgtcctctctgcattctcagggttgggggcggggggttggcacaccggaccttgagaactaaggtcctgagtcactctcaacccttgtacagtgatgtgcagggcctaactcaagaaaccctcaccagattaggacaagataattaccaaggactggcctctcagccatgttcagggtagcatctttctttcactatggacgttttatcccagatcccagtttgtacctgtggtcatcccactggatgaaacggacatagagttgacaggggaggtggagggcggaatccttgaatgacagtcaggttttgcaatgccttgttcaaaggaaatgggataagggatgaatgctgggtaatgagtctgggtggtcaccgcttctccctgcaggccaggaatgagccagacgtttatgaaaccagcgacctacctgaggatgatcaagcagagtttgatgcggtaagactgtgtgctacctcaggatccctctggactctgacctttctccccagatgcaggtccttttccttctctggcaagccacaacaataagtgggtatgccaaccccagcctgggtggtgtggaggtctcagggctttcaaaggccttgcccagcagctggcagccaccaatgaacaatgccagaaaggagagtcgagccagtgagattacaactaacaagacctgtaaaacccaagtcttattaaatacaattgagatatctcaaagcagttacattctggactagtgattagttaggccccagggtctaatctgtgcattgaattataaagcttgaacatagtaaatcgtttaaggttggagtagacatttttttttaaagatttattttgtttatatgagtacactgtagctgtcttcagacacactagaagagagcatcagattctatttcagatggttgtgagccaccatgtggttgctgggaattaaactcaggacctctgaaagagcagccagatgctcttaactgctgagccatctctccagtccgacct

SEQ ID NO: 19362 - DNA, 1163 bp, Mus musculus
ttctaaaagagagattcttcgccgggcagtagtggtacacgcctttaaccccagcacttgggaggcagaggcaggcagatttctgagttcgaggccagcctggtctacagagttccaggacagccagggctacacagataaagtctcgaaaaaagagagagagtttcttctgggtgttcctcatctcggatagactctgatagactgttcttgcccctttataggtgcagacaacgatgcgtgaaaacttggccacagttgaggggaactttgccagcattgatgctcggatgaagaggctgggaaagtgagcatcactgggagctggggagcggggatgacccttgcccctgaactttgtcagacccttccacagggtcactcacagccccagcccacctgacaagggcaagggttcttgcatgtggggtacacaccctcccgacaaacagagtgggagctgggggctcttattggatgaggttgtgggcccagccacatgcagttcccgtccagtaagtgctttgcctgctgtgggagagggactggatcccgtcctctaacgtctgtctctggccgagtctaacactgtacaactgtctctgaccattaaatgctgttgtaccgtggagtctctgctgtgttcctggatttcggagaggcagcactgagagacgtgcataacgttaacagtctaagccacactattatgagactatttcagctgtaatctgttcttaccgaagagctaaataaaaaaatgagtacagagtcagaaccagagtttcaaaatattctcatctgttaaattaagagtgtctcccatagaaaagcagtggaggccccacagggcaagtacaaaacagaatgaaaactcccaagggtcttgtctttacaaaaaaaaaggcaggaggcagcccctggacagctggtcatgctggccgctccggctggaccacgctgcataacccccagtggcatcgtcacaccgtctctgagcgcttgatggggagaagggccagtgtagtgtgtatggaggagagatccaaagtcctcttggccccctttccatatcccagaggaaagcagagggaacctggctacgctttgaaatgaggctatgtgtttcggtcctggggacagggataagaggggatctgtgc

SEQ ID NO: 19363 - DNA, 1411 bp, Mus musculus
tgttaggccaagtgttgtactactgaaccatatagacccctggtcccaaatagtggcttgcttttcaaaaatggcagatacttgaatatgaataaggacattgtgcctttactatccaaatgtagaagtctctcaccagccttctgaaattcacctggtgctcgggagctgctcctgatcatctgtgcccttattgcagccctgcccggaacagcagcagctcccgccaggacgtgaccttggaacccagccctacaacgcgagtaagtgcggcttggaggtgtgggggttagagccaagagtggaaggttagcgtggtggggagaaagactcctgttacctcagctaactgatcacttctttcgacttctcttatacaggcagctgtccctttgcctccccgggcccgccctggacgtcctgccaaaaataagaggaggaaactggccccatagcagccatacctggagctggaatctgaccctgactggggagagctgagtgctgagccttgggagcccctgccagccacgtgcacctgtggacagtgggtggggcactactccccactcagagcacaaatgcaacccctcccctacaaatcccatcctgagccattgcaggggtagggaagctcacccctcccccccaaagccatgtcactgaagaggcctggggggtggtatatggcccctccccatcaggcgctaaggggacaccccttccccaggtcttttatttgtttaagttatttttgcacaaatgactcttttatatttaattcgacttcattgcctcccttcttaaagctagcaggctcagtttacaaacctgtgagctactgttggctgctgccctccttcccagtgaaaggtacagagcaataagcatcatgcatctccccgattcccactagcacccctctgcctctggctcaggttgctcaaagcacagatcccctcttatccctgtccccaggaccgaaacacatagcctcatttcaaagcgtagccaggttccctctgctttcctctgggatatggaaagggggccaagaggactttggatctctcctccatacacactacactggcccttctccccatcaagcgctcagagacggtgtgacgatgccactgggggttatgcagcgtggtccagccggagcggccagcatgaccagctgtccaggggctgcctcctgcctttttttttgtaaagacaagacccttgggagttttcattctgttttgtacttgccctgtggggcctccactgcttttctatgggagacactcttaatttaacagatgagaatattttgaaactctggttctgactctgtactcatttttttatttagctcttcggtaagaacagattacagctgaaatagtctcataatagtgtg

SEQ ID NO: 19364 - DNA, 3699 bp, Mus musculus
gatcttcctgggggagggcacagcagtggccagacactgggaaacttcctagtggcctggcattatgggaatttgcccacactcctagctgaagtcttctgtgcctagacaaagggaactaggccttcatatgtcaagaaattagggaatggttttgtggtccttgggagttgaggtgctgaactcctctggtctctagggactgggcttggaggggaccgttgtggacatggccagcagatcctgaggtccttacaggcgctacgtcatgttatttatggtcctttccttgagtgctctgggctgtggtgtttcttgagttggtagactgagaggcccttctctttccttgtattgcaggtgtgggctaagctggtggccccggctttagactggatcccacaatgtttgcagagatgttcaggtagccatggtggtatgacagaactctccctcaggtacccagcccggtgtaagcgtcctcgtgcccacatggatgtctgtgttgtcaggcacaggggagctcatcacacacaatgaatggagacaatgcgagcagtgcagcagacagagctgggggccctgccgccacgcctgtccccatccccatcgggtggcaacgctgtgtgcgagaaggtgctgtgtactatatcaggtatggcttttcagagttttcgtcccctcacccctcctctcagagctgtggttcctggcaccttgttgctctctgtatctctgcgtctctggatccattcactctttgtgtcttcccatgtcctttccgccttgcccttcccaggaaagcatttaactgtcctttaggaagtgtctccagataggctgagattaaccccatacttgtgaccctgttctttcccagcccaagtggcacagagctgtcttccttggagcaaacccgtagctacctcctcagcgatgggacctgcaagtgcggtctggagtgtccacttaatgtacccaaggtcagagctgtgggggtgccagagactcaatgcataagccaattacaaaccaccgtgcctccctgagatcccaccccctcactgtccctgtccatgcttcctaccttacaggttttcaactttgaccctctggccccggtgaccccgggtggggctggggtggggcctgcatcagaggaggacatgaccaagctgtgcaaccacaggcggaaagctgttgccatggcaactctgtaccgcagcatggagaccacctgctcacactcttctcctggtgagttttcctgccactttagagaaaaatgggggaaacctggggcctggaaggtggatgtgggggaggtgatctgagaaggcaggcccagggtggagtcagtgggggcagcttggtgagaaaggacatggttgtgacttgtgggcactgggactggagaagacagcattcgaggcagggatggacccacaagctgacccttgacttctcatttattgcaggagagggagcaagcccccagatgttccacactgtgtccccagggcccccctctgtccgccctccttgtcgagctcctcctacaactccacttaacgggggtcctggctccattccccaagacccaccttccgttccccaggccttcccccctctgacaggccctgcagggctcttcccaccaccccggcttcctgatccagttccctctgcaggcagcagcagcccttgtttcctcccaagaggcaatgctccctctccagccccacctcccccacctgctatcagcctcaatgccccctcctacaactggggggcttccctccgatccaacctggtgccctctgacctgggctctcctccagcccctcacgcctcctcttcaccaccctcagactctcctctcttccactgtagcgatgccttaacatctcctcccctgcccccaagcaataacccccctggtccccctggcccccctggtcctgccactcagccaccagtgtcttcagccactatgcacctgcccttggtcctgggatccttgggaggggcccccgcagtggaggggcctggggcacccccattccttgctagcagtctgctctctgcagcagccaaggcccagctgccccctcccagcactttacagggccgaaggccccgtgcccaggcaccctcagctgcccatgcatcaccccgtccctctcagcggcggcctcgccggcccccaactgtcttgcggttgctagaagggggaggccctcagacccctagacggactcgtcctcgggcccctgctcctgtccctcagccctttcctctcccagagccatcccagcctattctcccctctgtgctgtccctactgggactccccacccctggcccttcccactcggatggaagctttaaccttttggggtcagatgcacaccttcctcctcccccagccctctcctcagggagccctccccagcccaggcaccccattcagccctctctgcctgggaccaccagtggcagcctcagcagtgtgccaggtatgagtgacaagggatttctaagctcagccttacagccatccagggcacagggggcggggagggggtagtttggagagcactctggtgggttgggggtttgtgttggagaggttgggttctgtgggtgccaggaagagggctttccaggagctgagtttgttttcttttacaggtgcccctgccccaccagctgcctccaaagcccccgtagtccccagtcctgtgcttcaaagcccgtctgatgggctggggatgggggcaggcccagcctgccctctgcctcccttggctggtggggaggctttccctttccccagccctgagcagggcctggctctcagtggagctggcttcccggggatgctaggggccttgcctctccctctgagtctggggcagcctcccccttctccattccttagccacagtttatttggtgtgctggcggggggaggacagcctcctcctgagcccctgttgcccccgccaggggggcctggccctccctcagccccaggcgagcccgaagggccttcactcttggtggcttctctgctttcaccacccccttccgacctcctcccgcctccttctgcaccccctagcaatctccttgcctcttttctgcccctgttggccctgggccccacagctggggatggggaaggctctgcagagggagctgggggtccaaatggggagccattttcaggtttgggagacctgccccccctattatttcccccactttcagccccacccaccctcatagctttaaattctgcgctgctggctgccagcctggatcccccttcggggacacccccccaggtaagacccagggtatgagctggtggggcagaataagaattaaatcaggctgggctcttctctggggaagactcagtcttggctggggtagggtgggtgcaagaagggcgcacccctacttcacccaaagtcttagtcaaacaatgcatatggaggtgctgctgtacgcctgtccgacacttcactacacgcttaaccattcttcgtcttagccctgtgtcctgagtgccccccaacctggaccacctacctccagtgtcaccacggcaactactgacccgggggcctcctctctgggcaaggccccctccaactcagggagaccccaacttcttagccctctgct

SEQ ID NO: 19365 - DNA, 1187 bp, Mus musculus
ccaggacagcaaaagctacatagtgagaccctgtctaaaagagaaagaaaggaaaggaaaggaagaaagaaaggagagatttcaaagaggcttccaaaataatccagggaaagaaatgtatggtaaatttatatctggagccaggcagtggtggtgcacgcctttaatcccagcatttgggagacagagacaggcggatttctgaattcgaggccagccttgtccacagtgagttccaggacagccaaggctacacagagaaaccctgtcaagaaaaaccaaaaaaataaataaatgaaaaataaaaaattgcatctggaaataatgtagtaatgagaaatacttaggtttggggtacttttaaagttgtcagtgctttaggctgagctgtggtatctgagaaaggggcatcaaggataccaaagtttttggctttcagcacctagagttgccatttagtaagaactatacagccttggtaggaaaggcctttcatgtaagctgaacgcctgctcaacactgccaaggagctggagatcccagagcaggtctgcactgaggctgccagtggggggatggaatctgagcaagcactgctgagtttactcttccttccctctagttctgtctccctttggcggacttgaggtctatctgggatttagagaaaacttagttggccaggactttgctattatgtaatcaagacggcaaatgtcagcaactaaaaataaagttaagcctgcctctgtccttggagttggcttcagggacacacacgctgcaagacacacgcctgtgtgtgtgtgtgtattacaagagaagaaatggcttcagggacacacccgctgcaagacacacacacctctgtatgtgtgtgtgtgtattacaagagaagaactggagcctggtctgcagagttgttgagttccagaattccaggatgcccagggatgcacaaagaaaccatctcacaacccattttagaaaggatctagaaaagggctaggaggagttagaaaggatctagagaggggctaggaggagttagaaaggatctagagaggggctaggaggagttagaaaggatctagagaagggctaggaggaggctggaggtaaaggactgttttttccttttctccacagtgttccagaaggaagtgcatcttcatacaccaccacac

SEQ ID NO: 19366 - DNA, 1150 bp, Mus musculus
catgactaaaggctaaaggtatttaccttgtcctcaaaaccttccaagggcacaggcgttccccatttgaggtctctggtgatgcatcgtggcttgaggccatctcgaagccaggaacgtataatgaacctggcattgggtgtccagtcactgccaggcactgtcttccccaaccagtcctccagacgcttttccaactgagatgaagaaaagaccaacaggacagaggacccagacaggatgacaccaaggtcagtgagtaaggcgctgcacagctaagtcaggactacatatgtaaaactaaagattcatggcttcagggacatctaaacaattgttaacaaactcattcaacagaaacatccacagccaggctatggtggagcacgcctcccaccccagcactcggaagcagaggtgagcctggtctacagagccagttccgggaaagtgaagtaaccctgtcttaaaaaaaattccctcgagtctttaagatgtgtatgtaaagaaatgctgtctgtaaaagcaaaaacattgaaactaaactgagtacagtggtctgtggtttataattctggctcctcagaggcagaggtgagaaaagtaagtttaagaacttgtgaatgcttggcacacacttatgtatataatcaggaggggtgtgtgtgtttgtgtgtgtgggggtatgtttttgtatatataaacaattgtagaaaaagccatgagagggagcagttggaggaaaaggggaagtaatataattacattttaactttttaaaaaaaaagtttaaacaactgagcagtggtggagcacgcctctttctaatcccagcatttgggaggcagaggcagacacatctcatctctgtggatttgaagccagcatggtcgacagagtgagttttagaacagccagggttacacaaagaaaccctgactcaaaaaaattaaaaaataaaaattctcacagtttagatgatgaagtatggtatttgaagtatatgcatataatgaactattacaaggccatcaaatttttttaaaaaatgagattaggggattagagaaaaaaggtttgtggttaacagaagtggctgctcttacagaggacctgggtttggttcccagcacccacactgcagctcaca

SEQ ID NO: 19367 - DNA, 1290 bp, Mus musculus
tttctccttcagggtttgtgggctgggctggattcgctgtttagctgagggtggtcttgaactcctgatgctcctccttctgcctcccaagtactgcggttacagacagatagggaacgaggcctagctgtttccacctgccattcatagtccaaacttttaattccaaaattttttattttttttaaagatttatttattttatttatatgagtacactgtagctgtcttcagacacatcagaagagggcatcagatcccattacagatggttgtgagccaccatgtggttgctgggaattgaactcaggacctctggaagagcagttggtgctcttatccgctgagctgtctttccagccccattatttttattttttaagatttttatgttatgtgtatgggtgtttgcctgcacgtgttcctgtcaccacatgcctagagtgccctcagagcagtcgttcccaatctgtgggtcacaaccccttttggaccccatgaccctttgacaggggtccggtatcagatagcctgcaaatcacatgtttacattgtggcttataacagtagcaaagttacagttatgaagtaacaatgaaataattttgtggtgggggggtcacagcttgaggaactgtatgaaagggtctcaggattagaaaggttgcgaacccctgccttagagggaactgaattggagttcagagttatagctggttgtgagctgcagtgtgggtgctgggaaccaaacccaggtcctctgtaagagcagccacttctgttaaccacaaaccttttttctctaatcccctaatctcattttttaaaaaaatttgatggccttgtaatagttcattatatgcatatacttcaaataccatacttcatcatctaaactgtgagaatttttattttttaatttttttgagtcagggtttctttgtgtaaccctggctgttctaaaactcactctgtcgaccatgctggcttcaaatccacagagatgagatgtgtctgcctctgcctcccaaatgctgggattagaaagaggcgtgctccaccactgctcagttgtttaaactttttttttaaaaagttaaaatgtaattatattacttccccttttcctccaactgctccctctcatggctttttctacaattgtttatatatacaaaaacatacccccacacacacaaacacacacacccctcctgattatatacataagtgtgtgccaagcattcacaagttcttaaacttacttttctcacctctgcctctgaggag

SEQ ID NO: 19368 - DNA, 1194 bp, Mus musculus
tttttatttaagttttgtttattttatgtatgtgagtacactgtcactgtctcagacacaccagaagagggcatcagatcccattacagatggttgtgagccaccatgtggttgctgggaattgaactcaggacctgcggaagagcaatcattgttcttaactgctgagccatctcaccagcccagtaaagcactttttgcataaacctaacaatctgaatgtgacccccagaacccacatagaggtgggaggagaaaatggactatacccagttgtcttctgacctccatatgtgtgctgagccattcttgccccactccaaaaatcatggggtttgcttgtttttatttcatgtgtcctactgtttttattgcacgtatgtatgtgcactacatgtgtgcatggttcctatggaggacacatatgtagtggagaagagggcatctggagttacagatggctgtgagcctctgcaagagcagcacccctcacctatctctgcaggtctccccacttctacctttgagatggactttagccttggctggcctggaactcactgtatagaccaggctcctttagaactcacagagctctgtcagtctctgcctcaaagactctgcctttaacctgctagggttgaagataatgtgccactatgcccactaagagatacactgtttcccatgtgtgtactggctaacctgtcaccatcaccaagagatatactgtttcactcgactgaccaagagatccactgttttatatgttcattctggctaaggtatttacctataggccagctgcctttggcttagcctgaaatttcagctccttgggaggctgagacaggagaatttcaagctcaagatatcttgggcaacttacttagaccctgtcttaaaacgtaaacaaatgtcctggaagccacttgtgtcataagcaggttagtcccagtaggcaggaggaccagcaggttaggccagccttggctatatagtgatccatcctgtcattaaaaaccatccactaatcaagcaaaaaggtccagggtcagtggtagggtttttgcttagcatgcataaggatctagactgaatctttagtactgcaaaaatcaagaccatatgcaaattacattgtcttcttactctgtgtggtgtgtgtgaaagagaatgcagatgcacacatac

SEQ ID NO: 19369 - DNA, 1154 bp, Mus musculus
cccctagggtaaatcacccgcgttcacgaactttcttcccagaagaaaactgcccatcttttctccccgtactggaaggaaagacctataccataaagtccctggttctccggatgccccaaaccctcggcctctacggagtttcctttccttgatgctgttcccaaagctaactgtcctgggttgattgtttcagggtcatggggcctgaaagaggattcagagcggggagcaagggcaggcagggtggtctgagccagaggaggggcctcggtccccagatcccgcttgggcggggggccaacagggatacacaagctggcagtagccagtggtcccgctctgccccagtaggggtctcccggcgcctggcttcagctgccccggtggtcctgaggtcagagggtcaaaacaaggtctccccagctcttcctcttcctcgggggccctgcccacagtctttgggaactcagaagtccagaattcctagggattttctacggcctacaccgcatgttaggaaacccacccagcctcctcccgagtccaaacccactcctttgcccctaaaccccatgtgcacatctgtcacagccacaggtcaggagtccaatcccagcccggccctcaggggttctgttgcctggcacaccgctactcccaccccactgagcgctcccttcttttgcggtgggtcccgtcttagaaacactgacgtcttccaacggcgctcagagacgcacctggagttccctctaccacgcagacctccagctggccgtcccaactgcttcttcatcccaacctcaagaaagggagagatttctagtatgtgggagaggcgcggacaaagagacctgggacagacacagattgtcagaaaaaaagaaggggatgcagagaaaagaaggcacaaattaaagcaaaacaagaaaacacccaaacttcctaattgctctccccaaactctcccaaccccatattgcctctgagccccaggtctccttctgggatagggtgagtccctaggcgtcagagcatctcctcagcccctcccccatcgctcccaggtggtctcccgcctgcccccctctcacctccgtcggggcgcggtgctcgggatgcgtggtccagggctggaaactgggctgggg

SEQ ID NO: 19370 - DNA, 1192 bp, Mus musculus
ttatatggttgggtgcactaagattactgaagaaatagctgcctggcaacataaaagcacagatattaaaaggaattacatatcttccaactgtttctattgcttggttaaatttagaaccatacagggcttttgtagaattaaaatccctggggattttatagttaatagacagtattcagcttttcagagttaggaataatatatgtagcttcaaaatgatttttgtaccgtcactcacaccatttaattaaaacacagagaccaaagctgggcgtggtggtgcacgcctttaatcccagcactgggggggggggggggggcagaggcaggcggatttctgagtttaaggccagcctggtctacaaagtgagttccaggacagccagggctacacagagaaaccctgtctcaaaaaaccaaaaacccaaaaaaaaaaaaaaaaaaaaaaaaaaaaaccacagagaccagtaaaaagtcagaactgttctaagaattttagttcactgccatgttgctgaaagtggattagagcctggatttgatgtagtgaaggattctttttctttctcaggtgcattgcaagaggcgaccctgtccttcctcagtgtctctcagcagtaaacctgatacagttcctaagatcccgcctggatggaggagccagcaccatatctgtgctagaaatcaggtaagcatcacactggggcttacaggtaacgcttgtgatgcttggattgttttcggagttcatacagtttgagcagcaaataacctgtgtacctgtacggaccatcaacataaggaaaggtagacttaaggaggggtactttgttttttttttctttttgtttttttttttttttaatatttattatatgtaagtacactgtagctgaactcagacacccagaagagggcatcagatctcattatggatggttgtgagccaccatgtggttgctgggatttgaactcaggaccttcagacaagcagtcagtgctcttagccactgagccatctttccagccgaggaggggtactttgagtacataatttagattaagtagaatttaaaatagaaaactattctatagtaaatatctttagtgcatcatttggtagcagggaaagtaatgctattattgcatagtaagacattctggggatgtttgaaagtataaaacttca

SEQ ID NO: 19371 - DNA, 1140 bp, Mus musculus
ggcgggggaagaggcacaggtttcccagaaggaatttcttccggcaaaattccggcaggcagaacagatccttacaatgaggtctccattaataatgtgagctcgctgctggtgtaagtgcagatccatccggggtgagttttggataattttctttctttaaataaaagtccttggacttcacaggctgagagaggagaggtgacaaaaattggcattttaaaatagcactgttgatttctctgtacaatatacactatggaaattcagttttcaaatgttaaatattgtgggggttttctggacattttcagaggctgtttttatctttaaaatattttaaatattaggtttgctagaacttgtactgtttgctgatttctacttcttccatgattattttaagcaatgcctcattcagattttgcttatgagaatcactgtgatttctgttctctttggtgatgctgttgacgcacattgcaggaagcagggaatcccctataaatatccttcactgtgtcattacccagctctccctccatgcccgactggtgactgtgcctctgtgtcctgtgtctttatgtaactgtccctactcatcagatgtgttaaggagaaatatgtcgcctttgtcgcatctccagagcctttgtgtttacaagcatctgggagaattttgctaaactgttttcctacaaatgctgtttgatgtattctctgggtttgccactgttaattttgggtggcttgtttgttccttataattggcttgtttttgtttgctggctctggtttctaaagagtgcagagatgggattccctctgcctccagtgacgtattattttgtttgcagtctttttcttctgtgagggaggggtcagagagaaggaagaagaaaaatggatctgaagtctttgtgactcgctgccggctgggcaccactgactggagctgaggctggagtgggatgtttagccatagggtacctgtgcttgtttctcctcacagcaggcttagaccagagtcggatcgctgaagcaaggtgcttgaatttaaccccgtgagtgctgatgctaatgaattttacctaattgctatttctaaatgtagaaggaaaacgagctcatgaaggtttt

SEQ ID NO: 19372 - DNA, 1165 bp, Mus musculus
tgaatctgtatagctaaagcaaaggttaggaaggatttgcgaggtataaacctagttgtgagctttaacagccctagatggttagttttggattctatttgtgctttcagttccttttaagcctgtccattttaatatagatgatctctgaagggacctgcggaggtcagtttgaagaactcagtagactagagcctaggaaaagctaaagccgccttgtgtataaagcatgcatatttggatagcacatgccaacttgttcctttaacaacatgcctgtttattttctgtcttgatttatttcttgttttgtactgccattattcagaattcttcgtaagaagtgaaaaaaaaacctagattgggctgttttgcttagatatgcagttctattttctgtggtacctcagtaatttattatatccataaatgtttcagactaacaatttaactttatttagccggaagtagggtggaggagacaagggtagctgtagagtaaatgaagagcaatggatgctctctcttcactggagacagaggcagggctgcaagtgtggtggtaagcatggttccactgcggctctgcatcttgatatttcagcaaatatgtgggtaatttctcattagcttttcaggaaacccctgtggtggacagccctcctcagccgttgctgggagactgctctgacgtcactgtctgcagccagagcaggaatagcctgtgagaggaagaactgctgggaaattaaaagatgacagttttttaaaacgtggttttcatttgatttaggggtgggtaggatatatctaaagccttttttttttaaccgtttcagtcatttccaagctccctaaaaaataccaaaagattattttctttcaactaaaagtgtctttttaattttgttttctaattatcagggctttagtaaaggtcaaggaaaaaagctcttaaaggtgttagaaaagtaagattacagtttctttttatcattcgtgttctttcactctctcccttttggaggattagggaaagatcaaagcttttgtagagggtgatttagcataatttaagaataattaaaaacacatgttgggaagacattttggcaacactgactgtattgttttatatgatttatttacttatctaattgctgaa

SEQ ID NO: 19373 - DNA, 1173 bp, Mus musculus
ttgattggacagttctcgtgggataaccagcaaggatagaagaggaagatagagaatccgaggaagggggagggtatctcatcaattcctacttctgtgagatattagagatagattctgattagagatagttcatgaagactggccctagcttctgtgcaccttgcataggccagacacaaccttgaatgaagaggtgttacaccaaagaacagacatcatgtagtggtgtgcacctgcaatcctagcactcagatcgaggcagaagactcaggagttgagagctactatacaagttgctgtctcaataaaggggagggaacgtcacacaaagatttcacttgaaccttcatgtgaccttttcacttttgtggtgattcctaacagcaaaaattctcttgaatagagataaggaatttaggagaagtgtgtgtagaagttcttctccctaacaaaaaggtctttttccttccttcttttcacatttctttacaaatcttagccctgaacagaggttctcagaacatataaaagatgaaaagaacacggaatttcaacagaggttcattctcaagagagatgatgccagtatggaccgagatgataaccaggtgaagaatggaagagggtgggcctataaagagagaaactgggaagggagaaggatttgggggaatggaaaaaattgaaaatatcttaaaatggaaaactacacagcgctgttctcctgagttgttggggcttcccactgaggactggctacagttgccgtgctcaaggccccagagagacagggtgctgaggtctcatttggcccacagctctttaggtttgcctctaacttgtaactacgtttcattttggacaaacaaggtttctccctgtgtcagccttgatgtagctgacttcagtgtcatctctttgctcaacccctccctgtcttgcagaatttacactgggagctaccaaaataaccaaaagttactttatcccatttccactcttctagccaagggctggccttaaactggcaaagttatggtctaatttaaccagttacagaggtgtgtctttgatcccctttgataaactacttcatctttcccagctcctttcaccatggtgagttaatctgactttgagtgctgggaactcaggtccctttggatccac

SEQ ID NO: 19374 - DNA, 1129 bp, Mus musculus
aagcagtgacactccacacaaagatacacacatacgtatcaataaaaataaatcttaaaaggaagtggaaaaaggagaaagacatcccccactgttagcaaggatagagaatttacatttttaaaaaatttttaagatttattttgtgtgtgtaagtgtctatgcaccacatccgggcagtgcccacagaggctaaaagagggcattgaattctctggaagacattacagacacttgtgagctgccatgaggtcctcggaatcaaactcaggtgttgtgggagagcatccagtgttcttaaccactgagccatctctccatccccctctgactcttctttttagacagtgccaccttgaagtccgtctgaaaaccagaggctgagtgggctttgcactgttgatagtaccaaagatatgtacaattgtcacatttaagaaaacacaaaattctgctagatagtatatactgtgtagtcataattatccccgagaacagtgcctttcttagatctgctcagctctgtcttacccggttcaactttctcagtgtattgacctgatgaactggtttttatcagaagaaaccgaaggtagagatggagtagtgagccccagtttctgtggctgtaagtggcgaggccgaggctgattctgtccactgttcttttattgtcccacaccagctcctttcagacagcccttcttcctctcagttctatttgaagcctaattcagattcactgctaagagtgatgtttcctgggagcatcaggctacaccaaactgtgcagataatagcttgaagaattgggtaagcaggtgcagccctcacctctccgaatatttttttcaaagcctgaaaaatcagactgtgtttttgattaaagacctaggtgaagaccagtgagatggctcagcaggcaaatgcagctgccaccaaccctggtgacctgagttcagccccaggagtcaggtggtggaggagagaactagcccctgggggtatcctctgaccttcacacacagatataaaaaatgactagcaattacaaatagaagtgggactagaacaatgcccagcagttaaaagcacatagtgggggctggtgagatggctcagtgggtaa

SEQ ID NO: 19375 - DNA, 1136 bp, Mus musculus
atgctgtgagcttccctcttctcccgaacaatagattttgctgtcattaccacattccttcccaaagaaacttgcacatacctccagccctggcccatgacccaaacccaaacacagatcagacaagcactgtgcccagacatttcagcaatctgacctgggtgtttggtaacgctcaatttggacagaatggagtaattgttctgccaatcataacaaaatgtccctcagcaggtaaaggacaggagagcactggcatctggttccatttcttctccactcaagcctctactatgtaggggtggagggctgaagctggggtgagaatcagaagccgagtcagcagccgtttcagattcttggcaggacacagttagaatggccctgaaacaagtgggtggatttgcttgctggcttttccattcagagataactctacgttcagaatagttcgaatacccaaccactgatttcctcctgctactcaggagtgtcaccttctggaccaggtgtggtggtcatgcaactgaatgtccctaacggaccccaggccccccagaatccatccatggtccaatggagtcactgcaaatactacagcgtggagcagcgtggtcagaagcctggagacctgtacagccctgatgggagcccccaggtaggcccagccctggtcatttgtttcgtttggtttggttttgaaacagtgtctcactatatagctctagctgtcctggaactcattatgtagaccaggctggacctcaaacactcaaattcacagagatccatctgcctctgccccttgagtgctgggattaaagggtgagtcactattcccagcccaacccttgtaggccaggttcttctcaggaagaatcttcatgtcatcaaccaagcagcctcttttacacatctttctccagatgttttaagggagaaacatgaaaataccaaagtgagtcctctctcaaggaacccagttatagaacagttgtagaccacgccagacatgcttggagcagagtctgcatgggccagggatgagtgctgctcagcagttaccacaagctctgggctggagcaggcggcatctaaagaaccccaggttgacctccaccctccacaaactcgca

SEQ ID NO: 19376 - DNA, 1833 bp, Mus musculus
catgtttactaattctggttcctccaatgctttctctaagctgtgccttccaaacacacacacacaagcagacacagaaaaaacaactaactacagggtagggctgttggtataagtgggtggttcactgcttgcctcgcatacgtgaagtcctggaagtaagaatagcacacagtagcacagactggtcaggacgcaggacggcagcgggaagcagtggtctgacctgggcagtgcttacgaggccgctttgtctcttgacagttgtgacttggaagctgcgggacatagaaaggataatgtgtgtttgtgatatgtgttctctctcacaggccaacgcacaaatgggcagcagccccgtcacatctcctacccagtctccagcaccctctcctgtcacgagcctcagcaacgtctgcactggactcagccccctgcctgtcctcacaccattcccccggcctgggggtcctgcacagggtaggcagtcagatgaagaggggctgctctggggctcagcattccttttccatacaaggtggaagactagaagatagcgacaggcagggagacaggacagaagcacatcctctgacatctgctgaggcaaaggacacccgcctctcctgctgctcctctgtaactgaccccagtcctccttcacagacttggtattaactagggaatgtgaggctgagtcagaaagggaggggctttgctttaagattgtttctcgcagggcagtggtggcacaggcctttaaccccagcacgcaggaggcagaggcaggcggatttctgaattcgagaccagcctggcctacagagtgagttccaagacagccagggctacacagagaaaccctgtctcagggaaaaaaaaaaggttattttgctaggcatgccttaggaggcagaggcaggaggatctctgtgagtttgagaccagcctgtacgttttgaactagattcatacgcagttgtgagatgctaatgtgagtactgggaaccgacccaggtcctctgcaggactcagtgctcttgactgatgagcatctttccagtatcaagaagaatttgatttctaaacaggcaacaatgaatttcagttacaacacctgggttacagctccagtacaaacttgctgatgtttaacaagttacttaaatttataaatagaccttagtttcctcatctgtaaaatggggttaggcatacttaagatggaaatagtcttattgctttttgctttgactgttacaagtaatctaaaagtaagattaagatactgtttaagaacttcaaaaaaagctttttttaaaatttattcattttatataggtgagtacactgtctctgtcttcagacataccagaagaggacatcagatcccattacagatggttgtaagccaccatgtggttgctgggaattgaactcaggacctctggaacagcaatcagtgctcttaaccgctgagccatctctctggcttgtttaaaaactttaaaaatactctgaaataagacatttgtgagtagtaagttacacagtacttttctgtcacaggtgttgctataagtgctttataggctgtgttcagccagccgtccaacagcagcacatggggactctctcagtattgagtttcctgttacacagccagcatttctgactgggcatcaggctccaagcctgtgtgcgctcttgtccactcaggactgcctctcatgagtcagtgaggaggaacactcatcaagctcactctcactttgtatcccagactggcttggaattcactgtgtgtagtccaggctagcctcaaactcatag

SEQ ID NO: 19377 - DNA, 2107 bp, Mus musculus
cctagaagccctcctgtccctaatctagggcatctcccctgggtcatccgaggcctgacttgggaatctaggagaggggctttcctcctcaggccttgggataccgcagtccagctgttgcctaaacgaggcaggagaggatggacaggaaggataaagggagcctctgggtgggacaggaactacagatcatacttcaggttgagctactgccttcattaaaggatgacgctctgtgaaggaatggagttgtaggtgcagctcagaagcctgagattccaattctcagccccttctttcttattcctctaggttaggagaaaggaaggctcattccatctttctgtctgccctctaccctaccttatcttggtggggttaagttaggttgatctggggaggctacgagggacaggcaggactttggagggttttttgtgttttttgacacaaccaggccactgtccagtctttcctctcacagccatttgtctctccttccctttcagtgcttggaagggtgctggaggtgactgacctccctgaaggaatcacccgtacggaggctgacaaactcttcacccagcttgccatgtctggtgccaagatccagtggcttaaggatgctcaggggctgcctggtgcaggcgggggggacaacagtgggactgctgagaacggccgccacccggacctcgcagccctgtacacgatagtggctgtgttccccagccccctggccgcccagaacgcctcccttcgcctcaacaactctgtgagtcgcttcaaactccgagtggctaaaaagaactacgacctgaggatcctggaacgagctagctctcaatagctgggggaggggaggggctggcacagtgggagcaaaggccaagcacagggagccaaggcggacggacagacggatgactggcccaattccattatggctgaagagagaagcaaacagattcttacactggcatgggactcccttgccacggttcccccttttccctggttggtccccttctgtctccccctccttcccatcttctatcattttttaaatctcttctcccaccatgaaattaatttctttcatatttttggccgagtagaattgagaggctctgccctccccttttcccatttcatcaccagcccaatctccctcccctcttttggtcttcatgaatatatttatatggacagaattaagaaaaataaattgatttccccattcgttcactttccccatctcgtctccccaaaccccacagagttaaaacttgggactcccctcatccctaatccatccccagagcacttgtatattgtttgtttgaggtttgtgccacagtgacagacacagtatttaattgcacatacagatgtttgctgggttcactgtaaattttatttaatctggttttttgtttgtttgtttgtttggggagttacttggggggaggttggttttgtttataaatataaaaaaagcaaaaaaacctgtcactggccatcagtcgctgtttgtttcactgtttctctgttcgtgtgggctgggttagaagccctgagtagacccagttccacagctgctgagaggggtttttataggttaagaagatttccctagcatgtgcacatgtttttctaaccttttccttccggcctctcccctcccctgtacacaattctcagcaatggatgagtctctgaattatggtctatggttctcacactcggcaaactgctcttgatcaagctcgttgcttctcagcgctgggcctttgtgtctatatcagaggtttcttcttgctcattaattctaatattcattacagcctgactactgagccgggcaagtccagtccagaactaggtcaggatgctggcctcattcctgtccatctgatcttctgaaaaccttcagggatggagaccttgcacctttaatccttaaaagcttaggcttgggttcttggcaggaacacaaatggcagttacttataataaaaaacacctgaacttgcagtgccaaggtggtcactcaccagtccctgtccccgtcccctgcagttgacagaactgagactcgcagatc

SEQ ID NO: 19378 - DNA, 1595 bp, Mus musculus
tgaggcttggtgagaatctggggtctgcggagggaagggtcccccacactggggttgtctgtatcttggctatgctaattgtctcctgctctctctcccaggggcccccgcgttgacctctcgccagttccgtgaggacgacttccgtagagtcgtcgattttatcgatgagggagtcaacattggcttggaggtgaagcgcaagactggtgagtagcttcagaggtccttggtcaaccagtttcacccgcctccccgcaccctagctcctggccccgcccagcagccctctgatcaacttctcccaccgatctcagccaagctccaggatttcaaatccttcctgctcaaagacccagagacaagccagcgtttggccaacctccggcaacaggtggaacagtttgccaggggcttccccatgcctggatttgatgaacgttgaggacagttgaggacacctggcggtcggtcagaagcccacagacccggaagttacctttcttcccgcctccctggaccatagaagagatgtcactcctctctgggttttagtggagggagggaggccttccatttagggcaagagccaggcataaactcccttccagaatttgtagctgagatttctgatctttaaccgtgtctacacgaagcacccagttgacatccgacttgtttttgagacgggggtctcacttagctgtgagtggccttgaactgacccttccaccttcatttcccaagtgctggggttataggtttgcaccatgacacccgacttcgccctcagctttccaccccgaccctcccactacatctcaagtgttacagactcccctcccgctctttcttggggaagagggggtgggtaagcgccctccttcctgtttttatctaataaaatgctaacctgcccagggttcctattactgtgggaggggtcccctgggccagccagcgattctactccctcaacgtgtatctctccttccctcccaccaccaccaggacccccggggctgtagcctcctctctgatcagagccgacaccagacgtgattagcaggcgcagcaaattcaatttgttaaatgaaattgtattttgcccacggctgcttctgtttgatccccagggacagagaagcaagggaagggaggggtgggggaaaggcacaagactgcccaggtgcaaggcgggagggctgtccttgaccggaggctgccggcttgggcagggaagaagcccactgcatggcagagataccccatccgagtcaggctgggaacccaggacgagcccagtcgagcctgggcagacaccgccctgaaccctgctcaaaactctgtcaaaacaaacgtggggcctgccacgtccctggcactcgggcccctgcttgctgctggcacacgtcggacacgctcaacacgtagcctgcgccacacccagtcaggaggagcagggagcggcagggggagagggggactggcttgggtttttgggtcaaccccaactgtcgtctgcagtcgagtcccctcccccacgtgggactcaagctgagggtcagaggctttttcctctcctgggagcaagg

SEQ ID NO: 19379 - DNA, 1197 bp, Mus musculus
tggggtgatcaaggcaaccagaggtgttacacagaagtgggagctggggtattctaatcatatgaacctttttttttcccagcctaccaacttcaccaacccagtgtatgccacgctctacatggggggccacggcagccgccattccctggccagcacggacgagaagcgagaactgctgggccggggacctgaagacgagataggagatcccttggcatagggccctgccccgacggatgtccccagaaagccccctgccacatgagtctttcaatgaaccccctccccagccggcccttctccggccctgccgggtgtacaaatgtaaaaatgaaggaattactttttatatgtgagcgagcaagcgagcaagcacagtattatctctttgcatttccttcctgcctgctcctcagtatcccccccatgctgccttgagggggcggggagggctttgtggctcaaaggtatgaaggagtccacatgttccctaccgagcatacccctggaagctggcggcacggcctccccaccacgcctgtgcaagacactcaacggggctccgtgtcccagctttcctttccttggctctctggggttagttcaggggaggtggagtcctctgctgaccctgtctggaagatttggctctagctgaggaaggagtcttttagttgagggaagtcaccccaaaccccagctcccactttcaggggcacctctcagatggccatgctcagtatcccttccagacaggccctcccctctctagcgccccctctgtggctcctagggctgaacacattctttggtaactgtcccccaagcctcccatccccctgagggccaggaagagtcggggcacaccaaggaagggcaagcgggcagccccattttggggacgtgaacgttttaataatttttgctgaattcctttacaactaaataacacagatattgttataaataaaattgtaaaaaaggaaaaaaaaaagaaaagaaaagaaaagaaacccactgtgtctgcatgctaatgtgagaatttgggagctggggctgtgcttgcctgttccagccaccagagggagcattgctgcatgctggaggctggcctgagaatcctaaggtccacgtctccagccccactccatcctcctgtcttgctatggcagggaagagctgttttgctcagtg

SEQ ID NO: 19380 - DNA, 1099 bp, Mus musculus
gctcattgaaggggacagggtgtttcctcacaatacccaggagcgtccacaccaggccaggtgccctctcttccatctcactctgtctccttggccctgggatccaacccactctcatttctcccttcccagcaccatgtactggtcagactgggggaaccaccccaagattgaaacagcagcgatggatggcacccttcgggagactctcgtgcaagacaacattcagtggcctacaggtccctggggcaggggtagggtgtggaaggggcagactctgatcatggctgcttcagaagtcacccctgcgtgcagtggggcgggcaatctccagcagatcaggccgagggccatgggagtgcttcccggatgggcggctgggagagatcctatgagccgggtaggatacatgccgtggataccagacagagtcagctctgttctctgcgcccagcctggcgtgacagaagctgatctctgacagacagcattctctcaccccagggctggctgtggactatcacaatgaacggctctactgggcagatgccaagctttcggtcatcggcagcatccggctcaacggcactgaccccattgtggctgctgacagcaaacgaggtgagggtgctggcaggcttggttcccatcatggtccccaacatcatcatcaggcttctcactgagctcaaggatgtctcttcagaagcctggcacccagccagcccgtgagcctgcgcctacctgaccattttattcactctaccaacaagtatcaagttgtgtggggtcagcagggtaaatgaagggagagagagctaaagtcccccatggccccagaaatcttgggggtgatgagacaatttgccagtggcagggatagttctagatatgttaggtctgagacgcctacactgacaggtgtcttaaagactgggtccagggcccaggcgcctgtagtgacttaacctggctgtccctgcaccccaggcctaagtcaccccttcagcatcgatgtgtttgaagactacatctacggagtcacttacatcaataatcgtgtcttcaagatccacaagtttggacacagccccttgat

SEQ ID NO: 19381 - DNA, 1408 bp, Mus musculus
ccacagcaaggatgctggagacctggcttctatactccccagtggccagctcttccctaccacttgcccccaacactgattgtggctctgtctcctggcttctacagcccggttcatctgccctcccaaccggcctttccgctgcaagaatgaccgagtctgcctgtggattgggcgccagtgtgatggcgtggacaactgtggagatgggactgacgaggaggactgtggtgagctgagggcaatgagccggggctgaggggacctgcatctggggagcagactgctataaggctttcaatctggcaagagtggagcccttgggaaaggtatgggtggcctcctggagccctgagtctgcaaggtcagcacacacaccctcagcttggcgagcagccaggacacacctgtgttcatgaagtctctgtggatgtacgggtagtgtgctctgtatccagagcctaaagcctctcccctccccagagccccccacggcccagaacccccactgcaaagacaagaaggagttcctgtgccgaaaccagcgctgtctatcatcctccctgcgctgtaacatgttcgatgactgcggcgatggctccgatgaagaagattgcagcatcggtaggaccagacctgagagcagagggtgggtgggcaccagggggtgtggctcaggggaaaaccagagggcagggctcaggggaaaaccagggggccgggctcaggggaaggactccaccatctgtcctccacagaccccaagctgaccagctgtgccaccaatgccagcatgtgtggggacgaagctcgttgtgtgcgcactgagaaagctgcctactgtgcctgccgctcgggcttccatactgtgccgggccagcccggatgccagggtaggagagccggatgggagatggggcaggaaccccagctcctagactcccccatgacgcccagtgtaacccccagacatcaacgagtgcctgcgctttggtacctgctctcagctctgcaacaacaccaagggaggccacctctgcagctgtgcccgcaacttcatgaagacacacaacacctgcaaagctgaaggtgctagaggccggaagggccagaagggcctgaaggggcagggccagaaggaagggtggaagggcctgaaggggcagggccagaaggaagggtgggcagggtcgggccacaccagctataaaatggagctggcctggagtggaacattcccaatggcacttcgttgctcagacttggatgcccagactcaaggtacaccgggatgccatcccgagcaaagcaaagcacaggaaaggtagaaggtaccgcctggctttctggggaagttctatgagagcaacactcctgtgtggcacacagtgtcccctcccctctccta

SEQ ID NO: 19382 - DNA, 1153 bp, Mus musculus
gatgtatttcaggcagctgtgggattgggcagcaggtggcaggtagggagagggcttgatacaatgtagctggagatagcctggggtaccagggctgctggagatagcctgggggactagaggtgctggagatagcctgggggaccagaggtgctggagatagcctgggggaccagggctgctggagatagcctggggtaccagagctgccagaatatacctaagcttggagctgagccgagaccctcctcctacagatgaggagccatttctcatctttgccaaccggtactacctgcggaagctcaacctggacggctccaactacacactgcttaagcaggtgccaaaaccaagccttctttacacccgttgttgactgcccgggcccagtatggcctccccagttcttcccaccgccaggccatggttgtctccttctccctctccctccagccacatcctgactccagacatccttccccagatacacatgtgcccctgcggcagctgacttccctgtccccatcccaaacccagggcctgaacaatgcggtcgccttggactttgactaccgagagcagatgatctactggacggacgtgaccacccagggcagcatgattcgcaggatgcacctcaacggcagcaacgtgcaggtgaaaacagaaggctgccccgtgtcggctgacaggcacaccagggccccgctgacgagcctcacaccctccccatagtcctttgctgtaaaagagtctccccttctctcacacctgtcaacactgcttcgccctgctcctccctgagccacagaaacgttctgctcgcttcaccttcccctcctctcaactcaaaagtatgcaagcacaggagactcctcctgccttcccttgagttctgtgtgctctaggcgtgtgtgggtggccccagagaccccctgcttggagctcctggtgatagccacttacggtcaggagagtggagaagccatgccccggagactgagggtgccaccagctcctccttccctgtgttccttacaggttctgcaccggacgggccttagtaacccagatgggctggctgtggactgggtgggtggcaacctgtactggtgtgacaagggcagagataccattgaggtgtccaagc

SEQ ID NO: 19383 - DNA, 2197 bp, Mus musculus
tagtagcctctatcctctctgaccttgctttttctccctccatagaggtagtgagtcagtgggcagcaggcaccaaatctgaaaccataagtctaacatggggccagcaattgctcccatagtgtgtcttagaaggagctaggtgtgacccctcacccaccctcaccaccccttctattccatcttccacattggcccctaggtggcgccctgcccttcctcttctctcgtgaccccactgacccaccctccctccaccaggtaccacagactgcagcagctatttccgcctgggcgtgaaaggtgtcctcttccagccgtgcgagcggacatccctgtgctacgcacctagctgggtgtgtgatggcgccaacgactgtggagactacagcgatgaacgtgactgtccaggttggccagcggaagctcgccgggtgaacgggagacccggggctggcagtgtcttcatggctggcagagtcttcacatctcccttctacccccaggtgtgaagcgccctaggtgcccgctcaattactttgcctgccccagcgggcgctgtatccccatgagctggacgtgtgacaaggaggatgactgtgagaacggcgaggacgagacccactgcagtgagtgccctgggaccctacccagctcccacctcacagtccttatggaaagcgccctacacggggagacacctgggttccactgtgtctcatcctctcagactccagaatagagtcacttcttcagtttgtgatgagtcgctcacctgccctgcctttccttgtcttcttattactttctcctctattccagacaagttctgctcagaggcacagttcgagtgccagaaccaccggtgtatctccaagcagtggctgtgtgacggtagcgatgattgcggggatggctccgatgaggcagctcactgtggtaagcagtggcctgaatccggttcagggcggtcagtgtcctaccccctaaagaagggtccatataccagtgggccatgttatcacggctgcctgctctgccctgtcccctcctgagtctctctgtgtctccttgcccctcatgcagaaggcaagacatgtggcccctcctccttctcctgtcccggcacccacgtgtgtgtccctgagcgctggctctgtgatggcgacaaggactgtaccgatggcgcggatgagagtgtcactgctggctgccgtgagtgggagaggccgtgaggaatgggtgggcatcaagcctcgcagccttgctttgcaaacactggcaaatgaggtcaagggtaggaagaacttcagtgggagccgtgcgtttaaggagatcacagatccagacccctcccattctgcccattgctaccactcatgttgcaggaaacttaggattgggggtgggggagtgactatcaacagctagtaagtagggcagggcaggagtagggcaggcctgaggagggactctgcctccatccccagtgtacaacagcacctgtgatgaccgtgagttcatgtgccagaaccgcttgtgtattcccaagcatttcgtgtgcgaccatgaccgtgactgtgctgatggctctgatgaatcccctgagtgtggtgagtcccgtgactggaggagtagccctgcctagccgtgctggaggtccagcctcatcatcccctcccccaccacagagtacccaacctgcggccccaatgaattccgctgtgccaatgggcgttgtctgagctcccgtcagtgggaatgtgatggggagaatgactgtcacgaccacagcgatgaggctcccaagaacccacactgcaccagcccaggtcagcctctaggtggagccctttctccttcctgtgaccccactgacctgttcccaccaccctccatgttggcctctagatggctccctgccccttcctcctcctcttctgtgatcccactgaccagttcccgccaccctccacagagcacaaatgcaatgcctcatcacagttcctgtgcagcagcgggcgctgcgtggctgaggcgttgctctgcaacggccaggacgactgtggggacggttcagacgaacgcgggtgccatgtcaacgagtgtctcagccgcaagctcagtggctgcagtcaggactgcgaggacctcaagataggctttaaggtactcaggggatccgaccagagccctt

SEQ ID NO: 19384 - DNA, 1703 bp, Mus musculus
cccaacatttctcaaacccaactccctcaagacacctgtgtacatacatggacttgatatactcaggtccatctcatgcaaaactgcatgcgctcacgcacacgcacacacacatgcacacatgcacatgcattcgtactgttcatgaccctaggctcgtccccatcccaggagatcctatcactcagcctaataattccatctacccagagccacctacaccctaaaccttaccttatacccacataccaggtgtagcctatcatcccctcccccagcctgcacatagacatacatacctacacctggccctctcttgtgtgtgtgtgtgtgtgtgtgtgtgtgtgtgcagtgtccacatgccaccccatgcgaggttctccccgctgttgtgaacccccatggctgctggggtcgtgcagagctctggaatgttaggtgggcaatttgggagtgtacagggccagggaaccctcttcagctttcggtccccccactcccacccctgctcaggtgaactctccccctgccgtatcaacaatggaggctgccaggatctgtgtctgctcacccaccaaggccacgtcaactgttcctgtcgagggggccggatcctccaggaggacttcacctgccggggtgaggaagcaagttggagctgggacaggggctgctgtggggtgtcagcacaagagacccttattccagactccagcccaggctacaaggctggactcaggctaggtcgcaactcatgacaccttctccctccgcagctgtgaactcctcttgtcgggcacaagatgagtttgagtgtgccaatggggaatgtatcagcttcagcctcacctgtgatggcgtctcccactgcaaggacaagtccgatgagaagccctcctactgcagtaagggccctgctccagcccctcccccagtcccctgtgccatgtgacccagctccatagcctcagctcatgaagagcagagcttggaccttaggaagggacggtcattggtggggaggggggaaagaagccccttcctatgcctgctgtgaccacgcacaccctcccctcacagactcacgccgctgcaagaagactttccgccagtgtaacaatggtcgctgtgtatccaacatgctgtggtgcaatggggtggatgactgtggggatggctctgatgagattccttgcaacagtgagtacatcccagcctcacccccagtaccctgccacacccctgccttacccctacctcaccacagccatctgcctcaccctagcctcctgcctcaccacagccatctgcctcatcactgcctcctgcctcacccctgcctcatcccagcttcatcctagcctcctgccttacccctgcttcacccctgccctcacccctggtttttagtctcagactgtaccccgtcctcactccggctgagcatttgtccccaggcactctgaggacaggcgagaactctgtcctgggcctttctggccctgcagagggacactggcctgatggtactggtgggccctgttctagagactgcctgtggtgtgggtgagttccgctgccgggatgggtcctgcatcgggaactccagtcgctgcaaccagtttgtggattgtgaggatgcctcggatgagatgaattgcagtgagtaacagcctgctcatgactgacagctggcccatgac

SEQ ID NO: 19385 - DNA, 1208 bp, Mus musculus
ctggcccaacgggctcaccgtggattacctggagaagcgcatcctctggattgatgctaggtcagcagcatccgggcaggggagggacaggaccagcatgaagaaagatgaagccaagaggaggatggggggaggggaactgacagatgagaaggagcagggttgtaacctgcagtcatccatctaccctccgctcttctcataccccgtgtcctctgctgagggctctgcctgcccagggcaaagagaaggtgccttttcctaactcaccctggagctccaaacgccaactgtagccctgggaaggaaatctagaagattcccttggggagggcataaggctaggatcccaacccatgcaaccttgctttctctcttcagtcccaggcaggacttgggaaggggagttccctggtgtgttgagttgtgaggatgagggaaggtgggcacctggcagggcaccttgctgagacccccactgacccctccattacaccctcaggtcagatgccatctattcagcccggtatgacggctccggccacatggaggtgcttcggggacacgagttcctgtcacacccatttgccgtgacactgtacggtggggaggtgtactggaccgactggcgaacaaatacactggctaaggccaacaagtggactggccacaacgtcaccgtggtacagaggaccaacacccagcccttcgacctgcaggtgtatcacccttcccggcagcccatgggtaaggggccttcaggcgactgaagaggagccaccagcccttggatgggcgtgggggaggtgctgggataatggggtgtgaggaggggatgagacctgggtgagaagggccagggagggatcaacacatcccaggatgctcttgcttcctctctctgggccagctccaaacccatgtgaggccaatggcggccggggcccctgttcccatctgtgcctcatcaactacaaccggaccgtctcctgcgcctgtccccacctcatgaagctgcacaaggacaacaccacctgctatggtaggaagccatctcctcctctaacagttacgggtaaactgaggctgaaggagaggtccctgctgttaagcaaaggaatgactggaaggaggggctctgaaaacttgctagcgctggaggaaagagccacaactgccaagatctgacacagtctcttcacagttct

SEQ ID NO: 19386 - DNA, 1212 bp, Mus musculus
ctggtggctgccactcggatgagttccagtgccgcctagatggcctgtgcatccccctgaggtggcgctgcgacggggacaccgactgcatggattccagcgatgagaagagctgtgagggcgtgacccatgtttgtgacccgaatgtcaagtttggctgcaaggactccggtgagagggggcagagcagggcggggagcttcatgagtaggaggaggccatcttgaggatgtaacagtggcttggtgttatgtagaggaaagggcaagaaagagccagagtctgtatgaaagaccccgggaacccaaaccctggccagaatcgagcaccggcaccttctgcaggttctgcaccttcttcgttagctgtgtgggtttgacagaaaaggtttcaaggtttacagtgggctcctaagcacttcagtgaagacattcttagctgggtctgggcagggcacagtgagttccactctccaggcctggttcctcattctgtccccatcctggtccctcagcccggtgcatcagcaaggcgtgggtgtgtgatggcgacagcgactgtgaagataactccgacgaggagaactgtgaggccctggcctgcaggccaccctcccatccctgcgccaacaacacctctgtctgcctgcctcctgacaagctgtgcgacggcaaggatgactgtggagacggctcggatgagggcgagctctgtggtgaggcgcccatgcagggcctggggttgcccagcagtggggagaggggaggtcttgtccagggtaggactataggaaatgatctggggcagaggaggcactgacctaggacttgccttggccctgcctgaggtgacaactcctgtaacaattactttacaaagtggcccaggtagacagccactgtctgccaccaactgaggaagaagaagcacagagcccttaaataaactaatccagggccatcccactctgaaggcagggcagggagggagccgttaagactcctgacctgggtcagacaccctcagtcagaccactgaaaagggaggccaggctgggggtgaggcacagggttgaggcatgatttgagctgacttctggaggagggaatttaactgggttcccggaaatgggcaacgtgtgcagaatgagtgaggagggtcgaggagatctgagcaaaccacaccgtcccagaacaaacaagtcatctgact

SEQ ID NO: 19387 - DNA, 1176 bp, Mus musculus
atggatccttcttatccagagaactcccccgaaagctgaagtttctgcccagctgccctctgcagataacatctccaggccacgctgtgtgccaagggcagctccccagttctcatctgggggtccagtggtaaggagtaggagctgggtgatataggtcaagaggccagtagtgtcctgaggtcagaagcagaggttaggaaaggccagctgctggctgtcagtgggaacaagaggaacatggaggaaaggcacagcagagggctctgccctgccccgccatcatccctggcagggtgaggggtgctggtgtctggtgtggtgacaaacagcaaggaggtagagggacatgctgtacagacaacctagaaaacttgggaaggggtgataagatcctcttggctcctccagtgttccagacctactgtatagagaggatggatgctggagaagaacgagccttaggaaaccccagggtccaagagttgacttctgtccttccttgacatctaccctttctttccttgcctccagcccctaaaacttgcagccctaagcagtttgcctgcagagaccaaatcacctgtatctcaaagggctggcggtgtgacggtgaaagagattgccccgacggctctgatgaagcccctgagatctgtgagtaccttcccgggcttgctctctccagataagagcagccatctctagcctagcatggaccttgctctgtgcttgtatttgcccgtgacacagctaaaagtgtagccgcttctccggagtgcctgcagggtgcctggtgtgtgtagcagcagcacctgggatttctcctttggctgctacgtgcccaagactattggggacagtatcctctggggctgcatctctgtctcggggagataaccgcgccaccctttccttcgagcatttcctctggctggtgctcactgagcagcctccaggtcttgccaggtaccctgctgcccttagtcccaggccaaaggccactgccctgtaccagaagccccacccctgtgcccttcccgacaccctcccctcccctgcccccaataagtggtgtaatcagaggcagctgtttaaactgggagaaaggtccccacccagccttcacccatccagtggccaggatggggaatggttcatagggtagaagacttg

SEQ ID NO: 19388 - DNA, 2024 bp, Mus musculus
aggcctcacctgcaaatgccccccaacatgagccagataaccatgccctttgaccagcctcacccccagtaagtgacaaagccattcctggccccaccctctctgttcttcccttgcctaccccacccctcctaatttcctcttctgacccctggcaggggtctgctgcagtgccagtcccaggaacatgctgtgtccagccctgaacccatgctttgctcagatgtgactatggtagaggacagctgcctaactcagcctgtgggaggtttcccccaaggcacctggtgagtagcaacccgggagtgagggctgagacaatgggtgctgtgcctgctcccctacttctccctcctctttgcagggtcagtgaagacatgtaccctcccctgatgcctcccactgaacaggacctcaccaagcttctcctggagaaccaaggggaggcaggagggtccttaggaagccagcccctcctgcaaccatctccttatgggcaatcagggatctcactgtcccacctggacctaaggaccaaccccagctggtgatcccagctggagaagcccagaaacaaagcctcttctgtctctatggaccagctctggacacctgctcatgcaggtgccttccgtctcaactgttccttggtcaagagaaaagaactggctgggagaccatgtggtgtatggaactgctgtgctctgtccttcctgccatatcagggccccccttttccagcactgggtgcaaagggatgagtggggtgttaatgctcgaatgtgatacaactgtatcacaacacacacgcacacacacatacacacacaccagaactgtgttgagccagggcctgggactcaacatacagaaacatagagacattgtgccaaagacagagggcatataggcctagggcattgaagctgggctcaggtgactctgggagggagaaaaaggaaaaagtgggtatacagtcactggtgtgagttctacccagattttaaaaaacaagactccaaagctccaaattcttgcaaaaaaagatgcctagtgacatttgagactgcattctaagagctaagcttgtgtatagctgtaccaatgtttacccaagacatgttaacctatagaagtcacacatcactgtatgaccgcacagaacatgtatcttctgcttttgccagtgtgaccttaacatatctgaaaggctgagacattgtataagacagcaacccagtatcatttggggagtaactatgtggctgtgacatgcataaagctctagcctgggtaacttgatgcttccagtgtttcctagagcctgggatataagtagggatgcagacctctctgtgtaaactccctgggcgttgaggccctcaactgctgtctcttgtacttttctgtccactgccagctctgcccccctcccccggctcttacccagtcctttttccctcactggaggggaagggggccatggatcctaagccataaaataaattttattccaaaataacaaaataaataatctactgtacacaatctgaaaagaaagacacgctaagtgttcgacaggtgctgcagtcctgccggctgaggaggcccagggtccaacccaggcctctaaggggctggtggagggaacttcggggcaccctcccacacagtgctgagagaaaggtctgcggggaggggggagataagaacgggtgggcaaactgcagcacttgttaaattaaagaaacaaactagaagcacgaaaaatggggatggggaggggagacccagttttcccaagcccccagtctcagagtgaaggttccactgtaagtcgctagaccttcctggggaagttctttctccgtgtccaagtgaagtagttcagctgctcacaccactgctggccacctggagaatatgtgtgtgtgtgtgtgtgtgtgtgtgtgtgtgtgtgtgtgtgtgtggtatgagagaaaggagagccccagcaggctggaggcaaagtccgtgcccctaag

SEQ ID NO: 19389 - DNA, 3407 bp, Mus musculus
ccttatctccttgttccttgtcttctttttatgtactcattctattcattcagccttcctaaccaccagcatgctcccagatcttatcatttataagccctaaacaaccatctgttaagtttctttctatgcaattttagttttgtaactgccacgcttttccacggcagagaacagaccttcaggtgtactgcctgcctctggtgcccattcagctgttagcatcagctacatcccctgagtttactctacttacttacagttccatttctgtagagacgctgcctctgcagtgatgttagcttccgaatcccttgcctttgcagatctcttagaagctggcaggatcatttacgagggacagactctcaagtttctgccgtttgcttggttctttcattgtgatcttcaccactgcactggaggaagtgtgtaatgtgtgtaattccttcagccagggaggtcggtgctcactcaggaatacagcatcagactcattgtcttaggatcatcgaggaggaaggtggtattttcaggaagctcttagggcttcttcagacccgcttttaacatgtaattttggaagaccctgggctttactgctagcatccaaaatgtcagctgagacacctctccaggtggccagttagttatttcaaccaatgttccccatagccttaaattgtcctaaagtgacaactacctcacttggtagaaggtgacagaaaaatgagcagtatctgagctgtggttagagctgcagggtataagaaactttgtaacggaacctttttgtctttgtgaattataaatacagtaaaatttgtctcttttcaaagaacttgaagatcctgaagaggtgggaatgcacctcagaggcagtaagtgcttgtcctgggggtgcaggctggccaccccccaaacaaagcccaccactaacaacaaaagccttcagaaatttatacctagtatattttactgtaaactcagttatacaatttttgtaggtcttgggagaccctcatgcctgtttccccaaatcactccttacggatggtagcttgctaaaggggaggaggctcttgacttcttattttaatgagaattcactgtaagtgactttgctcttctgtgggttgactcactgtgaaagacagatttcttttcaaggccattttttttaaaactgtatttgaatttggggcgagcaaagcaagctcattttcttacccctgcctggtagttggagaagtgaatgctgagagagctgcttcagacagtgaaggacagacggtgcctcttttgtatgctgtgtatccttggcctgcctgcctgcctgcctgcctgggtggctccgctggatgcttctgagcctctgcgtgcccagacactgcttgagtcagctcagtctcatccctcagaatgagctcatcaaggaccgagggagaagtggagtgagctggacactggagccatgagcgctgtgtgccagcaatcatcgatccagaagctggttccaggagtgggggtcttgatggtattggaaatgcattgcttctaatgggtctgacctgagttcataaaacatgactcccgttaatgggaacataagaggcagccggcatacaactttacagttttcctttccttatgagaacatactgatcaaagccaggaaaagtttagcaactttgataacttggttaccttgaaatgagaaagagccagttccccacccacattcttgttttctcagcagagggtggttttgtctgagatggctctttgggtcccactgttccattttaccatatgaccgcccattcaagggcatagccctctgtgaatcagttgtgttctctttagcctaccctacttgggtgattgaggtttggtgaataaaaggacccaaataggccagagaattcccccaggccttgatacccgtgaagaatttggacgggttacataattgttgaaaggtatgctgagatggatcccagagttaaaatggaccttagctgtgcccacagctcttgtggactgagtggtacaagttgaagtgtgcagacaggaaaataatgccttctagtattcccatggactcgggtccaagatgggtgcctgcatttgcatgctgagaggacaggggcaggtgtacggagctctccccttaggcaggcactgaaaccaagggagaagcacacagagtagccttgcactttacaagtgtgtctaaatgtttgtgcttgtagtcttatagcagagagtatttctttgggggaacgtaggcagttgagctaacccagagctaacccagtggcatcttcgtgactcgattatggattctgttgctgttggagaccagatggtgactacctcgaaaaggaggtttggaagtcaggcatggtaattagtgtccgcctgaacttggaaggctgaagcaaggggaccacttgagttggacattgtcaacaatggggacccatacatggcaggccctagaacccactgggaataagcaaagcatatggataccctttaacctcagcggggacagaagtggtcacatagactcagacatggggctttgggccacaagtgtcttccatgtgtcatttttctttgacatgctcttatctccccaaggtattgtttagatagggcaccactctgtagcccaggctgtcctggaattcaatttatttattacccaggcttgcctacaactcacaatagccatgtctcagcctcctgagtgctgggattacaggcttgagccacccagcccagcttcctttttgcactcttggtgttaacttaaaaatgtcgagttcatttgcttagaacttgtgggcagcactgccatggcagatcgtccccagcgtgagccttgagccagttacaacctgagctggccactctccatgtctgtgggactgttcctgaaataacagggctaagaaactactagataagttatagcctgtgggtaatgccttagtgttatttagataaaatatgtgtcattgatacttaatacatggtaaggaatgttcagaaagaacaaagttttcagggatgtctgtttgctgtgagtcttccacatttgtgtaagaaaatctgatgccatgtagttttttatttctattgtggcttgtaaataatccccactttaataaagttttatacaatttatagtagtctttttaaattaaagtattttaatgtgtgtgtgttcatggtgtggacaacttgtgtgagtctgctctcatgtggcttccaggggtcagattcaggtcatggggcttgttcttacccactgagtaacactctgtcctgagtatattttggtttagtattttggagcctgggaagtttgaggatcctgttgcccaggttggcct

SEQ ID NO: 19390 - DNA, 1129 bp, Mus musculus
cctgtcctcctgcctcctttcctcgatctttccctggagagtaagatcgcctccacgatctgagatttctcctcctcacagtgcaagaagttccgagatcagctgtccccgaagcaggtgcagacactgcgggaaaagctctgtgccagtgaactgtttaagggcaagaaggcttcctacccccagaggtgagggcctccaaatgctgtagccatttttgtcacgtggcacctcttgagcttgaactcacagcagagttgcctgggaggactggagataccaagctgtgccctccttgatggcgctgacccagtgcacatgcgtgctcgcgtgcgcgccacactgtagttctcttctgatggatcctggaccacgtctctggatctctaaaataagatgtggtacaagagcaggaccctcaggaagggtttgtttacatggtgcacctctcacgtgtcctcagtgtgcctatcccgttccgtggtgattacatcgggctgcaagggaaccccaagctgcagagactgaagggcagggaggaggggcctgtcctggtggcagacaccgtgaagaaggtcaaccgtggcaatggcaaggtgaagaactactgcagcccacagaggcccacctgcggaggctttgcccggtggtgggactgggtgacaatgcctgtcgtcactctcccatctcctctctagacatcggcgcggattctcctcctgaccaaggggcacgtgattctcacggatgcgaagaagtcccaggcccagattgtcataggactggaggatgtggctggggtgtcagtcagcagcctccaggacgggctctttagcttgcatctgagtgaggtatttgagctgcctaggtggggtctctgtggagtgggcatcctggggctgaggtgggctggatatgctagaactaaatttctcactatgggcagcattaatctctattaatccccctccccttttcctaagatgtcatcggcagtctccaagggggacatcctgctagtgagcgaccatgtggttgaactgctgacaaaaatgtaccaagcagtgttggatgccacacagaggcagctctctgtcactgtgactgagaagtaaggccatgggctgga

SEQ ID NO: 19391 - DNA, 1163 bp, Mus musculus
ccggggcctttgtgtgaggcggtggcggcgatggtgctcggaccccgcggagccgggtaagcgcgatcgggtccagccggactcccgctcggcctttctgtcgccctggctgggcgcgccccgccggtgtccccggccggccctgtcctccctcccggcgaccgggccgcggctcccgggcctccgctcggccggctcccgcggcgccgggcctgggtcgcacgggggcagcccgcgctgtctgtggcgaccgaggtgcgccttcccggcggtgctgcgccccagcccggtgctgtccctgccctggcggatcgcggggagaccgcggcacgggcagacctttggttggggcgtactccttgcaagttgtatatccatggggtgcccggagcctcccaccgtggatgagtgaccgccagggcccgggagacgcgtggttggtacccaacaatactcagacgagtgctgggcccccgggaaaagttgggaattgttggtagaacctggtgcgatggagaaaagggttgtgctgctcagggcgagttgtgcgaagcacacgcatgtgactagttgtttctccgaggtgtgcaagacctgagatgggggaaaagtgatgttaaaaacgcttgcaggaatctttcccttgcttaaggcatccagttgttactgtatagttggtaaagacagatacaacgtacctaagtaatgttacataccacagttgtgtttgctttggctatgagtttagcttcatccacagaatacagtaacgtttgagaaattagcatccagaaggggtctgggaaggaccagagaataggcaagtatcccatgaagggcgaggtggggattcaagagtttgagattttgaggtggggctggtggtggctcttatctgtaatctagcatttgggagatggaggtaggagtatcataatgccatcaagatcatccttagtaacagagcaatttcaaagtcagcctgggctacataagatctcaaaaagaaaagaaaaaaagagctgagaggtttgtttgtagactggaaaggacagctatggcagacaagtaaaggtgcaaccgttacctcttccttagctgctaatggagcattgataatagttcaagtatattcctggcatttggcattgtgaggaaagaga

SEQ ID NO: 19392 - DNA, 3109 bp, Mus musculus
gttttgtagagtgagaacccttgatgtcaaaccttctgtcaagagcagggaggacagagagccacctcagtgtagccgtctgccatctggctacctccttaaccttgcgtctccctgtcacggagaggtgtctcagacagcagcagtcttgccttaatttacaccgagtctcccactcaggatggtttgacctacagtgcagatgagaagaccatgtgagtttgtggtggatcacaagcccttctggattaaaggaacccaagtaacttggtggtacatagcagggtgtgcattctgactgtcctagttgggtgacttgtttacttggtaacagtgtgggagtttggcagttcacctttgacctgctggaattatcctgatctgtcattgcatcacccccagggggcgctcttggatggtagctggcttaggcctcccacgcagctgtttggctccattcttagtctatgaaagggtcttacccagaaaaggctggagagaacccttaatcttgcatacttataaggcggcactccagtagctcatactacctcaccctgctcaggtgagctctaagagtccctaactttgggcccagccaccgacactgccccctggtgggactcagcagcgctctgggctgtttcataagcaagtggttttaattaactcacaaagcctttctagacattaatatttattttattattattttttgttttgtttggtatacatactacccagcatctcttttcaataagtgactttaggaaaattagtttctctcaagcaaggagccacattccaacaaagggttacgtctgaggagaggaagacaggggtgtaagcaggagagagtatgccaggccttttaagcagcagtttctcccagtgtagtctctagcagaacaaacccaggtcagtcacaggaagaaggtttttgcacagttttatccttctgacacaaggagcctcctatacatatatatgtgtgtgtgtgtgtgtatacatacatatatgtatgtatacatacatacatatatatatatatatatatatatagacatagaggcagaccaaagcagtacacagttgagccggtcagcggcctctttccccggctgtgagtcggtgtgcagggccttcccaagggcccgaatggtgtagctcgagtagttgaggatacccctcaccatctaaacgaggcattttcagggaagtcagtcgttgctgtagctcttagtgtctgactcggagtctacactggggatgtgtagcacactacagttccaggtctgctgagttttctatccccgccctccctctgctgctgccgaggagtgagcattgactggttgacttgagacaggtcgctgagagtggagaaacccccttgtccttagcgtaaggcatctccgatgctgggtagtctgtgtacttaacctgaaactgtgaagttttccctttttgccataaaccaaaaggcagatctttgaggttttgcccttgaaacattaaaacacaaactgtattttctgatcccttcaggttaattgatcagggaggtccagttggtcccagtcagacatgtagcaattgggaccagtagctcacaaggcttgttgcccaaaccatatctcttcgggtagccccatgtttcctctctgtgaagttgtatttgcttccctgcagttagttcctcctgagggcactccgggacacctggtgggaggagttaactttattttgcatttttaactttacacccatttgagttcatccccacccccacccttggattcccgtttggcactatcccctgttgtattgctgtagagctctccttgaccttcatctttgcctgccccccccccactcccacccccacccccgccactaccgctccctatttttgtttttgtttttgtttttttttggtctacacttagagccagctgtacagtgttcagaacttttgttcagcaattcttaggattgtccagttggctatttgcagaacattaagccagactcggggacatccctagcttgtttcctaaggggaaactgtaatgttgatgtggcacactggcattaacagcctgtgctgcttgtggccagaggataagatgtgtccacatgtgctggtgtccctgacagctccgtgacgccacggacgtcagatagccctactcaatgaaccccaggatttggttctaaattttaaggttctgtggagctcccacagtttatgctagtcggggaataaagaggtattggtggggtcaggtgaccctaagaacaaggcatgggtgagaatttctcttactttattgtgacctatccccagccccgtgtgtaccgggcaaacctgtaaaccccagagcttttcgcccaggcagggctttgctactgattatcttccttttctggcttcctgctgtgctctctccaccagacccgagactactcaactctgaaagtgaacttaaatccctttacagatggacagtgaatttgttggcatgggaacgagccctatggagtggtctctgtctgtctgtctgggagtgcgttcacgtcccagtcccattgggtgagtcagaaatcgggtgcacagcatccatctcggtgtgatgacgcgtcacagtcaatgtcaagaggaagatggcacctgtggcagcgatcctgatattttccttctgccggtccccacccaccctgcccggagtagctcaagtctcttctgaagcagagaaacgttgctgtctaactccttccattaaattaagaagtactgacctcctaatatttaagtgtttactatctgctgtaaagttttgtatattttgtaaacctttttccccaaaacagtagacatctaaaatcgtacatctgattcttttatatttcattgttcagcacaaagtgtggtttttatttagaataaaaaaagaaacagacagagaaaaaaaaaaaagaaaaatttgaagtgagttcctttcccacggaccctcagttcagatagctgacttgctccagcttgctctggcctgctccggcctgctccagctcgttccggctcgctccggcttgcttcaggagcttg

SEQ ID NO: 19393 - DNA, 1209 bp, Mus musculus
ctcgaaaaaccaaaaaaaaaaaaaaaaaaaaagatagatagatagatttttaagagtttgaacatgataactgcatggacaatacttacttcccccgtaagacatgtattattaaatgaatatctcagttgcaggtgttgtataccttcttctgaattattggtggtcagatagacttcagagtccccaaaagaactattgtcgaggcgggagtgatctgcgagcgaaacctacaccatgagtctcctcaataaatccaagagtgagatgaccccagaggagctgcagaagcgggcggaggaggaattcaacacaggtcccctctcagtgctcacgcagtcggtcaagaacaacacacaagtgctcattaactgtcgcaacaacaagaagctgctgggccgggtgaaggcctttgacaggcactgcaacatggtgctggaaaatgtgaaggagatgtggactgaggttcccaagagcggcaagggcaagaagaaatccaagcctgtcaacaaggaccgctacatctccaagatgttcctgcgcggggacttggtcatcgtggtgctgcggaacccactcatcgctggcaagtagagcctgctccctgccctgcgaaggcctgcagaaccctgcccagtgggcgagaaataaaaccctgtgctttttggtaaaaaaaaaaaaaagaactattgtcattgctcagcaggaccaggtggtgagaccctactgctgatgatatggttatctgcaggagacctgcatacagtcaacaagatcagttaacattgtaacagacagcactaattagacccagtggatcacaataaataacagaaaggagaaacatgaaggggaaggtgatatgttaggggcacctggggaaaatgggagagaagagtcagggtgcctatattcaagatatctggtttagaggctggagaggtagctcagtgaagagcacttattagtcctccagaggaccctggttcaattcccagcacccacatcatgactacactatttataactccaatcccagggaatctaatgccctcttctggtctcctttggtaccaggcctgtaagtggtacacagacacacatacaggcaaaacacccatagacatataagtaaacagtttttaaaagatatattgtttgcatgtatgcagatgacaaagaataagcaaaaggtatgctagtaaaaaa

SEQ ID NO: 19394 - DNA, 1163 bp, Mus musculus
ctctatgacaatttttcaaaatctctttatgagatattggtaatatctctaaaatattcatcttttgcaaaggacttgttaaaatcttactattggccgggcggtggtggcacacgcctttaattgcacttgggaggcagaggcaggcagatttctgagttcaaagccagcctggtctacaaagtgaattccaggactatacagagaaaccctgtctcggggggaaaaaaagaatcttgttattactaatcaaaatcaatatgctaaaggtctctccttttcggggacaatcctgttgttaaatggataggttttcagagcccggaagatgcagatggactctaaaaggagcagtaggagtcgtctacacctgcgagatctgcaagaactacaattcccagcagtccctccggcggcgcaggtccatgcgcgcgcagggatggaggcctgtcttgttcccgccaattctcgtgtcagtcctgtccgggtctagttctttacttcatggagccatttgatcctgcggagctgccggagctactcaagctttattaccgaaggctctttccctacgcccagtactatcgctggctcaactatggcggaggtgatggaggctgggacgggatgggtagcggggctgggagccgtgtgtgagaatactttgggcgggatgtcctaggaagaagagaggcaccttcttcaccaatgacaggcagcgtccttggaatatttacagctcctgtttattgctccctagcaaatgtgaaattgtatgccccttcagattacaggctatctagaacagagctgggcacagagcactcgttaaaaatattccagagagcctagtagctcatacctataatccttacattctggagattggggcatgtggattttcatgagttcaaggcgagccagggctacatagtaagctctagagcaacctattctacacaataaaaccctgtcgtttaaaaacttatgtcaggctgggcgtggtggcacacgcagaggcaggcggatttctgaattcgaggtcagcctggtctacagagtgagttccaggacagccagggcaacacagagaaaccctgtctcgaaaaaccaaaaaaaaaaaaaaaacaaaaaaaaaacgaacatatgtcttcccattagtt

SEQ ID NO: 19395 - DNA, 1196 bp, Mus musculus
gtcatagctgtatcaggagagatttctccctcccccaaaaagacctcaaaaactgcagcccccaaagagaattcagcaaccttacccccaaaaaggtcccccaaaactgcagcccccaaagagactccagccacatcttctgaaggggttacagctgtgccatctgagatttctccttcacccccaactccagcctccaaaggggttcctgtgaccctaactcccaaaggtgcccctaatgccctagctgagagtcctgcctcccctaaaaaggtccctaaaactgcagcccctgaagaaacctcaacaaccccatccccccaaaaaattcccaaagtggcaggtcccaaagaggcttcagcaaccccaccttcaaaaaagacccccaaaactgcagtccccaaagaaacttcagcaccttctgagggggtcacagctgtaccactggaaattcctccctcccccagaaaggcccctaaaactgcagctcccaaagaaactccagccccgtctcctgaaggggccaccactgcaccagtgcagattcctccctcccccaggaagggctctaagaaagcaggctccaaagaaacacctacaaccccatctcctgaaggggtaacagctgcacctctagaaattcccatatcttccaaaaagacttccaaaatggcaagtcctaaagaaacgctagtaaccccatcttccaaaaagctctcccaaactgtaggtcccaaagaaacttcacttgaaggggccacagctgtgccactggagattcctccttcccacaaaaaggcccccaaaactgtagatcctaaacaggttcctctaaccccatctcctaaagatgcccctactactctagctgaaagtccttcctcccccaaaaaggcacccaaaactgcagccccaccctctgaaagggtcaccactgtgccaccagagaagcctgccaccccacagaaggcctcagcaactacagcctccaaagtgcctgtccctgccgagacacaggaagttgctgtctcctcaagagagactccagtaaccccagctgtgcccccagtcaagaatccttcctcccataagaagacctcaaagactatagagctcaaagaagccccagcaaccctccctccctccccaacaaagagccccaaaattccatcatccaaaaaggcaccaaggacttc

SEQ ID NO: 19396 - DNA, 1215 bp, Mus musculus
ttacaggggttacgagagtcactatccgaaaatctaaaaatatcctctttgtcatcacaaaacccgatgtctacaagagcccagcttcagacacctacatagtgtttggggaagccaaggttagtaaaatttcaggtgaattgctccagaccagtattaatgttatttggggtcagataattcattgctgctgctgtgcagaggttaagccccaattgtgataccaaaaattttatttatatagcgttgagtttcctgagatgcatttttcacttacaaacatctacccgcacctctatcctctgccctgtagattgaagatttgtctcagcaagcacagttagcagctgctgagaaattcaaagttcaaggtgaagctgtttcaaacattcaggaaaacactcagactccaaccgtccaagaggagagtgaagaagaggaggtgagccacggaatcttgaggattttacttaatctctccgcatcagcgactcttgcttcagaaaactatagaagttattcttactttgctttattgagactcttctccgtcttttaggttgatgagacgggtgtggaagttaaggacatagaactggtcatgtcgcaagcaaacgtatcaagagcaaaggctgttcgagccctgaaaaacaacagtaatgatattgtaaatgctattatggtgagtggcccatcaattaggcttcattccaaagcctgaattgccaaagcctgaaataatgacctgaattctctacctcttagcctataaatgcctctaattatctttttttttcttctttgcaggaattaacaatgtaactatttgacagcgaagacaactccccctttcccccctttttggtgtttgaaaagtggaactacagcttggtttaaaatttgtactgtttctatcactaataaagttgtggcttcttgttggatggactcagcaggtgctagatcttttcccagaaagtaaattgaagtatgtgggggaaaaatctttttaaaaacttttgatgtgccgggcatggtggcacatgcctttaatcccagcacccaggaggcagaggcaggtggatttctgagttccaggacagccagggctacacagggaaaccctgtctcgagaaaaccaaaaaggaaaaaaaaactgaatttgaaaccagcctagtctgcatagtgagttccagaacaacattgtagagagac

SEQ ID NO: 19397 - DNA, 1188 bp, Mus musculus
acagcctttcctaattccaggtcaagaggatcaacatcctcttctgacttatgcaggcaaaaccctcatacacacagaccttaacaaaaaaaaaaaagttgtggttttggttggttggtttttgaaagtatagaaaagcatcaacgagccatcattgcctgcatatataaagggcctttgacatgggagtcctttagtttaggactatttggtcagaaacatcttttagttggggtttaacactatagattaaaggcgtgctccaccacgcccggagagtttttgaaaacagatttatgtatatgtgggtgtttgccaccagtgtttattggatttctgaggaggccataagagtatctagtcctttggagctgaagttacagtctacatgaggtacctttatgtagctgtaggtgctaagaactgaacatgagtccttttgttttggttggttggtttggttttggtgttttaatcaagacaggctttctcttggtagttcctggctgtcctggaactcactctgtacagcaggctggcctcagactcctatgcctttgcctcctaagtgctgggattaaaggccatgtgtacactgcctgacttttaagttcttgagatgctaatctttctcttcaccccagcatcctaaatcctattttcccccaattatttcaagtaagaccaagagaaaaaaatataaatatacatgtgggacttgatttgtaaagagactattgtagatgctactgtaaggcagatttggggccagcctaaaatgttgtgagaccttaccattattaaaaagtgagttgcagccgggcgtggtggcgcatgcctttttaatcccagcactctggaggcaaaggcaggcagatttttgagttcgaagccagcctggtctacaaagtgagttccggacagccagggctacacagagaaaccctgtctcgaaaaaccaaaaaaaaaggggagttacttttggctatttttattttctaagtaatatttctaagatgatatactctttcgtttaagaaacaccatctgtgtcttctcatctgcatcctcatctcctcttataagggcaccagacattggaagttttaggattgtactttcaatttccctttaaaagctctgtttccaaataaaagtctcattctgaagtgatcagacagaaaacag

SEQ ID NO: 19398 - DNA, 1307 bp, Mus musculus
aaatctgtgtcttagttgtagtagtgatggtttaaagaattatcacctcgtgattgactggcattaaatgttagatcttagcttcaagtcctgttaaccatgatgaaaggggggttatttttgggttgggtggtgttttgtgtgtttatttttggcttcgtttgattctttttttttttttttttttttttttgagatatatatatatttttttctgtatagacttggctgtactggaactcactctgtagatgagaccaggctgggctcaaaactcagaggttccactgccttcctacttactgcttgagccgctaccacctggtttgtttgtttccaaagcctactttttgtcctatgataaatgaatggcattgtgtgggtagggcaaggaacgatcaggtattcaaggccaatgtgggctacttaagagccctgcctcattccctcatctcccagaataaactccctattaggaaagttttaagtcttcctgaaagtactttgttgaagcctttggaatgtaagataaatgtaaagtgaaatttaaacttgtgatggagaagagaaataaatgactgttaaatatgaagttataaatactcaaagaattcctttttgaatttatcattttctctacttataggcagcctgcttctgcaaagtggtacgatcgaagggactatgtattcattgaattttgtgttgaagacagtaaagatgttaatgtaaactttgaaaaatccaaacttactttcaggtaatttgccttttgtcttatttaaggtgtctattattactgtgatgaaacaccatgatgttgggtggaaatggattattgggcttatggatccactgttaatcatcaaaggaagtggaagcaggacagaggacatggtggggtgctgcttactggcttgctcagcctttcttacagaatcctggggtgggggcacccacaatgggctgggccctttcctatcaatcactaagaaatgtactatagtataggccttcttacagtctgatcttatagaagcattttctcctttgaggctcctgtctctaggattgtgtagaattgacatgaactagccagccacctttctacatctgtgttacccaaagcttactgtatgtaactggctttctaatctctttctctgtctcacttttttttttttttttagttgtcttggaggaagcgataattttaagcatttaaatgaaattgatctttttcattgtatcgatccaaatgtaagtaccattgatgctttttttctgatttaaatgatgagaagctg

SEQ ID NO: 19399 - DNA, 1919 bp, Mus musculus
agagggcatttccaaggatggatatgggctagtgaactaagaaccaaaaagtcttgtcacattcttaggagggtttattatttaaggtgtgcttacatgttcagtgtgtaagtaagtgttcacatgattactagggagctcttagttttgctgcctccatttaatttatataagtgttagattctcttgtagttctcttgtagaccttgctgacttgtctgtaaaattctttcagagatgccagatctggagtaagggctgttgtcatcgcctggattttgagaaaggaaaataacttctgcaagatttcacaattgagaaaacccctgagtcgatagctctaaaggcagatatgctgtacttgcctcctctaacccagttgtcaacctttttttttctttttcttttttttctttttttttttttttgaaaggcttcactaagggttgattatgtaccattgtgtggggcgatttaagtcagctaaggcagtatccttatgcatgaacatttcccatgattccatgaggcagttgatcctaggcaactgctccagcagctcggacaaataattgcatttcatctaagtctttcatcataacacaattacttacacattaggaaagctctcagcttagggaaagatgaaagttttagatcctagaccatggatttaaaggaggcggaaacaaattggctaataccttaaactgataacctgccattctttcaggatacctttcaaaattattccactaaagtttatttttcaaaaaaaaaaaatgtactttacatcattgtatgtgatcacttgtcagtgttcaggtgtattttagcaaaaactagtggatgccctaacttagatggtttttgaagcctatacacttggtattgtttggcccttaagcttttacatctcttagcatggaggacaaagaaagctgtacattgttgcttgagagtatgtacattttagaccagatttgtatttgcacagtcagtatggcaaatgagtggacaatgttaaatacactattggattttttttattttctgttttgatttcagcttatgccctggctggaaaacctcaatttatgttcatgacagtggggatttttttaaatgtctacattctttctaataaactgttggaagatttcttggctgtccttttaagtgtctgtttgctgtaatttcatgtatttaccccttactggaatggagtttggttttttttttttttttgttttgtttttttgagggaaaatttggactggtcctgtttgaacaaagaggcttgctgtactgtcacaggaaaccctgtaaagtgtgtctgtaaatgggaagctgtgggcacttggcagcagccagacaagtgttgtgacttgactgaaataaaagtgaatgtgttgtcctcctgtacattttcactcctgaattagcagtgtcaccttgtttactgctttgatccagattgagaaccactgactgacgtaaaagtatgttccagtgctctaaagctaatagtgataacgaacaccccacactcatcattttaaggagatattacctgaattcaaaagaagggtttcaggagggaggacttgggggggggtgctttactgttttgttttttggattttatgtgtacatgttttgtctatttgtctacatgtatgaatgtgtaccctgagagtactggggattgaacctgtgtcctctagatgttcaggcaatgctctgaactgctgagctatctttccagctcccttgtttttgtattttgattgcttcctgctagggagtttaaggtgctcttgactttagcaatcctgcttccattctgaatgctagattgtaagtactgcaccagtgtgctcagttcttaatggtgttggggtggattcttggttcta

SEQ ID NO: 19400 - DNA, 2088 bp, Mus musculus
tattcagttattgaaaatgaagatacagaagtttggattgttgaaaacttgctacatagaaccccctgttactttttttaaagctgtgttacattatggattctctaaaatttacaggtttttattttcttattgttatataaagaaactttgttatattaagttcagtaaaaggaaaatatcaaaaaagaggattatttgttcttgagactttttttttttggtttttcgagacagggtttctctgtatagccctggctgtcctggagctcactctgtagaccaggctggcctcgaactcagaaatctgcccgcctctgcctcccaagtgctgggatcaaaggcgtgcgccaccacgcccggcgagacaatattttttattgcagagagatgatgttctgtgacagcttaacttgaacaagattagacttgactgtttgtggtggccagtggcttttgagcatggtgcctggttctgaccctttcctccctgaaccttacagatttgctcctattcatgctgaggctcctgagttcatagagatgagtgttgagcaggagattctggtgactgggataaaggttgtggatctgctggccccatacgccaagggtgggaaaatcggtacgttggtttttggtccgtgttttccaaatacagtaaagcatggagacccttttttcttttgagagtgcttgagccttcagtgatgattagcttctgactttcgttcttctgaatttgctgaagccagatgccgttcctgagaaggggaaaatggacagaactgaacatttttgaaggctgtttaatttgggaatgcagagatctgaaatatttcttcttaaactaggactctttggaggtgctggcgttggaaagacagtactgatcatggagctaatcaacaatgtcgccaaagcccatggtggttactctgtatttgctggtgttggtgagaggacccgtgagggcaatgatttataccatgaaatgattgaatctggtgttatcaatctaaaagatgccacttccaaggtgagctccattcagaaaactaatgtgttatgtttgatgtgatgagccccgggttctgtaaacaaaatagttgtcttcccaccaccattttccagaataccagtgtacacttctctggtgtgagatatttctagactttttgatgagtaagtaatccaatttgaaagctgatttaaaaggtgtagaatggaagccactcacatatctcagtcttacttttagtttagaaattatttccagtgttctcaatttcatgaaggttccaaacagaaacattggcatccagtggaagatcccattagtggtgtctctctctctcttcccctctcttctctctgattgggaatcttggatttctctgtggcttccttactactctgctgtcttttctgacttgtgtatgttttacaggtagcgttggtatatggacagatgaacgaaccacctggcgctcgagcccgggtagctctgactggtttgaccgttgctgaatacttcagagaccaggagggccaagatgtcctgctgtttattgacaacatcttccgctttacccaggctggctcagaggtaggggggaagcctcgaggcctggtttgttgagccagttgggcatattagaagaaagatgtagacacctaagaccattattctttacttctgtcttttaggtgtctgccttattgggcagaatcccttctgctgtaggctaccagcccaccctagccaccgacatgggcacaatgcaggaaaggatcaccaccaccaagaagggatcgatcacctcggtgcaggtaatgaaaaaaaccaacctagggagataataacaccatattatacttggggctagagagataattcacagttaagaatgcttttggctcttccggttgcccagtgtccatcaggtggcttaccatctgtaactccagcttaggagacatggcgccctcttttggcttccatgggtacctgcatatacagtaaacatggtctggggcgcggagatgtacaaaaatcatgtgctaggtgaaatggcacttaccttt

SEQ ID NO: 19401 - DNA, 2088 bp, Mus musculus; identical to SEQ ID NO: 19400

SEQ ID NO: 19402 - DNA, 1099 bp, Mus musculus
gaacagtcagtggaggttaggagtggtgtctggtcactggaattagaggtgataaagcagtagtcagtgttaaaccaccactcaagccccaaacatattcttgatctactacatcttgtcttaaattacacactttacactttaaaaacaattatacttggaagggggtggatatggtgcacacctttagtgctgggactcctaaatagatctaggggcttgagttccaggtcagccaggaacacacccccaccccccaaaagtaaatttcacgtggaagttgaaaagtttccttgcatgataaggtttcacagtgggctcaagtggtgaggtgtacatgctgcaggaagctgatataactcagcttcttactgtgttttcccctatgtaggtgaatatgaccatctcccagaacaagccttctacatggtgggacccattgaagaagccgtggcaaaggctgataagctggcagaagagcacgggtcgtgagggactccagccaaaggcagcactgcaactgatctctccatatcaagcgagagctcaggtttccttccatgcaggccacacaagagccttgattgaagatgtgatgttctctctgaagagtatttaaagttttcaataaagtatatacccctcatttatgtctgtttatgttgcttctgaaacagcttataattgagctcacagtggtgggccacatttaggaaattgttagaaacaggattattattaaaaagatcaatttattaatgagattctatgggccttgtgtttcataataggctcagctttggtttttgctccaactatcactaaagtgtttttcccctggagaaaatagataaacttattcaagacagggattgcgtttttaggaaatgctgactatctgtcacaattgagggtcttgtctaggtactcattcagaaaattcttaatatattgccagaaatttgaacaagcctagctgtgcatgtttgtgcttgagtcttcagggcaaaaaaaaaaaatggtctcttaagatcccttatgaaaaagttttaaggcttcggtgatgttacaaagagtaatcttgatactgttgccactg

SEQ ID NO: 19403 - DNA, 1168 bp, Mus musculus
tagatcccattacagatggttgtgagccaccgtgtggttgctgggaattgaactcaggacctctagcagagcagtcagtgcttttcactgagctatctctccagctcagtttattgagtttttaatattgttagaacttttctattcctttatcttatttacaaggaatacctaacaagtctattaaggatccttgtgtttagttctcagccttgggtttagttcacagcagtatatgaaaggagaagtcaagagatttggggcctttgtttgtttgctttttttttttttttcttttctgagacagggtttctctatgtagccctggctgtcctggatctcactatgcaaaccaagctggacttaaactcagagatatgtcttcctctgcctctgctggaattaaaaggtgtgtatcatcactggccagctactaaaattccttgaactcagaaatctgcctgcttctgtctcccaagtgctgggattaaaggcgtgccaccaccaccgccctgcaaatttttttaggcagtatctcactgtgtggccctggctagcttggaaggctctaggaaatacagaccggaccttcaacttccacctgcttctgctatgactgagtactgggattaaaggcatgagccacccaaatttgatccctagaacccgagtaaaaatgtcaggcaggcatggtgctgtgtgattgtgaacctagcactagggaggcagaactgaaagacccctaaggctcactggccagccagtctagcctaattggtatacttaagatcattgggcaccctgcttcaaaagagatgaatggttttagaagtcctctgatctacacgtgtactgacacatacaagctctggcatgtatatgaaattgggggctgtgatggtggtacagacagaggcaggcagatttctgaggccaacctgatctccatagtgaattctactcttgccagggctatatggtgagacgctctctcaaaaaaagaattaaaaacaaaatagagggctggagagatggctcagcggttaagagcactaactgctcttccaaaggacctgagttcaaatcccagcaaccacatggtagctcacaaccatccataatgagatatgacaccctcttctggtgtgtctaaaggcagctacagtgt

SEQ ID NO: 19404 - DNA, 1137 bp, Mus musculus
gcaataacagctgctgccaccagctcctgtgccacacctagaccgcagcctcagcaacagctgctaagcgtacacaagagcatccaagtttagtgtccccttgagaggtagaagataaagggagcagaggagtcccccttgcttgtaccttcaacattgtcaatttgaagtttatttggtggcgttatatgtatgttcatagccaaaccttttctgttttttttctgccaggtttgaatggggatgtgaatgttaatggcttatctactgtatctcacactactacttcagggattttgaactctgctccccactcctctagcacctcacacctccatcaccctaacgtggcctacgactgtctttggaactactcacagtacccatctgccaatcctggcaacaacctcaaggacccaccccttctttctcagttccctgggggacaatacccgctcaacggtatccttgggggcaaccgacaaccttcatccccaagtcacaacactaatcttcgagctgggagccaagagttctgggccaatggtacccagagtcccatggggcttaacttcgattcacaggaactgtatgattcttttcctgatcagaattttgaggtgatgcccaatggacccccaagttttttcacctcccctcagacttctccaatgttggggtctagtatccagacctttgcaccttcccaggatgtaagcagtgacatccatcctgatgaagcagcagaaaaggagctgacttcagttgtggcagaaaatggcactggcttggtaggcagcctggagctggaggaagagcagccaggtataactgggtctgtgagctgggagtggagaggggaagtggggttgggggggggtgcacagtagctttttgaagtgaggaaaacttgtctttccagctctctgcagtataggctaatttgcatgttgatgtaagcagagccaaatggctggggttttagtgcagcagcaccagttcaagagtgggaggcaaattatcccaagcttgtcatgcagagctgctggcctggagagggctggtgggtgatgggcaagcctgaagtagccaggcagactccatcagaaatggcttcttgggctaggggtgtatctt

SEQ ID NO: 19405 - DNA, 2227 bp, Mus musculus
ctaaatagaaaaatttgccaattaaatataaaaacaaggtctattttatgataaataaatgatgttaggtttctacaaggatctatggggtagatacacagtatctttgccttcattttcacagtctcctgactttgctttaagagggctatatgtttcccctaatttatattaatgtattgcatggtagggtagctgacatagcagagttgtgactttgacatgatcctgaactacatagtgagtttcaagttagtctgaactagagaccctttctttctttgtttttttttcccccaactccccaattcatacactagaaagtagaatatttgggggggccttaggaaaatctgactttctaacttaattcttaatattctgctttttgaattttctttcacccccataagcagagccagtgagtggcagtctttatggtatagatgatgcggagctgatgggtgcagaagacaagttgcctctggagggcaaccctgtgatctctgccctcgattgccctgctctcagtaatgctaatgccttcagtctcctggcagacgacagccagacatcagcctccatctttgtcagccctacctccccacctgtcttaggggagtctgtcttgcaaggtaagtgacgagaggggtaggacatatacatagagttgcaaaaacagtgagagaatgggttccataattaagcccttaaactgggaagtatgaagctgtaccttgctgacagactatgagatggtgtctagtgggaataaaaaggcattgaccatggtactttgccctgtagagaacttgagagacttggaagttgtcaaggaaaaaggccagaggcctttcaagcttcaggagaaggaaagagccagcgctgctttgttaaaacttaattttgggggctggtgagatgactcagtgggtaagagtacccgactgctcttccgaaggtccagagttcaaatcccagcaaccacatggtggacatataataaataaatatttaaaaaagaagaaaaaaaaacttaattttgtttgtatgagtgttcctatgtctgtatatctatgtatcgtgtatgcattggtgtccttggagaccacaagaaggagggtgtctccagctagaccaattgggactggagttccagaaggttgtgagtcacccacttgtgggtgctgacttttctcactaaaagaccttaaaataaccatgtttaccatagtgcaagtttgagtgtttaaattcaattttatttatactgttgtttgcttgtagataacagctttggactgaacagttgcagtgactctgaacaggaagaaatagagacccagtcttcaaacttccaacgtcccctgactgagccagctcctgaccagccacctagtactcaactacatccagcagtttcaccaacagcctccccagcagcctccttgacagcatctgcagaaatctctccagctgtctctccagtagcatcctcgcctgtccctcctgaagtctttgtagcagtctctccagcttcctcacctgctctgccagccatctctttggaagcctctatgacaactccagtaacttctcctcaaggttcccctgaaccttctccagcagctgccttccagactgtctccccagcaaggaaaaatgtcagcagtgctcctaaagcgcgtgctgatcgagaagagacgactggaggagcagttgcagtctctggtagtggtgagtgtccacactctgctcccacctgcctgttctctacagaagcacatgtcacatatggtgcccatccttttgttttttgatacagtgtctcagtatgtagccttgactagcctggaacttgctatgtaaaccaaggtggcttccaattcaaagagatgtgtctgcctctgcctccaagtgctttatcctgtaactttgcttgacttcttatcttgatgtctctggtcttgtcctctaggtgatgtactgaagagacgtattgctaccccagaagaagttcgtcttcccctccagcatgggtaaatgctctagatggctacacacattgacctcaagaagctcacgaatgataggaagagaggagctcctctcttcatcttggtgggagaggactgggctggacaggagtggactacaggacagtatggagggtgcaggactgggcaggacaggagtggactacaggacagtacggagggtgtggaac

SEQ ID NO: 19406 - DNA, 1150 bp, Mus musculus
ctctgggtgggcaggctgagaaagagaagatgaagacaaagcaggaaaagctgaaggaaaaggtaaagcgagaaaagaaagaaaaggtaaaagcgaaggggaaggaagggcccagagccaggccatcctgtagagcagacaagacccttgccacacagaagcggctagaggagcagcagaggcagcaggctatcctggaggagatgaagaagcccacagaggatatgtgtctgtctgaccaccaggtattaagggtcatggaagggccagtgctgaggacatttctcgtgttaccagaaggacttgtgaattctagacagtgcctcttgtgagtctaacaagatacccatgcgcttttctctccccagcccctgcctgacttcacacgcatccctggtttgacactgtccagtagggctttctcagattgcttgaccatcgtggagttccttcacagttttggcaaagtgctaggctttgaccttaccaaagatgttcctagtctaggagtcctgcaggagggactcttatgtcaaggtgacagcttggacaaagtgcaggacctgctggtgcgactgctgaaggctgcactccatgatcctggtctgcccccctactgtcaggtaggtgttcctgggcctgggttacagttttgctctctccttgagaacacgtaaaagcttcccctaaagcaaccacagaagtaagggaaacgtagttgcttcctgtttctagcctttatatgcctttttctttgcaaggcttcatttgttcattttctcttttcttactttgcagtttctctttgtagtctttcacctttttcttttttttttttttttttcgagacagggtttttctgtatagccctggctgtcctggaactcactttgtagaccaggctggcctcgaactcagaaatccgcctgcctctgcctccccagtgctgggactaaaggtgtgcgccaccacacccggcctttcacctttttctagtaactttttcccttaatttttaaattctatttatgtgtagacatgttttgcttgtctgtttgtgtaccacacgtatgcctggtactacactgaccaaaaaatggtgttggatcacctgaaatcaagactcacagacagttgtgagctgtcttac

SEQ ID NO: 19407 - DNA, 1177 bp, Mus musculus
gagttgttcctagttccttctcatttccattgtgcttccttccaaacagtccctgaagatattgggggagaagatgtcagagatcccattgaccagagataatgtgtctgagatactgcgctgcttcctcatggcatatagagtggagccatccttctgtgacagtctgcgtacccagccttttcaggcccagccacctcaacagaaggctgctattctagccttccttgtgcatgagcttaacagctccaccattatcatcaagtgagggcttgggtgggaatggtcaatcctgtgcctgtgtaggggaggggcttagctctccagaagcccctgggtggtgtgggtgttgctcttctctgaggatgctggagtgattgggcatagactcattgtaagccttcctttgtcatccatcctgtttgaactagactgagatccatccctacagctctgtaacacttaatctttcttttctttttgctgccacttttccctcaaaacttcccccatgttcgttcccctgcagtgagattgacaagactctggaaagtgtgtctagctgcaggaagaacaagtggattgttgaaggccgactccggaggtagggacaggacagagtagagcccagagggagggtgaggcatagccagggctctggaaaatgtaaatttcaagtgtttcttttttggtattatattcttcaccagcgtcttagcctaatttctatttcttaagactgaaaactgctctggccaagcgaactgggcggcctgaggttatgatggaaggggcagaagacggcctaggacggaggcgcagttctcggatcatggaggaaaccagtggcatagaagaggaggaagaggaagaaaatacaacagctgtccatggccgcaggggtcgaaaagaaggagaggtacagaccaaagtcaattagaaagttttcatcttttttttggatctggtagctctcctttctcaatgtccgcttgtttctgtgcagattgatgttgcagcatctagcattccagagctagagcgccatatagaaaaactcagtaaggtaccatgtttttaatctcataaaagtcgggaaatgtgggttgcacaagagctgaagcccttgttcaaattatatcagttttgtagggaggttgataggcttcagttctct

SEQ ID NO: 19408 - DNA, 2907 bp, Mus musculus
gccctgtcttcccctgcccaggtacactagctcagaagagtttgcagctgatgctctgctggtttttgacaactgccagaccttcaatgaggatgactctgaagtgggcaaggctgggcacgtcatgcgacgcttctttgagagccgctgggaggaattttatcagggaaaacaggccaatctgtgaggcaaggaagttgggagtcactttgtggcatcttctccaaccttccaaacaaaaacctgccgttctcacctgctgatggctgccctgggtggactcaagtcagacaatgctgactcttgactctgcccttggcagcacccacatcctcttgttccgaatcccttttctcccttcctcctctggctcctcaaataagagatgcagagatgaggtccttctggatggaaagccaaaaaagaaaaaattttcctgtctctcctcctcctcccccccccccccattaaaatggagagagacaaagaagtcctccttccccttcccagcttcctcccctccctgtccatgcctcagcatcctggggctatttaacaatagcaatagttctagtgaatgtgtgaaactgagaaacactctgtactgtgtgcggacccgcagtgacggccagtaaagtggacttaactcccaagtgtgtcgagccggacaccgggccctgaacatgctgcttccatgttcagtcccctccctgcttctcacttcctctcactcattctgttctaactcctccctatttttaaggttttgtctcacccagtaatgtaaaactatcgtgtacgggttctttaccttccctcccagtctttttcccttatgtggaaaacaaagttgagagctctcctgtctttctgtcctcatcttctgcctcccttctagttaaccctctaaggtgttggctcctcctcacatgctgagtttctgtgagtctctagccttttctgaagctcggtggctggggagcggacaggcaggcagtgccctaggccttccagcctccttcccctgcttcccaaacctccctcttgggaactcctcagggacaactactgctgagtttgagtgctcctccgagatgggggccaggtagcaattgactggcctcagagagaggaggagagagaggtgggtgtgggtgtgtgttttgtgtctgtgtgtgtgcacgtgcacagatgagagttgtgattgtgaccctgtagtgtgatgggactcattgttccccacatgtgtttattcccgccttcccattgtttcacaccatcaaccttttgtctttgggaaaacacaagaacaagggttctctggggacaaggctgtctctcctcatggtcatttcttttccagcctcttcaaactgtgcaatcttttcagcaggaactccctctcccttcactagctttgagtttttgctggtaggggggtagaactggatctttcctaaaccatgagtgtctgggtttagctgtgttttccttccttacaccgacttcatgtcccaggacccctttcttccccagcagcagagaccctggagcacagaatgggcagagaggaggatttgggtctaccactgccctgtgtgtgactgagcccaggttagcccccagcatgagaggacagctgctaactccaagctgtagccatgggccactggcccctgctttcctgctcagccaagcccctcccatcagaaattacgggtacttgcactggggaggtggctgctagctgacctaagcagggagccaaggcatccaagcaatgttccatgggtgggcggaggatgccaggtgaggtgtagcattccttgtactccagcagtactaaagagtggggcagtgcgggttcctgggcagccctgactcctcgacccaccctcaccgcactcccggttgcctgtttctaaagtcgccttttctgtcgatgaacctcaaaacttaattttatttgagaattttttttcttttaaataagaggtggattgaagaatatttgaattgactttatattatgcataaatatttatattttatctaaataactgcgctgtaacaaactttgtgttagtcagatgtttggaactgtttcccctggcataaagtgtactggagtcattcgctactggaggtgcgggaggagggagagtggagcctctgctctgctctgtgctcctctcccagccccacctctgccctcgggaccaggcactcagaaggaggaggtcccagacttgattgtagaaatggggactgaagggattgtgggcaggatgtgatcaaaggggccatttctcacttttctttcctcatcctcactgcccctcaagctaggtggatttttctcttgttgacaaagagtatttggtagggaaagcaggttaaaaataaagacagcccttccctgccctttgtgtccccttcctggtgacagcaagaaaccatcaacaccaacaagtttccacgttccttttacagcaaaagggactttttatataaccaaatgtggtgtcttagtgactttttgataatgtacagttttttgtgaatttaaatttatttctttctatatttttaggaccaatctcatttttaataaggtttaaaaaaaggaaaaaaagtctagagaaaaaaaaataccttgtttttgccatgtgatgttccacaggtgcggctgtagaaaagtgcttgtcattgaataaaaaccacatttgataaaagactcaagattgcatgtttctctcctgaagcataggtcactgtaccttagagaatgagtgtgatgggttgacctgtgctctgggttagtgctctgtgtccgctgtgggggtgggacaggaatagacaaggcaccagcaccctccctacaccatggatgacactagacaggag

SEQ ID NO: 19409 - DNA, 3085 bp, Mus musculus
gctgtcttgtccatcatcatccttgattaccaagcctggggagtatcatgtgtgctggtcctgaacacctgacagaacctggccccactcctccaccccttattccctggcagttatttggtgtagactaaaccccagtccagccttggacatggagcctgttagttcatgtacttggccagcagtgacatctgtgactttgcctcctggaggatcttttctgcctgggttctcacagcctctcatcccagctgcacatggctgtactcaagtggtacttggctgaatcacttaattcagcaggagccatcttatttagcagggctcacccttggttgtatgtacatgccaagtgcacacagtttgaagggatgaaagcaagaactgttgtgtatactgtgcatgcttgagaatggactgagctttctctatgcagcatacccagcccagccctggtgtttggaccccttccccagggaaccagaccaccagaaataattttccttcttgtggaaggacgacggggtgctaggatagaaaaaggcaagactcacagctccctggccactcaaaggtcaggagggacttgtaaacatgcctgccgttaactattcccttctgcaagactttcagcacaaaatgtgacttgttacatcacatcccttcacgtcataagtacacctccagtagacaaagcaatggagatggggaagtgtgtccagaggtcagtgtgaaagaggaagggcagggcatggtgatggtgagaaactggctcagcagctgtgcacactacagaattgggaatcctggcctgactgtgctgctgtgcgttctagactgaggaaggggctgaggacaatggacagcataaagtacaaaatgaccagttttctcattggtgcttccaacatcaggaaggtcatacccagttatcgacctctagccctctagcactcagtgacagactcagagctctgtcctgtggaaaccctgctgacagtcttgctgccactgctgctccttcactgcctattaaaaattgttcctttttctgtagttctaaagcaatttgaataactgacagttttaaaatttgaaattacctttttaggtttttcttttgagtatactggttagggttctagtgtttctggttgaacaggtgtgagcatgggaaatgagggcaacctgtaattttgtttttatagtggttaatggcactcactgtgtaatttctgcttagtgatttccatccactcttttcctcattagctcattactcagaaaggtagcgactgaagacaggaagtagtatgcaagccatgagggatgagttgtaagcctcctctccatcatcctgcccaaggctcctaacagtctcctgagtcctgtttgcatggaggccagatagatggctctgcactctatatctcacctgtactcattttagtacattgtggttttgcttccaatcaatcagagtggactagagctcacacctgacctcgtgtgactcttcactaggctccaggcctatcccatctcattgggtcagactgtagatggactggacttttggagacaggtcctgctattacttaggaatatgtgggaacaatgatagggaccaagcttgtgaagcaaaacggctttggaaagggcaagtgctcaataataaaaaatggggtggaagtgaagcgttatttgctgagggtttcggaaggactagtttgtttttgtccctggcccttccggtcaagtgggcacctcccattttgtcgccaagagcaatacagttgagtaggtggtagacccaaactcacccagccatttctagacctgaattcagaggataaggtgagtctagaggtatatacaaccaatgcttgttagaccaattcttaccaattcggagcaagccggtggctctacttctgggtaacctgcctcttaaaagtgcctttgatcccagtagtagattcagggtctacaggagccttccctcagcagctaaaaccaatttgtctcctctactctttgctgcacctcccggaggtggtctccatgtggcagtgatgccctcatcacccttgtgaccaccgctctgaatgttcaaaataagcatttcctgtccaagcaaatccctaaactccctcgtcctcattactcaactacctcagtctgacaactcaaggcacacaagcacctacttgcctcccaccatcctttactgcccttgtctttgtggggttggaacaaatgcaaactcctcagttccacaacccaaaactgctctttctggatcgtcttctccagtgacgttggctccctacaagagcgaactctccatatgggtcagtccctgtaggacaagccagggactatgctgtgcagtcaaatgccaggtttggagcatagcttaagaccgcagagagtaaggacttgagtggtggtggtgtgcagtttgagagagctggaatggacgtctctgctcctgccctctgggcgggtcgggtgatgacttctagatgcactccttaccctggagggaagttaatttatacttaagatgcattttgtacatttcccctttacccagaaacctgtagtttcatactcccatgtctatgccaacactacctatcgctcactctccgtggctgacttctggttccatttccttcctgtgacttggaagagctttacttttgctcacgtgaacctttcttttttaaataaaacacaaaagcctcctgtctagtgtcatccatggtgtagggagggtgctggtgccttgtctattcctgtcccacccccacagcggacacagagcactaacccagagcacaggtcaacccatcacactcattctctaaggtacagtgacctatgcttcaggagagaaacatgcaatcttgagtcttttatcaaatgtggtttttattcaatgacaagcacttttctacagccgcacctgtggaacatcacatggcaaaaacaaggtatttttttttctctagactttttttcctttttttaaaccttattaaaaatgagattggtcctaaaaatatagaaagaaata

SEQ ID NO: 19410 - DNA, 1185 bp, Mus musculus
agcaaatgctgaagtattttccaaggtagctggaccactttgcccgctttctggcagtctggatgttggatgcacacatgcgttgggggcggtgtgtgtgtgtgtggctgaattggggaggctttagtgggaggtgcgtgtaggaatgcttcagtaactttccttggctgtgatacaggagagcaatggccagcagaatcaactggcagtggagcccccctcagaccacggggtctatcctttccagttcagcaaataatgaggtaagaactttatggtggggaatgctgctatgctatgctgaactggaagatggtgcttgcagctttgttctgccaatagccagacaggttaattaatagtcgtgtcctcttcgtatcgtctccagctaatgcctcctttaggattctttccccccatctttgttaaacagaaaggaactcttggagatgctcacagactccagaaggtttagcaagttacaagcctagctgtagcctgctgagcactaacacctggctgtcattccctcacaggtccagacctggggagagaagcctatgcagtcctccttgggctccttcctgtggctgatggaacctgaggaatcacgttggtttttttttttgaatgtgctacattcaagatcaaaaagacttttttttcttttgcaaaagaagtttcttgctttgtatttaattgcagcgaacctttctcctaccccaaagacaccagttgaggtgcttctcatcttcgagaggtttgggtatgttgggcttttaaaatggtttaagaacaatcgcagtgctgtgaagtcagtgaaggggcgctgcttgccaggttcagttagggactattttcaatgtgtgttttagatatgcaggcttaaaacttttgttttgcaaagctctcaacacacactttgcacacacccacccacctccctcccacgcactgtttaaggcagggtctcacagtgcagtcctggctggctgacaatgtagaccaggctggctttgaactcagcgatccttcccactctgtctgagtgcaccgccatgcctagctagttgtttttttttttttggttttttttttttcaagacagggtttctctgtgtagccctggctgtcctggcgctcactttgtagaccaagctagcctcgaacttagaaatccacctg

SEQ ID NO: 19411 - DNA, 1195 bp, Mus musculus
ccattagggcctgggctactcagtcagcgagtgcgggctcaccctgcatgacaacttccagcactccatagcagtcagacacggtagaacttttctgcagttgtaacactgaggcaggagaatcagatcaaagccattctcagacacagggtttgaggccaggcagaggtatatataaaatacacacacagagagatagcctgtgtttaaaaaaataaataaaaaggaaagctaggtgcctcgaaatgaacatgtaggacataaacattctccagtatttgtgggtctaggagcctgtgagtatgtgtaggacacatatcccggacaggtggtcttactcctcatgtgcgtcttaggatggagtcaacagagaagtgtgaagccatcatcacccactttaatggaaagtatataaagacaccccctggagtagcaggtgaggcctctgggactcgggctgggagccattggaggaatgggtactgccccgtggcccagcaactgtgtatgttttctcttgacagcaccttctgaccctttgctttgcaaatttgctgacggtgggccaaagaaacgacagagccaaggaagatacgtgcaaaatggacgggcctggccaaggaacggagacatggtaaaaagatccccgaggaagcacgaaccctgagagcattagagttggaaatggcgcagcctggcttctgtgcgtgtaggtgggaagcttgagagtaagatgtgtggctgagccctggtgtctactcgctctttagcgcagtccccaaaacctgtcatgggacatgtgggtattctgggctggcaatatggacactaccttctttcttacagggcggtatggccttgacctatgaccccactgctgcccttcagaatgggtaagggtgtttcattctaattttcaaacagcagttagtggaggtggctctggctccccgaggcttctcactgaacaaaggcctctcctgcaggttctacgcagctccttacagtatcgcccacagcaggatgcttgctcaatctgcgctagccccgtatcttccatctcctgtgtcttcctatcaggtgaggtgtgaggcttttcctactgtgtgtgttaagtgaacgaatgtaaagcttttctatatagtacacacaaagaaatggtatgttggagcataacatgtgatttttatgtgtg

SEQ ID NO: 19412 - DNA, 1196 bp, Mus musculus
taaatatatatatatatatatatatatactatttcatttatttctttttgtatgtgcatatgtgggcatgccacattgggtgctggggtcgggggagaaaaatttttggtagctggttctctccttctaccatgtagatctgggaactgagcataggcctggcaacttactaagacatttttcaggccaagtttgaaatcttgtagctgagatctcagggaaagaaagcttcaaatcaaaacaaaacaacaacaaaaaccattgtcttttattaataataggttaattgtcttttcataataatcagaacttgttcatggagaaacagggttacatttgaaaaggattagacctaagaattcttctttctagcttgaactaagcctatgaaaaccaaaaccaaaacagaacatcccgggcattaggacccagtggaagtggctcgttctgactttgggttaacttctctcagtgacgtaaggagcagacctagctcattcttccccgcaggccccccccccactccctctctctctcttgcgtgctccttttctcctctttctcctccccctcccttctcccttccctccctctttccctcccttcctctctccctctcctttccccctcccctcctccctccctctttctccctccctttccttcactctcttctttctctctctcagctccgtaacagtaaagaaaaaatgctgctatcagtgacttccaggcctgggatttcgacttttggctataacaagaacaacaagaaggtaggaaaaaagtgcttttggggaatcagctacttcctttcctagggatccaggagcgcccttggttttagaattctcctttaagaggggaacgagattcctctgtcccccttcagcgcctctccttccaccgcgtctttcctgcctttttgcacctggttctggagttaaaggaatttagagcagaagtttgtgaggctggaggaggcagcggaataaaaacaaccaactttgcaagtttgtatcttctgaaacgaagttagtctgcctgtctgctgctgcgcccatggtcccggggatagtctgacaactcagaccttgtccctaggctcacacccggcaagattattttatcattttggttaattgcatccacccttacccccacctcacttcgctttttactcaacccaccagata

SEQ ID NO: 19413 - DNA, 1583 bp, Mus musculus
ccctgaatttggagcgcttccgggagtgggcagtggtgctcggagacaccacagtcaccagtggcagacactactgggaggtaacagtgaagcgctcccagcagttccggataggagtggcagacgtggacatgtcccgggacagctgcgttggtgctgatgatcgttcctgggtgttctcctatgcccagcgcaagtggcacagcatgttggccaacgaaaaagctccaattaagggtattgggcaaccagagaaggtggggctgctgctggactatgaggcaaagaagctgagcctggtggatgtgagtcggatctctgtgatccacacactacagacagatttccggggcccagtggcacctgcttttgctctttgggatggagagctgctaacccactcaggactcgaagtgcccaagggcctctaatgtggccaagaccctgaatcgtgctcatggtcagctttctgtccttagtgtctaaagcgattttactttgtttcaagcaactggtagctctcacaattctgttgggatcctttgtgcaatattgtagccatcttcccctgggccctactctgtaagagctaggtatacagccaaagtcgccagtttcctaggtcatcaggggattcgcctcctcaggccagttctttgggtccttctacttgtgcccacacaccttagactgttcagtcctgcggtcctgcctctcggcccgtcccttatccacatgtaacttgttttgggggctcaccagattctctagagtaaatgctctctacctctggctggaggagtggcagccacaggcttggccttttctctgatgcacctcagattcttgggttctggcttcctcagttgtacctcagcactagagatgtcagtccaacccagatgcagctatctccactctgagtccatctgtcttctggatacctgatacctaggcagtttgccataaccattgtgccagttatgtgacaaagggaaagagacactagggagacatgtatggctctggtgccagaaacgttaccctcgataagttccttctgtgtatctgccacagttcaaagctccagaaaaaagacaactttacacaatccattttggagcctgttcagacccacaactcccatctcccttggccacagaatgtacttaataaaagcagtattttggtttgaggaaaacctggtgaaacagttgaatatgtatgcggaatattcagtttggacttgtctgaccctgggtgctacaatggtgataactgatgatgtccttaggggagaaagagaacgactaaatttagcaaaatataaaataaaaattataattcatgtaattaaagtttatttgaacacaaaatactctgtctataaaattgctgtcagcagtagcagcgtgtcctggctaagatggacagatctccgcagacttctaaagccacgtggtttggctctcacccatttctcttactctgcggcagatacatatgcatgtagctagaggctctccaaggaagttgcttgttggcatgatgatttcttcagagaggaaaaggggacctgggta

SEQ ID NO: 19414 - DNA, 1179 bp, Mus musculus
gtgtgtgtggggtggtgcagtgactcattctctccactagggttcagtcaggcccagccttttcagccccgtaactgtagagatgcaggttaactttttttttccccttctaattacaaaactacttttaatactttgaggtatgtcgcatacctcaaaactgggaagagtaacctcactttccaggagtggcccagggtaagagaggaaggaaacacgagagggacctgctgcagacttgcaaatgccgaagggaaggaactgtatagcacggtgggaaggctctggcgcataggcgaagaccaagagggttggtcacgaagccgttctcgtttgcctttttctgtttctgctgcacgacctccgagtctctccgcctgcgggcggcagaggaaaccaatcgttatcccggcgcttccccttaaccgagtcgctctccttgctctgggagagctcgcactcaggtaccgcggtcctgaagcagctcccacctgcctcgtttgcatcccatcttcctcttctattgacttttaaacgtcggagcaaaaatgttgagggaatttcctctagagaggttgtgcctgttctgctaatgcttcgggtgtggataatgaagagggaatggtttcagaactgggtctctgaagcacctatagacttgcgccttcttattccctgccctcatcatgaccactgagctgtattcctggccctttttaagatatggttgtttgcttgttttaatttgtagacgaggtctcacgaagttgacattggaactcatacacactgtagcgtagggcagcatttgaactgtggacctttctggcggagcctcctgagtctggattataggtatgtatcgccagtggaaatacctgcattattttatactcattcagagagtagcttcacctgtcatttcttatattactttacttctaccatcaaataaacttaccttcatcatttagatgatctgtgtgccttatttttttaagatttattttatttttagttatatatgtggggcgggggagtcataatatgtacataagtacaggtgtccttggaaactgaagagaccaccagttcccctgagctggagttatcgtggttgtgagtcctgggaactggacttaggttcagtatcaagcacagagccatctgtccagccca

SEQ ID NO: 19415 - DNA, 1190 bp, Mus musculus
ctggagaattccagccaaactgagctccacccagcttcggagggtggctgcttctttgagtcagcaagaaaacgaggaggaaagggaagaggagccagagccaggagtccccggagagcagggtcccagtgaggagcaccggacagaagccctgagagcccttctgtcagcccgtaagaggaaagcaggcctggggcctacagaaggtaaagtgccatggcccccgcttggtgacttactctgtgccaccgtgtggcgtgagggctgttgagacgatgcagggccggttcccgactgtgtcttacatcactgcagaggaggccactggggaggaagaatggaactcagcgcccaagaagcggcaactgctggacagcgacgaagaggaagatgatgaggggaggaggcaaggtagggactcttgtcttcagtggagacactggccatttgccttatccttttacatacttagatgctttccatttctgtctcttacctgtcattcccatggcagcagtgtcgggaacgccaagagtccacaggaagaaacggtttcagattgaggatgaggatgactgaaagccagatgtgtttgaccgatgtgagttggaggcacaaaagctacttttgcctgcgttggaagcaatcttctctacattgacagcccaggaattttaggcagcagtgttgggtggagtctttgcggtcagtccttgccccaggttcatcagcgtgcacagccggtctctgggtccgtctcgtagcaaatgaagagtggcgaaaggttcaaggtggcttgtcctcctctaaggactgcgtcttggcttctgacggggagctttataacccagcacggttgttcattctgtcctcacaaagcactggattgctcccattttctttctttcatcccaggacacatgattgaacccgtttctacagttgagggagagctgggatgcaccactctcaagctgacaagcatccctgatttgtgtttcatattaaatgtgtacaattaacagttgctcatctcagagcggccagccagccatctgttgtgtcttcggaagaacttttaagagtaaaattaaaagacatgtcctgaactgagcttggtagtgtgagctaatcccatcgtgtgggagacagaggcaagagaattgccatgagggagaggaaagagtcat

SEQ ID NO: 19416 - DNA, 1185 bp, Mus musculus
agctcagactccaatcactttttattacagcataacttgcgaaaattcagccgggatattcaggtacttggaagagccgggaatagtggcatgcagctggcctttaagtatagggtaagagctggggtacagagtctggacgtggagtgtccctagcagagtaaaggactgaatttagattcagggactgtgaaggaggaaaatactaaagacactgaaggcagggtctggattggcaggtcactaaggtagttaaatgggagcttgcctctgtttttcctacttagacctttcccaatggccctacccagttggctgagatgatctttaatcttcttctggaagagcaaaggattctgaatcaggctcaaagagctcaagaggtaaggttagtgtgatgttgacattcaaaagcccctgggacagcaaggtgcctggaggagagtcagggagcttgtctcagaccaggatctcctccaccctctgcggtaaaatttcaggccctgattttaaggatgaaaactctagagttcatgtgggagtgaggggatgtagcccacaccgttaatcctagcattctgggctgcagaggcaggtggatctctgtgagtttgagccctgcttggtctatgtagtgagttccagaacatccagaacatacatagagaaaccctgtcttgaaaacaaacaaacaaacaaataaacaaaaccacacaataacaaaaaaacaaacaaaaaaacccaaaacctgacaaacaaaaaaacaagtcagagttcaaacacactcggaacctcttacctcattcaggtgcagcccccaccagcccccgaagcagttgtggagagccagcagcttgagattgaaaatcgaatccagggtttacatgtggacattgaggttggcgggtgtggcaagtgctgggtggggaggactcggttttcctgccctcagaagcagcctcactggggtcccatctcctctacagttcttggtgagatccatcaggcagctgaaggacgaacaggatgtcttcagcttcagatacacagttttcagtctgagtaggtcctctcaatgtgggaggaggacaggggccatttttggggtctaggggaaggacggacaacagaagctaaatgatccagagagcagtggtcacatatggccggtggtagtacagcatc

SEQ ID NO: 19417 - DNA, 1148 bp, Mus musculus
gaacagacactggccataatctttctaggatcctgaggctacctaccatgctgggagacgcaggggtcttgagggctggtcaggacatttgcgaggtccttagagggtctggggcagtggtgtctttcaggttggaacgactttaatgttttgataattggctaagttggtgcaaagcagcatcgggcctttgtggggagttcagacatgaatggaattctgttcttcctcctccattgctaccctgggtcctgtcaaacccagagccctgcccgtggtaggcaaccacggtggccctgagccatacctgggcccttcagttctctcttccagttacctcaggtgtactcccttcgctcctgactccagttctataaatttccttctcttcctatagaggctgagcgctgtctgcttcagcccaccatgtaaaacagaattcatgctagcagctcccttgccatgatcaattccccacctacaaagtaatcctgacactctcatgaagatgtgaagctctgctgctctaggccatgccgtctctacctcccccagcgcttgagagaatcactcctggaggtttgaatggtttctgagcacttgggaattactccttatagtactcagtagagctgagagcttgaagagaacttagctattttattattttatgaataagagggcatcatttcttttgcacagtgttttgttaacatgaaaggaaaaaaaaaaacccaaaacttctgttccttaggagtgacctaggcaaggaccaggttccttgggtctcagaaccttgaaggtttatcagacatctttatgccttagccattgttggggaacccaggaggcaattgccttgccgctgctctacggtgtgcttgtggtacaacttgtgggaaacgaatgtgaggacctgcactgtggccgttctctaacggcgcatcagaacagtccaggaaggggttaataataactgggacaggggacagcagtgccatgcccagcctcaaaggcggcacgagccaaccaagaaccaaggaggcagacaaagaagatacacacaggagcagaagctcaaggagccagaagcaaaagtcgtgagaaaaaggtgcccggccaacaggtgaaattaagaaattcagcaa

SEQ ID NO: 19418 - DNA, 1135 bp, Mus musculus
tcatctactgtgtaccctcccttgtaccactgtcttctctgtgagctccattgctttactggagtcccgctttgtatccagcgctcacagatcgctcctcccacccccatctttccccactcccagtttccgcaccagctctcctgctcacccccccgcccctgcccctgcaccagctctcctgcccctgcccgcaccagttttcctgctccccctgccccaccaccagctctcctgctaacccctccaggtgctctatttcttggagcctgttcgctgtctgatccagaaccacctttgccaaaaggagttctgcctagcgtgcgagctcggcttcctcttccacatgctagacctctctcgtggcgatccttgtcaggtcagtcctccgagacctgggacactcaaaatggcaagggacagaaggtggatggttgaaaagggcacatttctgtcaacataaccctcttcttccagggcagtaatttcctccgagctttccggaccatccctgaggcctcagctctgggtctcatccttgctgactcagatgaggcttcaggcaagggcagtctggcccggctcatccagaggtggaaccgcttcatcctcactcagctacatcaggatatgcaggagctggaagtgccccaggcttatcgaggtgctggaggcaggtatggaactggacaagaagaaagcccccaaagccagccccctgggactcaaagggtcttctaatgctcggtgtgtgtgtgtgtgtgtgtgtgtgtgtgtgtgtgtgtgtgtgtgtgtgttgccctcacctctctcagcagtttctgctcatcaggagactccatcattgggcagctgttcagttgtgagatggagaactgcagtctttgccgctgcggcagcgagactgtgcgggcctcgtccaccctactcttcacactctcctaccctgagggtagcatctgtggtataccctgcacctgggttgggaggctccctcagataacttgtaacaccacagaggggtcttggggggaccgtgggtagaggagggagcctggagtgaagtgtcaagtttcccctcagataaaaccgggaagaactatgactttgctcaggtgctgaagcgaagtatctg

SEQ ID NO: 19419 - DNA, 1178 bp, Mus musculus
gccaaaagatgggacctgaatggggacagaactctggggatattaggaattgtgtttctctggtgtccacattaacctttgtgacataggaagaagcagagttacgcagtgatggtaccaagtccaccattaagccaagccagatgtcagtagcaaggatcacctgtgttcggggccaagggcctaacgagggcatccccttcattgatgactacatctccacgcaggagcaggtgagaagatatgaggggcattgaagtcaaccctgtgcttccatagagtgcttaagaaccctaagaagagtgactggaagagaccacaccttctccagcccagagatttgtctttttctctactcctaggtagtagattacttgactcagtactcggggataaagccaggagaccttgatgccaaaatctcctcaaagcacctcacaaccctcaagtctacctacttaaagcttcgctttctcattgatattggagtcaagtttgtgggtcatggtctgcagaaggacttccgggtcatcaacctcatggttcgggcagggcttatttcagagtgtgttttttgttgttgttgtcttcctttgtttcttgtttgggttttgttgttgttgttgttttgacacaatgtctcactaagcagctctggctgccctgtaactagttaagttaagcagaccggctttgaactcacagaggttcgcctgcctcctcctgagtgttagaactgaaggtgtatattaccatccctagcacccccctccctctaatatacagccttcttccaacccaacttgctccgaccatcttcattcactcaccatactttaaaaaacaaaattaagtttatttggtgtgtgtgcgctcatacacacctcctcctgcaagtactgagttacacgtgtagaggtcaaagatcagcttgtgcacgtcaactctctccttccatctcgtgggtcctgggaactgaagtaaggttgtcaggcttggtggcaaatgcctttacctgctgagccaccttgctgacctcggagttactcttctggctgactactcagggcatatatctgaattcagagaatgggaggttctggatcatctgtctcaaggcttcttttcttctggtccctgctaggtgcccaaggaccaagttcttgacacagtctacc

SEQ ID NO: 19420 - DNA, 1204 bp, Mus musculus
ccagcttgggatctgggtcaattctctgtcttcttggtccgcagtgtgagagcattgtggaagaatacgaggatgagcttatcgaattcttctccagagaggctgacaacgttaaagacaaactttgcagtaagcggacaggtgagcacccccgactttccgtcccacgctcacagccctgtgtaactcggcttgcggccctgaccctcgccacacagaatgtgtggccacacgctcagacctctgacaggtgtcccacactgctggcttccatttcccttggcttagggtttggagtgatttctctccagtctctgcctaatagttctcagagtatgtgtctctgttaccctgggttcaggagagggagctgtgggaggtggttggccacggtgattgttggttggcgcgggtgctttctggtgaggggtgtatgtgtgtgtgagggtggctgtttccttcacactgttacgtactatttgcagatctatgtgaccatgccctgcacagatctcacgatgagctatgaatcactggagcaagcagcctacaccaaacgtgatggaacacccccaggaggggaagatggcagcattgccttttatattacgtttttatggaaatgaactgaaaaaaactcttgaaaccgaaagtacaaactgtgttgtcttttttttttctcattttggttttttgagacaggttttttctgttgttttgtttttttgttttttatatagccctggccatcctggaactcactctgtagacaaggctggcctcgaattcagaaatccacctgcctctgcctccctggtgctgggattaaaggcagcgccaccactgcccggcactgtgttgtcttttatgcccaaaggcagcctttgtaccaggcttgaaggttgggggctacagatgggaagaaaatgaagggatgggttgtaatagcgtacatttaaaagggccctggcccattaattctctgtcatgtggaattctgttcacttacaaactggagatgagtatttattcagtgtgtacttaatgatgtgttagcagctgtggtgctgtggagaaagagcctgaatgacagcacaaggcgctgggaggtccctgtactcctgctggaaaaacattgaagatgggaactgatctggacggaagtaatcgagcaatcgagctgcgttcttttgttcttttctct

SEQ ID NO: 19421 - DNA, 1232 bp, Mus musculus
gtcagtatctgtaatttcaagatttcttctgttcacaaatgaccatcaagcaactaactctggcatcatagcgggctttctgcgtgatgtcacctccacggccatgaagtcattaaccaaagacattctttaagaaagcatgccaagcaggtagaggaagtgcaatggtcagttgcagtgttcagtgaccttcaaacgtcgcgtgctggagctttatcttcagcattctccggagaacccgaaatgtgttaagggcaaagggaaaagccaaagaaggaagttaactgagttctcaggcacatccttagacacctacaatccctttcccacccactcctaattagcctaatccgtacggtccaatcctccccgcgataacatctgtcaaaggctcagatcccgcccctcttccattttgggccaatggtcgaggccggggtgggtcgccggaggggggcgggctcaagtttcgggcagagggcggggcctcgccgaggaccctgggctgggcgcctgtgccggtttgtctacccttcccctcagccgcctcctttcaaccttgtccgccggttggcgcggtctccatcacagcggcgaccgctcctgttgcagctgtagctctctcccttcggtcccttcccgccaggtcccggagtttcgcccgccatggctctactcactgcagcaacccggctcttgggagccaaggtgagcttaaaggagggagcgcgccgtggcgcgcggggtggggctgaggcgaccgcagggcctccggcaccggctctccctcccacaccggagcgcagccctccgcgccttaaaggggcccgaccctggcgagccgccaacccttcccagagctcctaggccatgtgctgcgtgcccttccggctaaggtgaacgctgccggccccggcctgcagcccccggcggccgggaggcccgccttctgtcatatcaagtatccaaggtgcaagcgagggatgcagggccctggctgcaaggccagagagcaaagatgtggcgtggtcccccgaattagggagagaactgttggaggaggagtgggggatgtataaatatgctcacttggtcactggggctaatttgggctctgctttgtagggtgagtcctgtcaggacctgtttctttcctcactgtaattgaagcctgtaagtgaccccgccgttttagttttgttaggggactagagccccccagctcctctttg

SEQ ID NO: 19422 - DNA, 2392 bp, Mus musculus
ttatgtttggagatggggtcttttattgaacctggaggtcattgatgccactctgtggtaacaagcttcaagtggtcctcctgtctccaggatttcggcacatgtcacaaccctgacttatgtataagttaagaatctgaacttgggccctcagccttaactggcaaacattctaccaactgagctgtttccttggcctctggctttaaatacatagattttcaggtctactctaccaggctccaccagagcaaggactcttctgcgtccgtcctcacagagccctttgatgtacttgctgtggcaggggctggggttgagcccttgactgacctgtgactactttccctggtggtctttttatttaaggctgactgggctaagaccgaggaggacgggtgttcccatgttactgtgtatgtgcatgtaccactctcacacaaggcttcccttctaccttgacagtactatggcatgacggagatgaactactacacagtcctgtttggagtgtctcgggcactgggtgtgctagcccagctcatctggagcagagccctaggcttccccctggaaaggcccaagtccatgagcacggatggcctgatgaagtttgtggactctaagtaagggtaaaatgggagactggggggaaactgactataagaaaacgaggaagcttaaaaataaagtgtaattttgttttgtttcaggggcctttaagacttaagattaaactgtatctgaggcactgaaaatatatttgaagttaaaatataaattaagacttgaaagacaaaagtgaccccttctcccctcaccagttcacctccccctcctggtatgagctgcccagcagctgtaggatgaccgggactgaagcatgtggtcagggttagatctgcctaccaccatctctagagcaagactcaggctcctcctctttaggtcagagcaggttacagacaagctgcagtcactcatggagctttgtttctatgctgccacccccaagtcatctacgccagggacaggcccctttctttccatagaaatcatgttggatgccagctgtgtccaacactagggcctttcccaatgtacacaaacacctcctacctagcaagatctcttggttagctggagacgctttggcaactttttatgctatcagatgatcttaaatggcgtagtatttattgtgactggcacccaacatttgagttatttctccttttaaatttataccattaaagttaaggtctggggagttatgtttccttccaggcctctatacctgctgtgcctcaagctgaggatgctgggggtctccctgtcctgaactccactagggtcctctctcagcaggtctgtccgacctgtggtcttcctggtcgtttggctttatcagtacttaatgtgaactaggtcttttacttccatggaacataagccactatcttctgaccttggtttctcctgttaatatgctctggcacggaacaagggctcaggaatgaccagcctcttcgggcctggtcccaggggttctagcttttctttttgaacagcagttacacacagttcccactgaatatcagatggatggacctagggcttggggccttcttctcatcccgtgtcaaggaaacggtcctttatttatcagtgtcttttgctcttcccttaagtaagagcccatagcacagcacttattttagcagccccatttgcacagattttcagtgactcagaatgctctactgccttttctttgagaaagggttgagatacactcctgtcctgcccctcctcatcccaaagctcctgcctgtgtttgtatggaacccaactccagcaccaccacactgttgagatggacacactgtaaacccctgggtaactgttaaagtcatgatgcagacttcaggatgttctgtataaaattaaaaataataaatgtttttattaacaatgtttgagcttgctcttacgtaaggcctgaaagactcattgtgaggaaggggtctggttagcaaggtctgaagcagtgattctgagcattcctcctctggcaagctggacatttcagagggaggctgatttccaaagacctcgagtctctccccaaggttaagaagtctttacctttaaccctcttccctcctaatttggacagagacctcacaagtgcttgcctgactaggccaggagctggtctagcccagtgggtgaaaggaacaagaagcctaccaaggacaaattagaaggacactagagggcgcttgtggttagtgtgtctccttgtccttttccttaaggaggcccccaaataagggtggtcctcagaagcactagatacatgggaagtctaagaccatatgaatctgtc

SEQ ID NO: 19423 - DNA, 1207 bp, Mus musculus
gtacccccaaaaccctctctgtggtcttggaaggggtcccgagaggcggggtgaggccaggccgctgggctggagtgcgcacactgtgtatgttatgcacacgagtgtttctttgtcaatgactccagtacctgctccagtgggaggccccttcctccttccctctcagccgtttctcaccctctccccacacccaatgttcattccctgcctccccttcccaccgcaaaggaaaatagccttacagaccctagcccagaaaccctactccaggggcgagccagtgtggccccatcctgcccgccaagtttgagccctgtcttttggggaaggcagggagcagagcagcctcttcccttccgtggtggctccgccctcaggggccttagcctagcttgggtgaggacagaggtgaggaatctttgaggaccaagccccgtggtctgggaagagggaggtagaggaagaagggtctgacttggggactccctcctcccaacccaacccctatagagaagcgaccaaattcccagagatagaagggagttggggtggggagggtctgctccttgaattacttgaaggtactgactccgaggctgctgttgcccacgtaggtgtgagggggacattgtcactgcgtttgggagggccgaggacggcgggtgacgagaggatctaccttggccctcgctcactcctgctaggccctttccctgggccctcctgtccccaccctcactctgggcacccctccagttgcactaaagtagctgttgtgccagtcttacccacgccaggtgccagggtggggtctctgcttccagtccttcctcccgcctctgctcccatcctggacaatcttgttcactcgtattcctggatagctcagctttgtgtgtgtgtgtgtgtgtgtttcgggggtgggggtgggtttggctggagtgggtctggcaggggtttgggaagggctaggggaaagatggaggatagtatctcctacccccttccccaacttcaagccacagaagcctgggagggagggtgcctactctcgctgccgtgtgtcttgcagatgtgccaaaataggggtgggtgggaggggagggtgcctggcagagcagccccagggtggctctctcaaagcaatacagttctcctgctggggaacagcaagacaggggagagggttgggtggggacctggg

SEQ ID NO: 19424 - DNA, 1103 bp, Mus musculus
accagcacatgggggacgacatggtgcaggagccagggctcgtcatgatatttgcgcatggtgtggaggagatataagagcgtaactggctgtcaggaagaggtagagttggaaaacccattgctccagcagctgagccctgacttctcccacagcccttatgccgcggcttgtacctgagccacgtactccctgcttctggcatgaaggactttggggcacttagctcagcctttcagcggagaacccagattcctgccttttgctatattctttcccccacaatgtctgtaaattttcagtcagggtggagaaatccccacttctgtattttcctgactaagatcccctggttcccaaatattttcagaaagcacaaagaaatttgttttccctagaggatcagggtagagtgaggcatttctaattgtctatctcttccaaaaccagggagtcccagcaggcaggagtcccagcaggcaggcttgctgaagtcacgcagcattgagagctgctctgaggagccagcacctggcagaagggctgagggtgtggcccaaaccctctaaccagtgaggccaaagcctggtcctcacgcgcatccctgtccaggccgctgtgaaggtgcaggccttgatgggtgcgcagggtggcccctgtgagggtgcacagggtgggttgttgaaatgttgctgaactctttcctacacgtttcataattaggaagggaaggaaggggtgggcgtgagagcactggtgttcgtacactcagcaggaagctgctgtctggctctgctgatccagaacggcactgcctcaagagggtgtctgtgttgcctcggtggcccctcttcagccctgtgattgcagttagcttgatttcctttggtgttgtttgtttatatttccaagtcacaaaccccatctgttacccagtcttgttttcataggatggactggctgtgtctctctgatctagcccagccacattgttggcaatttaatttatttactttttttttttttaagaaaggagaaaagaaaaaacatcaagaaaacttaaaacctttcttatgccctttctttggctgttcctattgtgg

SEQ ID NO: 19425 - DNA, 1189 bp, Mus musculus
actgtatgttgaatttgttgacctttatcgtgcaccgaatgtaaatataatggaactctcctgacacttaagttgagggaaaggacattcttgtctctctgagtcttccctttcatgcacagtcactgatcgcacagcggaagccacctgctgtgatgcacactgtagttctggcactctggggattgttgagtcagaggccatttgttctgtgtagtgagttccagaccagtctgggcttcgtactgaaggcagggggttggggggagggtatgagaatgattggcagtcacagtgtggagcactgggaagtgagacacgagcctgtcagaaatgctggggccctcctttccccttgaatcagttttctgttttttaatttttatgtgtttaagtattttgcctgtatatatgtttgtgtaccacatgcgtacatgcctggtgttgagctggtgttacaggctgtggtccagcgagtccaacgacagctgtctaccagtggaaattccaagagtccagctcagttcatccatgttcatccatgagactggatgtctcagatggttttcagtgtgtggtgggatcctgaaggcataggctgtaatggcagtgaaggaatgaacttgctggcaagagcaagcaggcaaagagtgagagcttcctttttccatatcatttatataggctacctccaggagatatggcccagattaaaggtggttcttcccacgtcaaatgatttaagaaaaaaatcccccacaggtgtgtccggcctctaattccagatagagtcaagttgacaaccaagactaagcattgtaagtcagatcaatacacaatcatgttttgcttaatttccaaatgaaaacaataaccagctcattattacgcctaacatgatagaattatttttcatacaacacattataagttctaggtctgaagagatggcttagcagttaagagcactgactgctcttccaggggtcctgagttcaattcccagcaaccacatggtgactcacggccatctataatgggatctgatgccctcttctggtgtgtctgaagagaacaatggtgtactcatatacattaaacaaacaaacaaacaaacaagattctagataagtgcagtgtcccttgagggacatttctcatagaaactcaaataggagaaccactgatc

SEQ ID NO: 19426 - DNA, 1115 bp, Mus musculus
acatcagcaaagttgaaaatacttaaatctagccaggtggtggcggcggtggcgcacgcctttaatcctagcacttgggaggcagaggcagtcgggtttctgagtttgaggccagcctggttctacaaaatgagttccagaacagccagggctatacagagaaaccctgtctcaaaaaacaaacaacagacaaacaaaaatacttaaatcttttactgaatgtaaaggtgggagaacaagaaaggaagggaatagggttggtggttttaaatttttaatccagtgaggtggtcctgcaggtgtctgccactgaccctggtttgggtttgatccccagaagcgtaaaggagaaaaacagccccataaagttgtcctctgacctacaggtcatacacacatataataataaaacatccacttcagtgtattatctgaaaaatcacaacacttttgtattatccaaataaatccatatctaatttacatttccctcattttcccaagaaaattattttacaaaaaggatttgtggggggctggtgagatggctcagcgggtaagaacaccaactgctcttccgaaggtcctgagttcaaatcccacaaccatatggtggctcacaaccatccgtaacaagatctgacgccctcttctggagtgtctgaagacagctacagtgtacttacatataataaataaatcttagaaaaggatttgtgtataggtgtttgtgtgtgggtctccgtgtgagtggtgggtctgtacacaagtacatgtgtgtgtgtggggtctgtacacagctttaggtgtctatgtgtgggtctctgcataggtgtaggtatctgggtgttggtctgtgcacaggtgcaggtgtctgtgagtgtgggtctctatgtgagtatctgggtgggtctgttcacaagtgctggtgtgtgttggtctgtacacaggtgcaggtgtgtgtgtgtgggtggacagataaaggtgtctcctagctaatttacatctaaacctggattcaacccaagaaccgcattgttattgtttctcccttcctcatttggattcctaaagggtaaactttgagattttgttggttagctttctctccatgc

SEQ ID NO: 19427 - DNA, 1123 bp, Mus musculus
tcctctgcaagccagccagcctggcattgctttgggtttgaggtccagaggctcggataagcttcatatcgctagtccccacccccaccctgtaactggaaataaggatggggaacaaaagggttcaagaagccctatctatctttttttttttttttaaccaatttttattcttgtgtcttcatggtgtctgggctttttttcgtttttcttttttgtcttcgatatgggctgcttcctcaccaaccccggctaagggttcttttcccttgctttgttttacagcccccaactcttgctactccagccttgcagccagcctgtcagagtacagtggacagcttcagaaagctccactaattctggtttgagtttagccctgaaaccatttggggtctctctgttgggtgtcagactcttgacaaacagctgttgggtctgtgacttgtgtgcaccctcagcgtgaggctctggttcccagttttctgcctttgaccttttaaagggagatcggtctagggtcttggtgtgaagccccgaaggctttgacagctgtgacctgcttcagctttcaagtgcttaactctttgtcatttacttctcccttcacggatctctttatacctcccaccgagaggtgctgactctaattagggtagaggaaataagggtcaaaaggtaaagagaaagtagcttcctggctcagtgaacagaacagaaaggtaggatcccaggtagcaaggtaggtatggtacggaagtgtttgagttcacggattcccggcggttgtcttactacttatttatcaagctgggtgggtggtctgagatccttgctagagaggagaccctacaatgccaaccatgcctggcttcagtagaagcaaaatgtgcaggctttagtttttaagtgagcatgtcctgcctcactcccttgctctcttaacacaccattatggacggaagcctagtctttatcatgtttcccccaagaaatacattgttgtatcacttagagactcaaaggggtttttgtttcccttgagctccatcaaccttcagaatttttacagttggttggaggtgaggtgccgagatagcggtgtcctgccattccaacgtca

SEQ ID NO: 19428 - DNA, 1596 bp, Mus musculus
aaggaaagctcctcctgccccctcaccacccccaccatgcccagcagaggtgtgcagttttatatccaattattatccacggacttctgactaaaagatgtttctaatgcctgggagagagaataggagggaaagatgtttatacgaggttctactaactggttctgagggtctaccccttcagaattactgcatttttgaagtgataacatgaaaatgaaaccctttaaaagggaggttttaaaaaaagacacttcggagcccacaaaaaaagaacttttttaattattattattattattttgaggggaaagggcaggttttaagaggaattaaatttctggggcaaggtgtgaggtggaatagggcaccgagcctgtctccctgagcccttggcagtgctgagtcagctcccctcacccattccagtttattcatacaaatccctcctgctgctcgtcatggttgctgttttaggcccagttcagccaatgaccttttcctccagtcagctttgtgtttgtgtttaagtcacctgcttactcgtcagcgtctgtgtacttgtgggaaatgtagttttcggggattctgtggtaggaaatagaggaagaaggggcctcagttgggctcttcttcctgctttcctagttgtatctgtgagtgcccaacaggcatcagagggggagctctaagaggatggggggcctgcagaccctcaagtttgaaaagcacttaagcacctacttttgacagtgggacagtctgctaacttctgcccccaccaaccaagcctgacagaacccagtgatagctaggagttccccaaatgaggacaaagatttgggagcagtgcagcgtgcctctgcactccaggtcttcctcttcaccccctacttggaggcagacacaattccaggccgcaccagagcctggcccctcccaccaggcgctttgctccttctgtcccagcgtctccttcctctgcatctccacacctttcttctgttcaaagtcttctgtaaaattttctttccttctttgttcttttctttttccttttttttttataaattaatttgctttcagttccatcttgtgggtgcctctgtgttctcttagctgtggctgctaggcagggagcagattgggctggggcagccttcctggagtccctcactggacattcaccagggttgcagaggcccacagccatcagcctcttgccacaagaggccacacagcagtcaggaaggcagcagcggcagcagcagcaggagcagcagctgtcacctactcaagattgagctccgggaagcacatccctacagcgtggacctgaatccttttaaacatggctgcattccttcccttattagggaggaggcaggcctacacctacttctgttgctattggcccctagccctgcagcagacaagacaggctctggcagcactaatatgtcctggcattttagcttcagtaaacattcacaggctttcccacaaaaggcgttcggtacttgggtgagtgggggccaagaatttaacctgaaaaggaatagataccccacacacaaacacacatagctaccttga

SEQ ID NO: 19429 - DNA, 1207 bp, Mus musculus
agggtacctccacgctgtccagtagagggatggaaaaaggacttttgttttagcagcagaatggggcagttagctcaaccctgcccccgccaactctagaatcaccatcagaccagccttccctacaagctggtgagcgttcccagacaccagcaccaagacccctgtaagtcaaatctcagagaccattctaggagaggaggtaccacacccccaaactgcattcctcattgaggaatttctcccctcccaagccagctccatgcagagtcatgccaggagtaaggcagatggtagtagggtatggccagaggctagagcacaggttgggaaggaaaaaaaaacactagggagataactagaggagaggctgggaggagccgtacccgccccatgggcccgtcaccccgacaggatatgcctcacaaatgctgcaggaaggaagagacattaatggtgaagacaagacacagacatggggtgaaggggtcaggcagtggaacagacattctgtttacgtcccattcctagcccaccctccgtcctccatcacccccccctttactgctgtctccccaacagttccctcccaggctggactgagccttgcttgcccctttgactcccgactcccttctggaaccaagtctaggaatacaatgcctctttaacatctcctgaacgaccatttcctcacaggccccagtttatggtctgcccctcaccttcatagttgatgcaaccattgctgtcctcatgccccgccactagcatctctacttcttcctctgtcatcttctcgcctgcagaggaaggaacattcttagaactgagtgactgacgggtgaaatatatcaggtggcagctcagctccagaaaggtcacagacccttacccagtgtgactaggacatgacggatttcagcacccatgacggtgccatttccttccttgtcaaacacacgaaggccttcaacataatcctcgtaggttccctggtccttgttcttggccacggtctgcagcatgggcaggaagtgctcaaagtccagcaccttcacattcatctctgtcatgtgggaggtggaggtgtcagacaagagaagtcacacatgttctcaggacatgacggtagggaacacaaggacggccagaagagggaatcagaactggatgagacaaaacttgctcaagtttggcacctatg

SEQ ID NO: 19430 - DNA, 1185 bp, Mus musculus
tcaccaaaaccacccgagcctttgaatgccaagcttcaatactttatcactgcatttgccccacaggttcggggtgaagggaccggcaccctgggctctgtatcccttcctctctctgagctcctccaggaggaccagctctgcctggaccactggtttgcactcagtggtcagggccaggtgctgatgagagcgcagcttggggtgagtaccagggcaggaaggcttaggctccagagggtgggagatgtcaggagcagccctcgggcactgggaaccatgctgcccggctcaaacctctcctgcccccagatcctggtatctcagcactcgggagtggaagcccacagccacagctacagccacagtcacagctcctcctcgctcaatgacgaacctgaggccttagggggacccactcaccctgcctccccggtcctagaggtcaggcatcgcctaacacatggtgacaggtaaggggctggaaggggaggtaatgtgcaggcaggaggatggagatgagtcacggggttcttagatgcttggtctccctcttcctacagtccctctgaggctcccgttgggcccctgggccaggtgaagctgacagtgtggtaccacagcgacgaacaaaagctgatcagcattattcacagctgccggtgagaccctggccacctgtcctctatggtcccctccgtcctttgccttgaatgctccaatgcccacatccttctgttgcagggcccttcgacaaaatggacgtgatctcccagacccctatgtgtcagtgttgctgctcccagacaagaaccgaagcaccaagaggaagaccccgcagaagaagaggaccctcaatcctgagttcaatgagcggtcagtaaacgggcgtggggtggtgggagtcgggggaaggcttccggtgggaccctggctctaagatctagtgctttccccaggtttgagtgggatctgcccctggatgggactctcaggcggaagctcgatgtctctgtgaagtcaaactcctccttcatgtcacgagagcgtgagcttctggggaaggtgagaaggccaggactaaagctgctggtgccatctggggcatgaccgtgaccctatcctcacacagtggttcacctggggtgtgaccgtaacctcccacagtggtttgaaatgataaaa

SEQ ID NO: 19431 - DNA, 1180 bp, Mus musculus
gggctgctgggctaagggaggaggaggttctgggaagagggtagtgcggcagctgtagttcccgctgctcctttttactcgtacccagggcggccccacccttttccggactgtgagcagccttcgctcgctcgtttgctcagccgacccaggccctcattactataccctgtctcctgggctgaaaagatgcctccctctgaccttgctaagctgagcgggttaccaacccctttggggtaccctccctactcttctcacttagaggtgacaggtagagagaggcagacaccagtcacacttgccattccctggagagaaaagaagaagaaacggtttcatgtgccctaagtagcaactgttattgctactctttatccttggaattaacccaacacctccctacctccgtgtacagcacaggtgtcctttcccactcaggaagaaagagaaaggagctagggaggaaaggaatgagggagagagtgcggaggcttgcgcaggcactagcgcaccagcgcaccaggcctaagacttcctgccagtctctaggttatcagggtttggtttcttcttcaccttcttatactggagcccacgcccggtcccaggggagcagggaaggctggacaaaggaactaggacttcttcatcccaggattccccggagttctgatttgacaggatctcctcctgaaagaatgtacccttctcttcaagactcctccccctccccctccttggccccagaagctgccatttcgcatctctgagctagctgaagcatctctatgtggccccacatcctacccactccccttattaaagaagcctcagtgtccccaagttctaaggaaagaattctcccacccccgggattgtatgcttggatctgtgttgaaacttttttcttactgggcgtggtgacacgcctttaatcctagcacttgggaggcagaagcaggtggatttttgtgaactggaggacatcttggtctttatagtgagttcctggtcagccagggctacatattgaaaccctatctacaaacaaacagaaaaacaacttttttccccctttgtttaactcatagtctcatatagcccagactggttttgaactccctgccctcttgcatttaccttccaagtgttggcaatatatgttcgtgtccccgta

SEQ ID NO: 19432 - DNA, 1323 bp, Mus musculus
gcgccatgagagcgaaggtgagcggctcttaggtggtgaatcgggcacctagtccccgccatggttcctctgcgggcttccagacggtttgcctcgggtgttcgcagtcagggagaggcttaaaattcttgctgaagaaaagatggggtgggaaaatgagggattcggctctaaaactgaaccggtgtcctttgtcaagccctgtgttctgagcagtttcatggccttgcacaagcctgtctctaacattcttttttgtctcctcacatgatcgggtttttttagtggcggaagaagagaatgcgcaggtacgtttaatttttcaagactaccttggggcagtgggggcaagctcggtgtgggatatttggttggaagaaaatatctggcgggaaggaagcaggagtcgccgcccagtacagcagagctggtgcttgttaatctcatcgtctcttgtactcgtgcactaagtgtacgtattgatagatgtgcaaaggaaaaaaaaaaaactcaggtttgtgtgccttccattccaggctgaagcgcaagagaagaaagatgaggcagaggtccaagtaagccagcccgtgcacctacgacgcctgcaggagcagaagtgagggatgctgagggccgggacaagctatcggactgtgtgctgccatcggtaatgagtctcagtagacctggaacgtcacctcgccgcgatcgcctggagaaatgaccgcctttcttacaaccaaaacagtccctctgccctggacccccggcactctggactagctctgttctcttgtggccaagtgtagctcgtgtacaataaaccctcttgcagtcagctgaagaatcaaactgctgttacgtgtttttttgcggttccttggggtggggactcgagtgtgtttctgtataggcgacatagtttgggtgtttgatctggctggagccggttgagtgtgcgcccgaggttaagttacagagttggtgcgttcacagcgccactcctacgttttgggggtaccactgcgtagaacctgacgctgagcggagttccgggtccggcggagtcctgttaccatggtgatgcgcaaggcttgttgggagcttcctgcgcctactagcacgcaagttggaccatagagtgtgtttccgggtctggtagctagagcgtctctttcttccgcaggaagcggaagaaccgtagggtgggcggctctttgtcgaagctagaggaccggcaggcggcagcagcaactacggcggcggcggcaggtgagggaggcgggagacttaggtggaggccgcgcccggaggggaggagtc

SEQ ID NO: 19433 - DNA, 1323 bp, Mus musculus; identical to SEQ ID NO: 19432

SEQ ID NO: 19434 - DNA, 1998 bp, Mus musculus
accagtggtccctttgagcctgacctgtacaagtctgagatggaggttcaagatgcagagctgaaggttagtgttgaatggaatatgaacatgggacatttgtggacgtcctggaaagatttccaaagtactgcactttatgatcccacattgctcaggacgcctgcttctgttttccaggctcttctccagagttctgcaagtagaaaaacccagaaaaagaagaaaaagaaggtgtgtgatgttaataatgggtgggttgcaagctcacctcctgctctgagacaccagcatacaaattacttgtctttctcctgtctgtaggcctccaagactgtagagaatgccaccagtggagaaaccttagaagagaatggagctggggactgaggtgggtcccctccccagcttgtcattcctgcctcaccccctcccaccgcaccccaggctctgtcaagtgcagttcgtcttctccacccaagactaccagcagagcggggggtcttcagccctcatcccggtccccaacccacccacccactcctttcaacaaaaaaccagctccgactgactctggtgttgggaggccaggcttcccagccaccgaagactacttttagtagaaaagaaattgaataataaaatcaggagtcaaaatccaccgtcgtcaagcccctctttctagccttttctactccgcttggtcaaggtttgtggcccaactacaaaacagaaaggaggtgaggttatccaccagcatggaggcctggactggggattttttgtcactgacagcatttctcactcctgggggggtttgtttttcttttctgtttccccctatctgtcatcaagtatttaatctgccctcaaagagggctggctgtggtggcagattccttgtgacctgcttaggcagggtgtctgtttaggcccttcctatttctagaagctgaattctccattaagaagagatttttttaatctattgaatggatcctcatttgtaaaaatttttagccatttttgttctgaacagtccctcaatccttccacccattttcacaaaattgtaagtaagtcataccttgtttcccgccatctgggtccagtgcattttccctcacttgattttaggccctacattgaacatcccagtgggttttttcccctgtttaaattgtttggtgtgtaaggtggggtggagttggtttgaaacagggtctcgctaattccagctggcttcaaactatgtcaaccaggctagccctcacagagagcctcctcagtgctagagttaaggtgtgcaccaccacacctagctacctacttttgagtttcctctcttgaaagaaaaaccaggaagcagaggagtagactgaagagaactggctttctgaagctgtggacttggatgcttgctggggggttgtagagaagttacaatttgtacctctggcatgctgtcccagggaactaaggctgaggtttttgaaatgacatggcattaaaataaatttggatttgctcactgttgtgtgttctctttgtggtggggatggtatagtttatctaagacaggatttctctttgtagcctagctgtaggccaggctggccttggactcagacacacacaccacacacacacttgcttcctgagtgctgggtctaaatcactttaagcatcactgtcccctgggctgtcttagcttttccagttctttgatagaggttggaagcattgtcactcaaggaagtgatgatcaactgaagggctatctgggcttacaagtgggtttggtttggttttgtttttttgagacagggtttctctgtgtagccctggctttcctggaattcactctgtagaccggtctggcctagaactcagaaatcaatctgccttttcctggggtccttgtatagaccaggctggccctgaactctccggtctttctgcctctgccaggctcccaagtgctacaattaaaaccag

SEQ ID NO: 19435 - DNA, 1180 bp, Mus musculus
tatccctgtagctggtaccataggttttatcctgtctgcaggtatgctgtcacaccaattgaagcagcatgtgattgatggagagaagacgattatccagaaccctacagaccagcagaagtaagcccagccccgtttgtcttttgctgtcacatgttgtctgtctaggcccctactttgatcaagatgacctccaaactgctacaggtcactgtggatcttccttgttttctttaaggatcttaattattatgtctgtgtgtctgtctattcctggagcaagtggcacacctacctacctggtttgggtgatgagaactgaactcaggtcctgtaagaggagtgtttgaggggcagttgtcattgtgtgtgtgactggcctagaacttgtagcaatgcccctgccttctaatgctaaggtcacaggcttgctcccctatatctggcttttgtactcttagggttccttctctgttccttttaggaaggaccatgaaaaggcagaatttgaggtgcatgaggtttatgctgtagatgtcctcgtcagctcaggagaaggcaaggccaaagatgcaggacagagaaccaccatctacaagcgagacccctctaaacaatatggcctgaaaatgaaaacttcacgtgcctttttcagtgaggtggaacggcgttttgatgccatgccgtttactttaaggtactacgtgtggcaagagcagtactgggaaaccagtctgacactgtttgtacacccaggaatggtttcccatcccttggccctccctccttccctcccttgctctcctgcccagacttgtagctcctgaatgaatgcacgtcccctgttccacccatctccttgttgaatataatatggaacaaccccaaacataatttctgcacaaggatggcagtgatttaagaacatgctgagtgtggtggcagatgcttgtgatgtcagcactccaggggcggaagatcaagagttttaagacagcctgagctacattgagcaaaaccctgtcttgaacagcagggccattcaatgtgcagttgcagcccaagaactgtgtaagactgccaacctaagttcaacccctgaaactcatttaagagtagaagggaaccagcttcacacggttgccccctgacccccatctccagtcatacatggtaatcc

SEQ ID NO: 19436 - DNA, 1165 bp, Mus musculus
aaaacgtacacacacacccactgaccctagtcctatggctccaggctccaccctgttccaccctgcccagcggcctctcaacccttttctccctgtagctccacccctccccgcttggcccgcccctcgctgttacgagctcagggtcggcgtgaatgagaggtttttcccggagagaccacgctttccctcaagctccccaacggctccgccttcccgccggggccagactcttcccagcgtgcccggcgattccggcgtgcgcagacttgggaaggcaagtcctcccagggcctggcggacgggcgcgaggagcaggctgggaattgtagttctagagcccgcgagggcggctgggaactggccgacagcaggactcattgtcccagtgtgccctgcgcctcagcccgcgcgctcgcagcttctcgctctctctgcccgccctcccgctcccttgcttgctcgcgctttcctcgcggatcgaagagactctagctacagcctgtggctgggaagggagacggaggccgcagctcagggaaagtgaagctgcagtagtagcagtaggaagatgtcgggcgaagacgagcagcaggagcaaactatcgccgaggacctggtcgtgaccaagtataagatggggggcgacatcgccaaccgtgagtgcggcctcgggggtcttggagtcgaggctgagagggagaggtttggggctctctccggagggctgtggcgtctgggtcttgccgagtgagccaccgaggggcgcgtgccgactgccgggggcgacgtggtggggagatctggtgtcgccctggggactgagcagccatgcctgggctggagagtggaggtgcgggccggcgaccgcgaggagtacagagaggggcccaggcatgctccgaccctgggcggttggtaaggaggcaaggcgcgtcgtcttctgcccatacccttcggtctgtccggatctatgctcccgactggcagcagtgaggccacctcgaaaaggaagcggccagctgttggcgacggaagcgcccctctgccagtcgcggctcttgacccgcgggagctgagccggcacgtgttgccaggtccctgtgtgcggatcgatggctccccacttcctctcctaccgtgcttccccaccacgtgctttgct

SEQ ID NO: 19437 - DNA, 2283 bp, Mus musculus
tctccaagctccccttaattttttttatcttctctgatgactcgctcgctcccattccttctggttatttctatgaagttctatatatacttaagagtttctctcaaccataggtacatcctcttcccgggaaggcaccctttcgtcagtaggtctcagttctgtgctgggtaccgaagaggaagatgaagatgaggagtatgaatacatgaaccggaagaggaggggtagcccggctcggccccccagacctggttccctggaagagctgggctatgagtacatggatgtgggttcagacctcagtgcttctctgggcagtacgcagagttgcccactccatcccatggccatcgtgccctctgctggcacgactccagatgaggactatgaatacatgaaccgcaggcgtggtgcgggcggttccggaggggattatgcagctatgggggcctgcccagcagctgaacaagggtatgaggaaatgcgagctttccaggggcctggacatcaagccccccatgttcgttatgcccgcctcaaaactctgcgtagtttagaagccactgactccgcctttgacaaccccgattactggcatagcaggcttttccctaaggctaacgcccagagaatttgacctcggttccttgagactcttggggaacatttgatggcagctagtgcctctttgagggtaacccttcctcacccctttctctgaggtcccacctccatttctccaagaatgccatctagttcttggagatttgtcaacatatcgtcacaaactttttgcggtacatagccggctgtgcactctcttctcttcccaagcctaggaaagagaagtttccctgtgtctctcccttcctgatcccgttcctcagggagactccctggagatatgaaggattactctccagaccctttctctcaggctcttactcattgggattagactcttaaactttgcctttcttccccaatcagactctaaagaaggggagatgaaagagaagagaaaaagtaagacttttgtttatgagacttttaatcccagaggaagattgagaagctcaaagctttgaggagtgaagttaggagtaggtaccagtgactacgaactgaacatgcactgtgagccaggcatcctcatactgaaccccacctacattgtctcagttataatctttccagttttgtgaggtagaactgatcctgtttcaccaatatggaatctgagtgttccaagatagccaacaggtcccggaatctttgaatagtactgaatcctgtagggttttttttttcttttaatatttttaatatttttttaatattcagtaaacaaaactgaattctgtgattagtgacttttccatcttaactaagaacttattgttctttttagtttgaggtgacacagcagaggttgtactgatttttctatttttctaatttaatggatttgttattatagacattacaacccccccccccgtgaagtcaagaatttccaccttttctcaaacaaaaaaccatttctttgacacatttgaattaatagcaggacttgccctttgggcccattcttaggtaagatgagggtctttgagcacaagtactatgagatctgtcagtcaatctaataaccaggcaggtaattaagtggctcaagagcaaataggttattcagtgcgggtgtaccaggcagagatgattcatctaccaagtggaacaggagaggccggctgtgatttcatcgtgctattcagaatgggtactatgtaaactgtaaggattatttatttcaggaacttgtcactcagcatgtttcagatgacagttgaccacaggttactaaaactgtggacagcaaaacctcagaaaatggggaattgagccttgaagaagcaaagccacaggtccaggattcaaaatcctcccaattcccatgcctgtgatttaactataaagtgtatgtgtgtgtgtgtaaagccgggcctggcgactggcctgcaactgtgtagcccaggatggccttcaactccacacacagcaatcccatcttcacctctcaaaggctgtggctacatgtgtgagcttccagactccgtttgttggtgcactgaatcaagcaaatgcagccagccacgttttcctccagcacccaggcctctcatctcaggaaggagtggagatgacacaggacaagtaactagacatttttgtgtaagctgcaggccatttacgttgcagatacacactcattacaagcca

SEQ ID NO: 19438 - DNA, 1841 bp, Mus musculus
ataattctttagttattgaaaaaaattgaacagcttttaaaacgggcaaagactggtttgggcagtttgtgacttggtttttggcgtctcagaactcactgtgtagacctactcaagagatcttccctagtgctgggattaaaggcgtgcaccacagcacctggctggcttttgtctgtttgttcattgttttgtttttttcttgacctaacagtagtaaccatgaggcctgccagcagagtgagactccctaacttgagctattctcatattgtgtggcccactttggctttgaggatgccttggccttttgagtggcaacctctagcccaagagttgaactcttggtgtatgttgggtgtggtgttggtttctctggttttcattgggtgtcatttatcagtaaaacttggaggttagggtaatcctgaccaatagaataagagaatcacaggaaagggcgtctgtctaatctgcttctcgatttctcagcctacgtgcttcccaagctctatgtcaagctgcattattgcgtgagctgtgccatccatagcaaggttgttaggaatcgatcccgcgaggcccggaaggaccgaacacccccaccacgattcagacctgctgtaagtaaattattttaacttgggacatacatagtcttacccagagaagtatccattaaggtcttatttagtctgtgtggcagctacgacctacatttaaattttaaaaatgcttgtctgttttgcataacctgaaacacttttagtgatgctaggtgggtggtggttggtttctttggtttgaggtgctgggtcctcaacttaatgctggtaagtgctctactgtgaactacatgggtgggtgggtttggttttttttgttttgttttgttttaagaagtctcgctggaagccaggcgtggtggcgcacgcctttaatcccagcactcgggaggcagagacaggcaaatttctgagttcgaggccagtctggtctacaaagtgagttccaggacagccagggctatacagagaaaccctgtctcggaaagaaaaaaaaaaagaggtttcactggccttcgctcacctaggactcttgattcttctgcctctagaatgctggggttaagtaggcaaccgcagcagatccgagtacctcatttctaatttagctcatctcttgtttttcagggcgctgcacctcgacctccaccaaagcccatgtaaagaggccgttttgtaaggacggaaggaaaattaccctggaaaaataaaatggaagttgtactttacatggcatcggagtgtgtttatgtcgagactcttgtgtgcgtttcagggggtccatagtgcagaacttggtgctttgggctctgtacaccttattttctaaggcattctctgcaggctggccagcagtgagctccatggatcccgtttatgctgcctggactcccagcaagccatgggattacaagtgtgttcactgggctcagcttatggacagggttctgtggatcacctggatccttgtaagacttaacaagccagggtttctgtttttatggtgcagggcactcactggtccccggccctacagactttaatgtgaccataggatgttaaagttttaagccagtttaatttgttttgaggcatggtctcatgccttcatgtcttgctggctttgaacctagatgcctcagtacctgtgagtcaaccatctctggctaagttgaccacttaacctttatctgaaaggaggccaagctttgactgtagagcacagactggccttcaccctctcccctcagcctcctaaacactggcatttgcagg

SEQ ID NO: 19439 - DNA, 1057 bp, Mus musculus
aacctctccaagtcgtactacaactcccacaatgcatctcttttgtcctcccacactagggagtgtgcgtccgaattctggataacttccgctctggaactatcgtaaaccggatgttatagagccttgtaatcacttcctggtttgggaatgtaacattttaatcttccgccggaaggttaaatagttccactgatatttttcgtcatagaccatttctagggacttatcacaaccctacatttcacaggaaactctaagtaattaggtaaattcgagcataatagctgctagggagtaaatagaattacaggtcgctgagggttttttttttcagcgtgagcgtaggaatctcgtactatataagcgggtcgggcaagccgccggatcctctttcgagtcttggctccaagatggtgagtgtcgccgcgtggtgagcgcgcgggcctgggtactggggtagaagtagatctatggacggtagggacctgaaagtcagagtcttggaggagaaagtgacaaagggtccgtccagcccggacttggcgtgctcgggacttgtacgggtctctgtcggggctgcgggcggcggccggccaggaagggctgaattctcgccccctttccaatagcgtctctttccattctcagaccaaaaaaagaagaaacaacggtcgcgccaaaaagggccgcggccatgtgcagcccattcgctgcacgaactgcgcccggtgcgtgcccaaggataaggccatcaagaagtttgtcattcggaacattgtagaagccgctgctgtcagggacatatctgaagcaagcgtcttcgacggtaagtgagccacagccgtgatttgtacagggacgaagagtgaggagggtgtgtatggctcgttgtcttcagcttggggagaaggtgccttttgtggcacagtaagcaggcctaatgatggggttttaacttggtttttctcttggggtggagattgaggctcatgcatggtagccaaacccctgcatcccatccctgtgagagactgcctatttaggagaatctgaa

SEQ ID NO: 19440 - DNA, 1197 bp, Mus musculus
atatctgaactgttgggaccagtatgcaatatttttgcatttttctagggctcacttgtatattagtttctgaattggatccataactttaagattaaacagagaaaagataactggggcttttcggctttcggcttggaggaggcaacggtgcaactttcttcggtcgtcccgaatccaggttcatccgacaccagccgcctccaccatgccgcccaagttcgaccccaatgaggtcaaagtcgtgtacctgaggtgcaccggaggcgaggtcggtgccacatccgccttggccctgaagatcggtcctctgggtctgtctccgaagaaagttgttgatgacattgccaaggctaccagtgactggaaaggtctcagaattacagtgaaactgaccatccacaacagacaggcccagattgaggtggtgccctctgcctctgccctgatcatcaaagccctcaaagagccaccaagagaccggaagaagcagaacattaaacacagtgggaacattacttttgatgagattgtcaacattgcccagcagatgagacaccggtctttggctagagaactttctgggactatcaaggagatcctgggtactgcacagtctgtgggctgcaatgtggatggccaccaccctcatgacatcatagatgacatcaacagtggtgcagtggagtgcccagctagttaagaagcaacaagaaaatatttcaataaaagactatctgataaccaacaacaacaacaaaaaaagatagctggggagatggctcagtggtctaaagcacttgtcgcatttgtagagatgtggattcaatactagcacccacatggcagctcacagccatcaataactccagacccagggtagctgatatcttccggcctccataggtgccaggtacacacatggtacatatacatgactcatacatacaaaataaatcttaaaaaagaaacagctggatatggtgacacttgtcggctatttaggaaggctgaagctgtaagacttgtttaaaggcatcctaaatagtagtttagcaagaccatatttccaaaaaaaaaaaaattattaaattaactttgattgatcaagtagcttctatcccaaaaagaaacatttctgcccagacctgtttcttatttctgcttgaagccctccaatctgtcatagtctaaagg

SEQ ID NO: 19441 - DNA, 2521 bp, Mus musculus
tccatccccacccctcagcacacagtccctacggtaacagcacactgagccctggctcccaagggctgcctcctgacagctccgtcatggcactttttaatgcttcagcaaccaacaccaggcagctgttgccactactatgccctacctggggcttggggtcacatctccccaggaccttccttccaaaacaaacttcttcacttcgtgttctaggtgcaagacagtgaccttctcattgtcccccacccccgtgtttttccagtgtttcagagaagacttctgtctcctgcctcacatcccacctttcatcattactccctcttcttgatcctgtttctcctctttacaagatgatgaagggtaatcccagggactgagaagggagggatatacttttagttacattaaagaccttgtggggagagtaaggctcgcagcaggagggagtgaggaaacattgctttcccattttatttatctggtaagagtttcttgtctatgaaacactgcggcaccaatgagtaggacttgtggagggcgttcctaggtaggagtgagaacagggagtcaagctcgcaggcactgaatgggagtttattagtaggacaaaggttgaggtgcagtgtcatccgtggctctggaacttgccccgaggctggtttcccttttgtccccatccactcaccccactcgagtgtggggattggacctcagagtgctccaaagaatcttcactggttgcctgcacctttagctctgctgtgatctaattggaggaggtactctgataccgtcctctgaggcctatgtatacataggcatttcccctaccctggccttgagatggccttaaccccagacaccatgcccctgcagtttgcactttaattgatggtagttcagtcaagatacaggtttttttgtgtgtgggggggggggggttgattgatttacctatccttcaaccgttttaattaaatggaatctacaatgaatgaggtttggccctatagaagacagtagcagtggcagctactcacacccagtctccactgctagcttcctgactgattcatacctctattcttgggtataggtttgtctgagcaactggggagtggcctcagaatagcatgggccatggtagtggagtaaagaaaggtcaggcaaaaggagtgttctatcttcccagggttcacattcagtttgctatgtcttaccatgtcttttctacttccctgtaaatacgtataagtctttattctctgtacagtctgctctgcctcctggctcccattagccttcttttcttctccttttgttaatatcttgggtttagttcctccttcattcccccacttactcttacttaatccgtgtaccactaggggctcctaccacaaaggctgcttgtccaatgacagggcagctagaactgaaggtgcctcacaactgccttgtatcatcagagggctttggtccttcctaagtctctggcctctctacgtcctatattaggtgtttgagggtgtctgtgggaagccatcaaagcaagaggaaacttggtattttagccagagtttgggagaaacatgcagaagaaaggaaaagaccacggtaacctcgagttgagcctttctgccccttgggctcagagactgacttgtgttccagagcagctgaggaatccatgaggccaagattctcaaggacccaacttaggttcctccacttaggactcaattctcttccttttccaggggcagccttagttctcatggccctgaaacatatatttactttcctagaacctgttcatctgcaaaatatccaggcacatcctttttacaagtggagactcgagggaagctctccaagtctcttagaaacttaattccttctctgcaaaagtgaagatgttttattgccttggggctgggaaaccatttccctaggctttccctccctccctccttccctccctccccccctctcttaggaacagtattggccttagttcctggcctacctgctgccttccctctcctcctgccagctctcctgccttcgctggagctctgttgggcttgaggggttttgttctctccctcccctcccccgttaccttttttcttttgatcagtttttagggggagggctcaacatttttgcctttatatttctttcctaaggaagcatttgcctttctttcactctcctaacataacaatcgtggtaacagaatgcaactgctgatttatcgatgtatttaatgtaagtaaaaaaggaaaaaagaaagtgcactggactgttgttttgtttgtctgcctgaaactaaaaaatgggaagaaagggcccagagaaataaatccatgatacctcaagcatcctttccctccaccttggcacctctaactagtcgaagaaccaatttggaaaataaccctttttatttctttgattttgtttttatttttatttgtgtgtgtgtgagagagagagagagagcgcttatgtt

SEQ ID NO: 19442 - DNA, 1185 bp, Mus musculus
tcttcttcagtaggttggttcagatttgggaggagggaaatgagaactgggtaaggagaatactggttcccaagtttctgagtacacctgctgtccttctggcccgctgccacatcactgaagttagaatatatttctctttccagcaaatgctgcactatgaccccaacaagcggatttcagccaaagcagccctggctcaccctttcttccaggatgtaactaaaccagtgccccaccttcggctctgatgcccttcccaaagcccttttcacccgtggtctgacttgaccctgggccttttggacacaggtcagccttctgatgttttctggctgtcttagcattcgccttttctcttgccagccagttctggggattcagaggtgcagggaagggttagggaaaagggggcaaggttttggcattagatgcacttaacccggcttccaccagcttcttcccctcttctcagtcattactgagaaggattggtattcaaagcaaaactgacagttttcccctgtgtcaggttttgccatcccaatcttaagactgtctcataattaccatgttgagggaaacgcccccagactcctgctgccactgttttgtgaactaatgaacatgagcagaagcctaagttgggacagctcagaaccaagcaagagggggccgttttaatgaattagattgaaaaataggcctaagccgtttgtaccttagttttagcgttcggcctcacctagcaatcaagggcccgtttggagaagcagaaatgattccctccagtgccctgtctaccttccccaggcaagaagagccaggagggcacagggcttgcacgtcactctggtctgttcatcgtggttcacagggcaaggtgaaagacacttgaatttctctttttagcaatcttactgttttctggtgctgactgctacacccaggactttgccctcactaagcaaatgtaccaccaatgagccaggttcctagccttccttttggaagctcagttcttgagttgtcagagggcctcattgccgtcctcctctgagagcagtgatgcaggccaggagacatcatttgagaatgctgatgcttttgtaaggctttgacctggttaggtcattgggggaaattttctataaaagagtgaacaattatatttatatttcaagt

SEQ ID NO: 19443 - DNA, 1243 bp, Mus musculus
aacccagagcattgcccatattagacaagtgttctgaactacaacccattcccaaaaacctgttttgtttgggttttgttttttggtttgtttttggttttgtttggttagattggggttttggtctctcaagacagggcttctttgtgtagccctggctgtcctgcaactcactttgtagcccaggctggccttgaactcacagggatctgcttgcctgtgcctccccagtaccgggactaaaggcatgcaccaccatacccagtgatagttttttggcaggaggaatggcacagaagttccccggctccttactcgggggtgattgggcttctggttggcctttcttcctggaccctacactcgtgaatcctgctacctctgcggggggctccatcttccatgctgctttccccctctcctcagtggaggaggaccacagcatctgcctcagctcccctctctccaaaagctggctccttgacctttttctcagaggagcctggtctttggggctgcactgtagccaagtgccttctgtcttttaaagtagctttcctcctaaaccagaattcgggcccagctactgaccattctaactctccctcctctgattctcctgaccaagatctatttcctggtttcccagacatagtaaagaaaatatatctttcccctgagcagcagatctgtaataagagggaggaagaacaaggaatttgggaataaaatggcattgaaaattcacctggggagatgcgcctctactgttgctgctttttactttctttgcaccacgaaacaaagctaatctactcccccaaccccaccccaccccgccacaaagatctgctatggcacctatatggcatacactaccatatataatgcacacatacatatcatacatatacatgaatatacccagataactcagttctcttccaggaacatgaagctagcctttacctaaacacaaatgttccagagtctgtcagatatttcacatacagtattttcatctaatataacaatcctgtaacattgatattagccttactttgttaatagggaatccaaggtttgacagggttaattagctagccaaagccacacatagtcaggtggctcaaggactccaaatcccaagctcagtttactggccatgatatttttttgcactttatgttggaagaattcaatacccagctgttagctgcttcctcctgtcagctaaagcccc

SEQ ID NO: 19444 - DNA, 1485 bp, Mus musculus
gctctcgccctctttttgggatgtctacaattgggctggaggttttcggtgggactgggcaaccggttaggctggagggataagaccgcttggctgttctcttggctgggttctccagccttgcatcattgcttgactctgctgaaagatagcaggccatggcagcagctggtaaggttaatacagtggggctggcaggagctgccctgggtcaaacagaggactaagaaacagggcaatgcacctgtagctagcgggcgatactgccagcctgaagaggaagtgacccgactcttgaccatggctggggttcctgaagatgaactaaacccttttcatgtgctgggggttgaagctacagcatccgacactgaactaaagaaggcctataggcagctagcagtaatggtgagtatcctttgctgcttcctgttgctctttccccatattttctgttccagtttttagggagtgtagagtcaagggaaggtgaaggatttcctttctttgttttgtttttgagttagggtttcaccttgtagacagactaacctggaactcatgatttctcctggctccatctgtgagtgctgtgacttacaggttttgccactatacctagctaagggtagcattcttgggaaagagttataaaggcgtttctctgactaggaatttgacttttctccatcttaagtcttttgtcgtaaggtcttttttggggggagggggtgtaatataaaaggaagggttggacttactctgcagcagctaagtgcagctcctttccttagggtcgggaagagcctagtcagacagccccttagttgctatcacctgaacaaagggatatttgttttgttttgggacatggttttgcagactagctccagctagctttgaatttgtgatcttcctgcttttgattgggaaaggctgggctcacacatacagcaccatgaatggtaagggaggaatttaaagaaaatatctttttttcccctttttttaaagatttattttgttgatatgagtacactgtcgttgtcttcagacacaccagaagaggtcatcggatcccattacaggtggatgtgagccaccatgtggttgctgggaattgaactcagggcctctggaagagcagtcaatgctctcaaccactgagccatctctccagcccccaagaaactttttattgattctttgtgagtttcacattctgtgccccagtcccactcatatccctgtgtgctcttgaagcttctcacctaaaacacaccacatgcgcgcgcgcacacacacacacacacacacacacacacacacacacacgcacacgcacgcacgcacgcacgcacgcaagcacgcacgcatatgcacgcacacgcaccctaaacaaaacaaagcatggaaaatgtcttgtcatggaagttgtagtgtgttgttcacagtgtcccacactatacacctccaatcacacat

SEQ ID NO: 19445 - DNA, 1123 bp, Mus musculus
acccaaactgatcaaaagagtgtggatcccttggagctggagttaccgatggttgtgagctactgtgtagggactgggactgaacctgggtcttttgtaagagcatcaagtgttttcagccactgagccacctctccagccccaaagggagatttttttaccatggagaaaatctgcctcttcctagagaggcaggtgtggacctagtatgggagtgttcaggatgtgcgtttgggtggttattccaggaccaggaagaaaacagcttctgtttccttttggtattggatggcatccagagccttgtggatgctaggcaggtgctttcccactgaggtacatacactttaacctgaaaacaggaattttaagaacaagagtatgagcaggaagaaaaaaggagcataaatcaatagagagatatgtgtatcacgcatgtgtgtaagaagatacgattggttttgttaactctgtaggtgggagttttgatccactatataccactttttggcagtgctggggatcagacccagagctttgctcattctaggcatgtactctaaagatttatttatttatttatttattataggtaagtatactgtagctgtcttcagacaccccagaagagggcatcagatctcattacagatggttgtgagccaccatgtggttgctgggatttgaactcaggaccttaggaagagcagtcagtgctcttaaccactgagccatctctccagcccggcatgcactctataatcgagctaaatctccagctctgctattgctgtttctgtatgtacaagtaaaactacattatgaatataatatgtgtaaaactacatctgaggccaacttgtactgaatctatgggtccgaatcattaaaacattacgattttcaaattactatagtggctgtattatataaagaggaatggacacccaaggctttccctgacaaaggttcaggaagaccctagactgataattagcaaggaactaagtttagtgggaaatgcatttcttggtggatggcttggtatcttcttagagtggtcaacaattacttcccccctcagattgttactaagagtagtagaaccccctttgtttcacct

SEQ ID NO: 19446 - DNA, 1511 bp, Mus musculus
agtgggctggatgccagcgtgtgggtatctccccagatactcacagagttccttaccacatctcatttggttctcgggtacccggcaccagtggccggcagaggtaggtgatactttcacacctactatgtcagttgtatggtttcagatgccttgttttctaggaagtttgggcactgactctcggtgtgtagttaattttggaagccgactataatgtcttctgcctcttttctccctcagggccactccagagtcccctcctgctgacctgcaggatttcttgagccggatctttcaagtacctccggggccgatgtccaatgggaacttctttgccgcacctcaccctggccctgggaccacttcgacctctaggcccaacagttcagtacccaagggagaagccaaacctaaacggcggaagaaagtgaggcggccctttcaacgatgacaccccttctcttccttcctcaaatcaatgtcagggagtcaaaagggctgtgtacagcacaggatggaatttgatttattttaaaatactttaaaaagggaaacattttaaattgttcactcagtacttagaggaagcccatgacctcttctccctcttccccaacacccaggaactgaatcttgttttctgacaataccaaagaaataggaggtggtcagagcaaagaacttaggggctggacctagtccagacagtatgcttctgaggtgtgggaactggggatttctctggggtctgtatgcctttatcttatcatctgctcttaagagcagatgaaacacacccccttttaaatgagtgtatcttatttcttaaacccatatcaggggttcccctcccccctttaccctgatatactagctaaaagaaaaagcatgtagccctaattttggagacacagaactcaagagtggaaactgatttttttcctctgactttcactttattggtaagacacctaacttcaggcttgttgttgcaaggatggccaaaattaattaatttttaaaaagcagatttatgccctgtgcccttgggtgagggggaaggatagaggggttcccagaggcccccttgttagccaagggtttgtatttttttaagtttgttcatatttgtatgtacatatctatttaaagccaggagattatctttctataaatatataactggcaacttacatcttccttctcttctttacccatgtagctgggagtccttttctattttcttttggagataagagtcttactgtgtagaccaggctggactccagattgcagtgattctcctgcctctgcctccacttcctgagggctagctagtattataggcatgtgcctccactactcacttgtgagctcttttttcttatttgagaattctttccttgctgttagctgtgagtgaaaggtattggaccaaaggagtagagacaaaattttgcttaaaagttttttttatagtaagtcagcattttgcattttctccccag

SEQ ID NO: 19447 - DNA, 1142 bp, Mus musculus
ataaatggagagacattccgtaagttctgtgactctagagaactctaatacacctggactgaggatttgaaatctcaaagccctcctttcctccaacaaggcacagctaataatgccactcccttgtgaccaaacattgaaatctgtgagcctgtgggggactttcaacaaggccataccatctaatcccacttggggcctacttgtagaatttgtagctgttactgttcaaaccacagttactttccagaacattttttttttgttttaatttaattttccccactcccacttttatcctcagattaaactgaggacctcatgtatactaagtatacagtctatactcagcctgcaatatagctttataattagatatagtacctagagaaaatgatttagtgaaatagttttaaagtagtttggggatttctggtacaggaataaagagcaaatgaatgtagcggtaattagcttgtttgggttaaaagtaaagaggttttttgaaaatgggtcatattagaatatgtaaagtaggggctggtgagatggctcagtgggtaagagcacccgactgctcttccgaaggtccgaagttcaaatcccagcaaccacatggtggctcacaaccatccgtaacgagatctgacgccctcttctggagtgtctgaagacagctacagtgtacttacatataataaataaataaataaatctttaaaaaaaaaaaaaaaagaatatgtaaagtataaatctcttttaatggctttaatccttttaatggattttgcaagaaagacattaaaaactgtcctggaattaagtatatagaccagtcttgccttgaactcacagaattataccaacagaattggatatagtaatactgctttgcagagaaatagttatggttttaggcaaaattatatggaaagattttgagtccttatatttagggaaataattttgtatgtgactgaatagagaaattagccaattaagaatagaaatttcccatgaatcctgtgagggtgtgatgtgcatttattgcttgggtttaatgtgtctaagggaattggaatataatatgagaagttccctctcaggttctctttttactctgaggtttactgtaatgattg

SEQ ID NO: 19448 - DNA, 1208 bp, Mus musculus
gccatttgaaatccagcctcagctatatattaaaaactatctcaaaacaagagctaggatggtggtggtgcacacctttaattccagcacttgggaggcagaggcaggctcaaggccagcctggtctacagagtgagttccaggacagccagggctatacagagaaaccctgtcttgaggaagaggaaaaaaaaagggcctagtggctggatctgtacctcagtttatagtgttcttgcctagcatgcaagagaaatgaacaaaggatttggggttcaaggtcatcctccgatgcgcgcatgctatattagttactttgttattgacctgataaaatacatgacggaaggcaactggagtcagagagaatttattttggcttatggttccagagggttgagagtttatggtggtggagcagaggcagggcaccaggcaccaggcatggtggcaggaacagaaagctgtgagctcgtatcttgaaacataggcatggagctcagagagtgaactggaggtagactgggctttctttttctccaagcccacactcagtgatacttctgtagtaaggccacatttctgaacctcttaaaacaccaacgacttgggcatgcccaagattatgggggacatttttcattcaagctgatgtttgtctccatttatgacttagcttcacacaaatggaagcatgtgtgtgatctgttatcttttgtaattagcttttcacttagtgtaaaatttcaccttgaaccacagggtgacctcagacttgctgtgcaacgttttttggccggttcctcagatttacaatcttcccaaatgctaaaataacaggcctgcacctccaggcctgctctgtggtcacgtctgtttgtgtattagtgctgtgtcactgagcatgatcctcagcctagcatgtttccagcattgataataaagtcccattcatcttattgcttatactatatattccactttaagcatgtcacattttacttattcagttatcagttggtacttgttcatgatgaggtaaaaagaaagctggtgattgttgcattttatctgatacagttaatgatgctgtgaagagttgtttttaagtttttgtatagatgaatgttttcctcattttttgaaccaatgtctagaagataacctatgtggagttgattctcctcttctacctttacttgggctct

SEQ ID NO: 19449 - DNA, 1114 bp, Mus musculus
gtagaagcaacttagtaagttctatttgtagatattgttctttttttcttttttaaaatcaataagttaatttaatttttgaggcagggtcttatgattcctgggccagcctggatcttgcttttagctgagaatggccttgaacttctgattctcttgcttctacctgcagaattctgggattgcaagcatgcaccactctgcctgattcatgtggtactagggatcaagctcaggttagtcaggcactttaccaacatgtccagcctattgcctcttaatattgtctataaatttaagagaagtcaggtatggtggtacattcctgtaatcctagcacttgggaggcagaggcaggtagatctttatgcagtttgaggtcagcctggtctacatagtgaattctaagcaagccaaggctacatggtcagatgtcagaaaaaacccaaaccaaaacaatatatgtatatacttatatatgttatacacatatatttgagagtaaagagtgaagaatggagagtggtgttttctaggccattgtgactagtcagtgggttttcaaaatagtgttgtgataaaatatattcaactctgaactcctgccacagtcagtattgtaactgaaattgaaatattttattgttatttaatatgttctaaatgattgtaccaaggcttctaagaaaagaggaaagagaattgagtcgtgtcatttataaagtcttataaagttcaaaagtttacctttgcttaaagttacatcacttagcagagtttggtgtgacatgcttgtaatctaagcattcaggagactgaggcaggaggactattgcaagtttgagattacatagtgatttgaaggctatcttgggcttcatagaagaagaacctgtcttagaaaactaaaactagtcgacttttagagattgtatagtgggaattaatgaatttggactttgaatggtggacttgtttgtagtggtgaagatttttataggtggtgtttttcgagcagtgtttagcttgctttgatcttgagctcttttaggctcttgctgcctttgatgagtaagggttagctgaatcctctgctgtctacttcagaaaaggc

SEQ ID NO: 19450 - DNA, 1105 bp, Mus musculus
tcccgagtgctgggattaaaggcgtgcgccaccacgcccggcccgaaaggggccactcttaccccctcctccgccctagcctagctggccctaggacctgagtcactggagtgagggggtagttctgggagagactctagctgggagtccatagaaagtaacccatatcctgtgccgaagcgctgtttaaaggcagcatgacacctcccgattcccttctccttgtgtgccttaaacaacttcccagccttcattgtggggcaaggatgggcagaccttgtctacagccagtgtttcctggaggtgtaggatctatcttctgggtgggggtcgggtgcgagggctactggactgaggatctgacctaactctcgcctttttcctcaggcctgtgcagtgggattgatcgccattggtgtagcggttcaggttgtcttgaagcaggccattacccatgagactactgctggctcgctgttgcctgtggtcatcattgcagtgggtgccttcctcttcctggtggcctttgtgggctgctgtggggcctgcaaggagaactactgtctcatgattacagtgagtggggtgtgggagctcttgggggctaccggaagccttttctgtggtgaaggtgggtggatggagaacaccaggaaagtctcagtaattgaccgggtcagagcaagccctttaaatccagacttcaaacccaactcctgtcctcccacagtttgccatcttcctgtctcttatcatgcttgtggaggtggctgtggccattgctggctatgtgtttagagaccaggtaagcagggaatggggggggggggacccatctcaggttgctctgggaatctggggccggaagtctgttctctacagcacccacttctctgctcttaggtgaagtcagagtttaataaaagcttccagcagcagatgcagaattaccttaaagacaacaaaacagccactattttggacaaattgcagaaagaagtgagtgggatggccgggaggagggttagccgggatagaagattctcaactctgaattaaagtggaggtttccctcccatccctcttcccttcctagaataactgc

SEQ ID NO: 19451 - DNA, 1192 bp, Mus musculus
acaaaaggacagagatagatctgcgcattcaccactcactgcccgcaacattagcaaagctccctagaaggctgcttgaggtgcctaaaatgctgctctacagtgatcacccagagctgagagaacctcggtggagaggtgagaagacaagagggctgggaaataagagaaagcattctcttctagggagaggaagctgggaatccactgagaatcggccggcattgccaggaggtaaggtgagggaaggagaagaatttcaatgagttcagagagcttctgctaccctagtaacagaagtgtagtggacagcatcaggacaccaatcctctcaaaacccgacagccagagcatgtgaaaactgactcttcagcatgactaaatgcgaaaagtgttcctgactccagaaactgagcctcattagcgaacagctcacccaccaagcaaccaaccctccacttcgctcctttagctcctcaataccaaccaccagatgccaaaagcagagggaggctcttgcgtcacgtgatactgcgatcacgtgacgccttccgggtgagccaaggcatagtccagttcctgcagccttagggaggggtccgccgtgcccacacccagccagactcgaccatgctgtcccgcctgctcaaagaacaccaagccaagcagaacgaacgcaaggagctgcagggtgagctcagcgtccggtcggtcggcagctcccggccgcggcctagcttcttccagaggcctggacctcgggtaacctcccagatcaaggagagggcgccggctagcgggcgacccgagtgccgggcagggaattgggggcggcacttctggaaactccgtccccttgccaaccagccctggtccccttggcaccactcgggtccctgcgccacctccctcaatcccgcccaggcggcgcctgagtcccgcccctggagcgcgaaacgcgttgccaattggcccagccagcttctcaccccggaagtgggaggaattggggactgcccagtctgccacacagctaaggcacaactttccccaggcctagactgggaatcctggagttgccaatccattgcccaaagtagtggaaaaaggatgtctaggaagagtcctgggcgtacctgatggagtgtccattcccttctcagggccccagtttctttgcctccaaaataaa

SEQ ID NO: 19452 - DNA, 1191 bp, Mus musculus
agcacaattagtaagtgtttaagacttttgtctcttcttagtcatgagcttacaattttctaggaatttcatttattataaggaaaggaaatatgataaataccatgtggaacctaagtgccttctggttttatttaatcagattacaaagtatccaaggcatctcctgagttatttcatacatcattcttagcaggagcacttgggtatttcttagaagtcttttgagatgagctctgaacatcatcagtgctaacccaacgctggttctgcttgggtcagcagcatgttaatcggaactagaaacggaaacaggcaggttggccgcagctttttaggaagctgcttaggtggaagaagaaagggtttaaagtcatggatcaggcagttgcccttagttttcaggagttgtttcaggcaagaggagtaaggcttgaagtacaattagtaaaaaatattttaggtaagatagatagctgttgcccatggttcaaggaagaagaaacagcctcttagtttcagagtgaaaaagctgataaatgggtcatgattaatgtgtttgacaatggtaaagtgttttttattctatgattgtagctacaaaaattattattctctgattggtttaaatgtaactgcttcatttggttcttttttattgataatgtgctctgcatgtcttcacattcagctcataagttgttggttaagattaataattgttacattgctacagatggttagtgttaaatttgataactcaagtttagagtccttccgacacatggcataaggcagcccaagaggctgggtctctaaagatatttctagtttagataataattaatgtggttcgtatcctaaatagtaaaatttaaaataagatttaaaacaatgtctctttattaaagcattaaagcttgctttaataggtattcataggtattaattgacatccaaacttcgtaatatgatagtaatgcttctaataatgattttaaagataataaattgttttaaacttgggttttgctttcccaagtttgtaggtattatcctaaccttgcacaagaaacttaaaaattatggttaaaactgccattgttccattgactgcagcttgtagtttgatttcaaatttaagatctttaactcacctgtatactgtaattaagataattacaagagtaa

SEQ ID NO: 19453 - DNA, 1583 bp, Mus musculus
agtgtaagggggatggggtgaagaattctgagaaaggggccaggaaggaaggcaacatttggaatttaaataaataaaatactttaaatgaaaacagttcactctggggtcataccccacaggttgacaattggtatttacagcttcttgccaaaatcttcaatctaatttgacattatagaagaggattataaactgaggagcccggagctgccaccgggggatcggggctgggggcaccggggaagccgccgcctggcccgcccgccctctgtgcaggccgcctcccttcccggcccggggaggaaacgcgagggggatgtgaacagctgcgggagtcggagtctcgggagccggagcccgacgggcccccgcccaggccccccagcccagcccgcccgcgcgtcttcccgcccagccagcccgggcccgcgggattgttagatggaacacggctccatcatcacccaggcgcggagggaagacgccctggtgctcaccaagcaaggcctagtctccaagtcctcgcctaagaagccccgtggccgcagcatcttcaaggccctcttgtgctgtttccacacacagcatgttgtccagtccagctcttccactgagctcacacacaaggaggaggccaacaccatcgccaagtccgatctgctccagtgtctccagtaccagttttatcagatccctgggacctgcctgctccccgaggtgacagagcaagatcaaggcaggatctgcgtggtcattgacctggatgagacccttgtgcacagttcctttaagccgatcaacaatgctgacttcatagtgcctgtagagattgaggggaccacgcaccaggtgtatgtgctcaagaggccttacgtcggatgagttcctgagacggatgggggagctcttcgaatgtgttctcttcactgccagcttggccaagtatgctgaccctgtgactgatctcctggaccggtgcggggtgttccgggcccgcctgttccgagaggcttgtgtgttccaccagggctgctatgtcaaggacctcagccgcctgggaagggacctgaggaaaactgtcatcctggacaactcccctgcatcttacatcttccacccagaaaatgcagtgcctgtgcagtcctggtttgatgacatggcagatacagagttgctgaacctgattccagtcttcgaggagctaagtggaactgatgatgtctacaccagccttgggcagctgcgggccccttagccttcctgctccaagaaacggccatcccaacaggggactctgctacactgtgcctttgtggtcagcctcactgacagggtctgcaagtagccagggcgtgtgggacaaaagcaggtcacacgcagagcaggaaatcagaccaagacccagagctctctgcaccccgtgctcagttcccaggtggttgtgtgggtgtgtgtgcgtgcatgtgcccgtccggtaaactatggtcctgggtgcccagttgtgcagtagggggagaagctgaaagataaggactcaacccaagtcatttgtcttctttcctgctatgctgtgagctact

SEQ ID NO: 19454 - DNA, 1208 bp, Mus musculus
catgtggttgctgggatttgaattcaggacctttggaaaagcagtcagtgctcttacccactgagccatctcgccagtcccccatcttatctcttaattagcctgttctatgacaagagctatccagagaaaaaagaaggcagagcccagagataataaccgtcattgatctctgctttttaacttctttctgaagatatctgttgggaggccatctacaagaagtacattaaacagcatctaacataaacctgaccaatctatccccttctgtgcacagcaagtacccattacacacaggcacaatagtacttttcaagggaggacacaggaagaaacatgggatccacttctgcttgtctatttgtggtctgatggagcaagatatttttttctgttcaaagcaataaaacatctattgctgtgtgctaagaatcacacagtatgtgtgagagttttgctcagtgttttcttttttaaaagattttatttactttatatatgctagtacagtcactgtcttcagacatattagaagaaggcatcagatcacattacagatgtttgtgagccactatgtgttgctgggaattgaactcaggacctctggaagaacagtcagtgctcttaacttgcaagctgtctctccagcccttgctcagtcttttcaatatctgccctgtaacttgagtttagatatgatcatgaatagaatccctatgatggcacatgtagctttataaggacaaatggagaaacctcatcacatttgctctgtctcactaggtgatgccctcaccatgttatgatgtagcaagagggccttaacagataccattgctgtgttcttgaaattcccagtctccagagtcatgagaccaaaaattctattttctttaaaaaaaaaattacccaggctgtggcatgtggttataattacagaaaacaaactaaatatcttttattttagtcaacttgagtatagaaactttgagggatataactatagatttaaagaatttatttagggccagtgagatgtctcagtgggttgatgatctgagttttagccccagaatagatatggtggaaggagagaactaacttctgaatgttgtcctcttgtctctacatgtacactgtggtactcacatgtttaaaagtaggtacatccacccacacaagtaaataaatattttaaaattatt

SEQ ID NO: 19455 - DNA, 1050 bp, Mus musculus
gctatacagcccagtctccacctctgggattaaggcagctgctctttgacctttgtgtgctatagcaaaaatgatacaggctacatgtatatccagccttgttttgagtatttggtgagcagtctggttccttctgagaaacagccacctcacaaaccagcctgaacacttgggccttcgtggtggcgtctgtagagtttctttctctctcactcatgtggggatggggggttggagtatatgaaagtactcaaatttgtgaccaactcagcctcctgcactgtggtctacaggtgttcctgtataaaactgtgccaacgagtttgctgtcatgtgcctgtggtcgcctcaacaaagtagaacttccttactggctctggaggccagtctacagcctgtatatctggacctttggggtgaacatgactgaggctgcagtggaggacctgcaccactaccgcaacctcagcgagtttttccggcgtaagctgaagcctcaggcacagcctgtctgagatttgtactgtgtggtaatgcctggcccttgtctccattcttcattaggaaatgaaacccttgtctgcctttaagccaggcttagcagcaccgcatggccgtggcactccgggaggctccctcctgacctggactggagctccctgaggacttggcagatggtagagtttggggagccactgaaggtgagcactaccccctccttaccttcaaaactctgtctcctccagaccagcccatcagatggcaagatcctcacctttgggcaggtgaagaactctgaggtggagcaggtaaagggcgaaacctactccttggagtccttcctgggccctcgaaccagtacagaagacctgcccttccctccaggtgggtcattgcttagtcaggattggagctggggtagacagcaaagggtagtaacaaaaggcatagtgggctgagggaataaaggctgggcaagctttggggcagcaggctgctatgtagcccaaagtcattattggaaccccaagctaggctacatgcaggtca

SEQ ID NO: 19456 - DNA, 1050 bp, Mus musculus; identical to SEQ ID NO: 19455

SEQ ID NO: 19457 - DNA, 1157 bp, Mus musculus
accttcttgttcctaggacttgcacacaaacagccccaggtacagcaaggtactacaatgacctgagctttgtaacaaggagggcattcccatgcacaagggtgagcccctgggcgagttcaacctgagctccacatcatgctcatcttcgaggcacccaaggacttcaacttgaggctgaaggcagaacagaagatctgctttgcaggagcactgggctccctctagtcctctcggttgtggctgccaaaggatctttccacacaggagcatgagggtctttagcggagccccaggatgtctaggtgaggggcactgtggggctgaccttataagacctgaatgatgtgttcctgcctgtccatgggtgcagaggagaggttctgggtctctcaggacctaggccccttttctgagtatgggtgggtgtgatttgaccccaaagtcactttaaggggtgttttaaatttttgtacaagccagagcctcccacccctaactcctggctgtgtactaccacaccctctagctgcgccccgacccgtcacagggctctctcactgtgcacagggtgacgtgcctgctgggcagagactgtggatccactgtcttcctagagcaggccacatggccttcataactgctttctgctcccaaatttcacctatctgcatgctggaaaagtaaaatcatttatatattgctggatgtgttgtcctgggctctgtcagtgtcttctgaagacaatgactaatgatgtatgtagacctttgtaggctctaagaagctggctgaatccttttgctggtaggcaagaccaattaattactggcttgtctggtagagtctggagtgaaagggcaggttgaggccttgccctgcagaagtaggggacatgctgctattggtctaggtctgtgttggaagcagagggtatggaggtcagtacctagaaaacaggtatgcaggccatggggaacccagtggtagggacaagaccagagttcatgtcgatcttgggaatgccatgaatttcccctgcagaagaaatcacttaacttttcaaccctatcagtagtaccgtattttgtatgaaaagtaggagacttctgaacagtaattcatttcattgcaagacattttgaaattaaaaaaca

SEQ ID NO: 19458 - DNA, 1157 bp, Mus musculus; identical to SEQ ID NO: 19457

SEQ ID NO: 19459 - DNA, 1732 bp, Mus musculus
gcactcaggaggtagaaacagaagataagaagttcaaggttgtcttcagatgcacagcagattccaggccagcctgggctacacaataccttgtctcatacaaaacaaaacaaaacaaaacaaaacaaaaatgtagtttgaaaaagggagcttgcctgcctatcattttagtgcctgtgaggtggagatgtgaggatcagtaagtagttcaaggttattcttggctgtttagtgagtgttggctatcctaggctacataagtccctgtttcaagaaaacaaaccaggccactgtaggcgcgcttccctgttcacctctgactctgagaatctgtcgccatccaccaccatggtgaacttcacagtagttcagatccgtgccatcatggacaggaaagccaacatccagaacatgtcagtcatctccatgtggaccacggcaagtccacgctgaacaactcccttgtgtgcaaggctggcatcattgcctccgccggagctggggagacacgtttcactgacacgcgcaaagatgagctggagcgctgcatcacaatcaagtccaccgccatctccctcttctatgagctctctgagaacgatctgaacctcattaagcagagcaaggatggctcgggcttcctcatcaacctcattgactcccggccatgtggacttctcttcagaggtgacagctgccttgcgtgtcaccgatggagctctggtggtggtggactgtgtgtttggcgtgtgtgtgtgtgtgtgtgcagacagaaacggttctgcgccaggccgttgctgagcgcatcaagcccatgctgatgatgaacaagatggaccaggccctgctggagctgcagctggaacccgaggagctctaccagaccttccagcgcatcgtggaaaacgtcaacgtcatcatctctaccgatggcgagggtgagagtgggcccatgggcaatatcatgattgaccccgtcctgggcgctgtaggctttggttctggcctgcatggctgggcttcaccctgaagcagtttgcggagatgtacgtggccaagtttgcagccaagggcgagggccagctgggtgcaactgagcgtgccaagaaagtagaggacatgatgaagaagctgtggggagaccagtactttgatctggcctcatggagcctatctatctggtggagatccagtgtcctgagcaagtggtgggtggcatctatggtgtcctgaacaggaagcgtggccatatatcccaggtggccggtacccccatgtttgtggtcaaggcatacctgcctgtcaatgaatcctttggcttcactgctgatctgcgatccaacaccggcggccaggccttcccccagtgtgagtttgaccactggcagatcctgcctggggatccttttgtcaacagcagccgccccagccaagtggtagctgagacctgcaagcacaagggcctgaaagagggctggacaacttcctggacaaactgtaggcagcctgatactgccacatgttgcacagtgcccgcccatcagaagacaccttgagactgtccccacagtgctcctctggaggctgttggggccaccctgacatcactcagcactcacttggctaccaattctatttatttcagaattacaaggcagctggaatctctctgcaggctggactggcaggccgtggggtgggcggacatggctcttaacattttcagagggaa

SEQ ID NO: 19460 - DNA, 1099 bp, Mus musculus
atgtatcaccatgcccagccaacattcaacctcttagaattctttttcatatgggtcaagggaagtcccccagttagaggcaacgctgtgttttttgtgtgaaggcagtgttactgagcctgctgggtaagctagtttctattaggaacttggtagcaaaactgcagagaactggagcagtcccgaaccacagtggcttccagtgatgctttccttgttcacacttccacagctcctaatgcacctttataacccctcttgtcatgtctctgggtagtattcttgctttagagccttcaaagacaacgtgacccaggcccgactacagcaaacaagaaagaagcttgctcagcagctgcgtgacactacagtaagactctcctggccccaaccccagacagggctctgctgtatgggtagctccgggtggcctcaagctcactgtatagtctgtgctggtctagaattcacagtcctcctgagtcctgaaattacaggtgtactgtgcacagtacttgatttcctttagactccataatcatactgcctgtttccattgttagtctgtacctgctgatagagaaatttgttttagcctctttagtgttccctacccaccccgtcctactactggagtttgctaagaaaaccagggcttgatttggatgttaaggactggcttttctcttgacctagggtattgttagacagtatagaccccacggagtcctgtacttgaaaggctgttggtatgtttcccccataggcagttcccttcaatggtttgttgagcaggggcaacaattctcttcattggttttatttctgagtgtagatttttttaaaatgattaagcacatgatctacatactatgtagcctcaacattcattagtattttgcctcaaaattttccctaaatgacttcaaagtaaattataaacactttggtatgcatcacccccaaacaagtagttttacatcgcaggaccatccaggccattttcggattttcacagttgtccttgaaaacatcttctcaagcagtgttacacttcattgttattcctcctttgcctgtctgaagacagtcttgctgt

SEQ ID NO: 19461 - DNA, 1195 bp, Mus musculus
agattaatcatagaaagtcattattatgaaatacatttgtttctctgaagaaaaaaaatattttaaattttaatgtgaaaaattaattataaggcgctatctcattggtaaaggcacttgttgccaagcctgacaacttgagtttagtctttaaagactgacaacatggaggaaggaaagagcctgtccccacagatatcctccacacatacacacactataaataaggtattttaccctgaatctgttgatgagcccagttgctgaggacatggtatctaagatgttggtttgcttacctttctctttctggcatcttttcagatccacgagagcgagtgaaagaagatgacttagatgttgttctcagcccacagagacgaagctttggaggtggctgccatgtgacagctgctgttagctcccgacgatctggcagtccattggagaaagacagtgatggacttcgcctgcttggtggacgaagaattggcagtggaaggataatttctgcccgggcctttgaaaaggatcaccgtctcagtgataaggacctgcgagacttgagagaccgagacagagagagggactacaaggacaaacgtttcagggtttgtcctctaaccccctttgttctcaagtgcttgtattttttttttaaggtttatttatttagtatatatacagtactctgtctgtctaaagaggccatcaaatcccattactgatagttatgagccaccatgtggttcctgggaattgaactcaggacttggaagagcagccactgctcttaactgctgagccatctctccagtcccaagtgcttggaaatttgatactcacctcctttgtactgcatttctctgttgttgctctcacgatggttcaaaaccaggactgcacacttgttggcaagtgcccgagcctagtctgcattacatcctcctaacaccctcccacccccaacccccagtcactttgagaagctggggatcacagaccactcacagtaaacatggagaactcagatggcagtgcaagagtggggctgcacttgagatgcaccgcacagcttctgcatttcagctgctgtcatcagttcattacaccagctacagtgttgcattaaaacttcacagtctttcagtcttgctctttgtactttttcagagggagtttggagatagtaaac

SEQ ID NO: 19462 - DNA, 1182 bp, Mus musculus
cctaatgtggctgctgggaattgaactcaggtcctccatagaaacaatttgggctcttaatcactgagtcattcttcaggcatgggtcactcttcccctctactaccaacccccgttttgtttttgagactgggtctctttagtcctagctgccctggacctcactgtgtatagctggcctgtgccctcttgagccctgggataaaaggtgtgcaccgcggtgctcagccatctctttcagtgtatgtaatttcagccttattcctacctgatcttaagtgttcaggttacctattttagtgttagcccttttgacagcctcacttcagttacaaaatagttgtcattggcagccaatgagaattctttctaaacaccctttgcttggtgtaacaagaactttctcaacttctcagcacattcaggggttgtactttcagtggaagaggtagaagcagggctgaagggcttgaaagtggaccagcaaatgaagaattcaactcccttcatggcagaacatttagaggagaccctgagtgctgcgagtagcaatagacagctcaagaaagatggagatatgactgcattcaacaagctagtgaacaccatgaaggcaagtggaactttgcctacccagcccaaagtcagtgtaagtattcagtacacctcacccagcctctttccctgtttctgtatcacctcccactgcaataataaatgggtttaatgaaggtattctgagcaatttggaaatttctttagaagttgtttggtcttttagaaatttctgtagaagttgtttggtctttggtgtgtgtttgttttttaattctcaatattgatttgttattagaaaaagcacatctgtgaataatgtgtatgtttggggcgtacattcaattataggatgattgaataattcacgtgttacatcagttaatacaataccttcatgaagttctttcctaagaaaggaaagtaattgagttgtaaatttttttcacccagtttggagaaaagcatacttagtatgtgaggttatcgatgcaaaagggagaaaaaagtaagaaattgatcgtttgtgctgaactgagcatagtgatgtgtgcctataaccctagtgtctgagaggatcaggaagtcaggaccaggtagggccacctgattaatacccaattgttt

SEQ ID NO: 19463 - DNA, 1195 bp, Mus musculus
agcactggttaagagcactgactgctcttctgaaggtcctgagttaaaatcccagcaaccacaaggtagctcacagccatccgtcatgagatctgggatgtctgaagacagctacagtgtacttacttataaataaataaatggttaaaaaaaaaaagaattggcttatcagaactgtggaatttccagctaggtttcttctccagtgagagcctagatttttggaagtcctcaggccaagcaaaaatttactttgctttagctttgtacttcaggatgctgaaaagagaaggaagttcaaatcctgtacaaggcctcagtggttttgaagaggccttgagtccattttttagtacccctctacactcctcccacccagttgctagcccaacaggatttgagaagctggtgtgacaaatacctatattggcatttggaaggtagaggcaagagtgttaggagttcaaggctcaccttgacttgaaatgctttctccagccaaacatacatgaatttacctttgctcttggggcttagacttgatggttctgaatgaagatagagtttgtatcagatacactagctgggaatgtgctgcccgttgttgggatctgcggcaagtgttctggcctcttcccccccaaattgaaacgaagacctcacatggatttgtactagaagtaaggtttggagcaaaacagtagtgtagcttatggcaggaaacactatcagagattgactgcaggctgagtgagtgggggtacgtaaggacccaaagctatgtagcctagcttctcaaggtgtctaaagaaaggaagggtagattaccaatgagcagagtttgggcttctctatttttaaagttttaaaatgtttatatcaaggcaaggtttctgttgtccttgctggtctggaactagattggccttgacctaagagatgatgcgacttctgcctcccaagtgctaattaaaggtgtgagtcaccacgcttgccttggtgttttctatttataggttatatattcatttttcctattgcatgtcacttcccaaattacatctcatctagtcatctgtgcacccaatcacaaataggcataacctggtagatttccactaaaagttacttagaggaagtttgtgaatttattattacaggcaagccatggaaatgtgtgtagctgttgcagttg

SEQ ID NO: 19464 - DNA, 1172 bp, Mus musculus
gtcctggaactcacaaagattacctgcccctgcttcctgagtgctgggattaaaagcatcttccactcctggctcagttggtttaaactaattggctgttgaatgacagcgatcccatgactcagtgtgcaacactgctttagcaagtggctttgactgtttgtttattctgatgtatttagaagagggcttttatctgttgtagttctgtgccttttaagatccaggatgctaaatttgataagctggcacctgggcagttagggaagcagctgcttgctacagccactgactctttattcctctccatacagtgctttggtctggggtctgtctgtgaaacataatcctcagaaagtgggtaaagaccacacattggaagatgaagacgtcattcagattgtgaagaagtgaagtcctcttgccatctgctggctggccacagcagtgttccttatgactaagtaccttcctcagcccctctgtctttggcagcctctggattgggatacagggattgatatggagacttatcaaactgaaacaccacaatttttttctttccggagatagggtgttatgtatttcaggctggctttgaactcttgcagctgaggctggcctagaatccctttcatcagcctccatctcctcagtgctgggcttaccactgtgcacctttagctcctcagcaacaccactttccctactttgctgtcacttctattgaactgtataaagaagctggtgggcccgctggccatgtgtcgttattcatgtgaggtttgctgtgtgatgaggtgaatgaggcaacgcctgcttggtcataggaaatgggacagagaatgggacctgtgtccgtttgtccattggtagtgtgctgtaatgataggctttcacctgggcttggctttctgtcctttcaagtggtccttctcaggacattggagagaggaaggtataataggtaaagttaactgcagatttttctccagcgcaatagtctctggattctgagctgagcggactgctgtgatgaggaggtattttcttcatttatatttccaatgctactctgaaagtctcccaacccccctcccctcgctttcttggccctggtgttcccttgtactgaggcacataaagtttgtaagaccaatgggcctctcttt

SEQ ID NO: 19465 - DNA, 1176 bp, Mus musculus
ttatgttgagtgagggctggagagatagcttagtggttgaggacaatggctggtcttacagaaagggtccaggtttgattctcagcatctctatggcagcttgccaccctttgtctccagtgtgggaggagttcaagcaaacactaatacacattaaaaatactgtaattattttagggtttgtacttataaaacatgtttctaaacttatttatagtttattatttaatatatatctttcttttgattgtcttaatcatatataaaagatgggccagttttctgttccagatggttgtctgatgactttaaaacataactgcaaattaatagctaatataaatattggaaatcttaatcattttatatgtacataacaaggaaaaaccatctctgccaaggggctacaaacacttctgtttgagttttagattttatttgacgctgtttgtattcaacttagggtatcatttttaccctcagtggcccgaacgtgtaatttgattttgattgttctggatgtcctaaaacccttgggacataagaagataattgaaaatgagttggaaggctttgggattcgcttgaacagcaaaccccccaacattggctttaagaagaaagacaagggaggcattaacctcacagccactgtaagtggggaaggtgacatggggcagatctattttctgtaagtggggaggtgacatggggtagatctgttgactgtaagtggggaaggtgacagtggccagatctattgactgtaagtggggaggtgatatggggtagatctgttgactgtaagtggggaaggtgacatggggcagatctattgactttaagtggggaggtgacatggggcagatctattgactgtaagtggggaggtgacatggggcagatctattgactgtaagtggggaggtgacatggggcagatctattgactgtaagtggggaggtgacatggggcagatctattgactgtaagtggggaggtgacatggggcagatctattgactgtaagtggggaggtgacatggggcaggtctattgactgtaagtggggaggtgacatggggcagatctattgactgtaagtggggaggtgacatggggcaggcctattgactgtaagtggggaggtgacatggggcagatctattggctga

SEQ ID NO: 19466 - DNA, 1167 bp, Mus musculus
actcactctgtagaccaggctagcctccaactcagatctgcctgcctctgcctcctaagtgctgggattaaaggcgtgcgccaccacattaggtgtaattaatgttttgagttgggtggtggtggctggtagtgagaactagagggtagaggaagaagcctgatatcaacttccagtttatgcatgcccactcaaacacacaatctcaaaagctatgcacatacagtactccggaatgaggctggcggattgcaaattccagtcttccaaactagcctaggctatgtaagtatatcccatttcaaaaaatctggtcacaccattcccagggatcggataaaatccaaaccagagataaacacagagcctcaaatctgtatcttgttttttgtggttctgttttgtttgagacactctcactgtatagactaggctgaccttaaactctcacagtgccatctgcctctgcctacagaatgctgggattaaaggtgtatacctctaattctggctttatttttttgatattgttaatattttaaatttatgtgtgggccagggatagtggtatatgcctttgatcccagcatgtagggggcaggacagccagagctacatagctaccctaactcaaaagaaataattaaaacaaaacaaaacaaaacaaaataaaataaatgtgtgaatatgtggttactaattgtatgtgcaccagtgctttcagagcccagaaggagtaaaatcccttggaactgcatgtgtagctgcgcatgctaagaaataagcatgcatgctttgtgaagagccatctccaacccctatgctattttgtgtatgtgttttgcctgtgtgtatctttgtatcacctatgaagcacccctggaggccagaagagcatactgtatccctcagggaccctgagactgcagttagagaagcttgctagctgtgatgtgagtgctagggattgagtctcgtcctctgcaagagcaatcagtgctccagccccagggttttatgtttttgagaaaggatcttagtccaagctggcccctaaatttctgcttcctctgctttttaccttccaagtgctgtgactacaggcttgctctactatgcctcataaccttcagcccctcctctttctcctccttacttctctttcct

SEQ ID NO: 19467 - DNA, 1105 bp, Mus musculus
ctgccgcagccccgtccccatgcagccccttccctcagttcctcgggcctgggcttctcagctcccatccgccagctccgtctctgcgcaacctcccacatcccacacccagcacttgctccggttttcggcgcatgtctcgacattatttctgtttttcttgcttttttctctgagccacacgacttctatatcccagactccgtgatccgatcacgggctttgaggtcttgtcccgttattccttgcccacttgccactcactggtggtccccttttacacgccgttggttgtgacggtaagatctgggagtaagtagattgtacctggatggcgcgtcatccctgagaccttcagggctttttaaagtccgtaatgtgacacccttcttttagattgggtaccgtagaaacgaatcagcagatgcattttaattccctctgtggatagaaattcgaatgaccgtgggtcctttcacgttgggtctcgtttgtttcttttgtggtgaagagaatgaactggagaggggagagggaattcagtttatttttatgtttctgtgtgtgtgtgttcagcattacttaggggaatcgttctgttcagtcatggtttctgggattgagtttaggtcttccaagtttggcagcaagtgcacttgagtgtgtctatctggccctggattttttccctctctccctccctctacctctctcctttgtttggagacagggtcttgctacatacttctggatgtcagggatcccattgtgtagatcacgctggccttgaactcagacagatctgcctctgcctccagagtgctgacattagccaggcttggtttttctttttaaaaaatacttagttgcctgtatcctcttcagtctgcagtttgctggatgctcgtgaatatgagccatttggtcttcccctgaagcagtatttcaatagacagtttgttcaccttcacctctattgtgggcgtctaaggataaaaaataattcttaggtggagctcaggaggccgaggccagtggtacactaatgaattcaatgccaacctggtttacataataagttgtagtacagttaggaccacataaa

SEQ ID NO: 19468 - DNA, 1868 bp, Mus musculus
aatggggccatgggttcagttctcagctctggatgctcacgtctgtgtgtcccttctctctgcagaccggcattctcaaagctggaggactcgttcgaggcgctctccctgttcttgggggagctggccatcccactgccagcagagctggaagacctggaccacactgtgagcatggagtatggcctaacccgggactcgccaccctagccctggtccctccccctgcagggggacattccacagccagcattgccccctctgcacgctgtccttgctgtgagcaggactgcctaggtttcctgtggattgaaggcttgcttagaggcacaacaagccatccctactacctccccaggaggcacttgggtgcagggaaaaaaattctccgcaagttttgggggcctagtttctatctgtaaatccaacactcacctgaaagctgtgaagaggataaaagagcctggattatagaccaagagtctgttactcgggactacttgggacctctgtggattgagattctgggaggctgtagctttacactaatcaacatgatctgggcctgctgggcaagatgacggagtgaactggcctgagggctctggagtctggctcagcaaggtgcaggacttgaagcggtagtatgagttacagaaacggggaaccttcaaagcatgtgaaatgacagtagcgatttctcctccatcccaggccatgccctttggagcaggttttaaagagtcttagtatgtggtaaaacctacagaatccaacaaaggactggtctctgctcacagcccagggaccacatcagtgcatggggagtttccacttcagcatcctgtctcaacaagcagtcactcacaaaaacaccaaagaaactggggctgcaaacaggccctgccctctaaaagccctgtatccaggctggtgggctcagtcaaaagctcagcatgttgcctaacagtacatgggttctggatgccagcctggtttgcctcagactttgggtctaagcagagagaagggggtcccatcaatttctttgcacccttgtggcagctactgcacatcctctagaatgtctgggccaggcagcaatgtgggacaggcattggtggctgctgagtccccaaactgagataggaaaagaacaccctgagctgggccttgtagattctacctctttttgttgctggtccagcttgcttcctgagccacactcgagggccatgggcatgggcaactatgggggcactttctacccctggctgccaggtgtccagggactctgtagctcaccaaggtttgtcatctaagcgggagctcacgccatgtttaacaaattgggaatgggtttggttataaatacatgtgatgggttgtactggtggggggattcaggaagagtggttgctgttattagcttttatctctggggtgatatgtgagatattttgtacatagacgaaatgaattatgggatgggaagtctttggccacttttcttgctgtgtagactgtacttgcgtgtggagtttgcacacttgctgcagagggaatcctgaactcccgatgggcatggttcagcgtccttgactgagtatgcttgcactgtccccagcaagtgtgggagtggggcctgcactaggccatgaagcagactaaataaattaagcagttaacatagagatgacagagagtgccaaagtgacttagggcctgacttaaacacggaggacaggatggataatcacggtctgaccagggtttggttcccagcacccacgtggtggctctctaacatctgtacgtccagttctaggggtactctacctcatctcacctctgtgggctcctgcaca

SEQ ID NO: 19469 - DNA, 1193 bp, Mus musculus
agctgccctactctgtcacgctcatctccatgcctgctaccaccgagtgtagacgcggcttctcggtgactgtggaaagtgcctcttctaactatgccaccaccgttcaagtgaaagagtaagtgttttgagagccttgcagcagaggttcatggaccaagcctcccagggctcagctcacagcgcttcctccatcctcaccatcacctttctcctgaccttggctcttcacatttcttctgcccaagttgcttcggctgccttcccaacttttcaggtgtcaggtttcgtgtctactcctggaaattacctggcctgatcaatgtgtgtcagcttgattgtcatctttcctccccacctgtggtggcttgaataagattgacccccagaggctcctatctgaatatatagtgaatatatttgaatgcttagggaatggccttaggaggtgtggccctgttggaggaagtgtctcactgaggatgggcttaagggcttcagatgctcaagccagacccagtgagctctcttcctgctacctgtagatccagatgtagaattctcatctacccctctctagcaccatgtctacctgtgtgtcaccatgcttcctgtcatgatgataataaactaaacctctgaactataagtcagccccacttaaatgtttttctttataagaattgatgtggtcgggctggcgagatggctcagtggttaagagcgccgactgttcttccgaaggtcctgagttcaaatcccagcaaccacatggtggctcacaaccatctgtaacgaaatctgatgccctcttctggagtgtctgaagacagctacagtgtacttacatataataaataaataaatcttaaaaaaaaaaaaaaaagaattgatgtggtcataggatcttctcacaacagtagaagccctaagacaccactccaacatacactccagaagagcctccctttgtcttgttcagtactatatacctactgaactaccattaataggaagttattggggttttttgggttttgtttgtttgttttgttttttgtttgttgctttttgagacagggtttctctgtatagctctggctgtcctggaaatcactctgtagaccaggctggcctcaaactcagacatctacctgcctctgcctctggagtgctgggattagaggcgtgtg

SEQ ID NO: 19470 - DNA, 1594 bp, Mus musculus
tgtttaatcctgacccagggatcaagggtcagagacacaccaaggagttggaactcaaaaccaaaggaacccccaatttcaccactgctgtaaacactcttgtataacctcaggtcttgtgctgaatctcctctcatgggtggcagtgtgaagtcctgctccagccttctcagcaggtcccagctctacacagggaagagatgggaagaaagaaacagtttctttaacaagaactttaaattacaaaaatgaagggatgaaccaaatggtatttacagaaacttactttcatctttttacatactccttggtaagtggcctccactccctatcctgagagactcccttccacatcccagtactgctcctcccacctcccgcttcctcagcaaagacataagaaggtcggtcggttgcagcagcagaaactgaaaatgctgatgaccttaccagagactctggtttttgattggctctgggccttgttcagtgtcttgaccctagaaagcagcttagatgacctgctggcttcctggtatagattgtccctgatgtcactgggctcaaatttcccatcagccttctctagacttctgctgaattcaagactgactgttatgctttagggctgatacaagaataacaggacaggttgccctgccctaggctacagaagcctgagtcattctctcacagaacttgcccagagaaactggaggctttctcaggtcagcccagctgcatgtagaacactactaccctcagaagccattgtcctttttaaaaaaggttacgacgctgactccatctgatggtgaaaactccttgaatgtgtgctgagcccagggatacatgaggctcctgagcaagcaacccctctctggtgacataacacaaggacctcagagatacagtgtggtcgacattccttagtcttcctcgtgttgatttgttcttgaacttataagctgtttcctctgaatctgattgtgggattgtgttgacaggcaggagaatagtcacctgctgagacggttcttgctctgcccatcaggcctcatcttagaaatgtcacctctccctggagacctcagcagggcagcaagataagcgtctactggacccttttgttcacttctccaacacccactgccccagcaataacaaactgggagaaagccttgcctggtgatttttctagatgtgactctatataatctctggaaccctagaccttgaggatggtgaaagagccctcctcctcacagcacaatccttacctgccaacgccagtgttagtgttgaaatgaatacagtatgagtattgtgtaggagggtggtttggcaactctagctgttaagaataagccaccaaatttatggtatgcctgacagattttaaatattctttggcgcttggaaatccctggtcacggggcccctggagtgtctctgttctagagagaattggtaggatccctcagtgtagcatagccctaagtagtagagggaaaacttaagccaatgaacacaaaggagatgagagagggattgtgagtagtggagtaaaccatttggaatctggtgaaatgga

SEQ ID NO: 19471 - DNA, 1191 bp, Mus musculus
actcccctaggaggaagtgggtcactggggaatcctgatggtagaataacactagccaaaggggaaggctcccaggggttgaatggcccagctgagactctaccaacaaggatacacctgtgcatgaacaggaggtgggctctccagagagcggttgggttctagagccagaacctgcctgtctagggtgaggcatggctcactccccaacccctcaaattctacctgcttagcctatgggcaggatggcccctgggtttggttgtgggtttcccttcctggaaagcctttccgatcgatggacagacagtctggagtttgtgaaaagacgagcaggctgcgataacgacctcggggtagagggacacagcgagaagcaggctggcactgacaactcctgttgccccccccccccacacttgcaggatgctggtggactgtgtacccttggtggaggtggaggacatgatgatcatgggcaaaaagcccgaccccaagtgcgtcttcacctatgtgcaatcgctgtacaaccacctgcggcgccatgagctgcgtttgcgcggcaagaatgtctagccactctgctcacaccgcctgcgctgcgggctgctgtccccacgcccccagcaccggcacctcccagtgcgcctgcccactgctgccccgtctgtcaaaacacctctcccctttgtacacacgcagcgttttgataaattattggttttcaacgatcctgacttttctctgctgtcttggggagatggcattagactgtgaattatccccaagtgtcccccccattcctgtagctaggtagtgggaggagtcacccgaggatgtcaggaactcctatttgatctcccacaccatctactcgctgcaaataagaagagactccgcgtgaaggaagaagatttagtagagctggggagaggaaagggaggattgagattccccccacacaccccatttccgttgctttggagactggcgtcggccctcagcaagggagatgctcccgggatactgagcgcttcattctgtctccggggcgctggcaggggggggtcccagctccactgtggctcggggctacaggtcgtcgtgttctgaagcttcctcggggggcttagcgggcgcccacaggtactcggggggcacctgagcttccggcgccgacttgcggtagaa

SEQ ID NO: 19472 - DNA, 1210 bp, Mus musculus
gatccaaatttccaaatggagacactgaggtacccaggggttgtagaaatggccaagttcctatcttgtattttttttcctgggggttggaaatgaggacccatgagacaaagtcattgtatctctggatcttgaccctccggaccagtctggaccagctgtctcctcaggccaccgatctccacatgttctgtgagaagtgagcatagatctcttggttgtaataaggtttcctttgactttgacatttctagagcaggctaaagggggctctggtacaggacctcaaagttccccaccatgacagagagccctcaacaccacagctatcttgtctcaggcaagccataaacaagacactcaattccctcttatcagataaaaatgatgtatcaaagtaatgtatcaagagtaggtctggatgggaccatcagttaattaagagccttagctcctcttccgaaagtcccagcacttggtaactctggctccagagacctgatgccctcttctggcctccacagtcacccatgtgcacatggcatccactcatacagatacatgcaaacacatgaataaaactaaaccttgaagggaggacggtagaagctggctgagatggtgtgtccgtcccttaactccaagcatttggaaggcagaggcaggcaggtctctgggttctaggccagcatggtctacagagcaagttccagaacagcctgggctacacagagaaaccctgtctcaaaaaaccaagcaagtggcaaatgggatttagtgctgggtctgacactttgggtcactcactaggggtctagcccttcccaccctaggtcttgacttcttccatggtggctaggactaggccatagtcagtaaaaggggaaaggtaactcactgccaagcagggagctaggctactgcctcagattccctgtctcacatctttcccggcagggccctgctactctgactaggtagatcacctagtcagacttcagctacctgaatcacccttctcgttccttggactcttgtcggtagctcagagaagaagggtgactacactcttcctgctgtggctccctggtctaaagggttaatgaaagcccccggagagcagatgtcaagtcccacaaaggagtgcctggctgcttggcacctggcttgggtcggtggctacaggctgtgcactcacagaagggggccc

SEQ ID NO: 19473 - DNA, 1080 bp, Mus musculus
aattagtgttatagctcactgagatcttactgcttaagtcatccaaccatggacttctcaagtaatatttgcaaagaaatggatacattttccagtgctattacaacttaaaaccaacaatcttgttccctgatagtcatttttaatatttttatcctttttggggggatttcatgcaatgtattttgatcatattcccctaacttccccaaaactattccctaccctctttcaatttcatgtctttttaatcccccagtttgtgctgctcagatacttaatgagacacccactagagcatggttgacccttttagtcaattttaaacccaactttaatcaaaatttataataaaacttaaattctatcgatctgtaagatggtccacattagagaaagaatagaaaaactttgtctactttgtctgctttgtcttaacattgagcttgcttaccatattctggtttccattacctattttttgtatttcagcattttgtgaacaacttatcactgattttccaaaggctttgtgctcttgaagttctttgaaggaaagctgtgtggaagtccagagtaaagtgaagctgctctggatgaagtagtgaagtgggagttgaggtctacaacctgccacaaccatcttcctttaccaccatggtgatgccaaaagggacttccttaaagctcttcagaaaatcctgcttgaaaccactaccctagacaacatgtttgacctggatggcattctcttcaaaacaattcatattcagttgatgctcaacatgtttggagatgctttattcagagaatgatgataattacagcattgtctaatgaagttttattaatagcattccatccaaggtggacttcctggagttggatataaccagagagcaattcatatgtatcctacactgaagaacaccattaactttcagcaacctatagctagtggtactagaagtacgtgtcttggaagtctatgagagctggtattgaagctgatgcctccttaaggccatcttagaccaagttgtttgtttgacctctcctcattaactatggagcagaatt

SEQ ID NO: 19474 - DNA, 1111 bp, Mus musculus
cagcaaacactattaaaatgtttgaacagttgggtttcaaacatttttgttttgtggagtggtgcttattaagtggtacagctctctaagcaagtgaacacaaacatatttaagtgtattttgtatgattagatgttaccaattctgatattttattcaaatgtctaaaaaaataagttgacttattccctttaccaaagggccagagacaaatggtttcctttcaagagaaatgactgttttgaagaaaaactctgttggtcttagctcttttgtaattaaatctggatgtacctcaaaagactctttaagactgtggtgttaaaaggctttcctctggagaaggagaaaaaataaaatcaactggaacttaaaagcttgaaattccatgacaaaacacagatgtccaggattggaggttcataaagtacatgcagtagttggagtggattccattttcagtgtagctgccaccatggactccaggctcccagattttcaagaactggacctgtgacccagaagagcttgtcaagatatgacaggaactctggaggtggacgttttgtattcaattttggaactgttgatcttgccgtgagaaaagagagacacgactcaccaagcactgccaccagcactgtcactgggaacttgaagatccaagtttctgtccagaacctcagtgcaaactgacaacactccatccaaagtgaactacggtacttgccattttccaaaatgccttttcatttctgcacttttgctattcatactctctaccctggaaatgcacttctgtgattcttcacctggcagatctctgcaatttcataaaactaagatgctctctaaccctgtaactctcttaatattaaaaagaacatctttaggataactttaatctcttatatgcagagtctggttcatcacatgcatttggttatttgtttgtttgttttccatatagcaaacactgaaagagtcttggttttatgtatctttgcccaaaaataccatcatttctagtgaagccttttgaaaagcagggacccttaatcctcagtgtatgtataattgctacattataattaacattactctagatata

SEQ ID NO: 19475 - DNA, 2075 bp, Mus musculus
gagagatggaatcctgggggaagctacttgcctagggttctcagggtagagatacttgtactgagactgggagctcactaagctgtaataggaagttgtaggcagtaggagaggttagagacctctacatatgtggtttgatgtggcattgtccaacttttagtataagacactaatcagtttgaagatgtacgggttagaaccaggaaacctataagaaagctcccatccttttttgggcatgcagatttaactgaaatttggaagtagggcaggagcaagaaacagaagctgacagctggctcaggcccattctccagcctgtgttcctgccccatctgactcccacccactctgttccaggacatagacatcaacacagatgatgagctggatgcttacattgaggacctcatcaccaaaggggactgaggagccgggaggctaactcctgctcatacctgccctcaacacagcagcttcggggaggggagttcatttgtgacttggtggacttgatcttggtttgagtcatgtgagacatttgtgctttgggaaggagattctttgaatcttcttccctaagtttacataaatatttattttttaaaagagaagatgttaatgcctgctgtgagaccgtacttttttttgtgtgactcttgaaagggcacagagtctgaaccattcagctcctggcacctcaacataggatgaagaaagcaccatcctgaagttggagaggctctaaggacatcaacaatgggatatgaaagatacatggccccagggactcagctctgcaagaccctcaaggggtgatcaaaacaggcccagtatcagaaagacactccctgtaacagatctcctggtgtccagacagggctgtgaaggtctgtaggctgcctgagcagctgtcagtcatcttggatgtgacagtatccagacagcttggagatgtttcttaaggctcaaatttcccaatatgccacctactttgttactggaggagccatttcctgagtcaaccacactatccaagctcaagcatagacagctctgaccggtcagatccctgggctggatagcactctgaatgttgaactccaaagattctcagggtgtgcaggtgtgaaagctctctggaggagaaggcttccacagtggtgctagttcctggagagcctttgctgctgcttttctactatgtactctctgggctccagagagccctgcacctcccatgctctggaggtgaggaggacagaccatgtgcttcagacaaccactcagagccagaaaggcacgagcttcatctgatggctgtcggaagaattctggttccagtcccaactcttcacactcctgttcaagactgattttgtactcttgatccaaaccaccttgggatttgtatccatcaaggcaaggctgccaccttgtgtcctggggtctctgcagaagatggggaagtgttggtgagggaactgtgcacatatggctggaagtgcctgcttgagttctgccatcaggttgtttaggggggatagcattcagaagttcttctctggaacattctccaatagatgggttttaagttggtgcacttacccccacggctgcccccatccaactttctgttgaccctatccaggcagagtatgatccatttttttccataaacccactgtttaaaaggaatttggccctgcatttttattggcaggtaatactcattttgatttttttttttttttacttacacatgtaatcaaaatgtgttactataaatttctactggtgagactcctgcgttcagtacattcttacgtgaatcacaagacttttctcttcattctgttacagctccaccgttcgttttagctttaacttttccagatttaactaatccagcctcaacttttctgagtgttgggtctttcctgggaacatcatggaatagctgacctggaacattttgatgataaggcattcactggctctaagggagaagtgtggggtttaagatgctaagtaacagtgggtggacgtggtaagaatttaaatactacaaa

SEQ ID NO: 19476 - DNA, 1204 bp, Mus musculus
tgccctggttcccatccctgttatacagccgttagtcccatgtcaacccactggggtcgccctctctgctgtatgagcctgtgacctgagggagcctaccaagcctcgttctgactctctggctggctccggacagctcccaccaccaaaccctgagtgggtctcatagatgtgacttcagggtgatggtcacatgatgtggtcagggtgggatattgccttgctaaccccctttacttcgttgttttctgcaggcattgctgactacaaaccccaggacggggaaaccattgagctgcggctagttagatggtagtcctacgatccctcctgatgtcttcacaccctgctgccacctcaagtgcacttggaacaatgccccccagatcacctcagctaccttcccaaagaggatctaagccactccccacctgggagcaggaagggaaaaaaaacctcccctagggaggctgctagtttgagtttggccctgcctgatcccacaggtctttcatgaagactgccccatagcctgaggaacaggctgctcttgacttcctctacataaagaagtctgctggctatgggtgttgtgagtaccactgctctgggaccagggtcccacaagaaggacctccatggcctgctgtggctctgacctgcacacccaacccctgctctctgttatgagagtggtggtcccagtggtcataaggcagcctttggtcatcggcagggccatccaatacaattaaagccttgatttacctgacatggacgtagagtcctggtgcctcgtgttcatgcatggggggagggggagcagagatctctggggagttacttgtggttactctcctgtgtatcacatggacagttggcataaacagagttgactccatctttcttaaacagtgtgtgaaacagccctgtggggcgtgagcatttgcatctctcgctataaatatggggaaaacagggattcatccaaggtctcaagatgaacagtgctgctataggaagtgatgtcaggcaggagacatgacacagatatggctgctgatcctgatggaccaagagagatttgctggggactgaggctgtactgagtagcagaacacttgcctggtatgcacaaagccttgggttgtgttcccagatgcacaaagcaagaactaaacactatttgatggactagggatgt

SEQ ID NO: 19477 - DNA, 1195 bp, Mus musculus
cttaaactcactggcctagcattacaaaaactagtagctttaggtttagtgagcatttctgtttttgtttgtttgtttggttggtttggtttttaaagaaaacatcagccaggcgtggtgacacacatctttaatcccagtactctggaggcagaggcaggcggatctctggattagaggccaaactacagagctctctgaatcccagaaggctccgggctgtctgtctcccatcccttcagtcctgctgtatcccaaaatgcactggggctcgcgtgctcaaacaaccgtgtctagggtgcttataaaactgcctaaatttccatgttgctttaaagcttgtctatagattttggtaactaagaaaagaactgaaagaactaccacaattgttgagctttagagaatttggttgtaaataacgaggtcgccaaaagcacaactttctctggatttgtacaggcatattttcagacagccctcagctggcggcgtggggtccttcagggccctaggcagggcacgtgcgggaggaagtagctctggtgttctggctgccttgaatttctcaacgtggagctatgggaggtctggagaagaagaaggtgagtgagttccagcggaggtcggagctccggctttatcactttccctggcctctggggaccgagaagtcttgagacggccgccggagcgaaccttctgcacgtaggcccctggaagccgggaagaactgtgacgggctttctgtggaaggagttgtggagacaggcggagccgccaaaagagtgatcagtgaccaacgggacgtagaattcattatcaagacttgggactttcttaattgagccaggcccggtcctaggtactgggaattgagaagtaagcagtcagatgcggccccgctttcccagtgtcaacttcagataaagtggctaagggtttttaagtgcgctcctgagaaagggagggagggaggagcagtagagtggagagtatcaacaggcgcttaatccgattagtgttgtcttgtaggtcctcttctgacgtagcattttagtggaaatcagtacttaaagaacactttagtctggggcatgaaaatgttgggaagtgtggatggtccccaaccttcccctaagagaattctcggcactcagagaaaggagagactaatatcagcgtgcagctgtag

SEQ ID NO: 19478 - DNA, 1111 bp, Mus musculus
gacagggtcccagttagagatggatctgtcagatacatgcatcggactgctgagaaacgggaagacaagaccacccaggtgccagtgcgcctggggaaggaagcccactttccctggcctactaggtcgacttcccgtttttcctttttctctgtgggcctttccagtttcaagtagagtcaaagagccatcaacttggtgtcctcgttcacagaaggtaacatggggaaggttcctgaggtcccaagagttcactggaactttctagttttcagtggctacaggattgtttgcagatgcatggccagctgtgggaaagttgttgctatcaccatctgaggaagtagctgtggcagtgcctagcttgggtgtcaaggcctctggatagagggccttggaacccaatggagtgggcatgaatgctgccctctccaccctgcaggtaccccacatttatcgatgctctgcgggacctcgatgatgccctgtcaatgtgcttcctcttctccaccttccctcggactggcaagtgtcatgtgcagaccattcagttgtgccgtaggctcactgtggagttcctgcactatgtcatcactgcccgagccctgcgcaaggtgagctgaggctcttctggggagccctggtcctgccctgtcactccttggctttcatgctgttctccctccctccccaggtcttcctgtccattaaaggcatttattatcaggctgaggtgctgggtcagcccatcgtatggattgcaccctatgctttctcccatgatgtaagtgtgcctgttggcagggctttgtgctgtttcctggaaaggtgttggtggggtgctgtcttggagtctagcccttgcttggttcctgattattggcagctacgcgtgatgagagccagggacagaatagggactatgctctacagcccagtcggtcaataaccctgatcagtcacagttctcagtgtgatatgagcatagacgcataggctaagcctgactgtccactccagcacccctgctagagcagtgcttctcagccttcccgacactgccattctttaacaggcttcctcatgctgtggtgaccccaaccataaagtt

SEQ ID NO: 19479 - DNA, 1327 bp, Mus musculus
tatgacactagtgtgaccaccttctggagacacccagagcagaccctgccgacctctgactggttcttaggagcattacttgtagcccaggaaggagtcttgttccctgtcttgccgtcttccagtaaaggcttgagtggaatttgtctttccctcagagaagctaatggaagagtaggcctggattctccaagctggagatttgtggaccatgaaataacgagctgtatagcagtggtaggagctctgagatttgtggaccatgaagtaacgagctgtacagcagtggtaggagctctgtccttttgccctaaggttcaagttgaaatctttggtagcttttctagaatagaagttctgctagaaacattagccccagtaagggaagagccccctctcgctagctcacctcctccctccccagcctgagatcctctttccttcttacaggccaacaagctggcagagaagaggaaagcccatgatgatgctgtgaggtctgagaaaaaggccaagaggacaaggcccgtgtgagctccagttgtccctcactgagatttggacttggcagaagcaagctagtgaaacacacatacacaccagccagcactctcatactttggtggtatgtggctagccccagccgcctttgtggttcatgccagtgcctgggcaaagagacctcaacccaacgcagttcttaatccaggagtccgtctgacatcctcattttccttggctttctacagcctcctacatagctgtgcccatcctgtgctcaggatgctgttgcggagtgagggtggtgagcttttattattaaatggttggatctttacagccaattggattctgtgttcagaagcctccctgggattggagaggtgtcatcctctccaatccagatgggttcaggcacactaggactcccgagttcaaggaaggtagaaaagacacaggttctgggcttgggtttcagtcacacttgccctggcctggttcctgtttcagctcaggctctactctgaacctccttcctcaagttagggttggaagttctggaaccttcccacaagcagtatgcttgtccaattcagtcatggtccataaacaactgtcttccctcacttcctgctggagttcctgagaaggtgaaaggaggcatctaagttgaggtttcctttgctgtgatgaagcaccataaccaaaaagtaagctggggagaaaagtatgtatggctcacacttccacattgtatgtacaaaagtgtgtatggctcacacttccacattgtatgtacaaaagtgtgtatggctcacacttccac

SEQ ID NO: 19480 - DNA, 1184 bp, Mus musculus
ttatccttggggggaggggtgtaagcatgacttccttaagggaagagaataatcgaatgtatcttgacatggttgctgttggtaccatgcatcgagagtctttcccctagcccttgtgtttcctgcatctcctcatccttggctacctgctcaccaggccttctctctctgtaggtcagtggacttcctcctggactctagcctgcgcaagctgtacccgtcagtggagaagcccagcaccccctgaccctgccctgtgccttgcctggggtcggcccactcacatcaaagaatgtggatacgtggctgtttggggtccatggcactgccatctgggtgggttcacattgatgggagcttagagatgaaggccccgaggagtagtggcagtgagttctgaggtgggacccaattctgtctgcctcagtggccacggttgtgctgagtgggaacgaactctggctgggcctgtcttttgaaatctttttttaaaagtatttattttatgtgtataagtgttttacttgcatgtctgtatgtatgtgcagaacccttagaggttaaaagaggtgattagacccctctgggactggagttagggatgcttgtgaacccccatgcgggtgctgagaactgaatctggttcttctgcaagagcagcaagtgctctgttcactaaagttcctcttagccccgggcccaccttctgatggaaaagttagttcctcccatggaagagaagaatactaaggcccagagagggcagggaatactgagatcatgtgacaagtgagagccagtcttctggctattctaagtcactttgtggtagtgtggctgagcgacttagggaaagatacagaggtacagtatttgggacactcagggcagagtctctggccagcctgttcctgttgcaggagctgctgggcctggtgagaggcaggacaatcacaacccaagtgctaacctaataaaactttcaaaaatggcatctccttttcatttcctcttcctggggataagcagggttgcgaccacagcacagtgcttcctctggaacaggtaaactgagggagaagtgggctggtctcctggctctgcaggaagggctatggggagaacaagggagggatgtgttcaagcctgttcaagagcaatatcagatccaaggaaaagaaaaa

SEQ ID NO: 19481 - DNA, 1099 bp, Mus musculus
ccaatctcaggagtaacccaagtcagcactggaaggaaggctaacagcccccccccccagaacctcattaactcctgggttccactggctgcctgtttaaaccctccacaagcacaagggtaattaatttcagggatcatagataggaaaggaccaaggaggcggtgggtgggccccaagcctctcactaagtaaccctccgcttgagcagccctacacaaagatgacaattggggctgagacagcactgagtgcacttcccagtccagtctcccacagtgcctgagaaccagtctcctgacaggagcaagggcttggtgggcccttctctgtggaggcgtgtaatagcagcagtggcttcctcttgcctggggatgcaggtagccagggtgggcggtttcccgggaaggtagccatagctgggcaaacatttgagccagggtaaagaggggggccaggcacaggtgaccttgcaataaaaagctcttgaccccacacaacttgagagccaggttacaggctgcccagaattcaggaaggatgccccaggcccttgcggggtctgccttttcctctgaacgaggcgttggcccagcctcgtctcaggaagcggagggagctctgggcaggtgcagggatggcaagcagagagggccgaggctacccaggatctagtcacacatctcaggggcacagcctggccttggtttacaatgctgttaggtacattaaccaatgaataaagtgatcaattttcaaagcaaagagcagaattcattgcccatcgccggcttcctagcggtctcttacattagaccccaaattttcagatgccaagtagcaggctaaaattacacacacacacacacatgttctgttcctttcccctctactctcacgacactcggacacaggcacgcacagagagacagtaacgtccctttcctctcctctcgcgacaacgttctccgaagtcctaacaagttgccttccgattggttcagccggtgagcgtcgtccgccatctttgttcaaggcattcggatgctcccgagagccttcacggtgagggcggaggccccgccccattcggtggttc

SEQ ID NO: 19482 - DNA, 1179 bp, Mus musculus
agacctagctgacctaaggcaaagggcagaggtggccagtcctcattggtcctctctggaggtgtcctacaggtcagtaaccagataaaggtctctgctgttgtaggaggcttggggctgcctgtttactactgggtagtgagagatcagggataggggtggctatcctgggtcactgtccacctcccttggtggctttcctagtatgtttcccttttgtggccacctgcaggagctgtctgctccatcatggttgtccacccccctcccttggcttcttttgtagtctttcaaactagctccactatcatttttgaacaaagtcatttgagactaccagcttcctttcctttgttccccattcctttaccaaggcggcaggaaggctgcagaggaaagagcctggatctggactcacatctgcatccagatgttggaagtgttgctgagcctctttgtctttcatctctccatctgtaaaatggggacagcgacacctctaggggctctgggagagatgtaagactctgggagagtgccaagaccagtgctgtacacatgacaggtgcttggcatacagacagcgtttgctgtggcatggccagagtgcctgctatctctcactgttggctgggaacacacccacttgcccatcagattagcagggagatatgctcataagtgaggcagggcagtgtcctcttccctttctgtgccctcctctcctacccagctccccttgcaacacagccagtgtctacaatcgttgtaaaggagggctctggcaaaggccccgatggaggagtgctctgggcagagggagatgggcccgcccactcacccagctgtctctccctatagttccgagaaaatgttcaggacgtgctgcccaccctgcccaatccagatgactacttcctccttcgatggctccgaggtgagggaagaggggctgggacaggggtgtgttctggacaatagaaggatgtcctctggaatccctggcaggctgggacagaaagacagctggcaatccccccaggccccagcccttctacaggatacagacacggaagctcagacaggtgaagggacttgctgggtgagctgcaggcaggaagaagatgcgagtctctgggtctggactgtcagcagccttttcgtttactttgtaagtct

SEQ ID NO: 19483 - DNA, 1211 bp, Mus musculus
actttgcatctgttagaaagaaggaaggaaaaagagatgttctagaagaagccaaagttccatacttcgctgaccttcccttaagcttccatagtagtgaagtctagaatagcagtaagctcagttgtgtgaggctgcatgtggtcaaagacaggtggtgtccattaagacatttgtctgtcttccagggcatcttcatcaaggattccaactccctggcttactacaacatggccagtggtgctgtcatccacttggccctcaaggagagaggcggcaggaagaagtagcaagagatactgcaattgaaaccttgccattgtacctctttgcaccaccaattccaggagtgtccctggggcctcaggcacagcctgggcatttgtttccctcaaagccagtctacggaatgaatatcttgtttcaattctggattggaggtccttcaaggaagtccattagaagttgaatacccagggttgtcccacaggacagtttcacactatcgagtgatgcttagttaatagaatatggttaatgccattcatcattttgtatcatgctttggtttcttgaagccaggcatagtacatgcatgcctgtgatcctgggacttgggatgtgtgggcagaagaattaaatgttcaatgttcacctcggctgtatagcttgaggccagactgggctgtgtgagatactgtgttttggttttttgttgttgttgttgtttttggtgggttttttttttgtttttaattaaaaaccgaacacttcttggaccttcatggaagcagtttgtccctgccatccacagactggcttagaaagctctgccattcttacctatgcagggatagctagtgcacaacaactctcctaaggacaagggtgaaattccaagtcaattaatagggaaacaaatggatcgctgagctttggggtctctgcagtcttgatgcttataatatgtttttgctgccatcgtgcctttcaagtacttctaaagcatcgtggctggggagatgccttggtgagtacagtgcttacggtgcaagaactgatgtaagagccactagaacaagccactgctaccctgtgcactaggagacaagacaggcagagtcatcctagcaggccagtgaatgagaaagacctggaaggcaagggtgaacacctatggctgtcttctggtctccatgtgtttgccgcag

SEQ ID NO: 19484 - DNA, 1159 bp, Mus musculus
atctaaggtaagccacccgtgtctccaaccctcagatgaatgtgggattgtggcccagattgcgggtcccctggcggctgttgacatctctgcttactacatcagcacattcaactttgaccatgcgctggtgaggacctggctgggacggaggttccagcaagcacactgaggtcccttgcggggggagggggggggcagcatcacagctagtttagggggtcgggcatccctggccagagttagcctggcgtttcatgctgtacactccctccaggttcctgaagacgagatcggctgtgtcattgatattctccagcgaaggcaggaaagccaggcttccaaggacccatagggaagcaccagacccccagcattcccgtaaagccccccggggctccagaaacttttctgagcttcagaacaagtccctggtcctgccaagggatcctggttctgctgtctgtctgtcagctgtatggagctgggactcgtggccatgcctggttctgctgtctgtctgtcagctgtatggagctgggactcgtggccatgcctgcccacaaaagataccttggtgcttggggcttagatccccgacccaacattttctatgtgacctcagcaatgcacagagcctgcttgcctgcagctggagccgcctctcccctggctaaggctcacatccccgggccgggctctgacctccagcctgcactgctttcctagccagatgagttcagcagtgcactcccttcgcgggactccgaaggaagaattaaatctcacttttattttcatgactgtttatataaataaaagacttgcggatttgtgccctctggttctgagtgacagctggcgtcatgtcttggtctctcccagacttgtccccccgtccttggcttttcaagcagtttatgtatgtgacaaatgaggaactgaagcctccagcacatttgtgactaagtcatgtggttcatctctaaagtagagcgtctcttaattcgtagttacttacagaacaacctagagagttccccacactgggagaaattcccctgtccctcttacctaagagtcccctggctggatcctggagaacctatccaggaggtctcaaagcacctttctccaaggctgctgtctgcaacccacg

SEQ ID NO: 19485 - DNA, 1131 bp, Mus musculus
acagagtcaccatcatctggtcctttgctgtctctcagagaaactttggaaggcttggttgggatgtgagagagctaaggggactgggatccagaaggaatccttttattttattttattttattttattttattttattttataagttttgtgggtggaagggtaccctggggtggaatgatggaatgtgtcttctcttgagttggatgagagagttcaggcttagagactgtcagatggaagagtctaggtcaccagtgttcaggctcccacagaagcacagcggccagcttccagttgtcaaagcctgacgaactcggttagcttctatgcagttccccccacagcctggcgtggttggggtctgccagctggacctagaggtgaggtgtgtgcaggcaggaagaggcaggctgcaaaggcaggttcccagagtcctcccggggaaggacctctaactgtctaggagtcagggaaggagcaaggcagccagccattgctgaggcagtagccgactgcagctctcatctgcttctcaacccctgagaacaggtgatcttgagcagacagacaggtagcataaagtagaatgtcgggtctgaggccccggaggtcgcaaaggtacttgaaggggaccagagggctgtcttgggtccctggagcatggagaagcagaacttgaggtcagggtctcagggaagatgaggcccagagtgctgtgtttgatccagcacagctgtctatttattactatgtcctatttatattaacttattggtgctttaaatggcaaagttaattccccgaaatggtatgaggctccttccatgggagctggggccgagactctccacctagtggggcctggtctggaggcacatgattgttacaggtgcagctcatgggtcaaatcagagagctggctagctcctctgtctcccactgtgactcacttttagggtgtcagggtcccccagaaaaagctgggccagtttgtctctctgcttctgtctctgtctctccgagtctgtctctgtctgtctctgtgtctctgtctctttgtctctctctgtctctgtctctctctctctctccccgccccccccccttctccctctggtctccaaggg

SEQ ID NO: 19486 - DNA, 1102 bp, Mus musculus
gtctgtccctagtgctgattcctctgccaggagctactcttgcagcgttagcactctcatggcacccgtcctagtcacctctgtctggcccccacacccttagtcttgtttggctctcgtcttggtcagcagcattaccaacatgggtaactttgtccttttgtgttctttgcttcccatccttgtgctgctcccagtgaatagtgaggtcaagttgggcttgagtggaggctgtcattctttcagccttctagcccctcgctgctctgccaggaccttgcagcttctcttgctcctcctcaggcattcctcctttaaagcagtatcattgcttctcagctcagccttccctgcaacccttcacactgctgcccagacatgtgtcttcacaaccctttagctgcacaccgtgttaggacaaagtccacacttgagagatggtattctcagcccgtcgcaccccttcctgttagtctcattgaacacattctcagagtccccaggggtgtggctgtgctgcttcctaccctgtacctgtgctccggctgtctgcaatgtcttctctgcaaccctgtactttttttctgaaatttgtctattatttaaatgcattttatacatcaaacatgttaatgatattgaatattttgagaatcaaataatgcataaaaattttgttcaacttttatattcaatatcctttcataccctaaaaatatcattaatgaatatttaatactatccataactgagaatcctatatctaatattgaatactaaattgtttcaaaacatacaaaatattctttgggaattaagcatagtaaaagagcataaaatattaaaaacgaatcattaaaaaataaattcaaaagcccttatatgataccacctgacacagtgagagagtatttaaaacacattatatatccgtgtacattgtcagtgctcttaaacgctgagccatctctccagccctctgtgtacagtgtctaacaatcagtttacttaaaaaaattatcagtgtttctaggataaaaattattttatcagtaagtatattttaaaaatttcaaaatagcaaaaattctttgaagttaaa

SEQ ID NO: 19487 - DNA, 1206 bp, Mus musculus
atgaccaccacccatctttgatgtccttattaaaaacaatattccatgaaatagtagtttccctgtcttcaccatcatccctcagccctgaaaaccatccgtcatataagaaatgccttacttttaagactcaataatgctgtgtattgtatatataacatctctccatctgtgaatgttgtcctggctagttttatgccaacttgacacaaactggagtcatctgaaagagagactttcaattgagaaaatacctccataagatctaactgtaaggcattttcttcattagtgattgatgggggaaagtccagcccattgtgggtggtgccatccctgggctggtggtcctaggccctataagaaagcagactgagtggatggagagatggttcagtggttaagagcactggctgctcttcagtaggacctctgttcagttcccaacacccacatgacagctcacaactaatattccagagaatctgtcaccctcatacagatatacatgctggtctccgtgttctctgctatcagctaccgcatacaggtttctgcagttttaaattccttacctgacctccttctattatggacagtgattggattaggacgtgtaagccaaatgaccctttcctcccaggttgctttcaggcgtggtgtttcgtcctagcgatagaaactctgactggggtggacatgtacgtggtttccactttggttgttgtgagttatactataaacgttggtgtgtacatattctttatgctagatgctccactactaaactatgccactatacttccttataaattttagaatagcttttgtttttatttatgtaagaaatgttactaggttccttttcactcatttagtaggggaggcggtacatgtgtgtcacagtgcacgtgtagaagttagatgacatctcatctcttcccttctgccttattggttccagggattcaaccaggctcatcaggctttgcagcaaccatctgtacaagctgagctctcattggcctattgttaggattttgaaaggtttcgctttgaatctatagtaatgacagtgattatattaagtcttacagctcatgaatgtgaacatatttccattgtttcactgtttcatatattgcttaagaaactctttctaccagacatagtggtgcatgtctttcatcccaggactgtgagggc

SEQ ID NO: 19488 - DNA, 1228 bp, Mus musculus
ttaatggcacaaaaatccactgattatatgaagtgattcaaatgtattaatttgatcaagaaaaaggtataattgttttaaattttatttcaaaattttattctttttaaaatatttatttattttatgtatatgagcacactgtagctgtcttcagacaccccagaagagggcatcggatcccattacagacggttgtgagccaccatgtggttgctgggaattaaactcagggcctctggaaaagcaatcagtgctcttaaccactgagccatctctccagcccagaaacttaattaaaaaaaaaaaatccagtgttttctttcaatttggggtggtatgtggtttttattttgattttgaaaccaaatctcactacatagcccaagctagccttaaactggctggcaggtctctgcctcctgagagttggggagagagagaaagagagagagagagagagagagagagagagagagagagagagagatctcactgtatatcctactctggcctagagctcaggatgcccctgcctcttttctgagcactgccccatggtgaacccccatgcctggctttcgtttgtgtcgggaactttgatatgatattgagtgtgagtctgaagagctggctcagcacttaagctgctgcagaagacccaggttcaggttccagcaccaacatggtggctcccaatgtgactttagttccaggacatcccataccctcttctggctcccatgggtgctcgtgctcatgcaggcaggcagaacattcatacacataaagtaaaaataaatactttttttcaaaaaaaaaataagtttagggctagtgaggtggctcagcagataaaggtgtttgcaccaagcctaaaacccacgcagtagaagaagagtgtctactcctgcatgctgccctttgacctccacaggagcactttggcatgcctcctcgatcaatacatgtaatttaatattttttaaaaaaatattgtttgggtgcctgctcgtctttcagcacttgtcttcagtgtctgtctctttctctttgaggtagggtctagccatgtagtgctggatgtcctggaactcactgtgtagaccgggttggtctcaaactcacagtgaactttgcctttgcctcatgtgtgctgggatcaaaggattgtagcaccacacccaaccttactctcttattagaagaatcagcaacacgtcagatg

SEQ ID NO: 19489 - DNA, 1183 bp, Mus musculus
gttcttctgtggtctagctttctgtattgctgctttttgggaagtttcagacctttctgattctaagtccttgttcattatctgatcactcctgtctgaaagctttgttcctcaaggttttcaaattttatagcagcttcccttgatgtaggcctatttttatacattatttgttctggttacatagtgacccatttcattgagggagggcactccctcaattctgggaaccttcttgaattatttccttaaggaaaacaatgtctcatcaagttcatttcatgtttcttctttgtggaaccccatatagatatcagatctttcgtataggtattctgtttgttaaaagatttgtaatcagttttgcatatttctactgttcttgtcctggggaaagagaactctcaacacactccggattctttctcatttgtagactatattttcatttccaagacctttgttgtttttctctgaatacagctttctgatagcatcctgttcttgtttgtggttatagatttgtctcctatctttgaaaatattaattacatgtattcagtctaggagggttttttaaagggtgtgtttgtctgtctgtctgtctgtctgtgtatgtctgtctgtctctgtgtgtgttagtctgtcttcaggctcttgtatttgtattatttatttaaatagggctaacctcaaatttggcctcccaagttcagggattacagccatatacctctatgtccagcttacgagtctgtctccctccttcccatccacgtgttagtgtttgtttcttctgttctctatctcatctctctagctcctatgttcacatttaagagttcagagacttaaaaaagttctgaagcttgctgtggccttcattatataatgacttgttcaaatctttgggagaattcccaacatctgtgttttaaagtctttgtttttcttcatcagtgtccacaaaagtatgctatttagctaaacagacatgagatgtaaaggcccctcccgtcgtgtgtgtgtgtgtgtgtgtgtgtgtgtgtgtgtgtgtgtgtgtgtaggctagaagaaggcaatctcttggaactggagatataggcaatcgtgagccacttgaagtaggttctgggagaagaactcaggtccctggaagaacaaccagggcttttaactgctg

SEQ ID NO: 19490 - DNA, 1135 bp, Mus musculus
tcaggaactccaaagctataaatcaactatttcttagtgacaaagagctgactaatgtgtaggctaatttctgataatgctattataaatagcattacaataaataccttgcaagtgtgacacctcctttccttaccttctattggattaacagtagcaggagtgaaatatacatatttttgaaatttgtatagagtttggatgaatattatcaatatatgataatattcagaaacttccagtttttccacctcctaaggatggcatttttgataatgatagctacttgataaaaaggggtagctccccatcaccagctctggttacatctattacatgcatacatagacatatataatatgtacatattatatatacatataaaatacatgcgcacatatgcttttgttcaagatagagtatagatgactgtctttaggatattacaaaaaccaacgattcagggagttggctgagctaaattgatctctgagatctctttcatgctcagatttactgggctgtattaagactggtaccttgaaaacaaacaaacaaaaaccaaaaaataatggtgtcttggccagacaatggtggctcatgcctttaatcccagaacttggaagccatagttaggtggatctgtgaggtcaaaactagcctggtctacatagtgggttccaggacagctagattcatgtggaaagatcttgtctcacaaaacacaaaacaaaaacaaacaaaaaaagatgccttgctgtgaggaaaacgatacagaagatgtagtttttgctctgagaactaactgaagacacagcaagtatatgttatgagaatattagagacgatgtgaatgacagaaagttttcctatttttatggtctcaccatatagctctgtctaccctggaactcactatgtaggttagactattctcaaattacaggatctttctgcctctgcctccaagttgctggaactaaaggtgtgtcccagcatgctcagccttttcctcagtttgttaaggtagaaggttaagctgagattttgggtataacccaggcttgcctggaagtaactcactgtgtgtccaggctggccttgacctgaagatcctgctacctcagttttcagc

SEQ ID NO: 19491 - DNA, 1583 bp, Mus musculus
ctgcagtatggagaatgtcttcaagtgtagacaaaaaaagaaagccagaagactagatgctttagtaacctatgtcggagtgaggaggggatttctttgagagacaatcagatggtagataagcatagagctagagactgatttcatgcttggagagctgcagagataagcttatctcacaaatgggctacctgacctagaatgtgtgcaaatgacttgaccgaggtcatacagctgatattagatgccaggtcacctaattacaaatccattgttctcattactagaacatgtgactatttgaaagtcaaaaatttaaaatgatacttaaaatgcatcaagagtatctgctattcagagattctgtacatatacattgcagaaaatactattattcccttgttatctcttaaaaactgtctaccaaatgtcctcatgtttaatttattagatgacatagctaaaagttgtgttgttttggagtgtactgtgaatgttatacgtgattgaaaggtgccatttttctgtgactacagcagcagcacaagctttgaaagtgggacagacagtgaagatattaagaaagcctgttccctactaatccgtcaattgtatatactgatgcagaatcttggaccccttccgaatgatgttatacttactatgaaactccattattataactcaggtaggtagagaccttggttaaattccctgttaagtgcgcaggtgatgttgtgtatgagtagaaggatttgtgggcatctggaagatgtttttactgtacatgaagtagttatgtcacgtactctattgaaacttaatttgaaatatttttgtcctttctgcagtgaccccacatgattaccaaccccctggctttaaagaagcggtgaattcacacttcctgctgtttgagggggagcctgtgagccttcgaatgggttcagtctcctctggctttcacagcatgaaagtaaaagtcacaacggaggccaccagaatgctcgatggggagaacagtgtcagtcaggacgatggcactactgagatagctcatcaggggctagactgtgacgaggaagaggaggcctgcggcagtcaagtaaggccaacttttagtgacccttcattgttttacttaaacacaggtgacatttccagtttgtatttaggtcatgtcacagtaacagagtccagtggagcatgccagctatgaaaactgaaacaaactagcttgtgacgtcaaggactttttagtaaaaccgtccttctagaaggaaatctatgctgttgtatgagattgtctagcaataagaaaaattcctagagtgtttttatagtacttaaaaatattctaagtatcgggtttgttcatactcaatagaagtatacattagctcttaattagtagtaactggacatgagggctagggaggaacatttttatggattaacctgaatcagagagagagagaaaaaagaaataacaacatctatgacaagcattgcggtttgattgctggggagagctgaggggttgagagcttgcagccagtcccagtgataagtagagcttagag

SEQ ID NO: 19492 - DNA, 1373 bp, Mus musculus
attttaacttcctgtttcactgaacaataggtgatcctaaaatatgtgtttagagactttgtttttattcatttgtttgtgtgtttgtttgtttttgggtttttgagactaaagtttctctgtacagccttggttgttctgtagaccaggctgtccttgaactcacagagatttgcctgcctctgtctcctgagtattgggtttaaacttgacctagagactttttttttttttaaagtttgtctattaaagaccaggtgtgtggcacatacctatagttgcagcactcaggagaggcaggaggatcattactttcaggttagctgcacagcacagaaaaactctatgtcaagagtgaatccttgtaagatgaaattcttcttgaagatgaactctgggtgtttttgttagttttgtatttagcactgtttaccgacataaaggggacagaccaagtctctgacctctagaagcttatatttgtatgaagaagaataaccaatgagtaaatagaacttagtaaaagtcatttaaggtcgtaatgctatgaagaaagtatgaaaggtgttgtgctggtcagaaggagggctgagatgccagttttagattgacaaagccataggaaacatccctgggggctagactgctgttggagctgagatggaataagggcaagccacagtaatgacaggtagaacagcactgagggcaacaccaggttctggagtcagaccgcagctctaccacgtcctctctccatcaatactgacaacaatgatgctacctcagagtgttggtggcataatccggaatatagacacactgagaccccaagtcaggaagtgtttatcggcagaaaagagaccccggatctgtctcataagtgaaaaagggaaatggcagaagagctaagtggaggagaggtgaggaggctttagcacaaggacagtgagaggccggggagcagtgacacgctttgatttgtactcggaacgtttctttttgttgtagtccgaggaattggactcaggccttgcctagatcctccccgacccttgccccccctttttaaaaataacattattgagatgactagctcagtatgctactcaggttggccttcaattgtgatttccctgcttcagcttcctcagtagcacttcctgagtggaagcatatgtaatgtgtacctggcctggtttgtattcaaaaactcgtggctagaggacagagaataaagatcacatggatgtgtgactcactttggagacagacctgagaagtcttttcagtgacttggaatagagagtgagaaacagtttgaagatggtgaacttatcaagaattaacactttaaaatattctttatatct

SEQ ID NO: 19493 - DNA, 1197 bp, Mus musculus
gttctgagcccagctgaacacaagaagacagctcctctttgagggcacaacaaagatgaatgggatacattgttgagggcttaggtgacttataacttaattttcttctgagaatgtgtttatgaatgaataaattattttatgattttattgagttgatgaaatttaatgcagagactttatgccagatttagtaaaagcttatagtgaaaattcaagtggttattaaaatttgctaccaaaattacagttaacttacacagctctcatttggaaaattcaaaataagaatttttctaattcagattcacttttgcaattttgatagggctaagaagaactattttagctctgtttttcctttgtatttacaaaattaggcttggtaaatttttcttgtaacaggacagtctgagaaattgtctatacttaactgtaattgattttaatttttggttttagggttcacttacatctttggaaagacaagatagtaagtattatgttagggaaagtctctaattttttttttaacaggttggaattgttgaaagaatcctgattcattctcacgatggctactgcgcagctctctcacaacaccagaacactgaaggcgtctaaggtatttgttaagaattaaatagaaaaatcaatgaccatttagtgagttacttaatttaaaatttcttcagcagcagttttatcagctaattggcacataacactctgggaaagtatttcttcattttaatgcctaatggatggggatattcagaaaatcaagaccaattataaagttatgcactgggtacttgtttcctgcttactagagtaaaagaaatcagaaacaaaacgacgtttaaagagaaggttctttgttaggcatggacttcctgaagcaattaggaagcttgtagttttcagaaccagagaggagatatctgaaagaagctttgatgctgagagtctggggaagaatgtattagtcacttcctgtggggaggacaaaatatatgagataataaacttaaaaggaaggaggatttattttggctcacagtttcagaagttgcttctattgtttttgactcagtatcaagacagaacatcatggagacatgcagggaaaacatgtggcagagcagagcggcggcacaccacagaggtcaaggccaggagtgggggtggggagga

SEQ ID NO: 19494 - DNA, 2720 bp, Mus musculus
gctgctctctgaagttatttttttctctcacaaaaaccaacagctgaaactaacgttgtttttttttcttcttgtctcaaggaattgtgggaatgtattctgctccagttgttgtaaccagaaggttccggttcctagccagcagctctttgaacccagtcgagtgtgcaagtcttgctatagcagcctccatcctacaagctccagcattgaccttgaactggataagcctattgctgccacttcaaactgaagctcagtgacccggggtggcagaggccatgctgctgttcctttaacaggctcacacacagcctgggcagtccaagaggcccatacattttggaatgggggcatggaataacctgtacagagattgggatgtaccactggattgtaaattgatttttgtttcatctccccttcccttccatcctcttctttgccttctaaaaagaaaaatatcccagttgtcttaattttttttttaatggaagcccagaggttgccaggctcttataactgctgagccgcttgctgtcagtcattctgtgagatcactcagtgcttccctgtgggaggagccagaatgaaggcctgagacagcaggacagaaagtcagcctcccattggtaaccattcttcacatcacagctatgtcagagttgactggtaaaccttgctgctggggaggctggaagcccttttgagagtacgttcctgagagggatagggccatcccacctcacagacaaaaagcagggtggcgttgggaggaaagcacacagtgagctactccccaggcctcactttgaaacgagaggtatgtgctgcttttgagttaactgaggggctagatgttggcccatgtggatcccaactttaacatgaccaagattgggtagggctctctctgcctccttgggcttctagacagaaaggtacagactggccagaaagcagtatcctcctgcagtggtcaaggcctgcactgagcgaggcacctgggagccccctctgggttccacaagcaatctcttcctcagccaacacagggaaatccagactcagggttccacaagtctcctattccaaagcaaaccaatcatgcatctccccttgagggacagagtccccacagttccaaagctctgcacacaatcagccttcctcttctacttctggggcagcaggaaggacccaggagccccttgtcctgcttctggctgcctgagtgggcacatgtctgactcctgttatctatcagtgaagagcccttgatgattgtagggctctaagaaaatgacatggcctggaggagattcggggtacctttcctcagtgagctttgatgtggtccaaaaagagccttcaaccagtagttatctgtggtggaggtgggtatgggaagggtggagagcagttttggtttgtgctttgaattgttggcatctatgtttgtgaccaccccaccccccaagggtgatgcttagctctgctaagagctgcaaactggtaagagagcagattatagtgtgggggctgggagaagttgggagacagctcagttctagcctggcctatatccttgccccgcccctctggacgctgttacctggccatgggccttctgtgtctcaggaaggtggcttctgcatgctcctcagtatgaatgcaagaaagcagaagccttccctagtctgctgaagggaaggctgcagtatcagagtattgctcatccctccagaagcaagtcaggcagggccaagcttggtgaaacagggtgacgtgctccatgctctctgtggtctggagttagggtggggaaaggttggtataattgaagattgtgcagttcctagtgacaggtgccaagaggttatgatacgggtttcttgggtctgttgtacagtgtgaataaatgcttgcagctcttagccctttttgatcaatgaagcacttttttattaatattttctttgtatgtaaaggaggaagcgtaactccatagctgtacatagaaccttttctcctaaagaggagtcagcgctcctatagttttcattttttgtcaaagcaagaagtaaatactttagaattgttaaatatatagataaagtgaataaagttgagtgtccgcacggtggcatctgcgaacgagttctaattctttgccctgtagtttaaactctctttgtcccttttccccttacataggagcagtggtttgaggaactgctgggaatttgacctttagcaaaggaaaactgcacatttcaactctagaccttggcaaagggacttcccaagatgtccaagcactctagtccattttctcaaggatttgcctgtgaggtctgctaagctgagagagagcagagcaccagtcatcgtaaggaccaactgcatatccatggtagtcaatgtacctctagcctgtagagtctcctttcagatgggaacttgtcatttaacacaggctggcacactgtaaagccactgagcctagcagcagctgactgccctggggctctctaagaacctcttcagtgcttacaaccttgggtgtttatacctagctcacagctaagaactggaaagcagccattggaattttttttttaagcatttacttatttttcaacaaccaacgggcagtgagctcctaatcatagtaatgtgtccagtccctaggatgtgattgcaggtattacacgtag

SEQ ID NO: 19495 - DNA, 1144 bp, Mus musculus
cttggaaagattttgtctacttcaggaaaaatgggcttaaaagaacacccacatgcttaggatagtaggtttagacagaactgcttggcgttctggagaaacatctgccctgaaataatcattgttgggttaaatatagaagaacaaaagcataaagtgacataaagtacaaatatttataaaaattgctgctggggaagaatttttacaaatacggctttataaatataacatcaaaggtgaaaattagtaagagagaaatttgggtaggcaggcagcatttgtgtagtaaatgagagtgactgcacaaatagctagctagatagtcagtgtcctttagctggatcctgaatagagttggtaaattgaggcgtttgtataaaaatgtgtgaaccattagggagagagcctttggctctgagcctatgccagagattgactgttggtgacatggagcttaggatgtcacaggtgagacagtattgcacaagtgatctctcctcggtgcctccctgcagggtttccaagtcctggtggagatggaatggctcgattttggccataagtttgctgaccggtgtggtcatggggaggactcagatgatctgaatgagcgctgcccagtgtttctacaatggcttgactgtgttcatcaacttcagaggcagtttccttgctcttttgagttcaacgaagcattccttgtgagtttggacttcatgattctacattttgggacccatatacacctagagggatgctgatacaagtgttagggggtcatttttacctaaaactatgcatttttcaaacttatcaaggagtgactgctttatttaaaagcaacagcatttaactttcactcagtgaatctagccgcaccaggttttcctctgtaaacatagagttggcttctaaagtatatggtctaaaaagtagttagagatagaaattatctgaatctgccgtgctcccctccagtctctactggtgctgtctgccatgttttctgctcccgctagctcctttgatgaaagatgtcctcttcctgtttgagccctccgttactgtgtcctccagcttctatccccttatttctgactggcttagcatttctccactatgcttcttgcattagtatgtc

SEQ ID NO: 19496 - DNA, 1167 bp, Mus musculus
ggatggaggccagaggatggagaggggtggcctctctctctgcatccctctactcgatcttcaatagataagtatgaacagcaaaacacaggaaatcaagagaccctattaaaggttattttaccgaaatcacgcacatttaagctattagaacccaaatgtgctatctctattgtggcatgacccactttgcattatttagtacttcagtaaatgacttgccattaagttttaaatagctacccaatatcaaatattctcttaatttcacagcacattgagtgtttataggtttgggtactgtaagcactcgtactttactctagacaatctgagtaagcatcaggctcacagtgctagggtgaagtacctctgtgacagagcacttttgtagctttcctgctgtgtgcaatcttctactctttagtttttctaaactatatttctttgaagcttacaactaaatgttcaggtaggatttatgaacgcataaaacatgttttgttgtgtaatttgacagactgattcacagtctactgcttctgaaaccctagtgcatggctgagactcaggtgatggctgcttcactgtttggaacaagttggttgtgagtgttgaatacttaccttgcaattgtgtctccactgcatgagtctcttcttttttaccagtgcattgtgttcttgagggaatattttgtgggggtgaagataaagcccacagtttatacataagcaatggaattatgatcttcaaaaatgtagactgaggtactgcaaggtggtttagctggctgctcttccagagttcctgagttcaatcccctgtacccatatgggggctcacaactgtatgtaatggaatctgattccctcttgtgtctaaatgcagtcttgcatttagacagagcactcatatacataaaatacataattttttaagtgtggacagagggctcagcagctgaaggtatttgctggacaagcctgctgacctgaatccctgaaacccacatagaggtggaaggagagaaccaattccttgtagtcttctgagccttgtatgcctgcggtgcatgagtgtatgtgcacagaataataaataaaacttagaaaaggatgtagactgagttttaagcagaaatgatttataaacctttgtttcttg

SEQ ID NO: 19497 - DNA, 1194 bp, Mus musculus
cccataaagcagggcgcgttgaaacttttggagcaagacattgggttctacgcaagcgcagtggcgcgagttcggcagtgaggcaacatgtcgtcgccgacgatcccttcgcgcctgtactccttgctgttccgcagaacttccacctttgccctcaccatcgcagtgggcgccctgttcttcgagcgagccttcgatcagggcgcagacgcgatctacgagcacatcaacgagggggtgagggcctgggccatcctgaccttgggcccgcctgaagggtgactgggagggaggtaggacggaactcaatcaagtcttaccaggtctggggtgaactgtgcccgttaatacatctatttctcttgacatggtgcgaggcctaattggtatgtcctgtcacacagttccacatattcatttgcgaaagctaactcctgactcctgagacatcagaggacttacgggtctgaaccactccattaagtcggtggtgagttggaactccgacccctgccgtccttgctagtttcaagggcagatttcagcaaggcagtcgttaaaagtaggtctccttagaccatgtggctgaccttttaaaattgatgtttcagttccgaaggccgcccacgtaggctctttggattaaacgtgaagactatgaaacctcaagccctaactggcaatactggacttaaagcacttaaccgtggtattgaataaaggtcatagtggatcaaagatcctgggatacagatgaggtgctaccgttcatacttaatgataccactgaaagatagcatcctgggaaaatgtggggatgaatataaagtaggaaatggcgagccctctttgacttaactgtcccacactctgtgcatgttttatgtcaaaggttgtgagagtattggggaaggtatgttactgatggccagcatgttcatcgactggtttctttttctcgagacagggtttctctgtgtagctattgctgtcccggagctagatggtagacaaggcttggccttagactcaccctcctgcctctgccacctgagtgttgggattgtaggcctgagccaccaccgaccagctccttcactgagtggccttccttcttgccttccttcctttcttacctcttttggtttgtttttaaattttgttgttttaattttatttgcttatgttgtgtct

SEQ ID NO: 19498 - DNA, 1136 bp, Mus musculus
tctcattccagctcacctgtcccctgatggaggcaggaggacagaaccaagagcatgagaggcagcaagagagacaggccagccatcaaggacagacttttttataaacattcggatgtttctcacccatcttcttgagaaacgccctgagggatggtgggtggatgggcggccaggctcagaggccccagggagaagggagggaaggcagctctgcttcctcggttaggcaattgtctttactgtgactgatgagacaggttgaagtcaggcagggggaggtgaggaagagctcagccccactggactttggacagtacggaccaccctccaggtgggggtgcccgcagggaggggggcagctcctgcattggcggccagcccactggatactggaagacagtggttctgatgggttcagccctggagaggaaaaaggtagaggattagagcagagcacctcacagattccaccttactcttccaacttcccgactgtcagaaacggtggtcacctgcacggcccttctggaagtagaaccctgataacatgcagaacctctgagcccaaagtgggggctggtcgaggagactcaactaccagaatggccttgggcaatatggaactacccttagcatccacctgtggggactggttaaatatttatgcacgtccacagcagagaatgctatgcagcctgtgtaaaaatcaaggcctatatgcactgatgaagaaagatatactatgtgagtaaggagaaaaagcagcttataaaataatgtatatagcatgatactatttttgtttaaaaatatataacatatataaatgcataaaaacaaccctggaagttacagcgaaatgtcagccctggttctgtctgagtggggtgggtggggttgtttctttaacctctttatacttttccaaagtcttacaagcacacgagcctctggcagcaggaaggccttacttctcatcccgttcacttgcccccttactgattacccctaagctcagggcccctctgaagtggtccttaggaagggagggtccttgggtgcatcctggaacacccagacccgggcagcatgaaggcaggccgccctgcccccacctagaccctgcagagttg

SEQ ID NO: 19499 - DNA, 3072 bp, Mus musculus
tgcatttgaatcctggaataaatctgaaccctcatctgggcttgactgctagtatcttgagcatctactgggcaggtttctctgtcacccaagccaccgttgaggtcattccctgcagcaggatgggccgtgctgtgagacccagtgctctttcagcttcttctcttctttctacagctcactctgcagagcgccaagtcccgagtggccttctttgaagaactctagcaggtgacccggccacctcctgccacatctgctgctcctgacaccaacaggatgggcctgacccaaaaggaaccatcagtagagggctggcttgtttgggaactcttgagttgagggccccgtgccactctgaccctatagagaggtttctcaatgtgttctagttctccttgcctcctgcatacctgcatatctctctctccctccctctctctctctctccttctctctctctctctctctctctctctctctctctctctctctcttatataaatacttgttgtgtgtgggctgccatccttcctgcacccaagcactgtggtgcacgggttgctgtgcttgctgacattgagaatcggctgtgggagtccagtgtgaaagctggctgaaatctaccatgcaggtgctacccactccccaactgggcttctgggatgggcctcccctccaagcatggggtagaagtgtggactggcttagctcagaaccagcaatgggggttggggatttagctcagtgagagcgcttactcgggccctgggttcggtcctcagctctggggggggaaaaaaaaagaaccagcaacgatggctccttagccaggctcacctgaggcagtgtagctgtctgaatggcaggtaacaggcaagacagctgtggctaggaagaggcttaagatagaggctgttgggagacactgcacatgagcctttggtgggccaggagcttcccagtcacattcccatcagtgcctgggaacccagctgtgaccaggacctctgtctcctccccctcagcacatggaaccccagagccctgctacccgtccatcatcctcttcaacacctaggcctcactgtcattgtccttttcttccccaggagcccagcagtgtccttttagtccttcctttcctgagcctgacagagatatcaggctactaacagtcacacaagctaacactatgggttgcctccatgctaggcaacaaatgcttaccatgtgcctcacacactccatgattgggcctatcttctatgtaactggggtcactagtgtagccgaccagaaccctttaagtcctacagagcaggtgatctgcctcagtccacaagcagatgtatattaactgaggacagctgagctgaggggctgagcaaggcgatgttccacagtacggtttgtttttgagaaactgaggcacaccaccttgttcccgggctgttattgggccactttgtcataggcagccacccaatggtcacctcagcatctttgggcacctgtgatagcactctagtctgaaacctaaggctgaggagaaggtctctggacttgacaccccagtatttgccgagtcttccctggctgctctgaagttgagctgtgttctctggcctgaaactgctctctgactttcttcctctctgtacacttgatttaacaatggctgtgggacacgagacaatgatgctggtttataaaaattatgccaggccttccttggctttttcatttaactacgctttatatctcaaatttgggaaataccaagctacataaccacgtgggcgccctggtatttgaggaatggtgggtgtaaccatttcgccatttcttggaaggtgaggtccaaaccccactcagaagtacctcagctccgagagagagagagagagagagagggggcgggggggagagagagagagagctcgaatgggtccccagaatgtctccagcctgctttgagcctgtagctgggttcttactggtagaaaattttagtcaaagagaaacatctgaagtccaaagtgaggcccaaccctggctcttcctagtttcaatggtttctgaagcataggcaggggtaccctgctactgaaacagcaagtcactctcagtgcaggacactgaggccttgctcttgcctgtggctggtcacaaaccctgattgaggcagtacctgagccgccacagcactctgacctgaggtcactgccaacccctgctagacaacaccagtgggcttcacttactgctatatcctcttttagacaggtttctcatgctcccatactttcaaaaagcccagaggctgactcccagcaacagtgactaaccgttcctgccaacagggccagagcctcaaagtccctggtacaagcagccttcacagaggacccagactctcctaggtgccttgaggccacgccagtgcccatgggcttccattcctctgttactcttttcaaacagctcttcatgtgaggctcctgtcactcctatcggggccaggacatgaagctggtttctgggggttggggtgattataatttaagtgattgttttaataaaaactctaagctgctatagtctttcgtcgagtttttttttttttttgagctttattggtttatgtatattttgtatgcgtgtgtacattgtacacgcctgttgcctgcagaggtcagaagtgtcagatctggaactggaaattgtgtcttaccaaaacaatggagctatatagccccagccctccatttgtattaggtaacatagattgctagttctttttttttgttttgtttttttgtttttttttttgtttttcgagacagggtttctctgtgtagtcctggctgtcctggaactcactctatagaccaggctggccttgaactcagaaatccacctgcctctgcctcccaagtgctgggatcaaaagcgagcgccaccaccgcccggctagattgctagttctaacatccagaagtagcctgatttcctggacagtcaaatccgggaaactactctgtataaactggtcattttacactgttg

SEQ ID NO: 19500 - DNA, 1149 bp, Mus musculus
aggagcccgttggatggagcactctgagcaggttcctcgtggcttctagccttcccagaggagcaaggcctgactgtccagatgcctgtgttgcccttgtctggatccagtgtgagttttgaaggtctatgcattgcagagtgtagcaaagtagccattggtcagcatgagctcagctagcttgttcatggattcaggtagggacaccagacataggcaggccccagaattgacccagcatggtacatggggcctggtggcatatccatgtcatgagcacgtcagtctcactgcctgatggaatacaggactctccttgtccagtctaacctcccaggtatcttagtggtgtgagcagagcctgcacccaacattaaaggagtctgcctccacagcctcaggggtaccgcaccccacattcagatgatgcagcttcacagccagaagcacacgtgaacactttgaggttctgcaccccacaattaagggatccacctccataaccaaagggtgcacatgaacaccgtggctgggttcttttagagactgggctctttgggtggttggttttctgagacagggtttctctgtatagccctggctgtcctggaactcactctgtagaccaggctggcctcaaactcagagattcgcctgcctctgcctcccgggtgctggcattaaaggtatgcaccaccatgccccaccccctcagctgaggctggaatcttagtggaattgtctccatagcactccctgcatcttacagaggcgttgctgtgctgtgtgcatagagatccagtcctgtcactgggcaacagggcagcccaagtggtggggctcgtggatataagactctcataagaaacccaggatgtttgttgaagggctcaccatgttccactttctctaagcctgagcctttcctttcatggttatctcctgcttgaagctctaagtgtggaaagcagccttctagaatgatccttgcctatatcaaagacaacaggtggaaatagatctcatgggtcagcttgcccacagagtgcctagccaggagcatggccaacagaaacgagtagcagtgcccaagatgagagcttgggctctgaaacgcctccgttgtggggctcagcgggtaccttgagt

SEQ ID NO: 19501 - DNA, 1143 bp, Mus musculus
gttcactccgaaaagccattcctaacacatatgagtttccaaggctcctgtggctgctgagggctctggttttcttgcttttttctagtagatcaagatagaagggtcagccagccactgtctaagactacagggtgaggaagctttccactgcaaagagtttgctctgggaagtgttgcgcctgtgagccctgccttgtggcctagatgttttatggctatttgaaagtgcctgtggccattattgggccttatttgatgcagtaaaacattccatttggccccttggctctgaagatatgtttcatttcagcgcagctcccagggcacctgatttgttgctgcaacagtgggagggaaaagctgggatgcaaactcattctgcaggctccgggttctgttcttgtgagacttgctgtgatttctctttggagattggcagtttaaaagaagcatcagtatatcggaacctttcttagggctcttgcccagagtgcttggtagatcacatttggcctccacctgcccagcgaggtgaatcaggccgatgagttcatttgttaggtggaagaacggtagcaatccgcccttccagcatcctagggcagcagagactcagcagacatttgcaggcacagtgctgctgcattaggtccctaaggattaatacagatcgattccctgtagacttcctgggcaaatttctccataaaggaattggatttgtttattggcatggagttgccctctcatttcacttctgtttagggatatgcatgtggacagctctctatgcacacatcatgaagacagcatttgggtgcaagacattactaccaagactacagaaagcttaatgtgctcagtttatagtggtgccctccctttgttggcacttccaccttggctccgtggggttttaggaaggggaatgtttattgcaccccaaacaaagatcatgttgaatttgctggtgctggctctaactgtcacctttctgctccagagtctgcttgttccctgcagatcctcgtgccagagaatctgcatgtccttttctctctccaccctcccctgctccttcattttcaatatgtagtggcgaggaggaagtataacatgattttagggcttgcatttcaa

SEQ ID NO: 19502 - DNA, 1189 bp, Mus musculus
tggttttgtggtgccgcaatttcagaagatggttgagtggcattgatctaagggagccatgagattgtgtgttcattgtgcaaaaccgagctgtttggggtagagaagatgaggttgggaagggccttttaatcctccatcttgttggttgtattcgttagacacagagcagcctttggctgcctcctatcttacagccccacttatcatctgtccctggataataaaggctttcccccaaccctgccttccttgtcctttgatgacttctgtgcagtgacggccagtgagtaagcattgctctactgtcagggtggtccctgagatgaacagccccagcagccaaaagggccactcctagcccaggagtgtacttaggctagaggcatcctgcagctctccggttgctgctctagtggaacagtgcttgtttacacacccacctctatgtgtgcctctccctgcatgcagctttttaaaaatagctctgttgttttgtaaaaatgagccataataataaaaatggcaaacaatacccagacttgctttgcatgtgggcttttcttttgctgtcttttggtaggtgataaatctctatcagatgactccggaaatgtgggaggagagaattacggcttggtatgcggagcaccggggcagagccaggtgaggctgcttcatccttggtttatagtccttcatgcctcctcccctacccttaaagaactgtaaaactagggtgtgctcactggacacaatacagtcctgaagtatataaaacaagccagagctggaataatgttgctcttcagttttatgtacatccttattgtagtgtgggcatgtgacagtctggatgtgtggctcagtggtagagagcttgcctagcatgcgtgagaccctgggttgaaacctagggtgtacaaacccggtgcgctcggtggcagtttagctgaacactgtctggagccctttgtttttgcattcaggcatgtgttgatggcacttagaatccctgcatgctttcccctttacagaaagctctgcagtgcacagtctcatcttggtacacaagtccagagggtgagttgtgttttggtaggtgacactaaggaaaattttttaccttttggcacatgtccatcagcagtattagaatgttcctattgccctatgtttttagtcaatc

SEQ ID NO: 19503 - DNA, 1122 bp, Mus musculus
aagcattgccgtgatggatatgtttcacttctagtattcataacatgtaaatgatctgtttaagctgtgttccagtgaaacctattagagtgggcagtaagaaaaaaaagaataaaggtagatgtagttatttcagtcttccataaacgatatgcccaggatcttggagttttagattctagcttgtaaccattttctgtggctttgagaatcctggtgctgtcactgtggctccgctcaccctgtgggttattgattgatttggttcagaacccctgcatgaagtggatattatatcctgctatggatggctctgtgagtgcttccaattgtataacacacacagcctttaggaaatgggaagaatgtaacgggaagggattgtctaccttccctgcaaagcacgctttgaaggtaatagaaggggccagcacagcatgtcttctgctctgcaattctgcaggtgttggatcatgatgtttcgaaggaagaaccagttacctttcacttcctggccaaattttatcctgaaaatgctgaggaggagctagttcaagagatcacgcaacacttatttttcttacaggtacactagcccatgctatctccccctcccaaccacccctaccgtattaagaggaccagtccaggtatggtttcagaagcagaccaggtgaaccccttggagttgaccacaaacacttccacactgcagaaaatgttctgcctccaaatagtcagtcctttggctcagtaatagaaaaaagtcttcagaatagaactttacccaagcagtgagaattggtgtcagatgaaattgcagaggtgtgatgatgaacaatagagtaacccagtataaatccttagtgaagatgcatccctgtttcttctagctaacttaaaagttctctgacagtataaagaaaagcctcagagacttagcaaaaagttcctttaaagttcaagatctgggtcattgaggcaggaattctgaatggcaatgacccttggcatgtcccactcctaaggtgtttcagacaacctgctctgtgctactctgggtatatatttcatttcctcttttattagagtgcaagccccttaaagagaggctcactgaat

SEQ ID NO: 19504 - DNA, 1205 bp, Mus musculus
gccgcccgctccttctcaaccagtcttgctagagtaggagtatactttaggaacaaaagcgctcggagtgaccgcatctacagccactcaacgccgagaacagaccggcggccctcgttcagtgcaactttcaattggtggagtaggcctccaggaggcgggacgaagcggaagtcccgcttcctttggcgttcctgccaatcacagtatcttagagaaaaaagtgttagggtgagtcgctgagtagcgtagtgggagtccggagggcggggcggggcggggatccggcaggtcgctgaggtgggggttggtagaggacgcttcccgagggcgcgcggagcggagctggtgacagacacgcacgcgcgtgtgcgctcccaactactgcgcggccccgcgaccctcgggggtcgctgagaggcccggcgtcggcgccgcagccgtctaggatttctgtccaaaggcgtccctggcgtccccagcccgaagctccaagctcggggctgcgcgtgcttttgccggcatctccccccgacccccccgtcgtcagagactgtcccttaactcatctttccgcacccacagccgggtcctcgcggcccatgctggccgctggggacccaggcagcctaggtctgtctcgggccggccagccggccaccatggtggccctgaggcctgtgcagctactccaggggggctaagagacccagaacgcgggcctaggggtgaggggatccaaggccggtacctcgcgccatggccggagccatcgcttctcgcatgagcttcagctcactcaagaggaagcagcccaagacattcacggtgcggatcgtcaccatggacgccgagatggagttcaactgcgaggtaaccggccgccgaccccgacgggctgtgagtggagagccgcggaatctctgcctgtctggtggcagcgacgcgggtccctacccatggggtgccctcgctgtggtgacagtcgaagtgcaagcttaagggattccgtatatatcattatctggaaccggaagaggctttctagggccagatcacaagttaaagctagttgtttgtttgcttgtttgttaaagtggggttcttggttttggcatttcccgaaggttattttcattcatttgttattgggaaacactggaatcttccgtagaaacgaaccggtgtgcagtgtgtagaactcg

SEQ ID NO: 19505 - DNA, 1126 bp, Mus musculus
cttcctccgcggctgcagggaaggaagatccctctgcctcttgcaactactggttgctagaaacccttgacattctttggcatgtggacacaacagtctgagcgtgttctgtgtttcctgggttacatggtgtcccctttgtgtgtgatctttctcttcttatatgggcaccagatactggattgaagttctatccagtgttatataggcttagctcagttatgtacagagaccatgttttcagactaggtcacacagtgaggctctggcagggtactgaggggctactctttaagctggcagagaacatggggaaatctaataggacaaagggctcttggagagaaagaggctggcttctccctggacctctcctgggcttctgtagtcagtctcttgagtcaccaggaggtcttgtgtacattggcatctctgtatgtatcctcctacccctaaccacacgctgatacattcctggtatctcagtttaatccttagtttgatttttttccccattcccttggtgccttcttccttctgtctgtccctcccttaattcctcctttcgttccttttttttttttttttttttttgacagagtcttatatagcttgggctggctttgaaccttctgatcctcttgtctcctgtgtgtcgccagccagtccagttttatgcagtgtttggggatttgaacccagggctttgttcaggctaccagctgaggtacatccccagcctgcttcctttctttttaaggtggggtttccctctgttacccagacattggctcaatatatcatcctgcgtcagcttcctaagtggctgggaccacaagctccctgtttccatatgtagttacaactgttttttttttttttttttttttttaagatttatttatttattctatttaagtacactgtagctgtcttcagacactccagaagagggcgctagatctcgttacggatggttgtgagccaccatgtggttgctgggatttgaactctggatctttggaagagcagtcgggtgctcttacctgctgagccatctcaccagcccccacaactgtttttatttgcttatttttcttacgttcattgccttggaaggttcctg

SEQ ID NO: 19506 - DNA, 1719 bp, Mus musculus
accacagaaccgcagccctgcccgtaggatcgatcttgttgcttcagccgacctctgtgtccttgttttcatagcattaggctttgtatgtcttgcttgttttggaagcattgacgataggatgcgagggttcatatatgctagggaagtgtactaccactgagctatctcactttcacatacatagaaggtgaataaaaatttccaaaatacttggcttattaccacctaatcctgtctcataacttgggaaccatgggcctctctcagatgatagtagggagccctccctgtcacaggcttttgtgagttttgggtcagtgaccaagggtacctcccttgccccgggcaccctgtaacctctgctttcctccctgtagtccccttggttcgacacatggagtcacgaatcatgattcctctgaagatttctcctctccagtgaagctggcactgcctccacctccttccctttctcctgtggactagcctggaaaggaggcgcttctaggccacctggcacagttttctctgaactctggaagacttctgatgggtggtgttcagcttcgacaaagatgacgttttctgagaacttagtccgtccgtacccagctaacctctctcccatgctggatgaagaagttcttaacttcccaagctgcagaatagcaaccttttaagctttcacacactttcctcttaagatccgtcatctccaggacataagtccccagctcccaactgtggccatggcttagttgcataaaagcaggcatgactggctgttaggaggtatggtgtgaaagggtatcagtccaggtatggcccgggaactctctggtgtctacttgttaaaaaagcaagcctgagtctttaaaaaaaaataaataaaaatcctggaactgccataaagtctgaagtcgtgacagtcaggaggaaatccagaagttatcagtgtcagtaggtggtccagaagtctacttaaagggctaggaaaagggtgggagtgggaaggatctgggtacatgagacagccttgaagcaggaacccttcacaagtgggcacataggattcagaatttaaaatacagaattgggaagacaggacagaggtgacagaggatcttaagggagcaccctgttcctagacagatggagaggcgtatccatgttttcctacataatgtggttaaaacttgaatttgtgcttcagctcttctgtacttcttccttcctacaggcaaaaacacaggctgagacctatagttccatcaaattctttctttcccttcttgacattgtcccccaaaccctcattttgcagaaacactaggtctgtggagtaggttgtgattctggggtctcttcaatgaccccggtacctcatgaacccctgcttagcatggttgtgctaccatccaggagaatgttgatggaaccaaattaaatatttactgtacgttgtggtgttgtcttcatctacaaggaatctcagtagttgtctaaggcagggcagcttccagttggctgagggttacactggctttgatctcttagggagaccgtcttcatcttcgtcccagagcaagaaaaggagctgtttcggcgccacaaggtattcaatgttcatgtttgcagacaaccagaatttactccagaaatgccaggcataggaaacatctgaagcttacaggtactgcactagagtcttggggg

SEQ ID NO: 19507 - DNA, 1197 bp, Mus musculus
tagggtgtgtttctattgcggtgataaaacaccgtgatcaaaagcaacttagggaagaaaaggtttatttcagcttagaaccctcagctcacaatccaccactgaggaaagccaggcaggaagctggggtccttacctggagcagaggcagtgaagggatgctgtgtactggctccttccccttggcttgctatcatcctagctacaacttgactttgatccctggaaaccaggtcgtaggagagaactgactagcgtaagttgttttctgatctccacacgtgccataacacaagaatcctctccctgccccacccccacaaaaatataataaatgttaaaaactagttttaagtcaatgtatttgaggatttatgtaattactaagaataatagtgcttgtatggagcttactaaaggacttggcacatagtcagtgctggaacaggtgtgtgcgctatccctgcaaggcatgcctgacagtgccctatgtgcccctttaggctggcagaaaagtaccgagaatgtctgtctaacaaggagaagatcctgaaggagattgaggtgaagagggactatctgagcagcctccagcctcgcctcaacagcatcatgcaggtgagtgtggctccgcttcaccacagaccagccagagtccaccacacatgtgtgtgagtatgtggcctgattttttattgtttgtgatgccagatttggtctaaattcttatagttttatgaagcaagataaatggctaatgaggaggaactttgtaaaaggaatggagagaagtttaaatctgtttttctaggacttggcaaggtcttcacttcttcctctcagctctggacatggaattagagttgtcagcaaaaacacatttttctagtaggacttcataatagaagagaagagaacctggggctgggctgctgatgggcctgggaagctgcagcaggaaggttgtggatctgaggcagcctgcgctgagtgaagggtagactctgtcctacccaggctacataactacggctgtaattgctggtacatacttaccttgaggctagcctagacctcataggagttccaaactagtcaggtcttcagagtgggatcccatctcataatcacacaggggggagagagggagatgaagggagagcagagacgagggactgggagtgggactaggcagtc

SEQ ID NO: 19508 - DNA, 1167 bp, Mus musculus
aagaaagccgtggcctcagaggaggagactcctgccaagttgggtgtgaaggaagaagctaaacccaaagagaagacagagacaaccaagacagaagcagaagacaccaaggccaaagaacctagcaaacccacagagacggaaaagccaaagaaagaggagatgccagcggcaccagagaagaaagacaccaaggaggagaagaccacagagtccaggaagcctgaggagaagcccaaaatggaggccaaggtcaaggaggatgacaagagcctttccaaagagcctagcaaacccaagacagaaaaggctgaaaaatcctctagcacagaccagaaagaaagccagcccccagagaagaccacagaggacaaggccaccaagggagagaagtaagagaacaagagaaacacccagaatagccaaagaaactcaggacggtcccagtactcaggggtcggcgtaataaattttatttcttcctttccctccgtaagaagaaacactgcttagatggtgggcctgccctcaccaaacaggaatttctattaagattaagttagcaagagaagataaccctgagccttgtcccccacgccgaaaaccctccccaggtgatggacaattatgatagcttcttgtagccgaacgtgatgtatgctgaacgctacgcgtaaaacacgcgtctaaaaactgccccctcctttccaagtaagtgcatttatttcctgtatgtccaactgacagatgaccgcaataatgaatgagcagttagaaacgcattatgcttgaaatgttgtaacctattcctgaatgccttcttgttttccaaaggagtggtcaggcccttgcccagtacacgctcctggaagagctgcagcaggtgaggcagggcgctggccactgaaccacgccagggtgtactctccactgaagtccactttcaattgcttccatgcaataaaaccaagtgcttctgaaataaaactgtggttgtttttacttgttctcttcctctgggaaggcaagggatggcggtctagacgtcacatcagatctgtgctggtggcctagggcatcttcatcagcatcacctgggagccttataaactcacatacggggctggtgagaaggctcagtggttaagagcattggctgtgcttcca

SEQ ID NO: 19509 - DNA, 1149 bp, Mus musculus
aggctgtgtaacctgctcaagtcacagcttgtaggtggctgaatggaatcctagttctccctgagctcgaggtgtatgctctcttgaaggaattcttccccataggagagggaggacagggctctgaccatatttgcatggctagagcttttccctgcagagccatcttgcctgtgtccctcccacttccctttactctcttagctgttgatcaagagagctgttgagcacagagtagaggctcagtaaatgcttgctacatgatcatgggagcttcagtactttctctgactccctgacttctacagtgctttgcactacaagttctatgctggatattatttttaaaaaaaaaacaaaaacttgaccagacagatgtgagaagcgctgttgtcacagtgtgccagactccagcctttgagagataatagtagatgtttagaaacttgatgggagttgtgggaagaagacacccccccccatttcttgagatttatttagggggctggagaaatgactcagcagttaaaaacaccagctgctcttctggaggaccctagtttgattctcagcactcacatggtgactcacaactatctgcaattccagttccaagggacctgatgccctcttgcctccacaggcaccagggacttctgcagtacagaatgtacagatgtacatgcaggcacaacactagcacacacacatacaaattttaaatagttaagtatttattttagggatataaaatatcctgagtgaatgcatgtgtccttggaggcaggaaaagtgtgtttgggtcccatgtaattagaggtggttgtcagccgccatgtgggtgctaagaaacaaatctggtgtcctctgcaagagcatccagtgctcttgactactgaaacatctttccagccccctccctcactcttaaacttttcatttctcacggaaatttgcatccctgaggtgaggatggcccctgagctttggtgagctgagcccacagctgaagtggagatttagaacattctaaacacaatgaattctacagagggcggagctaagactgcctggcaagagatgtgtatttctaatctatgttttcgtctatagttatctgtgactgtgtgtttactgatagtcaggaag

SEQ ID NO: 19510 - DNA, 1118 bp, Mus musculus
acacacacacaccaataaaaaaatagatctttttttaaaaactgagtttggtggtgtgcctttataatcccaactcttgagaggtagagacaggtaaattcctggggctggctagccagctagcctagcttcatccacaagctctgggccagtgagagactgtctcaaagcccccaaaagcagtagttgaggctgggagtgtaggtgggtggttagagcatctacttagagcccccgatgaatccccagtaccacacacacacaataatgcacttggatatagtagctgctaatataaagcaagggttgttgtcccttgctacacagtcatcctctacctttcaggttcctttgaggaacctaatgatacccaccctacccctgggggaggctgtcatgtgagcaggcagcagaatcatgtccctttgggcgtttgtgcattcctattacccaggagttgtaacaggttgtttcatcagacccatccaacctattttttgtttggaccacaggtattggcagaactcaaagagtatgctacagaagtagacgtggatttcgtacggaaggcagtgcgtgccattggccgctgtgccatcaaggtggaggtgagtaggttctgagaatccattcttacccaggcagggagaaggttgttaaaaacagaaagcaggctgatcttagcagttattcatgatacacttctgaagtcccagatacttgggctcctgaagcaggagaatcactagtcctgagatcaagactatcctgggcaacgtgtagacttcctacatttactcaaaaaattcacatattctccctatggcctgtcacttactcactaaagagtgataattggacacctagggatggatatcgctcagtcagtaaagcacttactagggccagttatgaaaacttgaaagtggtgtcctaagggagctgaagagatgactctgtagttaagagtaatccaagggttaccaacagagcctccaaggtgcctactatgcagattaaattggctctttctcactttaggtctgtgtgcaacaggtaatgatggttctacagcattgcttacggccatagagcagccagcagctcgtggacttcct

SEQ ID NO: 19511 - DNA, 1196 bp, Mus musculus
ctcctcgtcttcatcactcagtgtcctgggtggcaaatgtggccaacctggggagtcaggccgcacagccaatgggctgcctgggccccgcagccaagctctgtccagttcttccgatgagggcagcccctaccttgctgtaggaggggcactggatgcaaccaggagctctttggctggcccagaaccctcactgacctgggcaagggggcggatggacacacaaccagaccgtaaaccctcacgcataccgacacctcggggaccccgccgcccatcgggacccatagaactcggggcttggcatgcccagcattcggtcaccccaaggaccgagccagattcttcgatgtgatggaccggcttagctacacccacaccccattccattttctttgtggccttaacctaccctttgcatcagggaccccccttccatctcgagcaccagacctcatgggaccagaccccacgggactacatggcacaatgggacacctgttgtacattccggtttgggggatgagcattgctatttaattactaatattattgaatgccttagaggagaccgggccagcccggtgtccagaggacctgtggtccagtaagcagaacctctgacagtaaagtcttgctccagctcctgttttttggggactgagccttcattatatgttgggattctagagttaactgcctagaagccagacctcaatgctctgaacctgcatataccagaacaagaaacccttaaattgtgcatttacagtttttgcatttgtttttattacctggttaggcatggctttaaaagtgtctccagtagccagtccagccgtggagaggtagaggcaggcgggtctatgtagttcaatatgagtgctagaagctgttcaaatgcctctgatcacattcatagtcaagtcctttccatctgtgcttatgacccaataaggtctcaggtaaaactgacctgtccaatgattgggagttagctgggtccaatcaagatcaaagaaaagtccgatggccaggagtctgggtgggagcctgctttcaagagatttccctgtccaatcacatgaggctgcagcgcgctgggtgcagcgccccctgcaggcggagggtcggatgtgcaggacgtgtgcgcaccaaagcacaacgcagaagctctcggaagagacgcagcacgt

SEQ ID NO: 19512 - DNA, 1148 bp, Mus musculus
gggcactcaccctctctggaccaggcctcgagcactgcggaggctcgcgggggccgttcggagtcccggcctttcaggcaccagctcgggcggcttttcgcagcaggaatccggcctgcctgggtgacccgattcctccacccactgctctgcgaccttcggcgaatgcctgcccttactgcgcctcagtttcctcatctgtagaatggagacgcggtcgccgctcagcctgtggcgcggcccttagcggagaggagaagggaaaggcgggacttcgtgcaggttatgggctgagcaatggaaacagtctctccgtggttctgggcgaggctcctctcctgtccctccctacccacatgtcttcatgtttttaaatggcatttcttcctcgtgggtgccaacttgtccccagccaccctctcccgaccagccagacagcaaacataaacactacaatggtgtaaatgttactgagtcccttaaagcaggtcatggcaccgtgagaacaatgtggtgctacgtttgcttgttcacagcttgctcttaaacttagcgtctcccctgagtggcgggctggtagaggtggaccattctgaaccctttcgagtcttcacagcaatcctgacctatgtccccacagtgactccactggctctgggcatggcgaacccagtggcgggcatcgcaggctctgccgccaagagtgtgcgacccttccgatccagtgaggcctatgtggaagccatgaaggaagacctggccgattggctcaatgctttgtacagtctaggtctccccggcagtggcgatggcttcctcacggggctggccacaggcacaaccctgtgccaacatgccaacgctgtcaccgaggctgcccgggctctggctgctgcccgtccaacccgaggtgtggccttccaggcacacagtgtggcgcctggctccttcatggcccgagacaacgtggcctctttcatcggctggtgccgggctgagctgggcgtgcctgaagtgctcatgtttgagacagaggacctggtgctacgcaagaacgagaagagtgtggtgctctgcctgctggaggtcgcccggcgtggggcgcgccttggcctgcttgccccgaggctggtacagttcgagcagga

SEQ ID NO: 19513 - DNA, 1098 bp, Mus musculus
attttgaattaatgagtccccatcaaatggtggtgtagtagatagctgtgtgtgtttgtaaggtttgtagcttgcaaggcttgcactaataatattttatatgatctttcctggttggcaggacccatggatgaaggaccagatcttgatctaggtaactttttaagttcttgaactttgtactgtgctgttttgaataaatgctatagaagcaagggttcagcagctcagcggactgattccagcacactgaccccttcttatatcagtataatgggtggttggttctcttgcctttgtgatgaatacagtttgataataatgtccgattggttaagaagcccctattattatctaggcctgatgggacatgtctgagaggttgaaaagaggatgaggagtttgaggccagcctatctccaaagaagaagccactattaattcggggcagtaattctgttttatctaattttctctggaaggccttcctatagatcccgatgaagactctgacaacagtgcaatttatgtgcaaggattaaatgacaatgtgactctggatgatctggcagacttctttaagcagtgtggggttgtcaaggtgagtgatagtggtcaggtgatcccacagaacgtatctgagaactgtatgactgttttgttgaccagtgatggagggcgcacttgcctagtatgcataaggtcagtaaggctgcaaaaataaagagttcctccccttgttaattgggttgttattgttgtttatttttttgagacaagatctcatgcattctggcttgactcaaccatatagcagaaaatgacccctccccacccccaaacactgcttttacagtctcgcgctaccacacccaattttagccaggttttgtaggtgaaaaatgctaagcagctgatgattgtgttactgagtctactgttctctgtacttgtaaatgaacttacctgctgtgaaggaaagaaacgtaggtttttcttaatattcccctgaatacttaggaacttggagactttttttccaaattatcacttacggatttatttctcaggataagggttgaggctttgccaggggtg

SEQ ID NO: 19514 - DNA, 1631 bp, Mus musculus
aaagaagggactgaaagacataagaaatttatcccacatttccatggacaatctattgcggtcaagctatctcctaaaacatggaaatgtcatttaagtggcagtttgcttttttccctgccagtaaccattgttgggctggggtgaacaaagaatggctttgaaactagagctttcagtccccttcatggttttcagaggtgagagcctctttgggtaatagatttgggatggaacacacacaacccttctaataaccctagcttttaactaatgtcctgaacggttgtcttgaaatacctggtgtatgtactgcagaaaaggaatgcagctgttttccaatgtttgtacccagatttgttgatcatgatgaagactgactgacctcatgacccttaaaccatggcctgaggcgccccgatgtgtagttaagttagagctgagaacaaccgtaatagccttgttacagagtaatgtatatgaatatagcatcgctcgctattggagattttaaaagtctaaattggtttgaccattgtgattgatggaacaatctggtttagaaaactgtttagatcagaaccatgaccccgctgcctctgcctccccttccctcccctccacccctcttccctttctggtgtctgtactttgatgaaggtgaagtatgatgttggtggttaacataatcagatttagtcaatgtgtgtgttctgtccctatataaactagtaaaacaaagttatgcagaatgttgtagtgagtatacatttgattaactgttaaagaaaaactagcaattcttttttatagaacaaacttcaacacagattaagttgacctattcatttattagtaaatttctgtactactgaaagttagtattttgtttattctgcataactttaataaagtctccagtgaaatctttattggaaaaaagtgtttataaaaatacatgcaaatttttatgaataatttttgacaatgtaaaattggtcttcagatttggagaatatcattccattaataaaggtttcacgtctttatggatttttaaaaatagacatagacacttgaaattactatcatcacgtctcaaatcacctagaattcttagtatttttcaattgcaaaagcaatttgaagtttattcatcttaatactccagaagtgatgattctaccgactttgttagattgctattagaggggcccttgtttgtggatgagaagtctctcctggagccatagaagagaccatggcctaccccataggattttaacagaactgtgaagcagtctgttggatcctgtgaggacaggacactgggcagtcccctttccctttttttattgtggtgatggttttcagtgtctgctgcaggtaaggcgctcaatgttgttaacatgccctttttcattgcctcagtgtttgatatttttcattggctgttaaacgtggaaactttttaacatgctttgtcgcatttatatgctacaggttacaaagtgagagccttgtatacacttcaatacttaaaaagtacccgtactcagtactcagccggcagcataatgaaaagtgggactagacacggtgtccatatggagaggaaaaatatacataga

SEQ ID NO: 19515 - DNA, 1183 bp, Mus musculus
attgcaagcaaacctgggcgatttaatgtctctgtctctcttactctttatgatactaagtttggttagtcctaaatgtaagctaaattaagtagtcttggttcaggttatgttttaaatattaaagctctttttttgttaatgttgggggttttggggttggtgggtggggggaaatggcaccttccatggccaacacaacacttgatcatgtcccagaagcattggtgttctccaggagctggagtaccaggtgtccaccttggtaggatgtgtggggaattacaataggtgaacgggttcgagccttctctgggcttcatgaaacatggcctccagctaagggttccttcgaggagttttattttattttatttgagttttatttttagttaattgaaaaagatgtgtctctaatcaccaaaaagccatccctgtctcctattcacacaggggcaaaagcctgttttccatagcaactttgttttttgtttgggttttgtttttttaatagaatattctttcttgaggtagggaatatatcttagttggtagagtgcttgcctgacattcatggagtcctgcaccacaccaacaatgtatggtgtggtgccggtaatctcaaggctggagacttgaagcaggaatcaaaagttgaaagttatcttctgctaactaaggaatttgaggtcagcctcagatgcatgagacccctgtcaaaacaacaataaacaacacttcacctttctcatgaatatattttgaaaacagaaatagtgctctagactttaaaaattttggagtcagtgggatggctcaacagataaaggcacttgataaccagaaagtagtgggaagagagaaccagcacacatgccatggtgagctcccatgtgcacatgtttaataaaaagtacataattcaatgtaataaaacaacttaaacactcctttgttgctacttttcctgcaagaatgtaggaattcaatcttgtgatgctttaaagttgagcagtttacaagttgttttggtaataaatgcaaatctggcagagaggacagaacatctgaaatagttctcttttgttgtaggttatagcactccaactgccccgcaggcgtacagccagcctgtgcagggatatggcactgggacttatgacagcaccactgctacagtcac

SEQ ID NO: 19516 - DNA, 1132 bp, Mus musculus
cacactgcttacaaagcagagacagagtaggaaagaggtcttcatcctctcccacatcagcaaggatagggctgcggctgcctaaagtgagcaaggagaacagagctctggacttctctaaatgtgggctctggcttcagactcctcagccaaaagctcttgaagatcaaagctctggcgggtacagctgtcctggcctgtgggccagcccatgggatgtgcctgggccaggtgccaccccacggctcactgtcatcccaggagggaccccacctgatgctcctcatcatccgctggcctgacactatcagagctcgcgccggctgttgccagggacagactgactacacttgaccttcaagagcacttagaagtggatggcctccagactctgtcagcctctgcaggggccacacaagtctcccgagccaagtccacaagcctccatggttccctggctcctctcctgtggagtgtcctgtttgatgtctgaggtctgctttgggtaccgccctgggaactgctaacctccgattggtccctttgtgtctctgtttactgtcctcttctacctccaggtcacttagctctggctgctctggctgggagtggggggtggggatgctggctgcacccccaccctggtctgccaacagaacctgggggcctcacacgggctcctgtcttgccaagctggagctgagcacactggcccaggctgagtggggcagagcaaacaagtggaaggggatctctcaccttagagggaggtggccgaaggtgtagatccagcgagggagctgccatccccgccaccttcatagcagcaagaccttcccatttccaatctcaccctccagcagggatatgactttggacaacaaggctttatttgtaaatatgctcttaatatgcaactttgagaataagatagaaacatcatgtattttaaaatataaaatgaagtgtgacacactgtatacaatttaatatatatttttaggattttgttatttaagaaaatggaatgtgatggtacttaacttttacaaaagagagaaaatgttatttttactgtttgaagaaaataaatattctcattgttgtagaaaccgtggtgaggccaggctgt

SEQ ID NO: 19517 - DNA, 1131 bp, Mus musculus
cattcaccaccatctcttttgggagcaccctgctttagaggcagcccagcctgggatcctccatcacatgtaccagcctggctgctctgctggggatggtaagacaggcccaggctgacaggacacagctggacctgactccagaagactcttgggtggtggggaggtatagtgtaggatgagttttcttgcttcttctctgttttgtccacatacagatcggtttcccctgtctttacagtttgcaatagagccagactgaaagaactgtcaggttttctaggctggcctggttccccactaagagtggcattggcgccctagaggcccagaggcccagtgtaggcttggagctttctctgctgccaactaccatgtgtcatctagtccgaggggactgagagcagggccacaccagatgtcatctttctagagggttctttttagtacccactgaccaatggggcaagcctgaggattggtccatctgtttgtccatggaacagacacagtgaacttcctggatactagacttaactagcctagccctcaagtagttgccaatcctgtggaatcagaattcagcctgtcttcctgtcctcagcccaagcctgtagcctagagctggggctgtagcctagagctggggctgtagcctagagctggggctgtagcacagagctggggctgtagcctagagctggggctgtagcacagagctggggctgtagcctagagctggggctgtagcacagagctggggctgtagcacagagctggggctgtagcctagagctggggctgtagcacagagctggggctgtaactcagcgatcaagagcttgctttgtatacatcggaccctaggttctatcccagcactatcagaaggtgggagagaaaaagactgcaccatagcatgcgggcagcatctgtggttcctacgtgaggtgtcatcattttaaaagcagatcaaaactaccgcgagttttgtcctttgtcccttatcatgggagcagagtaggagtaagggctctggtcttgctcattgtcccccagacagggaggcaggaaaaggtcaggcttgggaactggagatcctcccaggaaaagctgcaagattgagagacc

SEQ ID NO: 19518 - DNA, 1157 bp, Mus musculus
gtgccaaaggtacggccagggacagcaatccacccacccatttaattatccattcatcaggattcacaaggatatgccatgtgatgccagccatggctctcagcccctgggactgaagtacagaacaggccgactcagacctgccctctagaagggacaacagtgtttagtagtctgtacttacgtgtagggctgagtgtcttggctactgcaggtgtctctgctggacacactataccgtgccagcagagcagtgatccagggggacaagaggcagtgtaaagtgtaagatgtggctaccctgaaactctttgtaaagtacatgtgatatcatccataaagatgggttccatagatagactacaggtaacaccttctacaaagacaggctctatagattgacaagctcctgataaaaagtaaggatctgccatgtcctcggccacacagcgcatagggcatggctgctgaccacacccattcccatcctctgggcagacaccagggtatgcatccctccctttgagtggacagcctttgtgactttaacactgttccctctgtgttcccacaggctgtctcagggccactttgacaagtagaaagataaggctttccgcttagagcacgcactggtgttggtgtagtgtctgctgtcttgtgttctcgctctgatacagccccatttgtgagtttgtaggcagtggggctttgtggctcaccaaggtgcatctgagacagtaacattgcaaacacttcaagtcattgagtttgccgtaagccaccacatgtgtgaggtgccagcaagaggcagaggtggtgactggtgtggattctgagccttacctctccctatctgtgctctcttgtcccttgccataatacacagtagtggtgagacctcatgagagttatgacactctacaaagggaagtctcaggcagaaggcagaagagagacctcgagcttacagaggatgttagcacatctgaggatctctgatggccgagggaccagacatgcactcctgacatcagctaggtggggagctccattggagcaataccgtcgcaagatttgtttcctagagctgccgtaatgcagtatcacaaattacaatgcttaaatgagtgggaacttaccctctcaccaggaat

SEQ ID NO: 19519 - DNA, 1141 bp, Mus musculus
aggatgggaccttgcgcttcagctacatcctcagcccaggctgtttctgcactaacttagctgcactgaagatcctaacatacacagagattaaacaagccttactttaagaagggcagttagaagtaggctgctctgcagagccctaacacatttcattaacaaagctccttgagggacttaactgtcaaaaccaagaggatttattctgtcatggttctctgatgacacggtacattcacttacccatgttacatggaagcaacagtgtcctgcgtgggcctgactgatggcatgaaccatttaattatccatgtaatatatgagcaccatggtatactattacttgaggtatttatctataaaaagcctgtcctatattaacatcggatttcacacgaaaaaagttttcacataaggaaacagtaaacataacattttcaagctccgaattctgctttctagacagtatctcagtttactattaaaaaacaaaacagtgttcgctttggcagcacatatactaaaatcggaacgatacagagaagattagcatggcccctgcacaaggatgacacgcaaatttgtgaagcattccatatttaaaaaaacaaaacaaaacccaaccctcagaaagtcagaaggtgagctgcggcagggctggaccacgacagacagtggtatcctcctgtcagaagcgtaaacgggtcacaggttccagtgcacggacactggaccagtcaggccagcgagcttcctgagcattttaccttctgttttgcttttggagatgcagctcagcttactccactgttgtgatgcactgtcctctgagtatgatatgactgctatgaccttaatcagagcagctgtgactacctgcaagagaccctcacacagtcgggcctgttgacatccttggcagaagaactacacataattccagccctgatagacttgctctgggggaaacacaggaatatataagaggtagaaggttaactgtacagctttgagaggggacatggctggaatggactgtcctgtagctcagatcttttggggtcaccatactcctgtatatgcccaataaactcactcgttctccaagctgggcttgacaaagctgttcctggtgtcc

SEQ ID NO: 19520 - DNA, 1095 bp, Mus musculus
tggttcaggcctttccctatgtgcttctgctctcaaagtccacacaggactgatgcttttaaaatgtggtctgtaaaagaatttgaaagtatcatcttttaaactgacctgcatttttctattccttacataaactttttgtatcgtgttggtctaatgacactattttaattttttttttatttctcccatagcacttaatattttgtaaagatttttttgtgataaaatggtctaagggctctttttccacattaccattttaaaaacttttaaaagctagaaaacaacttatgtatattctgtatatgtatagcagcacatttcatttatggaaatatgttctcagaatatttatttactaatatatttatcttaagccatgtcttatgttgagagtgtgacattgttgaaataatcattgaaaatgactaacaaggccctgtaaatacatgataattgcacacagattttacatatttgcagaccaaaaatgatttaaagcaagttgtagtcgtctatgattttgtaacaaattgtacaaatgactgtaaaaaaaaatacaattttatcaagtatgtgtcacatgtggtcattgctgtggctcctaacgtctagagcctgggccagtgctctgatttccatcgtatccagagatgcctgtgaccttctgctcctattaacagattccaagtcatcagagtattggctggaacctgtgggttatatccttgagtaacagtgtgtggcaggaccctgaagcaggaagatcacatctttcagaccattctggactacagagtgcatccaaagctagcccgtgcaatgtaatgaaaccctgtctcaaaaaagtaaaagatgtgctggagcctgggcacctgccagcagtcaaggctgtaggttcgatccccccacacctcccttcccctgccctgtgccatccacagaaaaccagttgggcatggtggctttgcttaggaggcaaaagcaggtggatccctgggttcaagttcaatttagtctacatggtgagttctaggacagccagctctgtgtagagagcctgtctcctgacccccactctacccccatttt

SEQ ID NO: 19521 - DNA, 2003 bp, Mus musculus
gcttctgtctcctgagtactactgggattaaaggcatgcactaacactgcccagcataagatatcttctaactggagatgctccttttgatccagcctgtgtcttgttcctgcagcatgtcaggttcatttccatctccatcgagatccttcgatctcagctccacagccttcctttccccatcagtgtcactcccactgctatctcctaatcacctcaagccaggcacctcgtgggaagatctgtgatctgtgaggagtctcccctggccccctgggaactaattcacttaacttcagttctacctatgcttctgtgatatcttaggagattcagtataggcatcaagggagacctgctcaccctctgccccaacagctgttctcagtgtagacttgagctcctcaggaaaggagccattgctgccccctttatcacacagagccaaatcaccattgtgaactatcacatccaagggccctatggatgggctagggatgctcaaggaccttacctgatacgtactacccaaagcctgctgtgctggctctctccagacccttgatgactgttctccctctttctcccaggaccaggatctggcccaggcatcggtacgggagcttgagctcaaaaggaactcttatgtagaaatcgtgaactgtacggagacttcaaagtctggcttccttcaaaactactatacacacacacacacacacacacacacacacacacacacacacacacacacatatatatattttagctttgacaaacacaaaagtggtaataaagagagccctcctcaacccaaaatgtgagccacctgtggcatcccttcctctttaacaaaccaacagacaaaaatctcttgagtcctttgcctctttaataatgtgttgttctgttttgtaatgtgtgcttgggtttctgaggtgtgtgggattgagttctctgctttttttctaaaatattatatgtaaatgtaaaaagttatttaaatatatattttaaagaaccctaactaccaacttctgttgaaaaaaaaaatcactgctgcattaaatgaaccacatcatgtgtcaatactgttgtctccctggagggacctcaggcctttgaaaagctcagggttacacctgccttattgaaaatgaaccagaaacttgaagtaaaaagctccaaggaacaatacaaagctgcctcatcctttttcccttttttgaggcaaatctgaacttctgggcttctgggaagccacacctctcctgcccacacctgtaggcagcaatggaacaggagggaagtgggggcagtgtcaagctattactgcctaggccaactttattggagacagttctgcccattctcttctgttcctttggtaggtctttatcccagcagaggctgtggctgtgaccagccctgttactagggtctctcctgcactctgaccaccagtcaagggaagagacgctctcaccctgtggccttggagtcttttgtaaaatcattttgggcttcatgccatcaattgcaggggtaatttaaatggggtgtgcagggtggacacccaggaggaatgttgatttatggccttggtgtcctgtgggactagaggaacaagctctcctctcagtagcagtgcaccgctccttgaaaggcatgctgaggcacacttgtgcccatgggtctagggcagccacacccctcagctgttgcccccttaggttgccttcttgggggacatatgcttgaaccacaagagtgtactaagctccaattggaccagtcccccatccccagaaacaggcctctgcctggtggctgcagcggttcaccttgccagcagatgtctgctagcctgtctgcctgatgcactattatgtactgattctccacgagacagactatcagatagttcagacccaaagggtaggcttttgtatattttttccagcctctttttttttaaggggaagagttttttaaacccaaac

SEQ ID NO: 19522 - DNA, 1185 bp, Mus musculus
agccacaatatttgcccttagagtccgtgcattagtgaattgtgctgtagatggaattcaagcagtttattctctacctgcctgcctcaccaaagaaagcaagtatgctttaaagcatcttctgtaaggctgcaagtggagcccagtgtagagcacatacctggcatggatgaggcccagggctcacccccagctctgtggtgtctgtcctgaatggaccgtgcctctggaacgaatgaacatccatgttcctatggaacaagaaatgctgggaagcccaggaggccctctggctgtgagtttccctgaggcacattccaggaaggcattccctacccaggtgctgcagtcactgccaacctctccaggtgcaccagcatcaaagctggaggaacaagcactcccagtcaggacatccctgaactcacactcccacagggactctctgatatgctggagccctggctgaaagcaaggttaaaaacatcagaggctctctttatttcgtcctctaggaatggaatttgtgaagaagcctagggtaccactggggcagaaacactagtacctgctcagaaagtctctgagctactgccctagggagcttaatggaagagaacaaacttgccacctaggcttctgcagggccatggctgttctgaggttgggactacagagattcagtgacttatgtacgatgcagtgatagagcacttgcttggcataaacaaagcctgggcttgacccccccacacacacacagcccgcgctatctagaagaaaaagagacactgaacctcactggtcacttgggatcactgactgtaaaacaatgaggtggtcctcaggcaactttctgattgttcagcctcagttagtttttaaggaagctgcccatagggcaaggacaaattctatagcaccgtacccaggattccagggtttcttaaactaccaaggaaaatactttatccccaatatcaccgaattttgacttgctggtcctaagttcagggaattggcttaaaaagcaacggggtgacactgccctctagtggtccagtaaagtatttgcccgttgggtttgtgcacctgtcagcacaggttatttctgtggaaagcatttggatttattctcatactcttgggcccatggtgatgtgacttctgagcactggctgaaat

SEQ ID NO: 19523 - DNA, 1161 bp, Mus musculus
aaataaggtgaagggaggttgagaagacatctgacatcaacccctgggctccatgtgcatacacatgaatatatgtgtatatagtatatacatatttttatttcatcttattttatgggtatggatgttacgtttgaatgtatctgtatagcagcatatgcagggctggtgcttatgggtgccagaaaagggcatcagattctttggaactggattcatagacagttgtgagccatcatgtgcatgcttggaattgaacctgggtcctttggaagagcagtcagtgctcttacctgttgagtcatttctccaccccttataatatctatttctaggggtttttttgtgttctcttcagtgctcagctcacagtaattacttgaaattccccgtggattaaaaacctgttccctgccataaagtttgaagttttgaagtgacttagtatacaataacaaatgcatgaagtgggtcaaaccagtctgtaaggcagcctgttgatatcttctttccattttgtctcttagatgcacccactaggcctatgtaataacaatgacgaagaggacttgtatgaatatggctgggtaggagtggtgaagcttgaacagccagaattggaccccaaaccatgtctcactgtcctgggcaaggtaagcaccaggccttctgtgtcactgccgttgtggttgatgttttccacataagcattttcctgagtttcaaatatcaggttctgaagaagagccatgctggcatagtactccttctgaagctgtgtgaggagacatagcaccatagaacgcatgtgctttggcgcttcagagtctgctgtaaccctgcctactatgtggtcttgggcaagttgctttccctgggagtctcaatacttatctgtgaaatgggttaatgttagaaatccataatactgtaccttacatctttggggccagaggttttagacctgagatttgggggtgggggcttcaggaagtattatggtatatatatatattttttttctataagtaaccctggggccatactcaataatcatacacattcatatatgtgtagcatatgcttatggatattcacatcaaatgggataactaaagcctaaatagcctcctcttagaccacaactgctttacttccaaa

SEQ ID NO: 19524 - DNA, 1150 bp, Mus musculus
tgctgccaagcttgacaaaccacaaggtgaaagaatctaaccaactcctaaggttccccccacccacccccgctgtgtgtgtgtgtctgtctatatgtaaatgtgaaacatttttagaagtcagagattatacccatttattcacaaatctttttcttcctacaaagtgatattctcatttggtaaatttgattttctattgctgcatctcagcatttggctgaaaatattttacattcttaaatttggacctttgacctatggccacttagggattttggagttagtttttccttacctgtgaagcagttacttacccattgctcatcagtgcagaagccttctccagtcagtgcttgtctttgctttatatttgctttttactcaagctcaacctaataactaagaatatgtgaagtcaagaactgtttttagattagactgaataaaatgcagcagcagtgagtcatggcaagattttaatgtcagctatggcagttggtgaagagcccaggttcagaggctgcctgggtttaaatcccaaacttgtagcatccttatgtatgacactgaacttgtcttcctcatccataagacaatagtgtatgttccagaagtgattgtgagggccagatgagtcagtgtctgtatcatagtggagtgatgcctatgacctggcaagtgtgcaacagatgtcaccagacattactatctctggtgtcttggtagttgtgtcaggcactgctctagacaaggtataggtgtttttttctaatcttaacaacagctttagaattccagcattgatcttttcatgtggacaatgaaacagataggaaggattctggctgtgggaggggctgatccaggagtttctaaatttgttcactgtcctgggtcctgtcctgctattccattgtgacagatcctgggaagcagtcttgatccaatcagggtgagtgtagggtaatcttgttaagacaaaggggcaaggcctttttgatgggctgatacctgtacacaaaaaaagctacaccatgacacatattttttttttttttttgggtttttggttttttgagacagggtttctctgtgtagccctggctttcctggaactcactgtatagaccaggctagcctcgaactc

SEQ ID NO: 19525 - DNA, 1133 bp, Mus musculus
tgaatttgtttggatttgacatttaattcaaatctaatttctcataatttgtattgaagttcttgaaggcctgtgccaacccctcccacccccccatgaaattattcacacattcttgtgaatgggtgtgttcactttcctgatagtttcccaagaggaaaagaagtttccacctagtacttgtctttgactggtccagcactaagaatttaagtagaaggcccagaagataactcaatggattaaggtgcttgctgtcaaggggactaaatttgatccttgacatccatattgtagaagagaaccaactcctgacagttgtcttgtgacctctgcctagactctgtggcacacatgcccttcctataaatgtaagaaaaaaaaagttgagtgaggtaataggtctcttgggctggccagggttggagggaagcctgcagcagctttgcaaaccttcattgagcgtatttattggatggatgtctaccaaaaacctattctgtacagaacaatgctgcagtgctgtagtcctctgagatagactggtccacagataatcatccttaccaactgagtttttttcacagtatttcaccctcatgcccataggcatctgcatctcaactgagtttgtgcatctatgtcctgctagttctgtatcatccttgggagagagaaaaaagaaaccaacactcaaggaattttctacatttagtagtggaggaagtggaagtacaatgacttggaggaagaagagatggaaatgaaagaattgaaatagaaaaagggttagatgtgtccctttctaccattcactgcacagtgaagtggaacagctgctggtgttggaaggctgcaagagtagcccctgccttctggtgaacccaaatttcagggagacatgtcttcatagtcaaaagaatcaaatgtgtgggctgagacctagctcaggggtgcagagcacttgcctagcatgattgaagccctgagtttcatcccctgcaatggaaaaaaacaaaagtaccaaatttaatgaaatagatttaatgcaaggctagaaaggtgaagtgccttgtttgggccgtatgtgtgtggtaaaggtagggacaactacaattaacatttaattcctc

SEQ ID NO: 19526 - DNA, 1914 bp, Mus musculus
ccgcagcactcagactatgtgcacctctgcagcaggtgcaggcccagttgtcacctccccagaacatcttcccatggactctgacactgttgcctcttcagattctgaggtagagcttattctgtagcctaagtggcgtgtgacacgcttagccaggcaaacggagaagttagtattggtggggttaggattaagcactttcctagtctgcttaagtggatggagtagggggaaactgttccgtgggtgggtcctatgatctgagagcataagtctggtggatggctgggtcctgtgatctgagagtgtaagccctaagtaacattgtggaacccagtactaaaagtatttctggtagactgtcacattcattctaatagtgaactcttttgtgttttgcctcttgtagtctgatatccttttgggcattctggacaagttggaccctgtcatgtttttcaaatgtccttccccagagtctgctagtctggaggaactcccagaggtctacccagaaggacctagttccttaccagcctccctttctctgtcagtggggacctcatcagccaagctggaagccattaatgaactcattcgttttgaccatgtatacaccaagcctctagttttagagatcccctctgagacagagagtcaaactaacgtggtagtgaaaattgaggaagcacctctaagctcttcagaagaggatcaccctgaattcattgtctcagtgaagaaagagcctttggaagatgacttcatcccagagctgggcatctcaaacctgctttcatccagccattgtctgagaccaccttcttgcctgctggacgctcacagtgactgtggatatgagggctccccttctcccttcagtgacatgtcttctccacttggtacagaccactcctgggaggatacttttgccaatgaacttttcccccagctgattagtgtctaaagagccacataacactgggcccctttccctgaccatcacattgcctagaggatagcataggcctgtctctttcgttaaaagccaaagtagaggctgtctggccttagaagaattcctctaaagtatttcaaatctcatagatgacttccaagtattgtcgtttgacactcagctgtctaaggtattcaaaggtattccagtactacagcttttgagattctagtttatcttaaaggtggtagtatactctaaatcgcagggagggtcatttgacagttttttcccagcctggcttcaaactatgtagccgaggctaggcagaaacttctgaccctcttgaccccacctcccaagtgctgggcttcaccaggtgtgcacctccacacctgcccccccgacatgtcaggtggacatgggattcatgaatggcccttagcatttctttctccactctctgcttcccaggtttcgtaacctgagggggcttgttttcccttatgtgcattttaaatgaagatcaagaatctttgtaaaatgatgaaaatttactatgtaaatgcttgatggatcttcttgctagtgtagcttctagaaggtgctttctccatttatttaaaactacccttgcaattaaaaaaaaagcaacacagcgtcctgttctgtgatttctagggctgttgtaatttctctttattgttggctaaaggagtaatttatccaactaaagtgagcataccactttttaaagtcactgaaagctttttcttcaggccagttggccaatatcagttactaagtggcagagatagaacctaaccaccttttgggggtggggtggggattaaacctaagatgtgcataatgggcaagttacataagttgtaccactgagtctcagctctttaaattactgttttgctatgataggaagtatcagacttcaccct

SEQ ID NO: 19527 - DNA, 2648 bp, Mus musculus
ctccctgaactccttcctgagaagccaaagccatcatctagccctaagaactacaggagagagagccaagcaaagcacgcagctccgggcactgcgttcccacagaggactgaagggttgctggaacctcagtgcgcagacgcgccgctttaccgtagtctggaggcagctactagcacagaggaggagatggagctctagacacccgttctgctctaacttgacaagtcggagaaggctcctgcgttcagaaatgagcctgcctgcagagtataggggcctgaaagttttatgaaacgggtgtaatatctcctctgcctgtgacttgggtgggactgtcattgtgggtagccatttattgaattcaactttttgccaaggaagcttatctcaagggaaatgcagttttttaataggcttatccaggaaatgttacagtctctttaacgacagctatagatgctggatgtgttccgatgacttaggtcatgtcacattgttgaagccattcattcttgagatgattctgtacaggagtgctcctaatcgccactgcaccctaattgctgagtcatgtgctgagctacttgtagtggtcactgtacacgtggggctcgggagggaagagagcaggacttgtctcttgtgaaggaatggaacaagcaaagaaacttgtgttggtgtcaggttggtgtagctggatcacccaagtagtagcccttgatctcctttcatgacggataggctcagttagtcaggaatgtttacacctcagttaacttcagtgattgacttaaagactgggaggtatattgcctgtgagagaaatgtcttttcatgaatcctaaggacatgctgtgtcagctaaacctacaattgattgcttctagagtttaaaaagggaaagttgtgcttgtatttgcaagttgaatttttttaatgttggttccaaaaacagtgaattagctgaaaagaaatggagaagtgtcttggagatttactgaaatagctaattgtcaggtgcttaagcttttgtgcagtaagcctaaaagttagcagaagatggcctcctgccagcaggaaatctttaccctttagtacccgaaccagtctcaaggtgttctttggaaataaccagggttaaagtttttaatttctcaggaagagctcttcagcatggcaggacgtgtaatgagggctttcgcaagtccttcagcgctgcagagcagtaagctatccatccagtgagtgtggcggctctttctacagctgaactcctcctcagttgagttttcagtttctggcttgcttctccctttgtataggggagaacagagaagaggtttatgctgagggggggtgactttttagaaacgtagcttcttggcgttttgcaacccatgctggcctccctcctgcagatggcataggagtccgtctgtctttggactgtctcctctgctgttgttcctgctctctccgtttctgtctagatgtcaggaaaaggtttaatgtttaatatttaaacaaaatatttatatctacacaataaagttaatcaaccttcaaaccagtcttgaagccagctacttgtttcttcatctcagactcctaggggaatgaaagctgtcttctgtgaatgtgcaagggtttggctcgtgtcatttgaaaactcctggcttatctaatgggaccagcttgtgaagtttatagccttaaagaaatctctgtgctaagttttagaacagtttagaaccatgcagggatgccgagagtctggagttagcccagtgttagggtaggaaggtagtggcagctttccaaagggcctaaaacaccaggactgcctctgtgaaaggcccgagtggctttgatgcagttggtaaccacttgagagcagagatgtcttaacttgtcaggagtccttacctgacatgaccctgtttcaacaggaaagtagatgttttgtgctcctttttggattttatcttcttgcacatgtttgtacagaaatcaccttcatccttgtggtgcttacacacacccagttgtctccacagctctgatacctttgccttctgttctcctctctagcataagactttggcttctgccttaaggttttcctaaggaattaacaggtcttttcatcttgtatagtttttacagtgtgaatccaacattggctcagtatgctaatgtgacagtcaacagttatctaaagcaggtgagctctgatgaacaaatgtattttcagtgagtctgagtcgggtgtatgtgggttttttggttcttggcttggggctttttgttgttgttgttcttaataatatgagaatccagttctcatgacaagaaccagtttaaaaactgctcgttcttaaaaaggtaaaactaagatttagaaacaaggcaggccttagagccgagggagactattaggcagcaggccaaaccactctggccctggagccgcctttgttaacagcaacaagaatgctgcagtgctacaacgtgctggaagatgtgtcagatttgctttaaagatgagaatctggtgtttctgtactttattattttcaataaaactcaatgttttgaacttttaaagtatctgtaatcctgtataaatgtaaattaagcatttt

SEQ ID NO: 19528 - DNA, 1136 bp, Mus musculus
ctgacctctttgttaccattgactggctggcccattctcccatctctgccttatatctaacttcctgtcagtgctgctgcatctggcttcttccgtgggttgctgggattgactccagtgtcaggtttctaaggcactgtaactgctgagcccgctccctgggccatggtatttctgtgatacacttaaatagcttttacattttagaattttattttatttttgcattcaggatctagcgttgcaacctcatctgggtttggaacttgtaattctcctgcctcagcttgtgtagtattgaattggggagtgggttatagattagtagtagaacatttcacatgcgggaagccctgggtctgtacctcagcagcacacacaccgtgaaaacaagcaaagagggttattccttcttgcctggactgtttgttttatgcagggatttgctgtgtcaaccggcaattgaagctgagatactcctgcctcggcctattgagttctggggttatagatgtatgttaccccacagagctctacactgaagacagttttttttttttaagatttatttatttatcatatatgagtacactgtagctgtcttcagacataccagatgagggtatcagatcccactacagatggctgtgagtcactatgtggtgttgggaattgaactcagaacctctggaaaagcagtcagtgctctttaactgctgatccatctctctactcctcactgtagacatttttgttctgtgacccttaacttttttttttcctgagactctgtgacccttaactttttttttttttttctgagactctgtgacccttaacttttttttttttttctgagacagggtttctctgtgtaaccctggctgtcctggaactcactctgtagaccaggctagaccaggctagcttccaactcagaaatccgcctgcctctgcctcccaagtgctggtattaaaggtgtgcaccaccacccagcgatgaccctcaactttttttttttttttttttttggttttggagacagggtttctctgtatagtcctggctgtcctggaactcactttgtagaccaggctgacctcgaacacagaaatccgcctgcctctgcctccgg

SEQ ID NO: 19529 - DNA, 1136 bp, Mus musculus
agtccgccatgttcaaagtgaaaatgcagtaagaaatgggtctgggtgcttctacttcccgtaaggctgcctgcctgtgtgtgccccgttagaaactgcgctgggtacactgccaacacagctcagcaggagctacttcctcctcacttggattattttccagatctccctgtggcttatctgacttcatgtcttgtttttacaggttgctttcactaccagaatctatcaccctaatatcaacagcaatggcagcatttgcctggacatcctgaggtcacagtggtccccagcactgactgtgtctaaaggtagagacactggcatggactgagcatgctggtctactggtcccccttgctgactagtggacacggaagctgaggaagaacagatggcttccccagatcacatagccctgcccagtcctgtgactccctcattctccatgctgtaaggcgatgagggcattgcgaagcacagttcccatgccagtaattctcagccatcagctgttctgtgatgctccgaactgtcacctgggtacaagaagatagcatcaactttacttgcattttcacctaaaagtcggaaagcaaatatgaaactttttttcatctgcagaccagcagactgtgagtcatctctgaaaggtcaaatacatggcctgggctctagtgtgtaaagacattttcctttcccaaaacaagttataatgagcttattggtggacggcattaagaattcaagctgcacacatataaacaaagcacttgagagttcagggccagcctaggagggaccccgcctcaaaaaaaaacaaagcaaaacaaacaaaacaaaacaaaacaatccaatctacaccatgctatagaatgctaggagctctggaacagagattgagtacggtagggcgtgcgtgtgggacgagccacccacagccggtatgaggagcataaggctctgggcactgggagaggcctcaggctatggggcaacgggcagggcaggctttggaatgaaacaaacaaacaagcaaacaaaaacaaaaaccaagaggcctgcagaggtagatatggtaaatccagaaggacagaactaccgtactgttcaggatcacagtgtaccccacacat

SEQ ID NO: 19530 - DNA, 1148 bp, Mus musculus
ctctgacattgtcctcaacacaggagggcacagaagcagcggtgagggcacagactggtcttgcagttctggttcggagtctctaacttcagcattcggaattcctgtcttcttgtcagtagacaaggctgctggggcaccaaagatgtgtggtgtgggtacagacgggcggttggaagagtgtgaaggatggaagtgaaggccaggaccacgtggaggaatcccagaacagtgtgctgtgactacactatgacgtgtgtcctgctggtattttaacatcaaatattatcgcgacttgaacagaatctttttgttgttgttttgtttttttgtttttgtttttcgagacagggtttctctgtgtagccctggctgtcctggaactcactctgtagaccaggctggcctcgaactcagaaatctgcctgcctctgcctctggctcccgagtgctgggatcacaggcgtgcgtgcgccaccactgcctgtagcagagtgtagaggggacagcagagtgtagaggggacagcaactgtgcttgaggatgctcactgggcgcacgaggagcccacacctcagggcctcggctgactgaccctttcctttcttcctagttctcctgtctatctgctctctgctctgcgaccccaaccctgatgacccactcgtgccagaaatagcccacacttacaaggccgacagagcgaagtatgcgccctcttagggttggctttgtgtgcagctgcccaggttcccacggacatcttcctgcccaagccaagcccatgtatgcagtgggtgtgtcctgggctgagcctcctgcctgcctttataactaacatgtcctttggccagaggagggagaagggataaaagtactttgccctgttggatagatcaccagctagcattgctgaatcctaaaatcctggcaagccctgacctgaggacagccacatcagtgctcagtcaacaaaggactcagaaggatatgacaagaaaagtcagggttaaattaaaaggtttatgaaataaataagagagttgcttggacacccccagatgagccagtcagggtggggagcactgccaaggttagcttgctgataagatagaagtctgaagtgtgtagctgtttgatcagaagac

SEQ ID NO: 19531 - DNA, 1214 bp, Mus musculus
gggccaattgtgattgaaagctgctgatgtcaagagtgtctccacatggagaacacccccaggttgactcctgcccttcaccctggtccagttctgcagccccatgcggcttgttaccaggtgccagctggttatggggcttgtcatctgagctgatgattttgtgagactatttttaagttcagctccttggactacaccccacccccagttctgctactggttgcctgcctctgcctgtatctcctggaatgctgattggcagttagggctggggtgggggctgggaaaactgttataaagcctaaagggccaagcaagcagctgccacctagagttcctgtgtcccccgccaccatgaccacccaccgcctagtaatggttcgccacggtgagagcttatggaaccaagagaaccgtttctgtggctggtttgatgcagagctgagtgagaagggagcagaggaggccaagcggggggccaccgctatcaaagatgccaagatagagtttgacatctgctacacgtcggtgctgaagcgggcaatccgcaccctttggaccatcctggatgttacggaccaaatgtgggtgcccgtggtgcgtacctggcgcctcaatgagcggcactatggtggcctcacaggcctcaataaggctgagacggctgcaaagcacggggaggagcaggtgaagatctggaggcgttcctttgacaccccaccaccacccatggatgagaaacacaactactacacctccatcagcaaggtgggccagatgccgggaagctggaaggttgggagcccaggggggagggctacccagtaaacaaaagcgaaatgttcctgtgcccttgtccccaggaccgccgctatgcaggcttgaagcctgaggagctgcctacctgtgaaagtctcaaggacaccattgcccgggctttgcccttctggaatgaggagatcgcacctaagattaaggctggccagagagtgcttattgcagcccatgggaacagccttcggggcattgtgaaacatctggaaggtgaggcctactctcaggaaagatgtgagacagaaaccactgcggttcattggtttcagctattttacagatgtcagggtttcagaagttgatggaggcaggagttttgtaatactttgtgttgtcccatttccagttatgtagtcagcacagacagcatagctgag

SEQ ID NO: 19532 - DNA, 1186 bp, Mus musculus
ccgttctgcgtgccagaaaagagagacctatgttcccgccctgggcttgatatgggaagtgtcattccagcagtgaggtgttgtgcagaagtaagacgcctgagtgcctgctgcagtaggaggtggcccaggacagcaacctccagtgctggtgctgttggcaccaccacccgaagacatgggtacctgtaccagacttcataagcagctcatctccagaatcggccccacatgtgtcctctctctgtagctaccaatcccccgcattccagcctaggctaagccgggcctgcctacccacaatctcctgtgcagcctcagcccctgcagtaccttctgggaaggctggtttcctagcacagagactgtagctcagcagcatcagtgggcagcagcagagcgctcttccttcttatcctgagattgtgagctgcgtggtccctggtcctgctcctctgctctgccacgtctaactgccctgcagcagtttcgaacctgcaatccttatgcaggcctgtgaccctgcagtcctcaggcaggccctgtgactctggtgtttctgttatctcttccagtctcagctgtacccctccagataagccttcccccacttacccagttcactcctggtccctgtttcccagctctttgtgaccaacttcttcaccttctctgggctggaagcactaaagtgtcacagtgtctttgtatctccaagtgtcgagacctataaagtccctttccttcctgtacacttagtgcccactgtccctgcctccttcagggcctgacagatgcgggcctcctagatcagtcagcagattaacaagtatttttaaaattaacattcaataaagtggattatttttttggattatagttttacaagttttaacacacacatgcacacacagagaatggctacttctgccaccttcaggacacaacagctctgtcccccagaactttgtcttatactgttatagtgacagtttccttacccaagtgtgttagggtttctattcctgcacaaacatcatgaccaagaagcagttgggcatctcattacggatggttgtgagccaccatgtggttgctgggatttgaactcaggacctttggaagagcagtcagtgctcttactcactgagccatctcatcagcctggaaccaaaacttctaggtc

SEQ ID NO: 19533 - DNA, 1200 bp, Mus musculus
tgctaggagatgtagccacaaaagggtttggactgtgtgtataaccttcactgctatgggggctgcccttagtctcattcaagagtctctaggtggttggctcaaggctggcaacatgctagtccaggactccatggaccagttggcatttgaatgtgagaacaacctgctggggtagatactggccaggcctccagtgtttctcttgaaaccacatctttgttcactcttccttggttttggtgttgaagagaagcacaagtaaaaaagctccagttgtggtaggttttcccaggaaactaagaacctggcgagcctgtatattagagtaactctttggggtctattgtaagcacaggctgggcctgtgtgtttataaagtgataaagagagagcttactgaagttttttggtagttgggcagcagaaatatgctgtccctagttggccaggattgagtccttgtcctgtggcattgcatgaagacaacactctcagtcaggggcatcgttctgtggattttgctcctgacccatccgttccttcttccacatagctcttcacccaggtcttcggggttggggtgaagactgccaaccggtggtaccaggaaggactacgaaccctggatgagctcagagagcagccccagagactgacacagcagcagaaagcaggtgaacttcccaaagctgcctagccctggaagctacacaatgaagcccttagctttagtgtggaacacgctaattgcctgagtgcggggcagcagttggtgcagaggaatcctggtagccatgcgaggggccccctgtggcttcctgcctggacccagggttggccatgagcctttctcagcgagtgttgtcacagcactgccctggcatcctgacctcatgtttcttcctgtttgatttcagtttgtgttagggacagctttggtctgggctacctgtccaatgtggtgtctgatgtatgtggttttttggtgtgggcgccacctgagtggaaataacagaaaccttgggctgagtccactcctccacgtgctaagtatgtaaccatggcttcaagactaacctctctgagtcgaggttaccttctctgagaaacacagagaaatgataaggtggaattcctaagtgcctccggaggctggcgagtgatgagcacacacgctgtctgtgtagcctgctggct

SEQ ID NO: 19534 - DNA, 1987 bp, Mus musculus
ggcagactggctgcttttattttgaagttcccaagaggaatggagggatgctttaagggtgggaacattgatgttcgtatgtgtggttgtgactttgggaaggaatttgaggacctccaagatgtaatgttgggaaaatgaaaccataaactctaagtggctcttataggtgctgaagggcttattctcagctaaccctggaaggctctagggagggagtctttttcctgatccttggtatgacttaggattcatttgtgcattcacgatattaactctccatgaatggggtgggggaggggctggggtgatagggctggggtgggcagagtctgaacactccagcattctactaccttgcactgtgggggcagggagaaagtcaccatggccagagaaaggtagtggtcactgggtctcacatgtttagcttgcctgcctggtaggactggcttctggcagggacagggcctatcctaagtaccttcacccagtatcacaaagatgactttgtgggaggtacttagaatgggctaaggtggacaggctgtgtaagttttatcagctagcagactgagtgtgggctggaattgttctggtgttgggagggtcagctgggagtgtccatctttagggaagaagcagacacaggtgccttcagctgtccagtatggaggaacactcacctggacttgcagttggactttgaacatcaagatcaaattagtggatgctgtcgtctcttaaagctggttttatttgtctctggtccacaagagtgttttggcaactgcctggagcttgcatgttgggacaaatcaggacaagtgccagcagcctgaatatttccagtgcctacctgtggtctgtccagttctggcctgtaagcccttccctatcagagacagttgcagagtagaggatattgaggggttgaggggttgatctgagctggtgccactgcgagcacagcctacatggtgaatccagagtgtgcccggttccacatcacctcttcatggtctgctgtgcacaaactatatccgagagatcctgtctccccaaaagccactgctgggatgctggcctctgatttttgagccagcgttgtctcactctgatccctaccctgagcctgctgaactgccctcagagtgctcatatggggagggggatatctactgtggcttccaaaagtccccactagttggtgtacctgtctatttctctggatactgctagccaaagggctcgggcccccccctggactgacctgcccatgtaattttcccactgccacagacctctccaacccagggcccctggacagcacagatccagtgtgttgctggcacttgaggtgtaataaatggcctggggtgctgcctctttctcttgttgctctgggggtactggggaggaggagaggtgggtggcagtagaagtttgtggggagaaggtaacctttgcctacatatggctgtcctacagggtctcccttgcctgcagtgggagagttgcccagtggttccccatcccccattatattctaatgctaaatcacttggcaagagtgtattttaatgatgcctaatttctctatgttctgtttgaaggtttctgtccagataaaattgtcttttgaaattcaatactgtcttgtgtttacttttagcttcagggaaacctcttccccagctcagccagtgagggtgggaagacaccaggtactgtgttcctgtggatactagggtcccgacctttctggtaggaatgttccttttttgttaagcgggtgagggagctctggaatagccttgctgtttcagagcccagttttctgcacactgaaagacttgcctgggtgtgccgcctcttagcaatagagtcctggggaggatgctgtgttttgctggtttcccgtttagtgcgggctggctgcaaaccacctagctttctgctaaccttgggagacttctgagggtct

SEQ ID NO: 19535 - DNA, 2154 bp, Mus musculus
agacggagctcaagccagagcttggcgggtcagcaatggagttggtcgtcagggtgggtcctgagctcgacttataaccattaacccacagcaaaggcagcctaggaaatgggtagcaaccacctctcctggcaggctccttccagaaaggaccttaacttactggattcctgcccaaaccttttccaaatagcaaaggcgtgggtggttagggtggtatgttgggctgagaaaggtgacctgccccctgtttcagagctgcgcctggtttcgccggacagagttggtgtttggagcccagccgccctcgggcgcacggcctgcctgtcgcatgtttgtgtctgcctcgtcccctcccctggtgcctgtgtctgcagaaaaacaagaccagatgtgatttgtttttaaaaataagatgatgacaacgacaaccacacgcaaaccaacaaacaaaattttggcatcggatgaaatggaaaacaagcaaacaaacaaaaacctaaagaaaggaaaaagctgtaaaaatctggcatttgtggggccaccccacccccaagctccactgtgtctgttgtgctcctggctttggggaccctcagggcgtgaatgtgcccatgccgaccgtgttagtctgtaggtaccgcactcaccccataccttgggcgtctgcatcctccctcccatgcatgggccccacgtgctaacctggctgttgtggtgtcaggtgtcttgggaagggctgggggctgcctcctttcctgctagttgtgcctgagagttgctgctgctcctgctttcccctacctgtcccttgtcccgtcctgtgaagggctgggagggtgctcctctagccaaggacctacctttgccccatggagtgtgtagaagcttgtccccgaggtcatcagaaaagaacctgggctctcagccccggttctttggggagtgaggtatggaggtacggatcttgcctccagacctcctgcctggcaggggttggttaagaaggcctgctggctgcagtgcctacccatgtagctatgaagagaggactgggcagaggatggcctccttcctgtttggggtacttgtcccttccctgccaccagcagctgagcaacagtggcccacccctggcctgggaagttcctctctgaagttggcagcagaccctaatgaagatggagaacctgagatactggacggatactgggaacaggccaggctgcgtctagggtgtttgtccactcagcttggagcctgggtgttcgagacttggttaaatgttgcagaatgtggtaaagaggggccagaagttgggttctagacttctgggcaatgcaggtccatacaagtgtttgatgaaatgggagtgctttcttgacctgggcctagagaagagcatatgccacctagaggcatgtggaaggccaaaattggttagggctgtattgtgtggggctcttccaggtaggccagagacacagcttagagagaaggcaggctgggggcagagatatatggctgtggggcctggataccagtgggtgggtggagggcccatcaggacagtgtggcacctccaagggcccagtggtgctcctaggtgccggctgcctggactcgttgtgggtggccctggcccttggtgactgagggaatcattaaggctggacatgttacaaagtcaggctagggagatataggtctgaagccgggttgggtgggggtggtcagaggctttgactgcagaggttcatgggcctccaccccaacgctgaccactttaaattcatgtcattttcaaccaggattttctttatcttttactacaaatcaagccaagggaggggcacgaagtggggaacgggacacaggatcctaaactccaaggggactgtccacctacagacactcagtggataccacctttcatccacactgtgcccaggacagctgttccctacccatggacacagggtaaacatctgccacccatggacacagggtaaacatctgagtggcccaaggccatggaacagtggcagggcttgccatggacagtgtgaggccctgtggcctgccaccctggcatcctggggtctcctttcctctcccacccaccttgttatctccacaaagctgcctgtctgg

SEQ ID NO: 19536 - DNA, 1149 bp, Mus musculus
gaggcactggggtttatgaggggcttcctgggctcttccctccatagtttcagtcttgcctggacacagtccgagagtctgttttaaagggctccccggggactgtggggaatgatgggattgggagcctggcttctacacccctctccagagcacaagctgagatggagagggaaggttaatctgctttggaaatgtgggtgttcttgctgctgccctgctcccaagtgctgcagagcctcggctggccactggccagcctgagagcctcatggggaaagatacctccttcacgtctgaggctggatctcaccaccagttgatgggtcctagtctcttagtcgtagagctccaccgtcgtttttgtttttcaagacaatatctcactatgtcgtcttggctggccctgaacttgctgggtaggccaagctgtccttgaattcatagaggtctacctgcctctgtctcccggctgctcggattaaaagtgcccaccactgcacccagcacagagcttatcctcttgatagacaggtgcctggacctgccctggagagctgacttaggaagtctgggtaggcctggaacctgggtctcaacagtgactataggactgcagggccatgccactgggtgcctgcagctgagtaccaagagcctgacacctcaccagtgcacctcttcttggagatcatgggcgatgacatccaattcagctccatcagtacctctaagcccttgcttacccactcctaactaagcagcaaccaagagctagaactcattgtgcctgtgttttcatgaattgccttatttgggtggtggatgcccagatgtgttttatgttattttgtttagttcttcaataagatgtctcccagtagcctgatgtgattcccagtgggttctgagcagtgacttgactccggcttcctgtgtggcctcggggggaaaggggccattggaagtccttgcagcagcttcatttcagtcaggttaggactcaaaaccagaacattccagaaggcagacccgaaactatgaggctcctgtggaaccttctctgaagatccaggggctctctgaggaggagaggggggactactagagttacccctagcctgctcttactctgctcacctcaacccc

SEQ ID NO: 19537 - DNA, 1227 bp, Mus musculus
ccagggaagacctctctccgggagcccggctctcctagggtcatttgttgctcggttcccatacagggaactcaccttcttgcaaggctaaggctggggatttgagcctcgtcagctggtgggcatcaagagaggttcctggggatggcctgtaggaagggagttgctgggagttagggtctgggccctcctgcctcagccttctgtaaagtgggtgaaattggcttagggaagcctagcttttctagctctaacattcctcaaacctggcagagtcctatccaagccctaccaccttccacagaaggcatacacagggtccaaggggtccaaggcccacaccgtggacccatttgaggcctggttttcaacacaattctcagcagctcatctctccttgctttgactttggtcccatcccagtagggaaagggatgtcccatggctgcactggttataagaaactgactggagctgggcgtggtggcgcacgcctttaattccagcacctgggaggcagaggcaggcagatttctgagttcgaggccagcctggtctacagagtgagttccaggacagccagggctatacggagaaaccctgtctcaaggaaaaaagagagagagagagagagagagagagagagagagagagagagagagagagagagaaagaaagaaagaaagaaagaaagaaagaaagaaagaaagaaagaaggaaagaaagaaagaaagaaagaagaaactgactgatagacctggagaggtgatggagaggtgatggagaggtgattatgcagttaagatcaccatcactggctgctcttccagaggacctggatttgattctaactacgtggtagctgataattccatctgtaattctagttccaggggatctgataccctcttctggtgtctctgggtaccaggaacacacatgcatagacatcatttaggaaaactactcatacacatacaataaaataaaatctaaaaagaaatggacttgtaagggtttagggagagatttgtacagattggactggggcgacaagctggtggtacagtaacatgggagggtgggaaagcaggtcccaagccgcctctggaggagcagggcctgggaagagctgggggtggtccacatgggaaccagcttcagagaggacactccagacgacatcccctcactctgcaggagcccctgtccccagaggctaggcac

SEQ ID NO: 19538 - DNA, 1206 bp, Mus musculus
gacagcctgggagcttagcttgccctctagccatctgtgggtggtcctggacagcaagcacttctctgtgaggacttagcttctgtcacagctggaatgtcctcctcacctgctccagggccatcgaaccagtggatggaggttcactactggaagtcatggtcagggtgtcacacagcaaacaatgctcacaggtcagatcgtgctgtggaagatgtgcccaaggcatgtggaatactgatggggacagggagcagaaggatagacaagccactcttgtgtaacaggaagtctccacagggtgtagagccacacctgcataggcaatgtgcaggttaggaaggtcacagtgactccagtgtattcttaatgaccttggctattctgtcgcagatattgtaatcataatgataacagtacaaaagcaattcctgctagtgataggtggatagatgggttctgtctgcattgttgcttagaagttgaaaaacacataaaaagaaaaatcttgtggtaacatcaacactctgttccaagcagaggttagtgtgtccagaaaattgtttaggtcagcattaaaatagtcaaggactaggcatgctgatgtgagcctatagtcccagccactctggagttgcgaggatggcttgagtggttcagagtcagcctggaaaacaccaggacctcatcttagatgaggagaaatagatgaatgaacagacagacagatggctggacagtcagatagatggatccatatatgcatgcattcatgcttgaatggatagataggtagatagatgatagaaaaggcctcttcttcacttttaagagctccttataatcagagggagaaagggattttgttcaggttagcacataactagcactttaagaataaattaagtatgaagaccctcagtgtggccatgacatgcacctactggtctgtctttaactttgaccccatcagtagggcctgcttagaactgaccatgtcagaaggttggagaaatggttggtttcaaagcagctgtttggtaatttatagtaggaaataaccattgcctgctcagcttcttccaaaaagttctggtgggaggctctgcggaggaggagccctgtgggggtctgcttgggtggggctcccgagggatctagtggagtgggcttgttgggtgggtcttctgggggttgtctggggac

SEQ ID NO: 19539 - DNA, 2377 bp, Mus musculus
ttttctttcatgatgaaccaggccttccatgctgaccttctaccttcagactattctagagaaggtacagggccagctgctgcttggcagtgtctgtggccaacactgaatgcaggtgtttgacatgcaggagggacatgtcccagcctactggtagcacatgttctgtctccacagcaaccaggcactgcaggcagcatttcctttctccccgttctctctgcttgctgttgttttgacgctattctgcttgcttgtcttctgattggggataaggagtggctgggctcagacaaagctaagttgttgtgtggagccaggcacctgcatgagggccagcggggcatggctgtggggctgctatggggttccctcacttgttgttgatctgtgtctatctctgtgtgtgtgtgtgtgtgtgtgtgtgccatcttgctcatttctttgtgaatacacttgacttgcctcagttttatgggcagagcagcaggaactgggtctgtttgagatggtaggagaaagtctgaggttctggcctctcacccaggtgtggtaaggattctgtctgccctctgactgcagctgccttgctttgattcttgttgaaatgagctgagactagccaccactactttttcccctcaagacctcctctttgggggtgctgcattcaagcctgggtacctccaagaagagatcacagcctgttggtagttcattggcagatccgtgtcaactacactccctaaggagctttgaccctgaagcatgcctcaggaaggaaaacgtatgcactagcttgaaggcaactacaattgagtccaagaaaatgaagatttctctgtgccaatcactagactgctttttggagctcagagcctgtgtggcgacgccagctaagggtgtgaagacctgcccagaggaccaggaccctggtgtcccatccctttacgtactctctctgtgctggttggtgcctggcatctccatttgcctggttcttagttgtgtggtgtgtgtgtgtgtgtgttcacgtcacagcactaatttctatactctggtaaccaaccatacaaagtgcaagaattaagacccattgaagccaaggcagactgttctctggaaagagccctgcaccaccgagtgctatgtccacttgcttggaaggagccattggaagagcaaattttggaacttacacaattgtgtagaaaggagctggttcattgtaggcatttaagggatttctggtttacttcctaaaagtccatactgggagttaatctgtgggcctgagtagaccatgatggtggtcaagggacagcagtggaccccatatacccactccagagtctgaacatgtgattggacattggtcatcaagttgatgaaatctccctcaagaggtcaccgtccaggagcagaatctgtcgtagtcacaagatccccaggacactttgctgtttgttcctgaagttttcatcaaggtctaggctgcgcacatccctgtcccatggaagctgtctcacctaaagaaggaagtctcgtggtgtgtgtgcacctgcagtcttctccctctcggccctcatcctgtgggtagtcttgcagaaggaatgatgtcgtggcggaaccctgcatccttttatttaagacaatgcttttctctgtgttgactcatcttcattactgtagcatggttttattttctgtgttgcatttttttctttgtccctgccgtgtttcaacaaacaagcctgtatagaaaaagcagcctgggggatatagcactggttgtaggccgtggggcaggaagctgtgactgatccctggggcatgttgtagtacatggtgtagtggtggcttctgtatctacatgtctccatcacagtgaggctcaatcccagccagccaagtagatagttctttgccctgaggcactgccctggtttgccccgccactgaagctggcacattgcctgttttctctttttagacacgacagccacagtgtggtctctaagtcccaccagctgaggtctgaggaaagcagggtgactctgtcccctttgcccagagacccaaagagtggggtgtccagcctgcagagttgctctggctcctcggtgttggtttgcaataaatctgtgtttaagcagttctggttctgtctgtgacagtcactattaagacacttacatgagtggtcgttacccttgacttctagccgtgagtcctgcttccctctacacagtcaacaccaaaactaaatgcactgggttgtttctcacctggcctttcactgcttttagaaatcctataagatgttaattttttattgttaccataaagacccattcaaaatattgaaccaccctgc

SEQ ID NO: 19540 - DNA, 1429 bp, Mus musculus
agaccaggctggcctcgaactcagaaatctgcctgcctctgcctcttgagtgctgggattaaaggcgtgcaccaccacgccaggccatcattttttaactttatgtttctcttcatcatcttatttcttcttctaggttatgggttctattttctgctggtgaaacagaggcgtagataggtttaaaagcctaggtagtttaaaactccagatatgggatgagtgatggttaagagcactggctgtttctccacaagacccaggttcaattcccagcacatacatggctgctcacacctgtctgttccaggagatctaatgctctcttttggcctctgggggcatcaagcatgcacatggtgtacagaaatatatggtggcaaaacattcatgcatataaaattaaaaccaaaacaaccctttctgccatcttccttcgccgccaccatggtgtgaatgaatgttctggcggatgctctcaagagcatcaacaacgctgagaagagaggcaaacgccaggtcctcatcaggccatgttctaaagtcatcgttcggttcttaactgtgatgatgaagcacggatacattggtgaattcgagatcattgatggtcacagagctgggaagattgttgtgaacctcacaggaaggttgaacaagtgtggcgttataagccctagatttgatgttcaactcaaagacctagagaaatggcagaacaacctgctcccttcacgtcagtttggcctcattgtgctgacaacctcggctggcattatggaccatgaagaggcaagacgaaaacatacaggagggaaaatcctgggattctttttttaaatgtaaagcataaataaaaagcctttgtggactgtgaaaaaaaaaaaaaaaccaaaacaaccaaacaaaacctccccaaacaaacccccccgaaaccaagaacacgcaacccagatacccagatgtagtctataataaagatttcttttcttggctaagagatagctttggtggtggtaaaggttatatatgctggtgtttttgagcctctggtgtaggctggcatctttttagcagagtcttgtagtaactgactgttccctgttaatgcagtggaacatattcctgactgccttctttttgatctttcctgagttggccaagtctatgtcataatagataatgagtgtctttacattttaaatagttgtgatatttatggtttaatttgtgccttcttacttacaggaaaagttatattttatgcaatggtttattttctattagtatttcctatgtaataaagttgatggacacatcaacattgcccttctatggttttagaagtaaaactttacatatattcttttttcctcttatttatttatttatttatttatttatttatttatttagtgtatgtgagtac

SEQ ID NO: 19541 - DNA, 1183 bp, Mus musculus
tctgttattttgaaacgatctgcctcataatatttcatcttagtgttttcagcaagtgtttaaactttgtttccttctgatggtgtatgctttttttgaatctgactataaaaaccccgcaaacaccaacggctcagaattgacagtttcttctccctgtcccgaaggtagtgtgcaaggccctgggttaattccacagaagcgtttttaaagaaggaagagagagagggggagagggggagagggaggggaagagggggagagggggagagggggagagggagagagggagaggagagggagagggagagggaaagagagaagagaaagaaatcaggctgtttgttgggcttgccactgtgacttttactgattgttaactgtgagctggttcagcatgtcctctgtcctatttcttgtaagtcacagttggattaagggtaacatttttaaagttacaaggctatgtaatggaaataaattgttcttcctggagacaatttgttcatagtgttttttgtaaaatttattcgtgtgtgcatatactttgcctataatacccagtacatgtgtatacacagcacatctgtgactgttgactttgccacatcccctaaatgtgctctgatcgctcaggcttgataaacggctggtactgacttggtgctttctgttgccaggcaccctctccttagcacacatgtgcgtttttatagtccttaaaatgacctggggtaggactgttgctctcctagcttgcagtccagagaagtggcttgtgctcgcgttgctgctgagggtgtcatctgggccttttccccctggaatggctggccccaaggttctgcactactgttgaacttaccctcactggggatgcagaacggaaattgctgggccccttcactgtctaataggtctgggtgtggtttgtatatcttgtgaattttcagaagcttttcagtgactgacacgtagtagccagggtttttcttgactgctatagagtattacaccctatggattagagtcattggagtcattatctaatgggtccctggggtggggtgtatttaagctgtttacaggatgctggtgtcacagatgctgctgcagcgaatatgcttgtgtgtgtttcttggaacatgtgtacgcgtatcagttgggtgaattcccagaacag

SEQ ID NO: 19542 - DNA, 1101 bp, Mus musculus
ccccttctcctaccttggtcccaaaaagtaatgacaactaaagctgtctagttttgcatcctctaggtttgtacatacagttagatttgacttattttgagtttattcattttggaaacttcttgaggaagagcaattcctaccagcttttggtgaagttgtagagtgtttccattttgctttggtttactgttatttaattttatacttagaagattttgttatatttctgtggtggtgtggtctgatagggtgcagatgaatttatttatttatttatttatttatttatttatttatttatttatttttgagacagggtttctctgtgtagccctggctgtcctggaactcactctgtagaccaggctggcctcgaactcagaaatccatctgcctctgcctcctgagtgctgggattaaaggtgtgagccaacactgcccagctgcagatgttgtattgatgtttgtttcatttttaggtctttaaaacatttgatcacatggcccgccaggatgatgagaaaaggaagaaagaactagaagagaaaataagaaaaaaggaggaagaggccaaggccttgccagctgctgaaactgagaaggtagcggtgccggtcccagtgcaggaggtagagatcgatgctgctgcagacttgagtgggcctcaggaagtagagaaggaggagcccccaggctcccaggaccccgagcacacagtgacccatggcctggagaaggcggaagctccaggaacagttagcagtgctgctgaaggccctaaggaccctcctgtgctccccaggtaggagcatctcctgcagtgtcgtcctctctgctgtgcttaagtttgcctatgagtggtttttgttttgtgtggtttgtaaaaaaatatcagctctgttttggtgggcagtggttaactatagaaattcatttcttaatagttctggaggctggaaaccccagattaaagtatgatctgggttgtttgtttgaaggcttctatcagtggtttgcagacagccatcttcctgtgtctcgtcacattcctttgttcttgcctgtgtcttattctcctattctcaagcagcactcaaa

SEQ ID NO: 19543 - DNA, 1144 bp, Mus musculus
cgaactcagaaatccacctgcccctgcccctgccccccccccccccccccagtgctgggattaaaggcgtgcactgccacgcccggctagtattagaaaatgttaagaacaaaagtagtctagtcagtcaatgactaaacagacaatgactcctggagtcagtgtgaaaagcatggctaagtggaagtcttccttataggagtcaggagccacctgtttctcacttctcttgtaacttattggaaaatcttagaggagtcagttcccctcttgtcttctgagatggcatattgaaggcaatggacttctattccaacaaggacactgcctctagggtgagtctgtgaacataggcagctggagctctggagtgttgtgagaactgggtagtgtagatgggcaggtggaaggggagtcgcaggaaggctgagtgaggactgtcaggccttggtttggagcaccctgaggttacaggagagtctttactgcctgacttcttgtagttaagttgaagatttaaggtgttagagatagagtgcttttgagtacaaaggactcagacactggtagcatggatgctagagagagtcaaaccttcaagctaccagcagattagaagtggtttttgactgtgttttgttttgttgttgttgtcgtcgtccttgtcgtcgtcatcatcttcttcttctaaagatttatttatttattttatgtgtatgagtacactgtagctgtacagatggttgtgagccatcatgtggttgctgaaaattgaactcaggacctctgcttgctccagccccacttgatcctgccccgcttgctcctgtcctaagatttattatatgtaagcacactgtagctgtcttcagccacaccagaagagggtgtcagatctcattacggatggttgtgaaccaccatgtggttgctgggatttgaactctgctcttccgaaggtcttgagtgctctgagccatctctccagccctgtcttttttttttttttttgaaacagggtctgactgtacaccctggctgggctggaactcactatatatcaatcacaatttatatcaggctagcctctgcctcctgggtgctgaattaaagatgtgtgctaccatacctggcctttgtctcc

SEQ ID NO: 19544 - DNA, 1228 bp, Mus musculus
attattataacttgataaacttgtccatttttttatcctcataaaagagcagtgtatggactgctctttgagaggtctagagttcaattctcagcaaccacatggtggctcacagccatctgtaatggggatccgatgccctcttctggtgtgtttgaagacagctacagtgtactcacatacataaaataaattttaaaaaaagaaagaaaaagaaaagaacttagttctatcgtatgggttcattgagctatgttcctttctaagaaagatttgtatgaactataagtcttttacccttccccacagctcactggatctgcttaatgacttgcttgtgttattattccaggtcaggggtcaccacattgcaaaacttgatcctctcggaattagttgtgtaaattttgatgatgctccggtaactgtttcttcaaacgtgggtgagaattaatatgtaaatgctaattttaatgtaattttactttttttttgccccttccctcttttttttctcctgtccttttgtgtgtgtccttccctctcatcgttggcccactcatagatacgagggcaccatgtagcacagctggaccccctggggattttggatgctgatctggactcctccgtgcccgctgacattatctcatccacagacaaacttggtgagggtctgcgagcagtcagctgcgctgcttgagcgcctctcgctgtgcacagcctgtgctagccaggacatccagacagcagggaaagactctgaagtttccttcgttctgatcacttgaaattcagcagtcagatagtcttagtgtgctttaaggatattatttatctcaagtttcagccagattgttttaagactcaatctggaaaaaaattttcaaaggaagggtctttggcaccaagaaaacctggctaactgctttagatagtagctcttctgactccagcttttcatatcctgcacaacaccgcctatggtaaggccacgagccctgcaaggctgctgttgtcatgactgtcccattctggagtatggtggggcctggtgggctagagagtgtttattttcctaaagagcaagttccagatcaagctgtgctatttaggttccctgatttataaatgctgtgatcatactgaggaaactttgggaggccttccctacagcgtcaggacaccagggcctttgggaggtgcatgtgtggagaattggggtttt

SEQ ID NO: 19545 - DNA, 1700 bp, Mus musculus
gaagtatcccaatgctgagctggcctggtgccaggaagagcacaagaaccaaggctactatgactatgtcaagccaagacttcgtaccaccattgaccgtgctaagcctgtctggtaagacccaagtccttgatggcctggaagatctggaagcaagctagagaacaggcaggagccacctctgacttcatccttgtcactccccctctctgtttctctcaggtatgctggccgagacccggcagctgctccagccactggcaacaagaaaacacacctgacagagctgcagcgctttctggacacagcctttgacctggacgcattcaagaaattctcttagatgctcctggagttgatgaggccatggcccccatgtccatgacgctctttgcttctcaactaaagaatagtgcctcagcactgtccacacgtcccttcgctgtgccacaccacccctgttctcataggaattaagttgtccactgcagtgctcagctgctccccggtcacatgctgcccagcctgtgccgacttctctcaggctgcacaccgttcatggagaccggaaggagcagaataaggaaagggcccctctcaggacatcctagagaaggaaggcagctctggccccacccatgcccccagtgcaatcctccagggtaggaacagaaccctatgtggcttcccagggtactagcactcagccctcgtcacccatcaagtcgcagattcaaggccaggagtagtttcatcttgctagggccaagctgagagctcatggaggaactatagctgccaggatttgggagtcatcaggatgttgtgtgaatagagattgtcatggggtatttagaggactttagcagtgatgttagtctagccctgctacccttcttgggtttgggctgtatgtgggaaacttaccccagctaccacgcctggagagcttggctctgagtacggcccagaagctccattggctcccaacgccaggcactgctgcctcttggtcctgctgcctctgctctcctgacccctccccagtcacttcattttctctgttgttcccttgaacacacagaagctgttgacgaattcttttttttgctgtgccaaggcaggtcaaaagcagatcagtggataagagcaagttgtcccaaggagccagctgtccttcctccctcttttgacctccactgggacacacctgatttatttattttggttaaaaaaaaaaaaggaaatgaaaaaagaacaaccacctttgcattgcatcggcttgacccataaactaagttatcatggccagcctgcctgctgtcgtgtgttccgcctcctccctgcctgcctgagaacagtcttcttgttggggtgggggggtcccagctgccatttgccaactggatgtgtgccccacagctttctgttccccctcatgggcagcagccattatcaacagcgcagcctgggccttcagcatctcatttcccctgccacccattatcttggttttaggcatgtctaataactacagtcggcaccaggagagaatgtcctgggacaggaacaatgccccttactctcagaggtgggactcacaggaccaaagtttgtatctgcctgtggtcggcatgttgctgtctggtatccccttctcccttgggacagccaggctgttttgcatacaaagctggact

SEQ ID NO: 19546 - DNA, 1100 bp, Mus musculus
tgatgccctcttctggtgcatctgaagacagctacagtgtactttacatataataaataaataaataaatctttaaaaaaaaaaaaatagaaagcaacgtgctactacaccagcttagttaagtccacagggacagctatctccacaggcctggcttattagacaagcttctaataccaggcactgacacccccatgaaggagtcttgaatcctttaacaactaccacaacacacacacacgtcaagacactattacacacaaaggcatatcatggtgttcctattggtctctttgtcctcctcttatcctggctaaccctccatctcacctgcctacatttccctcctatggcatccttcctttttgcctgtgtctaccatctcatctcctttcagaaatgcccttcccgggctggtgagatggctcagtgggtaagagcacccgactgctcttccgaaggtcaggagttcaaatcccagcaaccacatggtggctcacaaccatctgtaacgagatctgactccctcttctggagtgtctgaagacagctacagtgtacttacatataataaatgaataaaatctttaaaaaaaaaaaaaaaaaaaaagaaatgcccttcccttgtgcccagcttgcataggtactccacattagacactccatcctaagagttatataagagagagcatgcagtttgtccttttgggcctcggttacctcagagcaaaagagaaaaagaaagggaaatgggggaaggatttgtgtgaggggattctgggggaggggaaggaccgatattgggatgtaaagggaatgaattaatttataaaaaagaaattggtctggcaagatggcttagcactgactgctcttccaaagttcaaatcccagcaaccacatggtgactcacagccatctataatgagatccaatgcctccttctggtgtgtctgaagactgctacagtgtacttatgtataataataaataaatctttgggccggagcaagtggggctgactggatcaaccaggatgactggagtggtcagaggtcctaaaaattcaattctcaacaaccacatgaaggctcacagct

SEQ ID NO: 19547 - DNA, 1093 bp, Mus musculus
aagggaaccagttaaatacgctctgttacattaaaaagatttaatgctcctgttgattatgtcagagaaaccaagctcatggaagatgtcccatctgtactgtctgggcctcaccaggctccagtgggcagggtcccaagtagaccttgagctgcaggccagcaggagccatgctgattgaggtggcacagagatagagtggctcagaagccatagcatgccaggagtgtcttgacagaaaactagacagtggtcgagcaataccagagtgctctgctgagggctgaggcagtgtggtaacaaaatagaaaagcccctgcctatgtgtcagcactcaggagagcctcgctgccaggatggtggctggcttggctttcttccatactaagctcttccttccctctgtgcctgcactccttgaattcattcttagacatgtccccgagctgggtccaccttccctagctgctcctcccaccctccatgtaacatccctcactctgttgcagtcccacctcttcgtgctgcagctggtgcaccgtccgtctgtccgttccgtgctgcagggcctcctcaagaagcgcctattgccagctgaacactgcatcaccaagagtgagtgctctctactcctcaaccgcctgcctgtgctgtgctcggactgacccctgctctgtggcccagaggccatttcctctcagactgctagttctaaccctggggcaacggttagctccaggctactcctgagagcctttgcttgagcagtgacagggtccctggttagcccacggtgttggggtcctttactcaagtcctttcccctgtcaatgtcagtaaagcggaacttcagtagcggcaccatccctggcacccctgggcccaatggagaggatggggtggagcagacggctatcaaggtgtccctgaagtgccccatcaccttccgcaggatccagctcccagcccgtggtcacgactgtcgacatatacaggtgtgtggtccctgtagacatttgttgcccttaagatattttgagcttgtggagaaaccagtattgactggaatctaggtggaaactgagaaaactgc

SEQ ID NO: 19548 - DNA, 1787 bp, Mus musculus
cactgggcctgaggccagaacagcttggccactggaagtgaagggtctgcgctgcgcccacagctgctaatgtgtttgctttgccctcagctgctcccagaactgaccaatcctgatgaactgctctcctacctgggcccacctgacctccccacaaacagcagtgatgatctgctctcactcttcgagaacaactgatcctgtggtgacccctggcctggcgaagacacactcaaagatgccaccacagccttcccttctcacccagccccacaggctgcctgctggttctccctgaactcccaatgcacacaccctgagctggggcctgccactgccagccctgatgaactggaagcagccctgcgctccatggggccccaggccagtgggcctcacagcctccctccatcaagctcactgctccagaatggttcttgtgaggtgcctgcaggccccgtcagccccacgtgcacagccctctgccccagactcatggccttgcacttgtccttccaccctgcctgctcctacccagcctgcatcttgtccagcactgatccttctgtttctgttcctcctcagcagagctggctgctgaggctggctctgtacccttggtctgcagctccagtgcctgagcctggcagcctcagaaccatacagagcaccagccttagggggcctggcgctcccacccagctgaatctggtttaggggttcctccctccaccctgagctccaggtggaggctggggtgggagcaataaagcacaacaatgtacatagtgtagaaatgccaacagctgggaaagggagggaccgctatttcagtcagcatgttcctctggactggcctgcgccttccatgtggtgtctgccccttactgagcacagacagctcaggggaggttcaactcctctaggggtgggctttcaggctcagctctatgtaaattctccagtgagctgctcccccaagtttctcttttctgtgaaagtgaagaattagtacagctgtgttttttaaaccacctcatttccaccctgcggcccacacccaggtgggggaggccattgcatctgctggcaaagcgcctgggcctgcaagcagggtgctggcctgttgtgtctcctgtctgtgcaatctattaaaggactccctcttggtgggcttggctgagtccttcctttgtgctgagggtctgtggcctttctgttcttagaaccccaaataataaaaaatctagatgttttcatccaagctcaggatatccctgagctgtagtaaatttcctttcccctggaattttccaagttggcttcagctgcagagctattttgtaaagcgtctcaggcttgccctggagacatttgccaccatgtcaccttccctgggtgtgccctagggcagggagccagctatctgacaagtgactgcagcatgaccaggggcctcaacagcagtagggattgagcctgtgttcactgccccttcttggcctgcgccctgcctagacagcatttcctgtgcaacaggaaaggtgagaaccagggaggggtgaggggaatcctcagctggctgccagagccttccctgcagtactggaggaggctgccgggcaagagcaaggaaccgcctgcagaggctcagtagctgtctgacatttgagaacacaccggtgggctccctagggaggccgtttccagcttttctgtcctcttggctgagagtgggggagcggatagaagtggagaagacagcagtgggccagggccaagggaat

SEQ ID NO: 19549 - DNA, 1256 bp, Mus musculus
cgaattgagtgccactctgggttcctctctgctccttgtcatagtgatctgagtaaatacttgttctcccacctgtcctgtgtagtgctatttttattttagcttgttctttaaatgatgcgatacttcaaaccttaggtttaaaatatttccccatctgttttgaactatgctagagaactgccatgaccctgagcagttgtctaatgtggtagacgtggcaggactgagctagttgtgtgttaggaatctgtcaaggtgtgaggtgagttggcagttctcagctgttttgaacataccttacagatgtcatggctgtagttagccttgtttactgttcctgtagaagggttcacaggctcctgtaggttcagtaggatccaaatgagaagggtcttaaataagttcatccttggtataatcgttttttactttagctttaaagctttaagatttaaaggacattattaaaaataacaactcatactcattgtgttgtaggcgtgatcccgcacatccacaagtctctgattggaaagaaggggcagcagaaaactgcttaggacgtgagtcgctggcctgctctcctcggtctgtaacagggcagaggggactagtgcggtgtgcggaagagcatagacggttgctgtagacgagacaaaggccacatctgtatgtttttagactcggagtttgatgagtccctttccctgtggtcacagtcatgtgttgattggccaggtttctcccttgtgttttatacaaaagtagaattgataaaacattttttacaaaagtactgtgtctcagtatttcttcatgatgtattagaaatacttttttcaaacctggccagggccatgttgcctgcatccccagcgtttgggaggtgtgggcaggaccttcagaatacacgctgatctctgcctacattccaagttctaccacaacctggactacatattctcttcagacattgacgttttaagatattcagaataatcttaaagcaaaaattggaatgtagtataccttgattgttacagtgttagtttgaatctcagatataatcaatttttagaaatatatatttattaacgtatacagtgttctgcctgcctatatgcctgcaagccataagaaagcaccagatcccattacagaccattgggagccaccatgtgggtgctgggaactgaactcaggacctctgcaagagctgccagtgatcttaacctctccagcccttatcaagg

SEQ ID NO: 19550 - DNA, 2425 bp, Mus musculus
taaatttgtatgtgaacaaatgggagccagtcatcaattttgaaacttaaatttggaaaatggaaaaaaaaataaaattgcaccataaagatttatttccgcagtgattcccatttgctgtgtgtactcctgacccaaattaaggcctttatgaatgtattttatatttcctaatgaaataggaaatagccaccaatgtaatcacataactactttttcatttgaaaagcaaatgcctcttaaattagacattccaattggaataggtagagccattttaaaacaatagtaaatgccatatttgtagtttcagtaggacttctaataaagagaacagatctttgttagaagttaaagcctttttgtgattttaacactttgaagaaggattttaactataaacataaggttctgtgaacagattttatgcccactacattactgtcccctggcatggataagagggatcatttttgtcctctagtaaatgggtctcaagttctagagagaaaacagtagtaggccttgctcagtgtccaccatgaagtgcagaaggcacaggtgtgacctttccccaccttcaggaactcttcactggctaacgttttcaacacaatttttatttcttaaaggcaaaatattttgtgtcctgtgttgcaagatcacaatggttagtaaaatcttagtatttggaaatagaataagcttgtttcttcccttttaaaatgtctgtctcagaaatataagtccaggaaagtccaagaaaatgagcaggggcatactctgagcatggtgtatgtgggaatttggaggttttgtaaaacccttttctccaagcccatgtcactatccattgaaccaaagtcctcaggagtctggaaagtcgggaggttgggccaaaagtctagaaacttggctgtaggtcagcgtgacacacttttttacagagtctgtggttttgcatatttttttggcaggcaagtatattttagttatttttctgtgaccttgatatttgaaattaagattgtcagtgtatttggactttttttttcccctgaagttagaacagttgtattaggcatttactcttgtgaatctttatgcagatgtcttaccagtcttgtgaataaagtgcagatgacatactttgtattgtaggaatctcactgcccatcctgtctgccagtggctctgttaggctaggttcttcactccaaagctgggacttaatgtccttctagttgggaatcttcagaagtaatttgaatgagttcaaaccaaatcttgatagcaggagacagcttcctggtctagatgtacaattagcttaggttggaattaaagagggtttgggaatgtctttagtctctgtgtaaataccaacgtgcttattatgcatcgtaaaccagtgtgtatgcctgtgtatgggtctgtagagctggtttctgcttcaagtgaagctgcacctttgattttataaggtcccctccacccggaaccctataaacgtttgtaaatagaacactaaaatttgtagcgataggatcaatttgggaaatatctgctgagagaccaaaaagttcatttttttaagtaccttggttaaagagtaaagattattcctcttattttttaaaagaagtatgcactttaacaaacacagctgcatgggcaattcaaacaaatccatgaagtgcagtacccatccagaaaccacacttcctgaaaaccgttcaaagcagagtccagacgggctggtgatctcactgcctgtaggttgaagctcagattctgataaattgtgagacaagcagggctgcttcaaagagcaatgtgaatacagccagaagcttcagacaggtctgtaaaatggcgggtcccgtatttaccactaactagcaaaactgacagaaaaactcatagaaataaagttaagaatccttcctgctggtgtgcactccttccaatagcagacttttgcaaatggagttttacagtctatatttaaaaaattgtatgtttgtaacaaataaagtatgcggaaaagtgaatgacagtcttgtgcccttgcctcttatttaagggattgcatggtgattagggaaggaactattatcatcctttgtagttcacaaatggctgtgggtttgaagaagtccccacttgaagtgacctgaaatctagccatgttcagatcatccgggtttctgttgaataagtcagagcagattagaagggctcacaaaaacttgctgcctcagacgttccctcgtttacattgaactgactaagcagcaaattaggccagtcttctcttgcccaaatgctagagggaaaacaagaagatggtgctcagtggtcttggccagagagtctcagtctctttgtttcaggaactgctgtatccatatccaagggaatc

SEQ ID NO: 19551 - DNA, 1099 bp, Mus musculus
ttttgtttttctcttttctttttatttggctgaattgcagtaactagccttgcctttctattctgtagaaatgacagggtcttcacaatccttcaccagtggctactaagctataattagctgaatagaaagaatgtggaagtggtctgaggcatatagagtatatgccaagaacactaccatatatggcatcagctttggttaccagagaaattttcttagtcattagaccatataacagtaatatatcatatgtaaatctttagatttcaatttgagaatcctccaaaaaaaggagcaaagaatgcataagctatgtgttggcaaaagtaatttatattaaaattttgacctgcctttgtaagattaagtggtaaatgtcatagtggtgggtttttatgtcttaaccaatctctgaggtttatttctcctgcaggggatggttcatggcctctcttcccactgtaggaagatagcagaaggatgggggttaattgtagcatttcactgaccctcatccagggactagggacaatagaaatctgcaaacatggagagtcagtcataaatactagctttttgaaggcattgttggtctttgttgatttctgtcagaaaatggcattgtacaaattatgggaagcaaccaacttttctgttctgtttttgaagtgctactatgaacgattcagagtggtattttttttttcttttaaatttggcagatagcccagctaatgaaaaatagtcacattcctgagaagttggagctaaaactccaaattattgttgaaatacttgtttctactgtatgtagaaatgtatttttaagaaaatcaaagaggaaaaaaaaatctatgcagagaccctactactttgtggtttctattgtccctacacatcatttcagcatgtctataatggcagttcttgtcagcaagtccttcagtgcatatgctgcacaaaacaaaacataaatctgcacggcaccaaaaaccaaacaaaagcaaaccaaaaacccagacaccctatgtatctgttggaggcatgtaggtggtacaaatgactgtagccatgagcacacatggcttcttgtcat

SEQ ID NO: 19552 - DNA, 1099 bp, Mus musculus
gaatccattactaaaatagtttaaaagttggcaattttttttttcaaaaacaaaagcatttttacaatggggattgctgaggtgggcacaagaagtcaggcataaagcacaaagtggactgtttgagtggattggttgctgctcattaaagttcttcccttgatctcttaagtatggaggtctttaccaagaaatggcttagcatgagtgggagctgaatcccagtggctccaccgtatgaaccagagaattatggctaattcggctgttacagccactggctggctgcattttaaaccttaaaacttgactatctgcaaaaaaggaacagtgtggctacaagcctgagctttaatgaaatagacatcctcacagagaagttggaaataacagaactgaagtcttaatttaccttcagtttaatctgtggatttattgaaatactgacgatcctcaggtccagaattccagcatcatttattcttttaaaataaatttttaagaacttgatccatcttattcagtacctcacaatcaaagttggcaaatgatggatgaatgattcaagcgttgcacccggtagaagctgaatccatttgtgaatggactgaagtgaacgcgaatgctgactctatcctggaagcatttttataccatcttgaaatttcaacaaactggcacttgccggtttatccagctgtctttcaagaataaaagttggggttttcaaggatcgcctcttctatattttaaatggattttcagtataaatgatttttctaatcaagttaatcccaccccatcaaaaggtattcctagaaatgtcatagacctaggcaactttgaattgaatgggagctaatgttctttccaaagtttttcaggtatctgtgtgacaccttctcaagaaccaggaggcaagtaaccccacctccactatcttagtattttttttaactgcatgcctgccctttatttgagctgcctttttaatttattgcatatcctttttattatcttattttggtattattcaatctatacaatctttttgtatttattcggaaataagtaatatacaaaaaggtcattttttgtg

SEQ ID NO: 19553 - DNA, 1165 bp, Mus musculus
gacggaaatcctgcatttcatagacaaggcaaaggtaaaagcctgtcccatcccccgctcccccaatatgcttttctacttagcctgcatcagcccctggtcccctcacctgtgacctcagcctgagagggacggctcagctctgtcactttgtgggtgttcttggctatacaaagtcttcagacaaagatggtttcttagttgggacctttaatctctagacttggttttgggctcctccccaaactcagttttaagatattctaaatttccagatactgatcaaaaaaaggtagttccagaagaatccctcacatgattcaaacatgttgacattctcggggcgagtgctacttttttcgcctctccttggcttttaaccgaggactgtagccagcacagtgctcccagaggagagctggacacagtggtccagcgtttctgatgcttgtgattctttgcagcggtcccaccagcttcctgggcacctgactcaggagcacgatgctgtgctcagtctgtctgcctacaatgtcaagttggcctggagggacggggaggacattatcctcagggtgcccatccatgatatcgctgctgtctcctatgtccgagatgatgctgcacacctggtggtcctgaagacaggtatggattggctggctggtctggaggtccacgtccaaaggagaatccctggtttcctgccattgtgatggtttctgcagctccaggctacgcactgccacctgctacggctataaattagatttcctgccatgagctctgtcccagggtccctgtcacactcagggcctttggagacttgaggaatacagtattcagggtcagtgtttaaataaggtttttcttgggccaggtgtgctcagaggcaggtggatctctgtgagtttgaggcctggtctctaaagtgagttccaggacagccagagctacatagtgagaccctgtctcaaaaaccaccttcctcctggtgacttctcagtccctgctccccataattgatgttgcctccactgcttagatataggtgatccccagaaagaagggtggtgaccgaaagctgtaacagggacttcctctgagcccaaccaacatttgttttgttgttttgttgttgttttgtttgtttgtttttaatgag

SEQ ID NO: 19554 - DNA, 1178 bp, Mus musculus
gccagagttgtcatccaacatcagagagattaactgtgtctgtaggacgtggtcagagtagggggtgctcagcatctccaaggaacgggtggtcctaataaatcctttggtttggtggaagccagctatcttcccaggctctgtatctatctcctctctctcgtattttgcacacacatacatatcctcttccctagctctccaggattctaccgagtgggctctctttccccagctcccccataatgcctgtgtgctgtggcacagcagagcagggctgacttgagagacagaaaactgagacttaaatgggtagggtcctggacacttgagcttcctgggaaatgtacttggagtgtatagcagagttgtgattactatcttgagaggtgcccacaccaccccccacccccacacccccgcacccccgtgccactagagaacatctgaagggaacaggtgctgtgaagacatttggaaggccctagttctgggacaagagtaaagtccacttggctgatgctacaagatccatggccagactcattctcatgactactacagccaacccagggaccgcccttcaggtggagccctgggtcccctgcagctctgagtagcagcaggatgtctaccttctaccctctgcaggagtctcccatagataaggctcgcccaaaggggagacttgcaacaaagggggttattaccctacttggtacattcctcaaagcaccagtcctctgtgtgacttagcacttctattgtcctgacagactcttggttaccacagaggtgagggagaagcagaaaagcggctggaactggcttacaggaaggagcagctggccacaacttgtcttaagttgaggtgggttggtagtgctgacaacccagttggggaagtcttgtgtatgaggaaataaaagtttgtgctgctcaccacatgggccactggcttttcttttgagctaatggagatctccagctaatactcggtggcgtggtcagtggtggaactactgcagagccaccctagctctggcaatcggaagtcagctggaagatatgcctgtcaccacagggttcatagaacacctggcccgtattcaccaccgatagatagcgtcagtgttccattgctactgtcttctctaggaatgggtcatggggacatg

SEQ ID NO: 19555 - DNA, 1049 bp, Mus musculus
ttgtggtcgctggctgagcctgctcttcactgtgctccttgcgcaggtgcatgagaagctggaccccgtgctggggagcctggagccggccctgcaggtggacctggtgtgggcgctgtgcgtgctgcagcacgtgcacgagacagagctgcacacggttctccatcctggactccacgctcggtttctaggtgaggcttgtccctgcactctactgtaacatggaggctctgctctgcccgccagggaagaaacgggagcagagacagaagaaggccagagcacaacctccggccttttcccaccactccctgcagttggcctccgatcttaacttgggaacaccagcccatggctgggtggaagctactgctgtatctcctgtggtccccattctgcatctgctgctgtacatcagcctacctttttctctccctcccagagagcaagtctccaaaggaccagagtaccttccagaaattggtccacatcaacaccaccgccctgctggagcaccctgaatataaaggccctttcctgccagcctcagctgtagcccccatcccctcaccctctaataaaaagatgacacccctacagaaggagctgcaggagacactgaaggcactgctggggaacactgacaagggcagcctggaggtggccacacagtatggctgggtgctgggtaagggttccccttctgttgggaaaaagtctaagtcgtcttcctttttttcatgtatgtgagtacattgtcactgtcttcagacactccagaagagggcattggatcccattacagatggttgtgagccaccatgtggttgctgggaattgaactcaggacctctggaagagcaatcagtgctcttaaccactgaaccatctctccagcccccagggtctaagtcttacaggggcctttgtaaccctgcatggtatatcaagcaacaacccggattactgtggggtctctgaggcatcacctacagcatctcaccctgtcccctccctgcagatgcagaggtgctcctggatgccgacgg

SEQ ID NO: 19556 - DNA, 1183 bp, Mus musculus
gaagcttttagattgagtgtgctcagccagcaaagtctatgccagtgtttctaaatctgacaaaaaaagaaaagagctctgaagtgcttctggctgctagcatttcagatatgagagactcagcatgcattcttcacattctaaaataaaggaggcagatgtgctctggggtgggaggttccgagctgcaggaatgtctggatgcttatggcttgggcttccttctagattgcttgtcttccagaaagctgtaccatgattagagtgggggagactgtataagttaagtggatggggactcatttcaaacaagtgtccctggaccttgaagatccaggcagtgttggctaaatggagagggtgggaaagatacagagtcccagtaggaggagagggtattgggggccgtgagtggagatacccatttgagcctggccctggccactggaggacatacacaaacatactcaccaacagcatctctgtcaatgaccttgtgctgtgttttgtcccaaaggaaaaccactgtcgccgaatcaagatccttggtgactgctactactgtgtgtctggcctcacccagcctaagacggatcacgcccactgctgtgtggagatgggacttgacatgatcgataccatcacgtgagtgttgcactcatacaaggtctgtctagggctgcagaggctgaggcagctgtaggaggggactgggctacctacactggaagatgatgcgttggtgacccctgctcacagtttatgatgtatttctttgtccagagaaatcctttgtgtatctagtgtgcctgagataggggagaagaagggatctttgtaactgagcttggtggggcactgggaaaggctgagggcatgagcccgtttaaaagccagtgaatgttcttctgggcagatgattgcctcccatgctttggggagagagggctgaagtctgggttgaatgtgttctcctgttaagacctagcctatggaacccggtgcgcagaggaacatccatacagttggagctttggaacaggcataaggaaggagccagcaacatggttgcccaacgttggctctgcaggagatagctctctggagctgctcctgttaaaggccccccagaagctgatggactccgctctgttactgagagtgaaaaagttccctggtgccc

SEQ ID NO: 19557 - DNA, 1179 bp, Mus musculus
gctgctcctctgggtgtggccccagagatactgtgttgggtctgccttgtgtagataataggcgacctgtaagagaggagaatttgaagagtctggagtcagaaaactggggatgactgggctactttgggtccttcgtcctttctgggctcagagctgctgtgggagaaacggctttgggctcagtgtcagatgatggataccgaggaagaacaagctagtcctgagcccgggggctttcccttctatattggctcatttggtcttgagaaagccatggggtgagcagactgctctccgtgacagtctgttaggcagaggcttgccctaccacctagtcctctggcctgtgggtcctcttgggtgtagaacaaagcatgctgggacaagggagctttgaggtgccatttcctctgagccccagcgcttttcctctggcttgaagtcttccttgctgggtacctggtagatccctgggtactgacggtattttcccctatgcttgtgtttggtagatattcccaggcttgattctctcggatatcaaaccagccaagaggatgaagttcaagactgtgtgctatctgctggtgcagctcatgcactgccggaaaatgttcaaggctgagatccccttctccaacgtgatgacctgcgaggatgacgacaaggtagagaaggctgaggtgccgctcggctggagcactcgctgctgctgccactgctgctgcacacggctttatattgcgttgtattttgtgtttatctaggtctaagctcacattccccgctttcttcttttatttttcctggaaagcctattatgtggctattggagttcttgagctgacacaagatccacccccgcccccccacctctttccttctgttttctgcaaagggtttctcaactctaccatctaacatttctatacaacatttcaaaattcttaaacattccaggcagtctttgtttttttatgaataattcccttatggagttgtattcccatgtcagaaaccacaggcttgcctggaaactcactatgtagctgaggatggacctagaacttctgactctcctcctctacctcccaggtgtggggattacaaatgtgcaccatcacatctggttttatttcacgcaggggattgaacccagggattcataaatatgcc

SEQ ID NO: 19558 - DNA, 1197 bp, Mus musculus
aacacaaggctatgaggatggaaagtgagagtgggctttcagaacactgggccttaaagaaaaccatgggtgacaaggggtcctgcgggggggggggggggcatcttttgtcatatctatctcaggccaggagcccaggactggatatgtcagtgggtgcaggccatgagaaaactggcaaaggccatgaggaaagtcactgtctcttggccaaatgatcaagaatgggaaaccagaaaagcacaaataaccacacaactgcagccaaagaccacgtgaaagtctattcaccaagaatccgcaacttcccaattacatcaaatttagcctacttcctgaacctgcataacaaaatggtaccccactgcattgcgttaggactaaggacactaagtaccagaggcaaaaaatcaccttgatccatactcagaagtatttcctaaaatacaatatctagttcttgctcaaagaaaatcatgatgtaaacattaacgtacagggatcacttcctagtctagtattcatagctcaaagcatcgaaatcaatggtaaaatcctatatagcttaagagtttgaaagccgggcgtggtggcgcacgcctttaatcccagcacctgggaggcagaggcaggcggatttctgagttcgaggccagcctggtctacaaagtgagttccaggacagccagagctatacagagaaaccctgtctggaaaaaccaaaaaaaaaaaaaaagtttgaaagagaaagaatgaccttgcttaagactattgtctagcttaactattaagtgggaaagaaacaccatagcaccgtttaaagtacatgttatcaatgaccaagaaaatccaagataatttaaaaagtcaccacaatcggtttcagttagtgagacaagccattatcttcagtaaataaactcatagacgataatcatctgtagccatttttaatcaaaaaagctcgggagacagcccagagaaagttcaatcagactggtaacaaggaagaaaacacacagtatccagcacttggcaatactccaagcttgtgaaatctgacactgcagaggcagaagtcagggtttacacacaccatggacagagcaagatgcctgggagagcccaagctggcagcagcagcagcactccaagataaagcagaggctttcccagcccagcagtctcaccacaacc

SEQ ID NO: 19559 - DNA, 1086 bp, Mus musculus
ataggtggcgggaccttgggagtatcttccatggtcacagcaaaagctatggaggtcaagctggcagaggagcccaccatgactgagccccaagtcaactggcttatgggtggctccagccctggtaagccctggcttatgggtggctctagccctggtaggtcctggcttatgggtggctccagccctggtaagccctggcttatggatggctctagccctggtaggtcctggcttatgggtaactccaagcctgggtagcagtttcaagtatgagtgccagactgggaagttggccccgctgggcagggccatgacagttgagctgttcataccatgggcacagcaaagagctggtcaggtcttggtcagggcagtatgggaagaattgaaaagacacctcttactgcatgaagagcggggttgctggctttccccaagagtaggctcttgctaacagccagaggcaggtcttctggaattctcgggaggccctacagccccacttctgatctcctggcccgtacattctcttccaacccctcctggctgctggcttctgactgctgcgacagtgggccctcctcttcctgtgccatggctgcacattcagagaggaggggtgtgtgctgtcttctctgtggtgtcttggacgctgtaagtctaacaagaatcaagccttcgtttatgctaagagcgattgacccactatacccacgagtgctctccttgctggaagacatcctctccttggcctaaccagctctcctcttggtggtttcagagtcggcacagtgtgcattcctgagtctaggtgtggtgtccctgctccagggtgatgggaaagagtggccctgttgactgacacctgggacctcccacctgtgtgtcccagtaactgcaactgtgaggaaatcccgttagggtacaggattctggaggagttggtaggaagcaactggctggaaatagcgggatgaagcctggcttttgaagatactcagtttcaatacaggaagggaggcagcttgaagcagggcaggtgggcataagccctgcctgatcttgtctgtggaggcccatttc

SEQ ID NO: 19560 - DNA, 1829 bp, Mus musculus
tagggcagagcaaagcctagttttccccggcagggtgcatatgtggtgttctggattcagctctggttcaagtgtgtggctttgttggtgcctgggtaattttccaggtcagccagcgcccgttcctgggacactcagctgagtctagactcaggttacctgtgggtaggaagaaaactttcagcaagggagagctggaggctgcatgccaagtctccaagtctttgaggctgcacctcaggtgccctagggccgggtggggcagctgtgaagattgcacattctctgtggccagggatggagcttgtgggtggtggtaagggtatcatctagcaccttctgcagaggaactctgacccatgcccaccctgctttgttgcctttctgatgatatcaggtagcacggcctgggcattgtcggctgcctttctgtcagcccactgtggctagaacccagagccagggccagactgacttcagcactccactgcagccttcagggttggagagcaggtagcttcatcgtcctccggtggtcatgtctggttcctgaggcgtggtattttgttgtaacagtgttgggggagaatgctggctcccagagagttgagggcagcaggacaggcttttggtttctcccatggccctgaagaccatcttaagattgcacttataagaaagattcaggttgttggggcgctctgagaaggggcagattcctctgagccagaacctaggtaggcatgcgagcactctttctttgtggctcctgcctcctgcccgtccccaggtgttcctatccttgggacaaatggcttttcctcatggggctcttttgcactaggaatttctcacctcgtctgtctgtcttgcagtcagctcagccaggagcacccagagcaagtgagtatatggtgactttggctgagggctgtggcactgtccctggccttccaggccactgaggagggtagagaacctctcacacagcctggagttcctcagagtggcttctaggcacccagaactagtgcctctctggctgatcagatgagggacagaagagtggttctcaaagatgcccacatgacagccccaggtcctgtgtgtcctttgccacagtggaggaccttgacaaggggacttagggtaggtaggcctgaaggattgagaaaggattgagaaagtctacaccaatgggtttagtgtggacacagggcccctcagaagtggacagaaagatgcccaggactgagtctctgttgctgacctgaagatgaggacatgaaatacattgaagagacttaggaggacagcacagctccagccagcaaagaagccaggatgtcacgcacgcccataaccacaaggagctgaaactggccaaagcctgagtatacagcaggcagaccatcagagccatgagggaggaggccagccagtggcccctggatctgacctatatgacgctgagcagagccagcctaggtcgataacactgcaatcacgcatgcgtgtgtcaaaccgaggccacatgggtgcatgggcagagccacccaaggtgtggtcagagtgagagaaagcaacctttaggatgacactgccttctctgggcacaggactgttctgaagcagaccacacaggagccttggctgggtctcttcttcaggggcgacatctccatcatcagcaattccaaacccgcctacttcctgtgaggtcaggaaccacacgtgcagccataatgtaccttggggtttggtgataaacaaccttctttttacttgtgataaaaatgtattatattgccttatttatttttaatctt

SEQ ID NO: 19561 - DNA, 1094 bp, Mus musculus
ccaagcagattgctattccagaaactacctgtgcatgtgagattgctataaaggactgacatccaagtcccccatccctcccagaaggcctagctctagcttcttggttcctacagccaggattggtacacacacaccccgccctccaagatatagctgagcggactgagccagccaccagtcctgggccccactattgtcactaaggaataaaggtgagggcagccttccgatccttatatctatacctatccttgaatcgtgatgttttatgtgactgagggtcgtgatggtttgtttcagtgttgcaacattgaaaggtacttgtggcatattccaggtggcacatctggtgggaaaagggcacccccgagggtatatcaggaaagagctagaaagggctgactgaggattcaggctgtgggcttggctggcagatatgagcggcttccagagagctcacattgtatttacacgtgagctgaaggactcttgtaccactgtgctaacagcaacccgctgagactgtgcaaatgacttgctttaacggggtgagtaagagggaaacagtttggactgtggaataggggaagagttcactcaagtctcccagccaccctcagcaggtaagttctaggactctccaagtcccagggatcttttacagcctgtgcagaacttctgtcagtggacgtttggaggcatggttgtatagagcaagcatctacccttcacgtaatagtggcagggaaagaacactgctacatacactgcacacccgtcagcaccatgctgcagaagggatgctgatattttacattcttacatggctgtacatatgtagccaccagaaactgacttgctcgtgctttttaatggcttcaacttgcaaagggtgtgcttggcttgataaaattaataaagagcaaggatggcagcttggatattatgtgggtctttgaagcatcttgcttctctagctgtgattggctttgaatgtttctatagcaggcttgaaccaatagctcatttctatttacaactataggcttggcaggaggttgatggttaaaagtgtgtatgcatatgcactt

SEQ ID NO: 19562 - DNA, 1205 bp, Mus musculus
ccagacctcaactgctcatctgatcaggccaagctgcgcgttttctgttgcagttaaggtctctgctaagccaggtgaaatctgtaagaactaggctgctgttgatgctatcgtctatacaacagtgcttacccagtgtggtgcagggcacctcatggacgcgggtctcttgtgggcaagagttgcttgaagcccacatttggagcatgtggccaagtgctgtttggttctgtatttcttggcttcttgttgctaaattggagccgtttgattcttttccgatcagctgcattcctccaaggttagagacaccattccgagcaagaaattagaaccccggcttcagccttatagtgcccttgatagtctcaaaggttttgaaatacaaactgacattgtgtctagtggcatcttcttaaatcaatttttttctgaaaggcctgacatcgaatagggacagagctatgacattcctgtagagcccaagccacactgcccagccagcctggctccagttacagctcttacattcaatgctctcatgcttccagcaggcaggcacagcaatgagggtgccttcccagggacttccctggggggttagagagagttctccaggagtgcatagaaagcaaggaaggggcaatggtgcatggcagaaagcatggctgcctctcccatgttacaggagccccatacgctttccaggcactggttcctgccgatgccagactacatccacttcagatgtattggtttccaaacatttccagccatttgctgagaattagcatttcaacggacatgctatctgagactgactccagaaatctcttagacttcataaacttgtaggattgcctgcaagaacatttgcaggccacttagatctgtctggggtggtcccccctgctccatggcacagcattgggaagtgggcctgacagcagccagaaacttgtttctcacctcccaccagcaacctccactcagccccagaccccaggcacatgaagcacaagtctcaggggaccgttcccatgctgtggggagcccaaggaagcccccagcatctcttgcatacaccactggcagtgtgggcacaactggccaccaggagcacacatgcctggggaagaggggcctgctctgttgccttcatccctgttaaaattgagtatatgcaagccatttgcactacggaa

SEQ ID NO: 19563 - DNA, 2731 bp, Mus musculus
ggatggatcttggcccgggaaatgcctcatcagggccccaaggacaagggctgtacaaggagggagcatggaagacaaggctgtccccagtccctggctcattagcatctgtgtggaggaagagcatctgtcctgcttgacagggactgagtagccatggcacccacttgtcagcagaaatgctccctcatcttgtctttctacatcagtgatggaactgaggaggagatgcatggtcagtgaaggtctgagcaggttggaacatggcggggacctaagtcaggggcagcggaagggatgtgaggtgagggcagtggagaaagcctctggggtcagggaggaccacgtggggtctgagagccactgctggggggtaaggactctgtgattctgctctcaggttgtcacctgggctgtggagagcctagaggacctggagaggaaaatgagaagatggaatcaaaaatgccattttatataatatatattttacttatgccaaattatttataaccgcttgccattgccataccgtacccatgtcaaatgctgcagccgactaagctgtgattactaggaggcttgtccccttgtagacacaccagagacagctggcccgtcagctggaaggggaacagtggtctcagggtgatgccacgagatccttctcctgtagtactgccaaatggatttgccttaagcagcctccctaccctctgcctggcgcagcaacatgtcttgtccagatgcagatggttttgttcctgatggaaacgtctgggagacgtggaagactaagacactgacgtcagtctcagcctcttctgcaggactggctgggccatgtagaggtctgcgtcatctaaagcacacgtggccttttaccgtgatgctcctgtggtacctgcagcttccgaggggaacttctgtggggtccagagggggagaagggatgaagggaaagatcaagaactccagcactcacggctacgtttgatttgctgagtcatcttagttactgagtcaggtgtgatggttcttgctaagatgggcatccccctgctgcaggcttcctgtgcccagagattcggaagaatgcggtaagcccgtccttcccagggtggaggtggaggagggctccggctccgtggagacaaagccagggtctcctcagtcagaaccttctaccccaggaaggctctgagaattcctggcctggcctgaaattcccactctttgccttctaaaatccagacctagcttccacatttcacgtccaggacaggctacagttgttaagctgggatttttgtggtgaattctgtttcaaaaggggcagagatgtaactatgtgtagaattgggatcaactgtcaggatgagtgtgtgtgtgtgtgtgtgtgtgtgtgtgtgtgtgtgtgtgtacaggtggactattccatttttgctcatgtgtatgtctgtgtgtatacaggtggaccattccactttttgctcatgtatgtctgtgtgtatacaggtggaccattccactttttgctcatgtatgtctgtgtgtatacaggtggactattccactttttagctcctattgatgcaccaaaagcaagtgcctcatttctgtgccaaatgtttgccttggtctttaaggacctccttcgtggacactctgatgtgcctgttagagggaatgtgccaccattccctagaggccccatgtcttccacagaggcttctagtgttccagttactcatatgcagctaaactccagatgggggcaggggtggggctgaagtttgtgctctaagaagtatcacatcctatgattataagtttatatgcagatgtggcccagagatcacagccccgcactcttttcctcccgctggaggggggtgggggtggggggagagggcctaattagaaatcagctgggctctgctgaagcccagctttccggtgaattgaatgccacaaaggttggcatggaatgcatccaagaagccacacgaatgtgctttcaaaactgaccggtgaggtatgatttttactcaagataaaagtagtcaagggtatcaatggatctgatctgaggaaacacaggaagacagctctacaactgtctacaacagctggtagggcaaggctctgtcttctgtgtgtgacgcgtgtattgaacagaacaagaacagtatcatagactataccgtgtgctcagaaacactgcgaaaggagtattgcccaggcttttgctacaaggccatcggttgggcacaagttagtacattattctatgagtaaattcaatgatgtcccaccacttccaatagatagccagggtcccattaaccttctcattaacggtcttatagtttccagtgttgggctgtatccatgttaaaagccacactgcatttatcttcagtgtcaaagacattgtaatgccgccatatctgtcttatctattagcgcagttttcactattctatattgtaaagaatatatatccagtatgtaaatgagtgttctataaaccttttgtataggcatttcctctgctctttaaatatcagccttattcagagtataataaaaattatgaccttggtaagtctaatgaagcatttttttaagtctttgttgtacgtgtgtgtgtgtgcccatacctttgctcctgtgtttgtgagtatgcgagcacatgtgcctgccatgcgtaaagattagatgacaa

SEQ ID NO: 19564 - DNA, 1215 bp, Mus musculus
atcccactcacagtaacatttaagacttagcagttgtttatttctacagtgttctactgaatagttttagactgaggtcaacctgggtcactgaaacacatgcaagggatggggggatactgcgcttctatgctgtcctgcagcaagccccagtacctacttccccaatcctgtctcatctgtatcttgtaacagttgctgggtttgaggcatctgtatgtcccttacatttccctatggctatttttgcctttcgaacagcccgccttctgcagaacgccagtgggtagagagcagcccgaagtccaccctcaccctactggggaacagccacccttctgaaagtcccctcggcactcatgagttctgtagctctggtaaggactcaccagggctgccctgcttccagtcctcagagctccaggcctctttccacagccatgagctgtccatgtcagagcctcagggtgctttgcctcctgcgggcagccaaaccttcttaggtttcaacacagtaaccacagcaacaagtgttcttccacctggtgaggacgctggcaccttgctggtcaattcccatggaacatcaccagctcctggaacccctctgctgacgacaggggctgctgacaacggctttctgccccacaactttctcacggtgtcacccggagccagcagccaccacagtccaggcctgcagaaccagaacgtgagcctgcctgggcagccacccctcccggagaagaagagagcgtcggagggtgatcgttctttgggctcagtctccccatcatccagtggcttctccagcccccacagtggcagcaccatgagcatccccttcccgaatgtccttccagacttctgcaagccttcagaagtggcctcacctttgccaggtatgtctgcatctgccactccctcaggagaggagggctctggggcttcccgtgtgagccagtcttcagtgctaagtcagatgtcctgcaggaaatggtcagatcctctcttggctctctcccacccagtttgcctaaagccagatagacccagtttttccggtcagcttcctccttaatctcctgcagactcagaccagcgttagacagtgcagatgctgcagtagttctgtattcactttgactaaaaggatagagatgctttaaagtttctttctctcttcccaattacataattcatccagaattgagt

SEQ ID NO: 19565 - DNA, 1193 bp, Mus musculus
aattccctgtggcagtgatgttgttaaagaatccttggtgatgcttttgtgctcactggtaggatgcacacttccctggcaatgtctccatcactcttgtctccctgccgcccagcaccatgttaaagattgtagtccacaagctccttctctccgtctccagctttgacgatagttgagcttcttccccatagtgatgccagtgtcgtccttcctgacccactctcagctatcttgaggggccagatctgtggcagggacctttctgtgatttctcacatttctgttcttcttctatgctgatttcagacggtgatcactgcatatccctctgacctcaatatgatcgatggcaggattccaaacagcaaggagtcatctatgtgtctgaccccatcattccctgtgtctccggaaacaccatatggtaagaaagaagaaaaactagctgggtacaacttggtacttcaagatgggggagtgacagtatcctttgttgtactgttttgtccagtgaaaacatcgccacgctaccctccgttcagtccacctgagccccagctgagcagcccagccagtttgcacaaaggtcgaggtaagaacccatatgcatggttgctgtttctaccaaggcattttctgatgcagaaatatttccatttgggtcatatcccaatatccttgggcaaggacatgtctttctagaccttgggatgtggctatcagtgccttggttgggagttgagtagtagtaagacactgagaggattctcaggattcttaggaatcaggtttgatgctcacatatgtggcaatttaggctcaattcagtagggttggctctcagcttggcataggtgcttagcttgctggtgaattctccattcagcaaggagtttgaaggaggaatgctatctaacttcactatgcaaatgagttccagcaaagagcagggtgtctacatgagccctacaacatggtcatctttatgtgctgccgtgtgtgagccagctcctagccgaggcacacttggatttcctgtccctaaacccttgttctctacgttgaaacctagagactttcagtatttcgcactgtagggagagagtgctaagagtccagtgcttcttccaggtagaaattgcccacctttcttgggatcttgggatgagttgggcgtaagcagatggaga

SEQ ID NO: 19566 - DNA, 1189 bp, Mus musculus
aaaagctaaccagctagccaagacctatttttctgcccaacaagacgatcaggcttggctaagagcaggaaccaggtacccctgggtcaggagtaaatgcctgtggagattctggcactgggttgttaaatgttcattcttagtgttcccccatgtgaagactcagtttgccacaacaaagcctcatgcctggctcactgcgggtgctcaccttcttataacaggcctggggctggatcttagctggttctctctgaacttgagcttagccatagtctactgtcctagcattgtgggctgagttctggcacctgccttgccctttctggatggagtgctctgacttgtctctgggcatcccatagcctgcccatagcagtcctcctgtccgtgtagagtggctgactagtgacgacgttgtccggggatagtttaagatgggttttatcagaggtctctgctgtaaggatcgtacccatttgtttttcctcctcattggctcctcaggtgatgaccccattgggggacggcttcgtaagctgagcatcgggcagtatgacaatgatgctgcgagccaggtgaccttctctaagtgtggatggggaaaggctggagtggacccagccccaagcctgggatcattttcctctcctgaagacatcaaagaggtatgtgctggtcctgtgcccatctcctctcagcgccacttgttttcctgtctttatgcttagggaagtggctatgccatgtccttgcacaacatcaccagtcactgaaacttctctgcctttggctgacctcctcggctgatataaatggttcttaagtgacagacaggggttctgattgagagggagcacaggccagagggcctgggtgggggccacataatcccagatatggcaatagagggggtacatcatttgaggccattggagcctcaaagctcttatctgtagaatgggggtgaaatgcatacaggtgggatgtgaaggttaggaagcatcggcctgaccctagcagggctctgcagatggacgtacagccaacagctattgctgacttctagtctgccactcagggccctcatgcaaatgatgaccccaaggagatcctcagacaagagactccaaggtagttaaggcttctcatcagaatttggcagggcaacctccccagataattagcc

SEQ ID NO: 19567 - DNA, 2105 bp, Mus musculus
tgtgtgtgtgtgtgtgtgtgtgtgtgtgtgtgtgtgtgtgtagtgtttccttcatgggtaggtaagtatgaagctaagataatagctcagtggtcaatttcttactagcatgcatgagaccctgggttccaccctcagcatgaaaacgaaaccaagcaggaaaggcaaaaatgatttcggccgaatgcgtctgatatatgaatcctgttttattgctgctttctctgcagaggattgtgtagagtttggggacccgagctgagactgcacttgcgtactattgagttgcattatagacccactcatctgtttagataagtgcgtgcccactgtagtaggtaatacttccttttctcccttgcttacagcctgtctctttctttttctgcagtgctacacacacaggggccagtggatggcagcctgtatgccaaggtgaggaagaagagtgcctcagatactggcatccctagtagcccccagggcatgccagccactagcagtccagaccacggagaccacaccctgtcagtcagcagcgactcaggtcattctactgcctccgccaggactgataagacagaagagcgcctgacccccggagcacgaagaggcctgagccctcaggagaaggctgagctggaccagctgctcagtggatttggcctggaagactctgcaagctcccacaaagacatgactgatatgcgcagcaagtacagtgggacacggcatgtggtaccagcccaggtccatgtgaatggagatgctgccctaaaggaccgggagactgacattctagatgatgagatgccccatcatgatcttcacagtgtggacagcctgggtactctttcctcctctgaagggccccagtccacccacctgggtcctttcacctgtctcaagagcagccagaactctctcctgtctgatggctttggcaatggtgttgctgaagatcataatggtgtcctttctccagacctgggccttggtgtagacaccctttacgatcgggagcggatgtgtgggggccgagagcaaaaaccgctgcagcccctgttgaggaagccctctgcacccaccccagtgcaggcctatgggcaaagtaactattccacccagacttgggtacgtcagcagcagatggtggctgctcaccagtacagctttgcctcagatggggaggccaggcttggcagccgcagcacagtggacaatactggccttgcccagcccccaccccacatcccagttactcccaaccgtggagccagcagcagagtggctgttcagagaggcatcagcaatgggccaaatccccccgacacacagcagctctgtcctggtaaagctctccagcccagatttcaagatgacagagtcacgaatggagtccatcaggagccgaacactggctcctccccaggctctcctactctggatattgatcagtccattgagcaactcaacaggctgatcctggagctggaccccacctttgagcccatccccacacacctgaatgcccttggcatctcagctgtgtgtcctgacggtgtgggaagtgggctccggtgtagtggccggctggactctgtggatggccctggccggagccctggccggcaaggtgagctgatggggtgttggtgtcaggtaggaagtatctatgcagctgggaatttggatttgctgaaactgatgatggagcggcattttctactctcacaagctgtggcctagaatccaggtgatactgtggcactataagagcttgttagcagaattgaaaggtggggagaaagaggtgtaaaacttgcctataaaaatggtttggggccgggtgggcccccctgaagattcctcttcttaggaatcagtgtcttatttcacatacttgtcacgcttgttggtaagtgcagtaggtcatttggaagcaccagatagcctggtccatgttcctttgccacctgccagctgtgtgatttaaaacctatgtatacatctctgagcctcagtttccatgcctgaagaatcagctcaacaatgaaacttttctcagttcaagaatgtccctttagggaagagtgccgggcgtc

SEQ ID NO: 19568 - DNA, 2061 bp, Mus musculus
ggtgtgctgactgattctctgcctccgaggtatcttttcagtgtgaacatctggccacagctgttcagaggccataccatctatacttctgtgctaagcagtgagctctgcccctcagccattgcctgttttctcttcctctcttaaactaggtgaaatgctatcacaagaagttccgctcggccacccgtgatgtcattttccgcctgcagttccacaccggagctgtgcagggctacgggcttctgtttggaaaggaagaactggacagcgcctgcaaaggtgagtgaataaagccccctgggacgtcagaagtagcatccttccctgttttccttcccacttgctggtggagttactgccaacataacagaaccgagttgatctatgggtgaacaactcggagaagccaggaaaatgttgacactctgctcgtgaaggtggtcggtcacagctttgggaacaaccttgcactggctgggctggaagggcaggatcagtgtgtacacagtgcggtgtggttctttgtttcagatgaccgctttcctgactatggcaagattgagttggtcttctcggccacacctgagaagattcaaggtaggtgactggcagtgggcagacagacttgatcggactggagacagttttgaggatcctgagcttgtactaacacctcccaccttgaccgtgcgtgcgcgcatgtgtgtgagtgtgtgtgtgtgtgtgtgtgtgtgtgtgtctgtgtctgtgtgtgtgtgtgctgtgctgcttggggtcttgtgtattctaggcatcccctactgctaagcttggtcttgaattattatttttttagatagcatattggataataaggggtaggtggctttgaaacaatagcactcacttgggaaatatcaaaaggtagcatgacttgcctcaggtggcctcactaaggaacacttgaaggctagggtgcttgttggtgtccctgagggttcacttacatccatgaggttataccaaatgcttgctttttccctcagaaaaagtgttttaaaaggattgccagtacagtgtactaaatgtcggtatgttttagaaaatatgtttaatagtgtgtgtgtgtatgtgtatctatcattagatatatctgtagtgaaaagtactgatctgtctccaggcctcctgtgtatgacagtttcaagcgtgattattttgtagcctaagctgtgacatctgatcatctggcctcaaccttcccaatactgaaattggctacatggtcattttaactctattcttaattacttagaaaatgatccctcttaaaagtaggctcattgttatagatttgggtaggaaggctcacagggtagtatttcctgtggtagtttgagatgctgggctttgctaagtagcggctgtgccccataggatcggagcatctgtacagcgaccagggagtgaccgtggactataacacagcagacccgctgattcgatgggactcctatgagaacatgagtgcggatggagaaggtgagtggctctgcttgtaacaggaggcgcagggcagagatggggtgtccccggctagatcagcagagcttggctctcgtttacaaaatgaagatcaccctcaccccacagtccccgagctacacgtgtctggcactgccggttttgaaggcacttgcacatatcaggcttggtgaattttcagagttgtagtatatggagggctgatgaagcctcctgactggagcaggaagtgtgttctacccactgacttccatcctttccttcctgtatgtgctggggactgtcatatattgggcaggggcagtgtctactggctgcatattcccagggtcgtggaccttccggcactgtttatgtttgcttgttatccaggttgtaggcagacgtccattctctgatcacctgcagagtgtacactgtggctctctggggatccacaaagcagataaaaaataaacggacagtcatctcttggggatactgagagaatcccttggggttgatttctgagaagtgggcatccaggttttcttt

SEQ ID NO: 19569 - DNA, 1173 bp, Mus musculus
ggcccttctcagtgattttctaaattcttttaacaaaatagaggcaaaaaacctgaaggtgctccttagtttctggagggctggttgtccttgatgtgtggtctgcatagcatgggaaacactgagttcactgtattgccagactcctttttagcttgagtgggtaatacttgacagcattgtgggccacagactctgtttaaaaaaaaaaaaaaaacaaaaacaaaactaaagatcttggggtcctagattcttttacagtaaactctgaactattttaacgcctctaaaaggcttctatagaattgtcacccagctgcaaaggtgcagaccagcgcctggttgaggtgtggtctgcaggcaacgtggtagcctgcattttcgttcctataaaggaaactaactggccatgagctcattagctttcagaagaggtctacccagcatcccctgtgactgaggagtggattatgtcactatgagattaccacagaagggcccaggaggtggaaatcaaggcacctctcttctctgtcttgcagatcatggatgtgggctggcccgagctgcatgcacctcctcttgacaagatgtgcactatatgtaaggctcaggagtcctggctgaacaacgacccccagcatgtggtcgtcatccactgcagggtgagtgttcctgctcccacagcctctgggttcccactgggcttccagcgcttacggggccacgtggattagatcaggctgctcacaggcaccaactgattttccttgaagccaccgagtttacaggatacctgtcacctggtgtgacatgttccatgaaggtataccttttagatttcctattcatccttaaaaactaagaagctgacgaagaaactaaaaagaacccccaatcctcaggttgtctttagaatttataggtctgaggtttctggtgtttctggactttttaaagctcccttctatccattcgattctgtacttgttaattttgagtattagtgaagttgaaatgaattgtaatatgattgaaaacacatggatcaccaaagatgaaaacaccacctagatattttaccctcccgccttccgtaagtgattctgggctctctttgtccagtttatgggcttctgatgttttcctttcattacttaccatagagcactc

SEQ ID NO: 19570 - DNA, 1241 bp, Mus musculus
tcagcattccttcagcttggagagcaggtggtctgaacgccttctgaatatgccacatacagctgtagttggcagttgcttctgaggttgccctctgccttgcctgtgccgtggtcctcatgtctacacctcctgctctgcagcttggtcctgagctggtggccttttttccacctgcctcctgcactgcctgcctctgtttggtgggtgtgaacctgcagagttctcttcatctagcatgtttgaactctgtgagctgccaggtctgtctgaaacctggagtgctgcaggcttggggagtgacagtttgaatcgctgtggcacatttcattgtcctggacagtaagaagggcacgataagccttacctgatggactgagtgacagcctttgatcagggactggctctagggacactgttgcctttaaggtccatttatttgtgggaacaaaggtgccttcatgatggggaggagggacgtttggaatggctgccaggcattgacctgcgatgcttggtcttttgtttctttgctgatagcacagcctgtttgtccttctggcttacaaaagtaggatgtgatgttggcgtaatacatgaactgaaagtgttagttggtatgattgagactaggagctggaagaggaacctctctttgggatgactttgttgatgaagcaagtgtggtgggtgggctatgagttctctgggaacttgtgtgaaaaggaagcctttattatgggctctgtgtatgtgtgtgtgtgtgtgtgtgtgtgtgtgtgtttgtgagtgtgtgcgcgcgagagagtgtgtgagtgaacccagggttttatacagactaggcaagtactccttcacagagctataaaagggctgtaaagatataaccctttacccatttttattttgagactgggtttcactatgttgcgtaggctagcctcgaacttgtgatcttcctctggagtagtgaggactacagatctgtgccacacagcctggctggaagcttgcactttgtctgtaaggaagggaagagcagagaacatatttatttatataggacattgcagaggatgctgacccaggttgtaggacatgtcctgacccatggctgtcatctgggagtcaaaggtttgcgtcattgtaacttcattaggaccccaggcaggatgaggatagggggacgataagccttacccgatggactctgtttcagaacagtgaggggcattggcgat

SEQ ID NO: 19571 - DNA, 1138 bp, Mus musculus
ctttctctgtgataactccagatgtgtcaagttgacacaaaactaaccagtacaccttgcttcctgagccccacgtgtttcctaccctaggcttttgggagtcctgtctctacctgattccaagtgtctcctctcactgcagtcttgctgaacttcaacattttcagcctaaccccactcccctcacccttataggtgtggaatgctagggtggcttccgccttctgctctgaggcagtctcctacaggccagtgtgtctctaaaccctgacatgccctagagtacaagggtctgggaagatgttgttgatgctgaggtcaggtaggcatgggtgggcagggcctcactgattgagtaggagcctcttcgtgtcataccgatgggaatgacatagccacagaagcagggtctctccatctgcttactgtaggcctaaaaggaaaaagaaaggagctgagagcaggtcattggtgctcataggatgagcagagccctttagttggctaccagaggagaccttgtgggaaggagacccctagtaccatttgtgtcaaaccagaagaaggcatcagatctcattatggatggttgtgagccaccacgtggctgctgggatttgaactcaggaccttcagaagagcagtcagtgctcttaactgctgagccatctcgccagccctgtcattcacttgttaagaaaaatttggtaaggcctgtcacctccagttaaatgtctcagtttctcaggtcccagagaggccttcaggtcttcataagagtgaagaccagcatgatggctttgtgttccaaaggacattaacattatccacctttcctttatgttctgattttctgttaggctgcgaggtgtcactagtagagcccccctcccccacttcccatcccccaactctcagagtcctgtggtgccacgtagatgccttacctctactatctaccatggatgacagaccagaaagcactgtgcagtgtgtgaggtggggccctcctcacacactgctttgttctaggaccagaactgtgagaaatagatttgctattgtatgtagcccagctattcaggctgtggcttggtagtttttttttttttttaatagcagcccaaatagactgaga

SEQ ID NO: 19572 - DNA, 1170 bp, Mus musculus
ggtgtaaaggggtcgccaggggttaaagcttagctagcctctgcccatcatggagaatgtgccattaaacatgtcattgtggttttgctgaggggttgagggtgggtgggattcccatgtattttctttctccctctccaggggttgtgtgtcctggttccctgggattggaggtttgtcaccccagatagctcactgagcgctctttgggaacagagatttctttttttttgttggttcagaatacacagaaaatttgccatgcgtttattgtatttaataattgggtatttctgcttccggaaccccccccccccccgccccttttcctatagctactttctcactggggagggcgagactgtgtttgtctgggcctctggtcagaatgccataggagggtggcctgagcacaacagtcttgtctttagaaaggctggagagatggctcagcagtcagaagcactggctgcccttccagaggactggagtttgattcccagcgcctccagagcagctcacagtgtctataatgccagtctcagggagtatgacaccactggactcccaaggacaccagagacacaagctgtatgtcgacatgcgggcaaacacatatactcataaaataaaaaaaaaatatagaaaaatacaaataagcttaaaaaaagaaagtttgccagactgggccgcctggctttgtgtcctctcttgaggtaggctgcctagtcctttctgggattgtttatatgagctcgtgacccactcacctgcccaggctttgccttataccactgctttgaacatgaggatatgaatggaggcttttggaggagacaaagacattgtgactatggtgggctcctttctcttcagcagggctgttatgcacttgggaggggacagcagcatgtagtaaggtccttaggttggagcttactgactgggcctttccctctccctccctccctccctccctccctccctccctccctccctccctccctccttccttccttccttccttccgctctcttttggacaggatctcattatggtaccctggctggctatgttgaccaggatgtccttgaactcacagagatctaccaacttctgcctccagggttcctgagtagtggattaagggtgtgtgccttgagacggatt

SEQ ID NO: 19573 - DNA, 1191 bp, Mus musculus
aggactttcccttctttaaatactgtagggagtctggactacatctcccttatctagtcatttctcaatggccctgaaggtgattgaatctctccccagcttcctggaactactgcttctatttacaatgtctctttctctctctctctctctctctctctctctctctctctctctttctttctttctttctattactttacaatgtctctttctttctctttccttccttccttccttccttccttccttccttctatatgtattgtattttatatgtgtgtgcactatatggatgctggtgcctacggctggaactggtgagccactctgttagtgctgggaattgaacctgggccattgttattgttgtcttcctcctcctctttttttcttcctcttcttttgagacagtctcactatttgtccctgcctggtctggaattccctgttaagtctaggctggtcttcaattctttttcttttttttttttttaaagatttatttatttattttatgtatgtgagtacactgtagctgtacagatggttgtgagctttcatgtggttgttcggaattgaatttttaggacctctgtttgctccagtcaaccccgcttgctcagttcctgcttgctccggcccaaagatttattattatacataaatacactgtagctgacttcaggtgcaccagaagagagcgtcagatctcattatgggtggttgctgggatttgcactcaggatcttccgaagagcagtcagtgctcttaccggctgggaagcttacccagcccctggccttcgattttttaagaaattgtcctgcctccccctgcgccccccccctctcttttggcttttagagacagggtttctctgtatagccctggctgtcctggaactcactctgtagaccaggctggcctcgaactcagaaatctgcctgcctctgtctcttgagtgctgggattaaagggtgccacatccagtttagaatgctgctttttaagtgtgggtcatgattctgcaggagctgtctgtataagtcagtgtgggacacaggagaacatttggcaacagtaaaggtttttaaatgtgcaatgatcaaatgaacccaagctcaaaagcttagtgagtgtgaactgtttactgccacgcttgcttgggtcacccagctactctttgt

SEQ ID NO: 19574 - DNA, 1132 bp, Mus musculus
gtgtatcccaagggctggggatcaatggccctgtggtcacctaacgtgtcctgaagactgaaaatcaaggggtaccgcccccctcatggtctcatcccactgatccctgcttcctcatagttcatgccctctcacttttttgctcgatgccacagatagtggacattacctgtctgagggggtgactttgatagctaagctttcccttttttttttgctcactctgagagcttgccattcacagcatctggattttagcatagaaagaaaaagaaacttcgatgaagaaaagagcagcatagtccatgctaactgaaaaaacctttatcatcatttttttggaatattcacatttttagaaaacttgaaagagtaagttgtgaacttttgtgtacccttcattttgatttactaaccttccgtgtcatttgtcagattttctttactccccttccgttttacttgttagttttattttattttgtttttagaaggcttattatagcccagactggcacagtggttccaacatccaaggatgatgtctacctgaacctgtggcctttcactgttgttaggatctctctctctctctctctctctctctctctctttcacacacacacacacacacacacacacacacacacacacacacacaccttcttatagtgtagtctgcttgacctagaacttactagatagacaaggctgctctctattcacaaaaactggctgtattctgcctcctgagtagttctatttaaggaactgacgatcttggctttttgtttatttaaagatttatttatgtggggcttggagaaatggcctagaccgatgatgggtcataatcctaatgggggagggggtgtctaatgaccctttcatagacgtcagatattctgcatttcagatatttacactaagattcataacagtagcaaaattagttatgaggtagcaagggaataattttgtagttgggggtcaccacaacatgaggagctgtattaaagggttacagtatcaggaaggttgagaagcactggcctagcggttaggagcatgcaccgctctcccagaggaccccaggtctctcctaagcgtctgctttgtgcagctcacaact

SEQ ID NO: 19575 - DNA, 1149 bp, Mus musculus
cctgtgtctgatggagttaggaacctgctgcttctgtgtttattctcaaggttttcctctgactattgcatcttgtcttcatctagtattgtgcgactgctctattaggaatgcagttgtggtaatctatgagcattctactccaaaacaacatgtctatggtttggctccaaagcacccaccaggtaggcactgcagttttatttaaaagtgctcttattatactgagtcttagcagctcaatagtcataactattcagtcttacaagatgaaaagattctggaggctaatggtgatgctggttgcatagttacatgaacacattaaacgccaccgagttgttctgtgcaattaaaaattgagagaatagtaaattgtatgcaatttttagcttattgctttgttgttgttgtccttgaaagaagaaagagcaaaagttgcaccctttcatccctggagaccaatggccatggtccctggagccctcacctttacactgatggctacagtccctggacaccctcagactgatggccatggtccctggagccctcacccttacactgatggctacagtccctggacaccctcagactgatggccatggtctctggagatgctcaggctaatggccacagtccctcagactgatggccacagtccctgaaaccatcaggcagctgcctactctctcccagctgcaaggctgttctctggtttccatggatgctctaaaggccttgaacttgctgcgaactttctggagttcccctgctacctcctggccaggctgctataaataataatgatgacgataatgaaaagaactgcccgagatgcagcaggaggctctgcagactcacaggcgcactggggaatgagaaatgtcatgacgagggactgcttcatggactcagtgctaataaatcataataattaaatacaagtcctcatcgcttgaaattcatttctttcatttcttgtagcatggcaggaggatgaaggaaatagcagactattctgaatcccgacatcgtccaccagctcagggttggtccaggacctactggctgtttttgtccatggctctcagtccctgggcatggctgcctgcagcctgggccttatctctaaggcaattttttcat

SEQ ID NO: 19576 - DNA, 2396 bp, Mus musculus
tgagctgtacatagattgtcctggaactcccaagctcctatcctgttcctaagtgttgttatgacagatatgagccatcacaccactggctctgctgctatttaataataagacatatttaattaaactaatattttaaaattagggattctttaatcgttaatacttgtaacaaaaataaatcaaaatcatgatgcagatggaatttcaggagactccctacaccttgttccttaggcttgtctttctgccgaaagtaccagaacctcactagtcaccaatttcaccactgtgccgcatacctgatgccagtaactttacagtgacctaacgttgggggagaacaagcttccattggcagtcaagggatgtggtctctctggttcttgccacaactttctgcgtagtgttcctttcatagcttatgtctcaaggagctgtagtcaagggagggagctgagaaagccaggttaggagaactgggagctgctttgtgaaaccccatcctgaggtggagactgagaccagagacattttactgtgtgttgtctgcagtttggagatggactttcacttactatgactgcctaaaactctgaggtttggagagtacttccatacatatgagagccggtaagctaccccctgaccttgcctgccagggcttagaacccacattcctggtaacttgtcttgaactgagattttaagactgtcctgagagagtcaggaatgcagaagaattcctaatgcagtcacttaagccagtgtccaagtgggcttgttatcctgtggcctaccttggttcagcaggcaccttcctacccatcatcaggtctccaggctgagtctgtcctgctgtgcatcttgccacagagaatcgtgctcttggaagtctgaaaagcagttcaacattagttctggggcgggaattctggttcttccaccaggagcagtggctgatgacattcttggtaaacgtcacccaattagtggagtaccctttgtttttaagagatgtaattctgtactttttaattttaaagattttgctgggttatcagagcgtacaagctggaggattgttagatggttgagggttctatggctgtcactccatccacagttgttcctcacctttcactctgtgccttccctcttgggcacctggttatctctctcagtttctatacttacctgctctacacagctttttaacctcctcccaagacgcccaggcctctgaaaccaccattccttactacagctaggagggcctggtgctcttgactctggtaatcagaatctgcaatctgcatgtcaaatgtatactggtcccagcctttgcacctcggcttctgcccatgtccatccttgtatagtaaatctgtctagaaacgctgtcttcctgcaggccctgcagccactgcaaagcttgacggccttgccatttctacaagggtgctctcccagcagtcacactttgattgctgtgaggcacatcctggattgtatttaaatggcctgggtaggctagcgctgctctgctcacactgtctcatgtgaacagaccagaacagactcctatacaaagtctcataatgtggggaagccaaatgccagctcctgtctatttccaccgtggagtcaaatacagggaatttctcagtgtgtggtctatgagctgcatagagcagctttgtaattaccctggctgtctgttcatggttttgcatttctctgtgacccaatgggtttcacagcttcactccaaaatttggagaattcagggtagtcgtcttgttgctggaaagttagtagttggaattatgtggtgacacactccagttctgtgcttttgtgtggattctgatggagagtctaaagggagcatgagttggtcatttttcttctaaaaacagtgttaaactaagagatgataaattagaatcatttggacattgatggtaggaggggtgttagtaccaatgtcctgaaggtcacttggctatttactatccgtgggaaagcttgaaactgcttcctttgacttaatacttatgcttgtaagagtcatttaacacaggttataatcaaagcttagtactgttataaataagaaatttcctaatgtgaatgaacagggaattggtagataatctgtgctgtgatgtaatatcataccctaatgcaatacaataaagtgctgctaatatggtaacaaaccagtgggatgttggtgtccatggtgtgacattaaagaccaggaagcctgggtgtttttgacttcagtctttttatatttgtgtattttctaacaatttcacaaccaacattgtaatgacaatatttttatagaatgaaataaatatttataatttaactattacttggaa

SEQ ID NO: 19577 - DNA, 1201 bp, Mus musculus
gttctgctaggtgtgcgccgatgacctctctcagcagatgaaggtgctggagccacactggggagacgtgaagtcccccgtgtgcgtgtgcgtgtgcggcgggggtctaggggggaggggctcagatgaagcgagcccacgcgaggtaggtgcaagccagtgagggtcgcccaggtgtgggtcgggctgctgacaggtgagggggaacgtaagagaggcatgagcaggtgagtggctctcagcgtcctctggtgcttccagcatatccagtcccacacggagtaattcgtcttttcacgaaggaccgaacaaagtttcattttgatcactcgcatggatttccttgtaattgatttaccaaatgttatcgcataaagtattggctccaagttgtttggctgcagaccaaccgggaaactcgactccggtgtattaaatgtcactgatttgcacgggacctgcctcactttactgctccttttctgtgacaaccttcttgcagacctgcaggactctgcagtccttctcactctcatctctctccctcaggtcttgacgaagtgattgactggtggtctctgacactctggaagccttctcgcgacgtggacatcggtctctgacagtgagttaccatgaacacggaatctagggtagggcgaggggctactattacaggcagtgaagggcacttttacacgtcggttcacacttactccgtcctcttttctatctccccttcctgtccttccttcccttctccattcaagtttgtagttcactttgcctcatttttctcttgctggtgctatctgggcttaaaagaaaacaaaaaactaaaacaaaacattgggtccattcgtatgctgtaacccagtcctttaaaaacacatggtgacttccttgaatggagggctgtcttaagctgtctttgcctgtaagcgattcccagggcctgccattgttgatctctctttcagcttgtgcagtttgtgccccatctgcattttgggctaaaccacccccacttctcagccagtcagctattgtttctttttccttcttcagaggccaagcagaccttctggtctccgtagaaccctcattaccgcacgtatctttaatgcgcttcttgggcacaaattgtaatctcagtcttctatactttcagctctggtaagcagtcggcgctttaggtttt

SEQ ID NO: 19578 - DNA, 1099 bp, Mus musculus
agtcaggagttagaaaagcttgaggctttgtttgggggaacatatcggggtttctatactttccctgcttttgtgtccagttgaaagtttacaaaatacagaatctggaactactaagcttacatggtcacccagttggtggcgtgctagtcagtggcaatgccctgaagatagaaatgtcagacaaaggctgcagagactctggtgggttctctgcttatctctgccttcagcaatggtctgtacaaattcctactcagggaaagcttagtaggaaaagggatggacggctttgagcatatgcctggtgcctcagtacttggctttgccgatggatcctgttggctgtgcctaggttccgcgctgctgctttgtcaccctgtgtaaccgtgatctgtgcatcttcctcaggtctggagcctggctctgttgtcatcacgcagcaggcagtgaatgagtgcttcaagccggagtttgagcagattgtcctgggaaaacgggtgattcgcaacaccaacctggacgcgcagctggttcaggagttggtgcagtgctcctcagacctgaatgagttccccatggttgtgggcaacaccatgtgcaccttggacttctatgagggtgagaggaagtgagggcattgtctgctctagggatcgctcacccaccccaagcgtgctgtgcgatggtgtggttgctatctctgttggagtgctgacccactcagcatttctgtgatggctgtaacagtgggtggccccccttggccctagatcttaatggcatgtatagcatggtgcctaagtgcagtaggctttaactatgtacctgtggttctattcatttgctacagggcaaggccgtctggatggcgccctctgctcctacacagagaaagacaaacagtcttatctgcgtgcagcccatgccgcgggtgtccgaaatatcgagatggaatcttcggtgtttgccaccatgtgcagtgcctgtggcctgaaaggtacgccgatatggcatggccttgctgtcctttctctgtctcttttgctggaccatcatggaggggtcctcctgagagtaccccaatgctgaattctca

SEQ ID NO: 19579 - DNA, 1287 bp, Mus musculus
tgtagtccgggtacacatacgatgagttgactgtcacacagaaaagcacggatcctgagtgttcttgcagattccactgagaggggtcagaaagacggtgatgggatttcatgctgcccaggaagctgctccagccctgctgacagcttggctttctgaagggctaatccaccctgttatctagtcctgaacatccttccagttcagcattagccctcagaactgcctgtgctccatgggacaacgtatgccctcagtcctgcacagggcagccaggtgctggccctggaaacagctggaatgttttgggacccaagggcaaaggcataggtgatagagctggactctgccagagttgctggaagttccactctgtccacacagcactcccaactgtccctagcctgcacactgctggtttcccgaggtattgcaggctgatcctcagctccagagccctggccttcctccttggtgagctaaggaaggtatccatcctgcattgatgaggccattgtttttttgcagcggctgtggtgtgtgtcacccttctggaccgtctgcaaggagaccagatcaacactccccacgatgtgcttgtggaataccagcagagaccacagcggctagtgggccacttcatcaagaagagcctgggacgggcctgagccctgtgcctttccgccccggagaagcctctgcaactcctgggcaataaatctattttttcataacacattgtgtgactctgcggtagagtgtatggaactgggtttcatctgccagttagaaatccgagttagacacacagattgttctcttacacatcattggaacattttcagactattcaagcttaactgggggtggggtggggtggggtggggtgaggtccttcttcaggaccattctaaataaatgaaaactttcagacttttatttcaaaagtggtcactaaagtaagacattggcagttgtaccataaaacagatttccataggtattttaaaaattctatagttatttcttgatagctgcagatggaatacaagagtgactttgttgtcaggtagaaagcctaggaaagccattttggaacctagatcataactttcctgtggcgttgtgggatttggcaacacagatctcactccctccccccccatttccacgagtattgatggcgaagctcagggtagatccaggcagtgctataccaccctctgctgtccaatccaggtagtgcaggctgtctaactagaaatgtaaaggcttgacacatcctgg

SEQ ID NO: 19580 - DNA, 1149 bp, Mus musculus
tttgggtaagccactgtggcctactccttaaatgccagcaattgggagacagaggcaggtagatctctgtgagttcaggaacaacctggtctacatatcaaattcaagaccagccagagcttcgttgtgagaccttgtctcaaaaagaaaaaaataaaatctttgtgtaaaaggagcagagaactaatttgactagcttttaactgaagtgcatttctaccgtgggggaactgatccctgggtttatcagagtcgagaaacatctacacagaacagactatgagcctcacacacccaatagtgccaatcacaatcccatgtctacagggtccccattacagaccactgatactattttatgaaagttgtatttggctttgcagttcaaaagagaacttgctcccagcacctttctgtcactcctacctcaagcaccacccttccatcccacaaaatcttccagattcttcaaattaaagtttgactcctcagagaggtagatggagtaagaagatgtgaaatcaagaatatggaagaaaccgggcggtggtggcgcacgcctttaatcccagcacttgggaggcagaggcaggtggatttctgagttcgaggccaacctggtctacaaaatgaacagccagggctacacagagaaaccctgtctcgaaaaaacaaaagaaaaaaaaaacaaaaacaaaaacaaaacaacaacaaaaaaaaaacagaatatggaaggaaggaagactgatccagacagaaaagaatgaagaaagcagccccccaccccagaaggctacaaaccaactttgtttctctcctaactacactcaccttgtgcttcctagatagaataagtttcaagcagaaattactttagtcagagctcaatagttcccaaaaagccaaggaaaccgtcagattagcatgagaccaacttgaatacaggcgattatcacacacactcacttgactgattcctttgaaaggttatggtaatgtagtttaaaagttataatgtaaattattcaggattttcaggtaaaattgcctctttgtctctgtttaaaagctttattaaagtcaggggcaataagcaattagaagtttcattgcttaaagaactttcctgacccaaatgtttctcattta

SEQ ID NO: 19581 - DNA, 1194 bp, Mus musculus
acttaataccccctgactaacaaatggaagggtccagatccagttctaatttggggtagaaactcagtttgtgttttttcacgagatgaagatagagcgcggtggctgccagagagattaattcgtcagatgaacacagattctgactcttctggtaagtatcattctaaagactaaaattccttttgtgcttaaaattcagctgagagcaacagctctcaaagctgttctccagctactctctgaaccagctcccgacaggaggccggagactagcctcagctttacaatttgcatttgaataaagtacctagacttcccgaaaaaaagttctgctttcctactttctcactgtctttcaagattttgtctttcaagcaggtaaatcaacattcccgaggcggaccagtggatgtgcatccccgcccccctagagcacacaggtgacagctgttacccccagtctcaagacatttccagcatgtggctttcagtctgagttaaaaatttaggtttacctagaaggctaaaaaagtagatttttctatattaataaagattggtttttattttgatagacaggcttagccccttaactgacctctggcttttcacccttgctgttactgcaaggtgtccttagctcaataggctgtggaaaaaacagggatgaagaggaacgacttccagctcctattttacccacaaatcgtggtgttattaacgacataattcttgcttaggctttgctaattctgaggttgataattctcctttaggagctgcacagcactcaaaactgtgcatactggtttgtgattgtacaaattcagtatggacaccgcttggtgcagaaatacttactacaagggaaggtccggcttgaccatttctgagtttcctgtgagataaacccggtttaaaagaggttgataccaaattttggttaaaaataaaaaatattctccggctctacctcgcctccccaaaaggtaccaagagccacatgtgtgggttttacccacgagaggaatcgggtccatgtccacccaagccaaggttaaaagcccactcatctacggatgagaaaatcatttgatcacctcagttaagcgttgccttatttaacttaattaataggggggagagagattggagacgtactattgaaagggcaagcccttcactgcctcc

SEQ ID NO: 19582 - DNA, 1176 bp, Mus musculus
atttcaggcatgtaccatcgtggctagtttatgtcatgttggtattgacaccatacttgctatggaaatactcccttaactgagatatatcctcaagttgataacaatttttcaagactgacttttcttttctaaatgtttcacatgtcaacataatttgatcctcataactcctttaagcattgtggtgcaaccaaatttaagaagagaccatgataagggagattttatagcatggtgggtatgttaagatcaggttacataatactcttgaataaacttacagggtgtagtctcccctcccctagcctgaaacctgcttgctcggggtggagcttcctgctcattcgttctgccacgcccactgctggaacctgaggagccacacacgtgcacctttctactggaccagagattattcggcgggaatcgggtcccctcccccttccttcataactagtgtcgcaacaataaaatttgagctttgatcagaatgaaattgtcttagctccgttttttcttccgccccgtctagattcctctcttacagctcgagcagccttctcagtcgaaccgttcacgttgcgagctgctggcggccgcaacaacagggtgtctctttttttattcccaggaccaagtcatttatttttagtctgagctaaataatttcttcttgactgatggtgcagtttatgggtccactcaaaggatataatctttcttatcccttaaaatggagtaaaaccagctcgtaaaatggaatcctttagggcaagagacaatctaaaagttatggtaaatacaactttttattatttttaaaaaggaatacatgtcttcctgaatttgcttctttagcatatccaaccagcatgcacctgcaaaatacccccacatcactgacacctctctttatggcaaatggagaacatcacaggaaaccacaatggtacaaaatgcagagattaatgatctgcggggagcccaggcactactcctgcatccatggttcaagaaacatcatggaaagattgtaagatccagagtaccagcaagcatgctgtgaaatgatctcttctagaaatggctgcacaaacaaggacctaaatgaggcggtatcaatgcatatgttaatgtaaagggagaaaacgggaagaagcagttatatagccc

SEQ ID NO: 19583 - DNA, 1140 bp, Mus musculus
tttttaaagagaatggattgtttgcactgttaaaattgggttttgcttctcaaaattgtggttgtactctcttgttacaagagaaattgaaggcttctcccaaatcagagccaccagctaaatccatcagctcctccaaaatctatgaagcctcctgagtggcctagtccactacctcccccttatccacagcctcaaccccagctgctggggggaaccccaaacccctcggggcgtcgagaggtgggccgctgtgtgtacatggaaccgcagagcacagagtctgggcggactctggacccacccaaacttcaaacccttcagtactggtcattttcctctgctgatctttataactggaaaactagccaccccctttcccaggatccccaatgcctcacagggttggtggagttccttttatgttctctcatcagcctacttgggatgattgttaacagctgttgcagatgctcttcacaaccgaagagtgagagagagaattctgttagaggctagaaaaatagcccgggagccaacgggcggtctacacagctacaaaatgagatcgacatgggattccctttgactcgccccagttgggactgcaacatggctgaaggtagggagagcttgaaaatctatcgccaggctctggtctctaaggtgcctcaagacggcccactaatttggctaaggtaagaggtaatacaggggccaatcgaacctccctcagtgttccttgaaaggcttatgaaagccttcaggtggttcactccctttgatcttacctcggaagcccagaaggcctcagtggccctggccttcataaggcagttggcccccgatatcagaaagaaacttcagagaatagaaggtgtattacaagagggagacagttactcgatctagtgaaagaggcagagaaagtgtgtgtgtgtgagagagaggcgggaggcagaagaaagagaaaacaggagggatcgtagacaagaaagaaatttgactagaatcttggctacagtggtaggagagaaagaaaagacaggatctagacaggaaacctgagcaacagaagactgagcctcagctacaaaggctcagctgtgtcaggatacacccttcgagataggaagcagt

SEQ ID NO: 19584 - DNA, 1379 bp, Mus musculus
ggctggcaagaaatttgaagagtctctgttggaacctgctgatgcatcagtagtcctgtgtaaagagcccaccgcctttgaggttcctcagcttagtgtttgtggaggttctgaagacgctgacatattatccagttcaggtcatgacacagataagacccaagccattccagggagcagtctgagatgttccccttttcagagtgctcggctgcctaaggaaactaataccactaagacatgcctcacctcctcaacatctttaggtgagtcagccactgcagcatttcacatgacaccattatttggaaacaccgaaaaggacactcaaagctttcctaaaaccagcacaggactaaatatgttcttatctaatctgtcttgtgttccttctggctgtgaaaaccctcaagaaaggaaggcttttaatgactctgacatcattgacatactttccaatccaacactgaacaaggctcctagtaaaacagaagacagaggccgaagggaagataatagcctgcctacctttaaaactgcaaaagaacaattatgggtagatcaaaagaaaaagggccatcaatcccagcatacatctaaatcttctaatggtgttatgaaaaagtctctgggagctgggaggtcgagagggatatttggcaagtttgttcctcctgtatctaataagcaagacggaagtgagcagcatgccaagaagcacaagtctagtagggcagggtctgcagaaccagcacacctcactgatgattgtctgaagaacgtggagccaaggatggttgaacttattatgaatgaaattatggaccatgggcctccagtacattgggacgatattgctggagtagaatttgccaaagccacaataaaggaaatcgttgtgtggcccatgatgaggccagatatctttactggattgcgagggccccctaaaggaattctgctctttggccctccagggactggtaaaactctgattggcaagtgcattgctagccagtctggagcaacattcttcagcatctctgcttcatcgttgacttctaagtgggtaggtgagggagaaaaaatggtccgtgcactgtttgctgttgccaggtgtcagcagccagctgtcatatttattgatgaaattgattctttattgtctcaacgaggagatggtgaacatgaatcttcaagaaggataaaaacggaatttttagttcagttagatggagcaaccacatcttctgaagaccggattcttgtggtgggagctacaaatcggccccaagagattgatgaagctgcccggagaagattggtgaaaagactttatattcccctcccagaagcttcagccaggaaacagatagtag

SEQ ID NO: 19585 - DNA, 1196 bp, Mus musculus
tgagataagatctaagtttgggagattctagaaggatcaatcacaagcgttatggcgtgagtgctagagaggagccccatgctttctgcaagcatgaaatgtaatgtctaaggaagatgtatagaatgaccaagaaagtgggccataggtagcttgtgtgggatgcctcaagtatatgtctctggagttcggtgtgtggagcatgggatatgacagggctaccaacattggcattggtactgtgttgacttctttgtcctccaagtatttgttttcattgcagtgggctgctgcagtaagatattttcagttttgtaggatgcttatattttaattttaatggttttattgagatataattcatgttggcctttagcttatacatttgagtgatttctggttgtgaggtcatcaccataatataattttaggacctctttgtcttccttaaagacctctgcataatatcgcctttgtgattgtcagcttcactcttgatgtgatgttgtagtgaaggctaagatattggtggatttgtatcatttaggattattccaaatacacttggcctcagattttgctccttctcacatgcatggtagtgtgcacagccgtcacacacagaaccctccagactctttggctaagaaacttttccttctgtgaaactttgttacctccttgccacgattgtgccttttttattaaggaagcatgttagccaaacaccatttctttttttttttgcctgtataactatattgtgtgatttgccaccttgtccttgtcttttccaatttgatgagttcaagaagcatatactgtggctgcttacttattaagacagaatctcatgtagcccaggctactctcaaactggctatattagcctaagactatcttgaacagattttttcatcttcattctcaaaaggtgagggtacaggtatgcaccactctgctgacttaaagtagcatccattatacaaaattcatttttgtggcattggggattaaaactagggtctcacgggtgctaggcaactgctctaccacaaagctatactttctggcccttgtggcccattattagacataaagtatgaggcattacaatggcatagttactccttcttccctggccaggctccttttatcttacttatcttacttttgcctttaagaaaaagtattta

SEQ ID NO: 19586 - DNA, 2688 bp, Mus musculus
cagaacaacatggctttttgatcggtaccaaccgacctacatcaattagttattggacttcacaaagatttgccgctgtggatcaaacaggaccacctccctctgcgtcagccatttaaaattgggggagggaagagatccagtgcaagtgtgggaagaaactggaatgacgattttgattaggccacgtagggtgaaaaccgcagaaaaatgattggaaatgaactcttgccctggaataaccttgacaattcaaaccgcgatgtttactttttgtattgatcacttttttgcactccttcttcgttgtcgatgttgtactcagcctatggtaggagaggatgtggctttgcaactcagatcagacaaagaatttttgaattggcaggctttagcctacaaatgggtcccccaagttttctagataacatcctgctctctgcaggttgcggcagtgtgggtttggctccagtccttcccattatacttgaaaagctttttttttttttttaaataaaataataagataaaaggtgacaaccgcagttgacacctagcatgttttgtggacgcagtcaagctgccacagtctggtcatcgttgttgttgtgctgacgtctggtcatgtattattagtgtgtctcgttctccacggtgctggagacctcattactttggaaaactcactgttccccagcacagcacagctgcatgacctcagcttcagactgatgtcagccagccttcttggaacacattgctattcattgtggatgccacacagtccatctggggtgccctgtgcctcccattttcacagccgcccactgttgtagaataatcgctgcctttaccctctgcagtaccctcagtcatttcacttctcccacaggggtggggtaggggtggggttaaaggatcgaaagagaaaaaaacgccaacttgttggccttgtgctctgtcactctgagcatctatggtgataaagagaaggaaacgctgcagaggcacaagcataagctggctttgagtctttgaaagcttgatggcctctgcaccctactgaaaaccccctaagccagcaggagcagggtatgcagaggctttgcctctgctggcttagggtgagaagtacctcacaatggatgtgaacattggacagattttaggagcatgatgtttgcctcctccgagagagaggagtcagagagagagaggagtcagaaggtggccggagttatcattgggtcccctgagctccatgaaggaccctctgttgtccccttgatgatttatcaggcatgagagtagcagacaggattgccttgagaaacacacagacaacaacggtggtgaacacatttccctttcttgataccacccagaaagtctgctacatacctgagttagccactagattgcctgtcccgactcattgaagtgctccccagggagccacttctgatttgccatggttgacagcatagtggaagatagatatgacagcgctttgtaaagcaggccagtggcaagctggcccacagtagagaaacactgtagttcacagaccatgcaaccgtgtttccacgagatgttattacaacaaatgaagaatttttttccttttttttcattttaatcttttttgacttttttttagttaaccattttttatgcataagtgctcaaatgcatttctctttctttcgaaactagttaatcgttaagttgacaatgagagaattctcaagttcatacctggcagcaggctcccactgatcttccccttacagacagataacagacatttcagttttaccgtgctcatttctttttgctgacttaaggtcagaacttttacagacaacaaacaaccctagggtttctttttccagtttacacagaccggtccccacagtgcagaatccatttctctttcgtctcaacagtagacaactaggatgtggatctcatatttataagtatgcattttatttaagaggaagtataggcttgactctggttcacaatttcgtacgtagctggtttgacgtagaactttgtacttcccttgccgaagtgaattgttgaaggctgcaacccacccaccttgagtgtagcagacttcagtggccccgagatcgccagccctttgcacaggcagctgggaattccacctgaaacagctggtccctaggttagcgggttcccagcccccctaatcagagactgaaggacaattgacttttatttttgtatttaattgacatgaatgtaaaggggacagctcagggttgttttggagcctgtttgactttgtaatctctgcctgtgattttcttttctaaatgacgactccgtgtaaccacctggactaagttgagaaggaaactgccaaatgctttgggtttttagggttttaataggtagactctgttctattattaggtgttaagagtttccaaacgtgttttcttttttcttttattgtttgcttaaactttgaagaaatatgtgcctcagcttagatgttttgtcttcccctttctgcacttaaatacctgacagcctgttcgatcgctgtgcctccgagggcgcttctagctcatcgtagatttgtgatgtcatagtgcaaactgcagtgaccggtaaaatgacctgacatgtaaccgttttcagggaatgcag

SEQ ID NO: 19587 - DNA, 1121 bp, Mus musculus
ctttttgctttggatctgccttttttgtgtttacaggagtaatggtggttctcacttctgagatttcttttttttttttttttgacttccacagagtctcaagtttcatccctgatttccagttagatttcaactcttaagcatttgatgagtcagttacgccttctccactggctttgatattacaactgaactggccatgtgtgtagaatgctagaaggcacaggcgtggcttctctggagtccccctcagtaatcattagattgttctcctttgcttttttttttttttttaatagagaagagtgggggtttgatgcttttgtcctatatgacctgctcttctagaccaggaagctgtagggcaggtgtcctgtccaggcaaaggagttcctctatcctacctacccccaacattgagcagccaagcagaggggcccagggatacctatatgagttgactgtccaaactaaacataccccgggaacccaggttttctctccttggactgactgtactttaagcatagacatgagctgaagtgtgttccttcccttttgcaatttaaagttggcttctgtctgtcattttgtccctggtggtgtttgctttgctcagaatctccacaaaagaagtacccagtcaaagttaagttttcagaccagggcttgctgtgtttgatttgggcttagcactgttggatgccacactgagaacagcctcaaacctgcttctgttggattgactttatatttaaaaggattctatagcatgaccaccctgaagcctctgctccccggggagcatctactgtttgcccatttttcacccctccaccccgtggtacttagggacctgagctgacgtccagcccacttgccttactgcaacgtttctgtttggcctcagaaggtgcctagatagggttttcagagctccctcctccctttgcagatctgattattgcgtagtctacctccgcttcggaatcggaggtctactggtagctgccactgtttttatcgccatctacagtttctgtctgttagaggagagtgtgaaatctactgcgtcctagctctgtaccttggtaagagtcagaaataatctctccaaacct

SEQ ID NO: 19588 - DNA, 1484 bp, Mus musculus
cctgcctccaggactctcttccagcaagactggtgaggggaacaaaaaggagcaatgagatgctgtgggagggacctgcaaataaacatccacagattctatgttacttgttttctcacaagtcactggaaggttataagcatatttgtattttagaaaggtctttgggagagtgagaagcatggccagtggtctagatctcaattcttcaacatcttttacaaggatgagcatgcataactctcttctgtatactttgttgcccacagaggcagtaactctacccttcttcactgcaggttcccttgctcgtgtgaagtcctaccactgaagagaccacctgtacagctccaagtatcatcactttagaaatccacatgacaggaaatgaaaccttcaagaagtggcggtactttcctgtctccaggccaacttgcccacggtggattttcagtgttcctacataatggtcaaagaggagatactgctttgctgtgtgacttgtgtgccaaggacatatgatctgcctctgaatgctcacagttgccaataaactgctcttgttggcagagtaatgggaatacacaggctggagcccagcactcacacttgattttagctatgggcacaaggaattatgccctaagttgatttttggatctttgagactttgaccacatacacatggttaaaatcacttatgatcctttgaattctaggtgtacaaaaacataaatcaacagaaatagtcagaatctattacatgctccaggatgctgcttctggagtaagaagcaccatggaggaaggctgctgagatgacttttgcaggataagaaagcgtcagattcgtatttgtattcctcacacagtgaagcctcacacctcacagatgatcttggactgtgatctgaccaactagcttttaaaattccactgttgctgcccagaatagcagccctacttgaccctctgagcaagacattcctggctccttagaagatgatgggaagcagagatgagaacactggaagggttgtccgttttctgtatagatgtgtcccacttgtatagtttcccccctcccccatccccagtgtcccagaaggctatgacatgcatcaggttactgtgaaggagccttgcatggagcctgagatttcaccagtagccttctgaaatcctgcacagggccagagagcagagtgttgaggacctatatgtagcagagggcagtccacattgtgctgcacattctgtggcttacattttatcctgacacactttggcatggtccagcagctgccctggtattatatgacattcttatagtacattgtgggtagacaccatctttaaagaatttaaactcagcaggaagttttgtgattttttttaatgtatctctaaaaccttttcttatatggagaaaatcaagacagcaatataagtcaaaatgagttcatgatataaaatctctgcct

SEQ ID NO: 19589 - DNA, 1137 bp, Mus musculus
agatactagctctctaaccaactctgtcaatggtgtatccaaccacagtctgcaagaagccataatccctgatagtggcgtggatgacatcccagtcacttttatcggggaagtttctgatgagccttttgactcagggctgttctccagtagatgtaacaatgccactacttttaacacggggagcattgctagccaaagatctcatctgtccccatctcagactgagcatagccagccattcgtaaggacaagtagaaaagagcctgatccctcccctccttcccaagataacaggaagagaaatcagccaaccttagccaacacatctgaaaatgagaatccagttgaaacagaccccacagttacatcacttgtttcaaagcttttaatagatgacccaaaagcaaaggataaaggcaaagtgcatggttctagtcacagtgagaagacacaggcaggtcatggaataaactcactgcgagtgaatccaagagatggtaaggatgagagctccaattcagcacccccaccatggtctcatcatggccaggccttagggggaagctatggactcaagtatggcctcacgacatataaaattgttcctcccaaatcagagatgaggtgttatgacagggatgtgtccctctccactggtgccattaagattgatgaactagggaatctggtgagtcctcacatgaacggaagcaggaccatatccccaccatcagctgttgtcgaaacagacactccacctattggaaaagtcaaagagttctggaggcgcaactcaatggaaaagtaccttaatgggccggctgagtgcactatcaaaagggccccctccaccactatcactgccacaccagaaaaaccacagcaagataatgggatgaaggcagccttcacagtgaccactccccagcagcagcctgcctcacaggaatatggggcacacctggaggaagagagaagccggccacagtcagcagtctcttgttctgtgaaagtgccagcatctaatcccacagacatcacattcctcaagcctcaaagaagaacatccagccagtatgtggcctctgctattgccaagaagatggggcctccaaaagtccatgctgatgtggt

SEQ ID NO: 19590 - DNA, 1137 bp, Mus musculus
ccttataaagactcaatagcttccattgtttgtgtataccatattatctttctccatttatccatatacagatatatttgtttatacttcttatcaggaataatgccagagggaacatagatgtacaaatatctcttcagagtcatgctttctatcatttgtcattaccaatccagaaatgggctactgaaatgctacttggtatgccttttgtcttggcctgttccaagaactgtcactctaaagttagaactagctcactcaatccaaagtaagtctcatgtgagttctagagtcaatcatggtgactgagccacgcatctagaatgcaatgaccagaaacaagtaacagcaaggggagtgagagctgtttgggtcactaagatccttgtgctaggaaactaggttgttctccacataggagagaaacacttctgagcaaccccaaccttgaagtccttcaggataggcaagactcaagctgcttgggaccagctcttaactctgttattacataatctcgggcaatttaattgttctcttctgcaatttctatgaaaagcaaaactgtccttgagaattatacaagcaaataaatatataaacatttagagtgataaccaacgtgaaacaaatcaaaattagtatgaaagtggctacaattcaaaatgtaagaaagtatacattaaaacctagatgtgtgtgtgtgtgtgtgtgtgtgtgtgtgtgtgtgtgtgtgttcttataataaaaagagagaaggcaacatcagtttgtcctgtgaaggtgttatggggtacagtagtacctctatgccttgtaagtggctgatgatactctggatatcttcgacatccaatcagaccactcctgtcactcagcctgtctctcactgaagtcccaaggtctctttcaatttcattctcaaattttcaaaaactagaaagattaagcaacttaagtcctcattgtaaataacaacaaaacaaaaccagaagaaaatttttgatcatgttatgaaataaaccaaaataaaacctcattctctacttcataccccttcctgagaaatgcaaggctaaattgctatttttcttttcttaaaatattgtcattgcatggctcctttgacagaga

SEQ ID NO: 19591 - DNA, 1200 bp, Mus musculus
cacaacaaacaattaccagttcatttgaactgtgctattctatttcatgatgagagccctttcctcccttcaagctctcctcctcctttttatgaacaaacagctcaattttaagggagaaattgtgggaatgttttagaaatacatactttaagtagcatgtcaatttgttaaatcagcttccaaacccaacaccccatttctagtcaagggaggaccaaagcctcatattccctgaacctgggcccatgctggacacgagatcagctggtggccatagatgccaacagagatgtgagacatatgtctaaaacttaaaactgtactaacatcccttcattgagagagattacaaagagaagatgtggatggtggcagtttgccatgcttcctcctacccagtcctagacttgtttgtggggacaagagaatccagaatccctttctttctaagaataacgttgccctttgaggacaggggctggtagacaggtcttgtggttactgctaggtaaatggctttgatattgggtgtgactgttctaatgcagagggagctggaatttggcattgtgtatggctggcttggtgcagactgaggctgaagttgaaattgaacatggctgttttggtatttgacttggtattgaatgtgatttgtttagcattagatttggtattgggcgtgaccactttttggtataaaatttgatgttgtatacatatgctttgttgtaggatttggtattggatatggctggtttggtgcagagtggtgtggggtgtggtgttgagtgtgactggttttatgtctggtgagcaatagcagtacaccattcgttaaaagataggacctcctttggcttaacctttgaatccttcccatgtaggtgttggacgtcaggtgccacaaaagcctcccagaggcacagctcggggcccaccccagttagtgctccccccgcccccaccctaccctcctcctgacacagatgtgacagagcctgtcacctttcctggggaaggcgctggttccgagacctcagagctgagacccaaacgtacgtgcctcttgttgccattccagctatgtgttgaccatctgtctttctggtctctactggtataaagctgtgttcagacattcccttcttgcttttggacatctgtacctttcctttccaaatgctcaatgcaatg

SEQ ID NO: 19592 - DNA, 1178 bp, Mus musculus
tgagaaaaattaaatgcatttctggcttagtataaaaaatgtatagtgcatttgtacgcatatatttgtattcacacatatgtctgtgtatatatgttatatgtacttataaagtctttataaacatatattcatatatacacccatatattcatgtaatgttttgacttcttaagcaagcagttttgttttacaagatttattcttaaaactatttctatcatttacaaacatctttcctttaggaaaaaaatacaaatgatttgtacccaagtttaggcagactctgtgcaaggctgaacatttagacagaatttaaactaagatacctcaaccatgccagtttttccctgttgtttagcagttgccaattaacatgagagagtctagcaaacatctcatattctgttcagttattttccagtattcattatgctctttttattttcccctggacccaccaactttgtggaagaaagatcaggggctggaagtatcctgccatacccaatcctagaattgaaacagaaattaaaacaattgcaggaagatgcactcatagaattcatatgtctggtgtgttcttgcagaaatctgtacgactggtagtgaactacctgagaacgcagaaggctgtcgtgcgggtgagccctgaggtgccactacagaatattctgccagtcatctgtgcgaagtgtgaggtcaacccagaacacgtgattctgctcagagacaatgttgccggggaggagctggagctgtccaagtccctgaatgaactagggatcaaggagctgtatgcgtgggacaacagaagaggtgagacttgctacatcctatatataccctgaagagccacatggtacgtgccctgatatgtatgtagtacctggacataagatatgcacataaaacctgtattctgcccctgcagctgtcaggaacactatctagaggtgggcatgggaagcttcaggcacctggagttttctgcagtggtaaagtaggcagaagagtctaggttgttgtcttatcctacaatgctaagtatgtctctttcctcccatgtctgcaatgccttttaccttctgtcttcctctgagctctaagaagtaacagctaagaaaagaaatggtaaggagagagagtgcaccttttgctgttactactcaaagact

SEQ ID NO: 19593 - DNA, 1208 bp, Mus musculus
tttaattactgattcagcttctttatttgttattggtattttcaggattcccctttctctttgatttggtcttggtagagtctgtcagtttctgctgagtaatatctaagttgttggctcattgttcatcaaagtgcctatcacttttttcaacttaaaatttagttgtttttttttttttccaatactttacacttacaaacaacggggaaattcatgccgtgggctcaaaggctgtgtagcttttgcttatagaatttagttaacctaacagttgtatttaactagaaatggaactcttgtttttatttattatgattttagttggctattaaaatggactgttagcattgaaactgtgaacatgccatcatagaattatgcataagaacctgcatgttttagaattgctactgctgtcttcctcttgcttcgtctctttctttttacaagagtctagtctttcatccagctacatgaccatttgttcagccttactcagacagacagaagggcacctacagacagtcttgacaaccatgatttgttttctccttttcagccacgcaatgatggacctactggttgaactctgccttcagaaccacctgaatccttctcaccacgtcctagagatctggtcttctgagacccaacagcctttgagttttaagccaaatacgttgattgggtccttgaatgtgcatactgtacttctgaaagaaaaagtccctgaagaaagagttaaacctggcctaaccaaggctcctgaggtcagtggtgcccgtggattgtctgagaacatacagagatgcaaatatatttgtatatacaaatagatatatacaaatctatagatttataacctatacaaatctatagatctgtaatctgtacaaatctatagatttgtaatctatacatttgtacatgagtgcgcaggagtactagagaggccagtggtgatctttgtttgagttccaaacacgcagctctgtgttgagattccttcttttatagcaggtataactgatacttttataccaggcacgaactaggcttgcttacaggagataaaactttccaaatttactaatgtttattgttataacactgatcctttctagattatacagacagaactgttgtaggacaagctgtccatcagaaccttcttgaagagggaaaatgttctaaatctccatttt

SEQ ID NO: 19594 - DNA, 1188 bp, Mus musculus
ggagaagagttgtgagctgcccgatgggcaggtgatcaccatcggcaatgagcggttccggtgtctggagacactcttccaaccttccttcctgggcatagagtcctgtggcatccatgagaccatcttcaactccatcatgaagtgtgatgtggttatccacaaagacccctatgccaatacagtgctgtctggtggtaccaccatgtatgcgggcattgctgacaggatgcagaaggagatcatagccctagcacccagcacaatgaagattaagatcattgctccccctgagcacaagtactcagtctggatcggtggctccattctggcctcactgtccaccttccagcagatgtggatcagcaagcaggagtatgatgagtcgggcccctctatcatccactgcaaatgcttctagatggactgagcaggtgccaggcatttgctgcatgagccgatattgaagcatcgatttgccctgacaaatgtacacatctcctgctggtctcatgaaagtggaataagcctttgaaaagaaatttgtccttgaaacttgtatctgatatcagcactgggtcgtagaacttgttgctgatttttgaccttgtattcaagttaactgttcccttggtatatgtataataccctgtgcatatcttgatttagtccttagttcatgtgcctcggtcacttgggggctggggagagcatgcacgctgtggaagagaaaggcccaagctggtggatctctgtgaacatcacatagtgatctgtgcagggtattaaccgccagcagacttccaggatgtcccgaggctgacaagttaccattccttcttgccagtctatccggatgggaaagtctgagccttaggagcagtttccattctggtttttttttcccccctcctgaccgctatgggttgttagttgccttgagctgggaatgtttgcatctacacctgtaaatgtatccatcctgttaatttatgtaaggtttttttttttgtactcaattctttaagaaatgacaaattttggttttctactgttcagtgagaacattaggccctggcaaaacgtcattgtgtaaagaaataaaagtgctgcagtaactgaaaaaaatcttgacctattagcaaatttgagcacaaatttatgcttttcaaatataaataagaatat

SEQ ID NO: 19595 - DNA, 1099 bp, Mus musculus
cggtccctctgacggatctctggagacagccaggcatccctggctctccttacctcccagggcgtcccccagggccacagcctgtggtcctcctagcatgtctgccagccacagtcctccggtcattacggcccaaaaggacagctgtaaataccgaccgctcacacatttcagaaaaccccatcaccccatcctctacaaacaccgtcgtccacttctacctagatgaccaaaacaagagaagcacacttgttcctcactctgccaggtgtaaaaccaaggcacaaggtgggactcgaacgcacgatctcgtaaccctgaaaccaagacccaaattagaaacagaattctaggccgttaggcccaggcttgggaatgtggcctttgtaaaggtatgctaatcataaaacagatagctacatccctccatccacctgcttcctgggttcaaagagtgctcattcaaagaaagtcacccagaacctgcaatgcaaatgtgctattgttaggggctcctagaagctgtcttgagagttaacacttaccaggtgttccttgtgactcttgtaactttgcacttccttgtgactcttaactggtatttttggtattttccaacaacacccttcccacctccttaagttgtggtttcttcctttaaataccccctaatccagctactcggggcgccacagtcctctacccctgcgtggtgaatgaccgtgggcccaagagcgctcttgaataaaaatcctcttgcaatttgcagcaagaccgtttctcgttggtgattttggggtgtcacctctcctgagtctgaacgtgggggagtcctcacgttgtgggtctttcagtggcatgtataggtgtgtggagattagagaacaacctgtaagagttgattcttccaatatgtggatcatggaggttgaaatcaactttgtagatttggctacaaatgtcggctgttacaaaaactgtattcttttcttaaaagcaataagagatagttaattatgaactcattttcagggactatggcccgggaacacagatgtaggtagcccaaaatgccatgtttcaatggggaagcagtttc

SEQ ID NO: 19596 - DNA, 1285 bp, Mus musculus
cattctgattggtgtgaggtagaatctcagggttattttgatttgcatttctctgatgactaaggatgttgaacaattcttcaggtgattctctgccattcaagtttccttatttgagaactctgtttagcactgttccccatttttaatagcgttatttggttctctgtatatattggatattagccctctatcagatgtgagattggtaaagatcttttgccaatctgctggttgttgttttctcctattgacagtgtcctttgctgtacagaaactttgcaattttatgaggtcccatttgtcgactatttgatcttatagcaaaagccactggtgttctttctgttcaggaacttttcccctgtgcccacacgttcaagatcctccccactttctcttctattagattcaatatatctgttttttttttttttttttttttttttggaggtccttgatccatttggatcatcaccacctttgagcatgctcacaatatgtgcatgatgaagttcagcgtcagccctgttgtcatggtggcagtggaggccaagaacccagctgacctgcccaagctggtggaggggctgaagaggctggctaagtctgaccctatggtgcagtgcatcattgaggagtctggagagcacatcattgctggcgccggtgagctgcacctcgagatctgccttaaggacctggaggaggaccatgcctgcatccccatcaagaaatctgaacctgttgtgtcatacctggagacagtcagtgaggaatccaatgtgctgtgtctatccaagtcacccaataagcacaaccggctgtacatgaaggccaggcccttccctgacggcccggcagaggacatcaataagggtgagctgtctgcccgccaggagctcaaggcatgtgcccgctacctggccgaaaagtatgagtgggacattgctgaagcccgcgagatctgctgctttggtcatgatggcactggccccaacattctcaccgacttcaccaagggcatgaggtacctgaatgagatcaagaacagtgtggtggctggcttccagtgggctactaaggagggttctctttgtgaggagaacatgcgtggtgtgcagtttgatgttcatgatgtgaccctgcacgctgatgccattcacaggggaggtggccagatcatccccacagcacgccactgcctctatgccagtgtgctgaccgcacagccattcctcatggagcctatttatctggtggagacccagtgtcctgagcaagt

SEQ ID NO: 19597 - DNA, 1180 bp, Mus musculus
tactttttatataaatatgtccctggcacctaacacgcgctagtttaccagtgttttctattagacttccttctatgttttctgtttcattgttttgagttgtaaatatgtgttcctgtcttcatttcatgaagtaaacaaacaaacaaaaaacccagtattaagtattatcaaagaacaaccatgattccacattcgaacccattcaaaccatcagtattgtgaccaaaagcctttaactaagaaggagtaaccatgcaaaaatccatagaggaatttaacccaaaattttagtctcagcattgtgtctgctgaggtgtgtatatgagactacgaaagtgaactactcttcaaatccactttgccttcactcctctataccctaaatctagtgtaaaccacacatggaggataacttttttttttaattttaaaagtgtttattagatatgtttttcttcctggtaaactgcagccaaacatcagttaagagccatttttgataaacactatcacaatgatctcgggatccatcctttccgatttaccaagtgatggatagacgtgaactcataaacactacccataagacaaaacaatgagtgccagacaagacatcagccaggcaccagagcacagagcaggactgggcaatctgttggagatatctagaaagttcacaaaggaaacaagattgtccactaccttgtgagatctagcagtcataaataccagggaaatggaaagtgtgtttccttacagcaccaggtcttcgatcttcctaatgctgtgaccctttaatacagtttgccatgttgtggtgacccccaaccataaaattatttttgttgctacttcataactgtaaatttgctactcttacagaccacaatgtaaatatctgatatgctatctgatatgcaggctatctgacagaggtcgcaacccgcaggttgagagccactgccttcaaggctttaatcaagagagtagtgagctgagggctttactggtaagtcaggggcaagtccaactcaatcatcctcacatactggctgctccctcaggcctgagaatgaggcttgcagcatcctctggtttcctaaccgttatccatccctgactctcatctctgaaaatagatgtcatccatgaaattaaggagtgagaatattaagca

SEQ ID NO: 19598 - DNA, 2457 bp, Mus musculus
ttgctttcttctccatctctgaagatctgctcaagacgtccagcaatgctctctgtgtatttaaatggaagtatttttctctgtgaagccacattttccaacatgagcctcatgaagccaactaagtgttattgaactcctactctctcaataactcagtgtagcactttaaagtttgaaggacagcagcatgaaagagcatatcagtatggtggagaaagggaaggggttggctctttaatttatttttcttcatcttttataacaagaaagtatctatatatacatatgtaaatatttatatatagatatatgtagctttctatatatttagtaggttggctttaatttaatatacttgattcagaaacaaaatgttagagtacaaaagtgccaagcagaacataaaccatccttacttttatttcacacggttttatatgtagatagaagattgtacaatttgcgccaggtattaggccagctcttttcctttctctgtgctttctcctttgagagattgataaagcatttgttaatgccctattatttaccttacacttttgtaacgagtctgtaactttatttatatctctgactatctttccagggactgtgtcttattgctgagcagcgtttaatccatctctgttggaggtctagttcagtgctgttgccaagagtgggttcttgtgtccatagaactgcatatgctatggctgcttcaggctgatactttttaagtagtcactgttatttttattaagtgtccctgagaaaatgtaattagcagttgtgattttataaaggtcagaagttttctgaggcagtcatgacttttttaaatgtattatttagtgaagaaaacccaaagtaatcatgcagtggcttaaaatatccttgttccattatacacaagggaaaccatgtgaaatacttgtcactgaactgtaaatcatggactcatttttcttctgcatttcaaaagacacagttaacctaaaaaaatgaactgatacttcatgagcacatgtttatgtaaaattccgtctgtggttaagatgggggagtatcttgctaatctacacgccacaggagagcagattttgtccatagtcacatctttaaaatttctctgccagatatcggcaagatagcacatgatggatttttgttttgcccgtacaactagtgatggatgatgatttaatagatttgtgtgacataaaagtgcgtcatgtcctaccacttgacattatcccttcccttttctgcaaaggtactgttgatcggaagaaagagattctggctagttttatatggcagtcttccctacacagtttttctataccaattggttttataatcatgaatggtaaagggtgggttgaatcaaggtgagagaatattaaattgagtctacctgcctgccaccgctgtcccttcaactgagtgctgcacatcatgggctctgtctgtgagagaaaccccggtgcttggtgtctctgcatgacatggagttttgcatgtagatcaatttaaaatgtacctcttgtttacataatctgcataatttaaaaagatgatgttgccaaactttggaaatgttaatactcaaaacgaaaatctccactccatgtaactactttctccctctggatcagtacatggcttgcaatcccagccagtggtttgatctgtcccagtgtcaaccgccatgtgctctgcttcaagagggaactagtcttttgtgaatttttttgtacataattatttgttacaaatattttagcaaatgctttctatatctcttgcttgtgcatatcttggctggcgttgtggaaaaaaatagtgcaaactatttcaaactatttccttactggggaatgaggggttttcttttttagtttgtgtgagggaggtggggagggcatggtttatgttgaatgtttaaattttcttctgcatgatacatgtcatgttgtgaaatctttagagaacttcatactgtatgagtaagaaaataaaatatttgaaacttggcttgaatgtattgtgtcagctttgatgtgctactagagttgataatcctgtccatgcttttagggctttaaaaacttggataaatgttttgttgttctgaaccatgaactacagacaactacagattccccctgcatctgcctccccaatgctaggatggtttaaaagtgtgtaccaccatgcccaacctacttttgacactttactacaaaatcctgtgtgttcagcactgtgtaacaaggttgagatactcatcccagtaagtgatgtccctcactcaagcgagttttagggcagtgggtatgtttataccaagatggtaagtattcaacagtttcaagatcatgtgcattaaattgtgtggctgctttagaggatctgaagagaaaatttagagtgaaatgaaaattcttt

SEQ ID NO: 19599 - DNA, 1795 bp, Mus musculus
ggagagccccaagtcagtccaacctatagcattcatattaaaagagaagcacaggcagatgctgaaaagaggtgctgtgtggaagtttgcaggaaaagtcaccgttgcccgaggatgaaattctgcctttactcgtgtaaggtcaatattggaaagtcctaagtgctgcttcagccatcagctgagaaataaaagtcactgaagcttacatataaaaatccacccgtgaacgccaagctttcactcttacccctttgctcctgtcttttagtgaatacccaactcagcggtcaaagaaagattccgagggcttggagatgggagtcgcaggttccgtcagccttctgcagaacgtgaccgtgtctactcagcccatctccagtttggactggagtcctgacaaaagggggctctgcgtctgtagttcatttgaccagatggtgcgtgtgctgatagttacaaagctccagaccatttgactcagactttacacttgacattgtccagagggttgctcacagaactgtaacttgatctgtgttctgcatcctctggccccattgaagacggttggatttgagtgatgagtgacagccatgggcacaaagccagccagccagcctctagcatctttgggtgtttgctggcctgaccagcatgctgctgcacgtgaaggccccacacaccagcaccagctttgttccttttccccatgtttctactcagaaacattagggccaggagttgtggtgccagctacttaacaagctgaggcaggaggatcaatgtagtccataagatcaagactagcttgggcagcatagtgagactctgcctttaaatatagttggatgagacccaagtttgatcatcagtatctctatcaggtgacttataattcctgtaagtccagttgcagggcatctcataccattttctggctgtattgggcagtggtacccacagacacatgcacattcttagaaattaaaaaaaaattgtttttaaattaaaaaaaaatgtaaagccaaagtcagtagttgttatttaagtgtatttaagtctgttctgtatctgcatagctctgtgctttctctgtacactgtgctcctactcggagtcacttcacttgctctgtaaagctccagaagaacacggttcgactagccagcctggagaactgttttcagcagtgtaactggtaaaatactgtgacttccagctgtctctcgtttactcagataccagccttagttgtcttttgactgtggtaagtgatgacgagccgttgaagattgaatttgtttttaaacctttttgtcaaacctttaaaatatatattttaaaataaacaggtttttaaaatatttggaggcgttgattctttccctttgttcccttcttcctccttgttaagtgcaccttagtttcactggcccacatcataagctgagcctccggaaggactggattaatcatacctgcaataaaccttgtgtctcccagctcagttcaaaggggcagagacatataatattcatatttacaaaaccaatgagctctattcccaacatgcttttatagaacagtgctgtggagggttaagtgcttgctatgaaggaggaacgcctgagttctgaggactcatagtaaggtggaaagagacagccactcagccctgaccactgacatatgtgcacagcatgctcacatacacatacaaagcacatctaaaaggaacggagttgtaagtataatataataaaaataaaattgatctttaaaaaggccgctt

SEQ ID NO: 19600 - DNA, 1248 bp, Mus musculus
gggacatgtttatcctgtgcaattgcactctctagttccatggacttaatggacaataacgattcactgttgattgtcactgagaaagtgtgtgataaacctgggatgctgaacagctcaggaaatgactgtcttctattttccttcctaaggaaagaatcagagtctacatgaacagagttaaagaaataacagacaagaagaaggctgccaagctggacagaggtgctgcttcgagatttgtcaagaacgcactctgggaacccaaagcaaaaagcacaccaaaagtggctaataaagggaaaagcaaacactaatcttttggttttgatgtacatgttttcaaaaagtacatcctttttaatcagtttacaatgtagttatgtgaccatgtggtgtttaaatggattccttttggaattcatgtataaatttacacattacatttgtgatactgaatcttttttttgctgagaaagattaagttgtctttgttgattttcatataaagcatcatgatgtgtttaatattgtaagatattctataagcagttgtgaaatccaaatgttctctgtaaacatttgtagtgtttgaaatgaacaatgatattatgaagtgtgctatctgtagactggaggtgtaaggacatttgttttcagtaatgatgagaaatacagtgacttaaatacccactctgttttctgttcagttagttcaacatgtttctgtgatttttttttttttggagtaattgctgtcttgatattcaaagtacaaaattgaaaccttaaggctgtactttaattcttcatgttccatttaaaataaaatgttctcattaactctgatggaaaacacggttgtatgtcctgactggctttggcttgattcccttttaataagtatggtagctgggtagctcacatgcttcttgctgtccactgcgtgagtgaacaagccctccagatgaggcagtgtgagcagctccaccaggtagagaaggctgatgagtcatggcggctctctgttctcttggtctcactcttagaatctttctgactaagtatttcctaagccatgtggatgttttgaaatatcttctttattaaatactgccccttaggcacaggaggaatcaaattatatttacattctgatttatttttccagggtgttcgttatgatgaattctacttattaatgtctgagctcatataaccttgcttctctaggcccacatagtcatg

SEQ ID NO: 19601 - DNA, 1219 bp, Mus musculus
atagattcaatgcaatccccatcaaaattctagcataatttttcatacatggtataaaaaatattcaacttcacatgaaaacacaccacacacagtgttacggtggcatcaggctttgaagaaggtctcagatgctcaaactaggtctaatttcatttctgatgccttcagatcaagatgtagaattctcagcttcttcaacagcatcgtgtttatttacacaccatctaccatgaaaataatgaactaattctagagttctaatattgtacgccagccccagttaagtgttatcctttataagagctgctgtggtcatggtatctcttcatagcaatggaaaccctcactaacacaatcatattctagttttcacttctttggtgatcctctcttgcccttattcccttactaggtacattacctctaggattatctaaattgtagcacacactttgaaaatcaacatccccatataagaaaagaacatgatatttgtcttttgggggctgagttaccatactctgaatgatttttttcttttctttttcttttttttttttctctttgatttttttatagccccatttactcgagaacctcataatttcatttttaacaattgaatagtattccattgtataaatataccactatttcattatttattcatcagttgatgaacatataggctgtttccagtttctggcttccatgaatagtttactagtagagtcttgaatcttgaggtagatcaattcacaacttcctggggaaaccaccatactaatttcaacagtggctgtatcagttttcactctaatgagcaaagaataagtaattcccttcccaacatcctcatgaccatgtgctgttgttagttttatagatcctagccattatgaatggactagaagaaatttcaaagtagtattaatttgtacttctctgatgactaaggatgattgaacatttcaattttatgcagattgatagatatgaatctattttcatttttctatatgtagccatttagtttaacaagcataatttttgaaggtaccattttttcttcagattttttttaaatgaagtgtttctatgtgtgtgattttttttttcagtttgattacatttatcagggtgtttgtttttgtgtcagcaatatgttttttgcactgctatagttctgtgatacaacttgaaatctaggatggtg

SEQ ID NO: 19602 - DNA, 1179 bp, Mus musculus
agagaagtcaagagtgaaagccagctgcacaaagtgagttcaccctcctcctgaaagtcagtgaggcaggcgctccattcttgctcatagtcttgggtttctgtttcaatatgtgagttaaaaacatagtattctgagagttaaaattttggtgtttcgtcacacgaaactatactaaacagtaatctagtagttattaaacaattttttaatcaaaatgtttcaatgtttttttaatagattaaaaacaaaaaatcgagaaaaagaacttatgaaattggcccaacagtttgataaaaatatggaagaacttgatgtgatccaagagcaagatgggaagaatcatgattttatccagatgacttcaaaaatgggacatttagataaccataaagattctgtgcagaagccgtcaggtgatgtagttcctgaaatcacttgtactcctgtgaagaagcaaatgaaaggagacagtagaatatccttggcaaaggcacaagacagcagtcagaaaccctttgaccaaaatgttgaagcagcctttaatgctatatttgatggttccactcagatgtgtagtggacagctaagccaagatctgttagatgcttttttgaacaatagtaaaacttccttgagaaagaaaaatgccttactacaagaggaaataattactactgaaactttgctcactgaaaacctgctaaataaaactccaatatcactttcccctcaaatagatactaccgtaatactaaactcatgtgtgactccctgtcctaagacaccagcagcacctgatacacagcttgatgagttgaccgctaatgattttgaggatgattgggaaagcttactaggcagtgaacccttccttatggaaaatgctgaaatgcttgaattcgttccttctacaactgcccaagatacttgtcagaaggcaatttgtacctcagttggtgaaaatgatacaatcacatcaagaacaaatatgaatctaggtggaaggttaagagattcaaaagtaacactggatcttccctcaaagacacgaaacggagagctaagaaatgctggagaacataggttttcatcacatccaggtgatgaatcaaggaaggtaccattcacaggaaataaagtgagttttgagaaatctgtcactagcatagttagtaa

SEQ ID NO: 19603 - DNA, 1217 bp, Mus musculus
cccgcaaaacccatggtgagtcaaagaaaatggctcctcccccaaaggaggtggaagaagatagtgaagatgaagaaatgtcagaagatgaagatgacagcagtggagaagaggaggttgttatccttcagaaaaaaaaaaaaaaaaaaaaaaaagcaaagaggctaccacaacccgagcaaagaaggtggttgtttcacaaacaaaaacgggctgcagttcccacagcagctaagaaagcagctgtaaccccaggcgaaaaggcagcagccacacctgcaaagaaaaccgttacaccagccaaagtagttccaacacctggtaagaaggtagcttcacaagcaaacgcattgtaccaactcctggtaaacaaggagatgtcactccagccaagggagctaagaacggtaagaatgccaagaaggaagacagtgatgaggatgaagatgaatgatgaagatgatagcgatgaggaagaggatgaatttgagccaccggtagtaaacgaagtgaagtcagcaaaagcagctcctgctgctcctgcctcagaggacgaggatgaggaagatgatgacaacgatgaagaagaagatgatgatgaagaggaggaagatgactctgaggaagaagttatggagatcacaacagccaaaggaaagaaagctcctgcaaaatttgttcctgagaaagccaagagtgtggctgaggaggaggatgacaaggaagaagatgatgaggataaggaggaagaggaggaagaagaggagggaaaacctgttaaagcagcccctggaaaacgggaaaaggagatgatcaaacagaaagaagcccctgaagccaagaaacaggaagtagaaggctcagaaccaactacacctttcagtctgttcaatggaaaccttaatccaaacaagtctgttgctgaactaaaagttgccatcagagaaattttgctaaaattgaccttgctcttgtggatgtcagaactggcacaaataggaaatctcgttatgtggactttgagtctgctgaagactcaaaaggccttggagctcactggtttaaaagtgtgtggcaatgaaattaaactagaaaaaacaaaaggaagagatagtaagaaagttcgaactgcaagaacacttttagccaaaagcctctctttcaacctcaattgaggatgaattaaagaagtgtttgaagacgccatggagatcaga

SEQ ID NO: 19604 - DNA, 1212 bp, Mus musculus
gggtggaagcctgagcttactttaaggtcctcgttatcctgctaaaatggaatgcagggacctagcacaagtcctctctcttgaccccctctctttaaataccaatcagtgtctagaataccatactggtctgccttgggtcaaattcagtgatgtcaaccttgacatggcagagcctctgaatcaaccttagcaatcacccacttctgatcttagtaaggtagttgtagtctcccctcccccagcctgaaacctgcttgctcaggggtggagcttcctgctcattcgttctgccacgcccactgctggaacctgcggagccacacccgtgcacctttctactggaccagagattattcggcgggaatcgggtcccctcccccttccttcataactagtgtcgcaacaataaaatttgagccttgatcagagtaactgtcttggctacattttttcttccgccccgtctagattcctctcttacagctcgagcggccttctcagtcgaaccgttcacgttgcgagctgctggcggccgcaacattttggcgccagaactgggacttgaagaatggcagagagatgctaagaggaacgctgcattggagctccacaggaaaggatcttcgtatcagacatcggagcaacggacaggtacacatgctagcgctagcttaaaatttcagttttgtaaagtgttgctgaggatgcggtaggatacgaattaagcttgaatcagtgctaacccaacgctggttctgcttgggtcagcagcgtgttaatcggaactagaaacggaaacaggcaggttagccgcagctttttaggaagctgcttaggtggaagaagaaagggtttaaagtcatggatcaggcggtaggccgtagctctccgaagctacatgaggtgtgagaaaagaaagggtttattaaaaggaataggcgtattgccccagttaataaaaaatgcatcataagggaggaaaatgtcccaaaaagcagagagaaatatctctctgggccttatagcaggagtactctgttaccttttgtgtcttgtctaatgtccggtgcaccaatctgttctcgtgttcgattcatgtatgttcgtgtccagtctgtatgaatgaatgttctatgttttgtgttggataataaagatggtataaaaaactttatctgcaaagccgagagctgccacgtgtttcagcca

SEQ ID NO: 19605 - DNA, 1203 bp, Mus musculus
gaggggcacgctcagtaggcgggacaaagtgttttgtgagtgtgtttttttcctctctctctcctctctctcttttattttggtcgcaagtaggaagctttttgcactccaccacctctggccgctgggaagacgtcatcgcttccgccctacttcctcctcctgttggcggcgctgagaatccaatatggagtaaatcggtggagtggcgagatggggctcggacggggcgccctgcaccgcctcccaggcgcatctcccccggccgccgagcactacccggaaccctgattggcccggtccccgggggcgaccccggcccggccccagcgcagccgactgcccgcccgccgcccggagcgtgcttgtttttctgctgctctccccctccgggtccccttcccaaatctcgcctctgcaccccctcagagccccggggccgtgcccggccggcccacggcgtccgctgcctggtgtgccccttcccagacctcgccctgatctcggggctctccatttccccgcctgcctcggcgcccccttcatctctagctccccccctccaccaccaaatcaggagatgtcggagatgtgaagaaggggggcgagcgcacaggaagatgaagggagccaggctgcatgccgcgggacaggcgtctaggtgaacaagaaaatgaccgaagaaacacacccggacgagtaagttagccgcgggtgggacgcgggtgcccggaggggtggtgtgggggccgccgccaaggacgcaggaggggactcgtcggaggaacttggcctggggtgcagccgctggctgagctgtcggggctatgcgcgaggctcttgacttggctgggggagacggcagaaaccgcctggggtctgcaagtccaggtcgcagcccgggccaagggcgcgcaaatgacctcggggcggtcctcgggctgcgggagcggaagctctgacgccctccacgcggggcatcccggggtcgatgggtctgtgtgcatggtgactttgtgactcctggcactgctgccctcccatagccctctccggagccctctggggcccgggctccgccatttcgttttcttgaatcgctctcatttgcataccacattttcattcataaaaacacggaggagttgggggagggccagtcgggctcggcacagggtcagtgcgcccgggtcctcgcagcgg

SEQ ID NO: 19606 - DNA, 1174 bp, Mus musculus
acggaaagcctgctggccctgggcagcatgcaagctcagccctagaagaaatcacaggaaataattaaacagagaaggtcagagagagaggaagttcttgtgttgtttctgatgcggatagcattgttgttaacagggatcaagatgatggtgtttaaatcccctggcatgccactgcttggggctttgattgtatttaaattgcggctcttatagtttattcttttagacagcaatcttgttaggaaatgaattgcttttaggtcttatcaggaatccccgtgtgcctaagcagaaatcttaagtaagagttgcttatagcctagcatttaaatggggtgactgtcaagactattggaggttaattttaggtgtctgcagctctccctaacccttctgattaaacactttaacataatagtttccttaattggaataatgatggaatattagcatgcatattaaaccatttacctaagtctgaatagggttaaaatgtaaatgatctgtcacttgtcagttcttactctttgagataattcctggtgaggaatgagaagagactggaatatgaattggaggagggagggctgtacttgggcctggctgctggagatctaagaatagaccacaaggctaaaataagtgagagattctttgtctcccccccctgccccccacaaagaagcactaaaatactggtagctctcctgggaggaaggggacccagtgctttattagtctgtcacagttttcttcctgaggatcctgagtagggcctaaggtccattcccaggaagtctctttttaagactatttttaaagatttgtattttttttaactgtatatatgggtatgtgcctgggagtgtgggttcatggggaggccagaagaggagggtgtcagatccccttgagctggagatgtgagtagcctgacttgggtgctgggtaatgatcttggggcctctgtaagagcagctcttcctattaacggctctctccagctcttgcgggtcttgctacttagttttggttgtgtgtgggcatgtttgacccacagtgtgggtgtagaggtcagtggacagcttttcggagttgatctcttgtatgactatgcagggtccatcaatcagtcaaacccaggctgtgagaatttacccagggagccgtc

SEQ ID NO: 19607 - DNA, 1087 bp, Mus musculus
actggagttaaaaattgttgtgagctatcatgtgggtgctgggaactgaacctgggttccttgcaagagcatcaaagttctcttaacctctgagccatctgtggagccctgatttcttttcctttctgtgttttaacagttcacttcattgctcctgcccactctgagttgggcttcaagggggcctctgagttaccaagggcacctcgcacaaagggccagtcatttcacagaagccccagttctcaggcaggagtgctcctggtgggaggcagagggtggatcagccggaggacttgtggaggaactcagatgtagctgcttaaattagttcaaagtgagaaatgtaattactatgcttgctcaaaccaaatgtctgaacattgttatacaatgaggtgtaatcacagaaaaggaggttgcatacgcagcctcagcactcccacaaaatagcctttgtgttcccgcagccccggagctgattaatcttctgggggtgttgaatcccattaagttcaggtgtgtgtgctggacttaattggcggagtttggacactcatttacagtttctttgcatttgtagcaagtatctgaagaaagaaggaagcagtgttcagcgtcttagctaagagtaaaagatccccgaggagaagcaagaggtgactcgccactgaccccgttgtctgctgtgaaaggcggcctttttgaaggacattggctgtgattctctccatcaagctggaaaatagcgtgagagggcagttggggttctgattccaccatttgttagtcatgtgacccaggacagttaggcaggctatgagccttctgaaaaaatggactgatgtgtatgtgactgtgtgatttatgtaccgttggcacacaaggggatattagcaagctgtcttttagcataaccacattcacgaagatgtgtaacagcagacagacataccaggtgtggagacaagaggggagtgtggtgggaagccggagcctggagccatgtgaggctggtcctcgaatgggcggctgtggcctgcaggagaaagagaggcagatctgtttatattggagcaagtggtgc

SEQ ID NO: 19608 - DNA, 1153 bp, Mus musculus
tgtcaaaccaaggtgttctcattcaaaacaaggagagagaagtcacgtctttttttcctctttcagttttctgagggctgtgactaaaacatcctggcctgaacagtttcttgcattcttacttaaaagaagactctggcgcacagcagacctcttctagctatctttagtgggctgtggggtgtatgtgactaggaattcagctgtgcttactaccacggctgcatagcatacacgcttgggtaggactttagaatagcctcctggggctcggagatctaatttttcaagtacatggtatgtaagagtctctcctcaggtccgtgcgcctccaggacttcttgcaccagaggcctggaacttctttgtttaaaagccaccaccctcggccctggaaagacagccgtgccttgcttggagcagacagaaggctgacttcctttcagtcttgtgtagtttggccttagcgtgcctttggattctttacttctcgagtgtggccctgcacagatccatctctgtctggagactcagctgtgtggtagaactgcctcttccgtgtttaaaacttggagctgccttttgcctttgctcagaaagttgtgttttttcctcagctaatgttttttagggtttctgtcatttacgggcccatacggagctcaaagctgcatccgattcgggaatgtccacagccggcggcagccaggtatacagacccgtgcgccaaagtttgtcttttagataagaatgcaagaactgttctggcaatacaagtttagtcaaagaaagccctagggaaagtgaaagaagaaaaagatgtgactttcctctccctgttttgaacagaaacactaagatgtgaggagggccagcgggtccgggagctacagtgtctctaggcctctaggcgtttcttggcagggaggaggttagttaggtgggtagaattctgggaactcctggtggagaaaggggcgcctccctcatcttaaaggacagcaggtttgggtgtatgggtatagcatacacacccatgtgggccagggggagaaacaggagtattcacactgcatgttttgtgtgtgcctgtcacttgcccgaggacttgatcacatcatcccattcaatcctcttagtaacttttttccta

SEQ ID NO: 19609 - DNA, 1183 bp, Mus musculus
taaataggattcttagcttcataaaacgttaaagcttggtcaatgattgtaaactaggtttgaaagatttaagttgtaacatccttttaagtaatgggcttgactttccgactccagtgtcagattgtagagatgaatttattcgttcagttaatacctaacacccagaagctggagaatgtcaagcctgtgtatacattcaaaggctcacaaataaaaaaatgtatctttttgaagatggacttgtatactgcattacatgtttttcctaatgtcagggtgggctcccagtccgggttattgtcaggtctatttctgcagacaagtcaaaagaagtgtcagctggtggctgtcttgccctgggacacacgttctgcagctgctagaccgttgtcatgccctttcttgtcgttttagtgacagctatattgtgcgtgtcaaggctgtggttatgaccagagatgactccagcgggggatggttcccacaggaaggaggcgggatcagtcgcgtcggcgtgtgtaaggtcatgcaccctgaaggcaacggacgaagcggctttctcatccatggcgagcgacagaaagacaaactggtaatgacaagcacacatcgtggtggttaaaatagtgacgactgattctgtacataagctacagcccgcttccctttccagtacagtcgcttggcatgcaccttagagagtgcatgtggaccagggtatttgaccatcttgcttgtgtctctgattaatcaaggttataacaggtatttaaagcaaaagtatgttctttattattacaagtcatataatgacaaactgtagagtcagggttttccttgtgagatttggatggtagaagaaaacaagtgagagagcatcgtcacctaaccttggttccttctaaataaacgtttgtctgcaagatgctggggctgggaggtggcccagagcataagagtgttcgatgtgcaaacatgaagaactgagtcagatcccagtacccacataagagcatggtggctgtggccttttaaccccagcactgtgattgacaggagcgtccctggggcttaacaacccaccttagctccaggttcagtgagacactctgaggagaaaggtgaagggggtgataaagcagggtacttgatgtcgccctctgatctccactcacagaag

SEQ ID NO: 19610 - DNA, 1141 bp, Mus musculus
agtcattcctcagactcagttgttaggaacatggagttgtgctgacaatcctaatgttcagttagtaataataccaccagaggagagctgcagggactaaacactttgcaagacacagggaatgggcttggtgactaatggtgcaggggacagagaagcaggaggcgaatataaccacaggagttctgagccagggagaatgagcagacaagggctggtgttgccagataggagaaaatcgggagagatgaactcttcccggcttgttgtattgattgacgcggggagacagacacccatggggacagacctcccagcactgtgggggcaggaggaagaggagtggtgtccctggggatgagtccaggtggagaggtgcacacatggagaccagggtctgttgccatcagtgttggttccccattgggttcacaaccggcaccattacagctgtcacatgagtaaccagcctgtgtttcaatcctttaggtggtattggaatgctatgtcagaaaggacttggtctacaccaaagccaatccgacgtttcatcattggaaggttgataacaggaagtttggacttactttccaaagtcctgcagatgcacgagcctttgacaggggcgtgagaaaagccattgaagaccttatagaaggtactgaatttgctgtcacttagtgggactgtggattgttccagattactttccattcaacagtctgccatcttgtatctgtggcttgtttgaaggagggtttggggtcattagaaggtcatcagatgacaacactttccaagcgcaccaagtgagcagttgtggggtagcctcgctggctgagagtgtactaagcagctctgggtctccacatggatgggcttcacccatttcacctgtggcgtggaacacagggctatagctgctttgggatatttactgtgtcatgtaagtagctagtctgtaacatgaagggctccattagaagaatgttatccagagctggataaagtactgggtgttaaggcacacatctttagttccagctttcagtgagcagagacaggaaaatctatcgcttgagtttgaggccagtctagtatacatagtaagttccagggcagccagggctacatagagaaa

SEQ ID NO: 19611 - DNA, 1736 bp, Mus musculus
gaccagggcttgcaaggcgatttgggtttctgtgagcttgcccagttgacccgaaaaataggactttttagaattgcattgccacttctaaaatcctagcaatacttagaataacacatcagtgagataaattttactcaattattttacaaaccaaattgagttattcaaacacaagccagtattctgtgaacaagttccagatgaaaaacacagaagttgtgaatgaagttgtagccattccctgccctgcactatatttttcagggtgcattttaaatactattgattcaaacagtggtggcttgcgtttttttaggtatatatttttggttagttttttggggggggttgttttgtttttttaatttgaggctcaattcttcatttatacttgaaaaaaacaaggccatatgtaaagaaaaaaaaaaaccctctttcaatgcctaagtgtcttcttctatcactccacacccacagttgccacttggggtgcacagataagggtaggtcaccaactgattatgcctgtctctgagccatgcaagaggctcctaatgtgctgggggggggagcacatatgcatatatatatatgagaatagccaacttctacagaaaaaagacaagtggaagtggtttaccaatacctagcatggtacaatcagagctccgtggggactgtagggagcagggtgttactactggccgttcttcccacagtgattaacggtagagatcaagctcagtcccctttatccccccccccccccaagctcagtcccctttagtccttcttcccctcccccctcccccattgcacacagacatccgtctttaaaggaaaaggccttttttccagtcaatcagtcagtcagtcagtcagtcagtcatactgggagaagctagccttgcatccctagcactgtctcttcctggcagtgctttctgctcgcccgacagacagcctgtcgtgtctctttggacagacggaccatcagtgtagataatcagcatgcttgtgcattacgtggaggttggaggtgtcatctttgttgggatgactgattggggctatctgttgtcaacaagcgtcgtctccaccattgtggatggagggggtctctgtgctaggagactctatagactgcctccagccgccctccagtgctgtggagagactgtccccagcctgagggactctcctcgggccctcgcctctctaccaagcacaacactaatcctgtttccttaaacctccgttcaagtgcccctatttatttcagtgagaatgcgtgtccggttgcctctgtccctgtttgtgcgtccttcctcccagccggttcccaccctcctaagggttatgccagtggatctcacgcctctgtgcatcacctatctttggtttgtgaaggcagcagttaagggcacaaagacagccatggggacatttatgtaaatatgtttaattgccacactgcagctgaacggtgtgtagtattttcccagtcagctttgccatactgacgtcaatcatttgagagaaattattcagattttatttttatatccatggtaacagaacctaaccaaaaggtttcccgttcagaagtttccttagctctcgtcccaagctattcgctcacattaacaagtcaaagtgcctgaagcataactcatttacctgtatactaaaacccctgttgtactgatttttttttataataagccttttta

SEQ ID NO: 19612 - DNA, 2686 bp, Mus musculus
cctttttaaaaaaatttttctttattgccaatctttgaagtcattcaacccaggactgaaagaggctctctgtcccttttgacagaaaggtcaagtttttctctgtcttggggaagcattgctaaattcttgttaatatgggtaaatctggttgtttaaggctaccaaatctttgcagacattaccagggcaaggggttgctgctgctctgtttctttctttgtaggcatttagaactgcttgtaggcttccaatttttgctttcttgctctaatgctgctagctttagttttagcacagtaggtggtatgtctttattagcataagaaaaactttcacaggagcttttacatatgctgggtgggggtggtaaggggtgggtgggcagcccgagcgggagggcctttcctctgtagtgttagctttcagcaggtcactgctgctacttttgaagtcccctgaagtgtctcctagtaacatcttagggaaatattaagctcacaactaaggtgtttgggctagagttttatgtgatggaacaaatgggtgacctttctgttgtggcttttgaggtcttctgctctgggtacaaaagatgcatgaacctcatttacaatactctgacttggtagttttcttctttccgtctgcctggaactgttcccatatgacaggaaaaaagcaagcccagtgttttattaccatctgtcagctgggagtatatttcctatactctatcagtgaaaaagtaacattttaaaggaaatgctttttctaggtcaaattacagatagaaaattgctcaagggccagcattttctaatgctgttgtttttcctggaagcactaaggaaatgaaccaaccaagttccactcttgaaagttgtacttttatgttcctgatcagtgcttctcgacaagagctactgtacagagaagtaattcatggctgtgggttaattataattgttgtagtaacattcacattgggacttggtgccagttgttttgttttgttttttcatgagacttgggactaaaattttagcaacaacaaccacaatagaaaatttaccagtagtcaaccatgtctgtacagttatggaggctacttcccagccctctttggttcttgcaggaagagtgtttgcaggcctgtcctgttggtattgtttgtcagctcagaaagaatcaggtggtacccaagtgcggggtcttcctaacgttgaaaaatgaaacgagaagctgtatcacagaaaatacaaaatgatgattctgagagaaatattttccttcatttcaaatgttctttactaatgatgaatttgaaagaatggcttttttccttttttcttttttttttcttttttttttttttggatgcttaaaatcagaatttttaatggattttttaagataactttaattagtttatatgaaatcagcagcaaaaggaagtttgtcttaataatgcagcttctgtgatgttaagtatttttgcctgttttacctcaatttgaacaaataggagaagtctgtgtgcatgctggacatgctcagtacacacgacagcccgccggtgcagtgcggtgtcagctgctcggtgttgggtgcgtgactcagtcacagtggaatccctaagcgttcctaaatcatgttgtcaaattctccagtctcgggagttctgggcccattacctgctgtgcataggactggtaccaaggactattgagtgtagacaaacgatcaactcttggctttgaccatggctttaaacaaaggggtgaaaacaagaaagaataggatggaatctggaataaaacagtgaaagagcattgttctttgtaccttgaatgtagaatttgtttttatttcataattctgctagcaaacatgactgttaaaatgatgtatttatatatgtaataatttagaaattccattttatagtttcctatcctaaggtgaaataatgaatttagtaatttgggagttcggacatactgtattctattggaggtgccaggtttgagtccttcaaaaataaaaaaaatttaaaaaatctgttttttaaaagatctgatttttagctctttgaaacccatcgtcacttagatttccaatgctaattaaaattcttttatttttaaattaaaatcaccaatgccttgagggtcttcttagaaaatatggtattggatattaactttcatagttctgagcactattagtatctatctgacaagtattgggaagatcaatggaaagctaaatattctaaatttaacacaaatatacttctttttaattaagaaaataaataagatttttcaacataatttgaattttgtctttttcttttagtagtttttctctttaattttgatatttttatttgtactttcagttttgctctgcaagatgtgttttgaacccagttagttcaaggtcattcaaggttcttttgctgttgtttatcttatgtggagtagacagaagaaacaggtgtcatagccaggttgatctggaactgtagctgtgtagccaaggaggacttgaactcctgattctcctgcctctgccttccaaaatgctggggtgaggtgtgcacaccagtgccgagctctggtttagtgtttgttgtgacaaaactatttctactgaggtttacttactattataacct

SEQ ID NO: 19613 - DNA, 1187 bp, Mus musculus
agtcaaatacaaagaaagaaagtcttcagggagcaaatgctgcctgccatctgtgattagaaattaagtgctgaagttgagcctaggggcacacaccgttagtcccagtgctcagaggcagaggaagaggcagaggcagaagcaggaagatctctgtgaatatgaggccagtctggtctatatagcaagttccaggatagccaggaatacataaaaagacctgtcttgagaaaaacaaaacgagaagaaatgggggctggagagaaggctcagcagttaggagcattgaatgctcttccagaggacctgcgttcaattcccagcacctacatggcagcccacaactgtctgtaactccagttcagttccagggtatccgtggcacaggacatgcctctagtgcacacctatatgcatggaagcaaaatacccatactcataaaataaaataaatctttaagaaaacaaggaaaggaaatgctggctctaagcctcactagccacctttttgtgggtggcatctctactacatttgaaacgttctcgctttgattttctgaattaactcagaaccttctggttcttgtgcaggtttactgactggtgtagtagtggactctggagatggcgtcactcacatttgcccagtatatgaaggcttttctctccctcaccttacaaggaggctggatattgctgggagggatattaccaggtatcttatcaaggtaagtgagaggaaaatataataaaaggtagtcttttttttttttttttttttttttaagtttgtttattgacttatacaaagacagaggctagagagctggctcggtgatcaggcgcacatactgccttgcagagaaacatcttggttcccatcttggcccgctcaccattgcctgtaactctggttcccatgaagtctaatgccttcttctggacctctcaggcacatatccacacaaagacacacaatacacataatttaaaatgataaaataacttagaaaactcactatacaagagttgtagcctcaccccaggatagcattattggctttgctattggttcccgggattgagtttaggttgtcgggcatagacagcaagtgcctttgaccttccgagccattttatcctctaggagattaacttttgttcagtggaactcgttctcatagatt

SEQ ID NO: 19614 - DNA, 1240 bp, Mus musculus
atatgggttttatttgtgctaatgctcttcttttggaaacatgtattaaaggtaaggtcaatttattgatttaaacacatagtatataaaatattgatttaactctgtaagctggtcttgaaagaaaagatttttaacttttaagtaaaaaaacttgatctgcaagttccagaaagtttaaaattgaatcattcctgagttttctgagctgcaggaatatcattttctaaaacttctttatgtaaagttttaaagctttgatatctcatcttgtaggaccttatggttggtgatgaggcaagtgagctgcgttccatgttggaagtgaactaccccatggagaatggcatcgtgcggaattgggatgacatgaagcacctgtgggactacacatttggaccagagaaactcaatatagacaccagaaactgcaagattttacttacagaacctcccatgaatccaaccaaaaacagagagaagattgtagaggtaagttttgattggctagcataatatccatgtgtatctctgaaagaatgttaaatcggttttttttcttcttgctgcttctgctgcaaaggataagtaaaacaactgttttgccctagatcccgattattttgcatgtactcatctgaaatctgaagaccatgttagcgatgcacatgaaactgaattttggagcattgtagattttggagttttggagtaagggaactcaactggtaaatgtaaatgggcaaatattacaaaatctaaaagcagaagtctctctctggcccccagcattttggataagggacagtgaacatgtatgtgctagtagatgagactgctcttctctccctaagttaggtgattgagttaagtagtttattagaaagcagttgatctagtggaaaaatagtgaagttaggagagtgagaagttgtggtgataagcctttcattgtgacagtgctgtttaataaagacaagctaaggaagctgctgggtagcagggaaagggcatcccaaggcagagagaagagctagcttggcatctgtatacttgagagcaggcaagcggctgctatggctggagggcctaggaaggggatggctgaagaaacaagctagagtaagtagtagtaccttgctggtttctgtaggagctggcctggggcagtgcgggcaggagggggctgctgtagctaaggtttagagtttgccgtgagtatgccacagagagacagcag

SEQ ID NO: 19615 - DNA, 1117 bp, Mus musculus
tcttgcctgagcagagctcgtcaagctgtctccacccctcctcactgtcccaggcttcctgggagccccctccccctctgctgcggcaccgccctccgccgagttccttcctcctcccctcccgatggggcaccgactcgccctgctgccacgtctcactgatgacatcaacacagcccggtcggccttagccaatccgctagggggagtccgagcgaagtcctagccagcaggccagcggggaggggagcaggaagggcggggtgtgggggtgagggaatcgggacggggcgggctacaagctcgaaagtgcgcatgcgttcagggcgcggggcctagtgggaagctgagtgcagacagccctcggcccggtcgggctgcccagcgcgcggtgtgctcatgactctctttcccagcgtgccccgcgacgctgccgccctctgggccgcgccaggccccttggcctaggcttccccagttcctggttcgccggcggccattttgggtggaagcgatcactgagtggcggcggctgctgattgtgttctaagggtcggagtggggtcgacgtttgctctaccggaacagcttagctcattcctccctttccattacctgtggcgcggagagttggggcggcggctgcgtcagcaagggcggtggtggcggcggcggcggcggcagctgcagtgacatgtccagcatgaatcccgaatagtgagtgcaggagagccggggcgggccggggtgagagcggccggccgggggtgagggccgccgggaggttcgctgcgcagcgccgggaaggtcggccgggcgaaggagacggagcagcctgagggccccattgtctgaaggccgagggccgcagcgcagcggggaggggtcgggcctgcgggccgggtcccgaccgcagccggcggggagctaggtgccgcggctgggcgttggggagagggcctcggacagtagccaggaggggcgcgtctctggaggcagtgacggctggaggaggacttggttttaaggggaggtaggtgggagagctctgctagagggcactgtcagaccctgcgccggctctgcggagctgtcagcgtcggctttacttgtaaat

SEQ ID NO: 19616 - DNA, 2739 bp, Mus musculus
cagtgaaaatgtcaacaagttgttggtagggaacaaatgtgacctgaccacaaagaaagtagtagactacacaacagcaaaggtatgtatgaggtttgactttgacactgaatttaattatggggactgcctcaccctgtaaaagccagtgagcttagtcccccattcccatttcagaagactaagtcagaaggattttccattgttcactgtgccttattattctctcaggaatttgcagattcccttggaattccatttttggaaaccagtgctaagaacgcaacgaatgtagaacagtctttcatgacgatggcagctgagattaaaaagcgaatgggtcctggagctacagctggtggtgccgagaagtccaatgttaaaatccagagcactccagtcaagcagtcaggtggaggctgctgctaaaatctgcctccgtccttttctcacagcaatgaattcgcaatctgaacccaagtgaaaaaacaaaattgcctgaattgtactgtatgtagctgcactacaacagattcttaccgtttccacaaggtcagagattgtaaatggtcaatactgacttttttttttattcccttgactcaagaccgctaacttcattttcagaactgttttaaacctttgtgtgctggtttataaaataatgtgtgtaatccttgttgctttcctgataccagatcgtttcccgtggttggttagaatatattttgttttgatgtttatattggcatgtttagatgttgggtttagtcttctgaagatgaagttcagccattttgtatcacacagcacaaccagtgtctgtcagtttccacgcataaagtttagtgagacgttatatgtaagatctgatttgctagttcttcctggtagagttataaatggaaagattacactatctgattaatagtttcttcatactctgcatataatttgtggctgcagaatattgtaatttgttgcacactatgtaacaaaactgaagatatgtttaataaatattgtacttattggaagtaatatcaaactgtatggtgataagtattgttttaattcctatgattaaagggaaatagagctttgcattctactcagcagccacgtgtgtgcagcaagggcactgtagacctatcttaatagcacagcatccagggtttgctttctagtaataggtctgatgagtgacctagagaagcttttgtgctgtgtagagacttcaccaccttcattggttcaaggaactcaaactctagtgcttcatctccagcccaggccacctgaagtggcttcaccagcaacccttttttccctcatctgtggtagagatggagagcagcccatgcttcctcccaggcagtgatctggtaatagtgctggtgtttcttcatgctcagtctgatggcgcacacacctttttctttcttttttctttttggctattggagatagggtttctctgtgtatccctggctgtcctggaactctctctgtagaccaggctggcctcgaactcagggatccacctagctctgtctctgagtgctgagactgaaggtgtgcgccgccacgcctggcttttttcccctttcttttttgagacagggtcttactatgtagccctggctagcctggaacttaagtatgtacaacaggctgcctccccctcccccattcacctgccttttcctcaaaagtgctgggattaaatgatgtcccagactgcacctattttttgagacaatgtctcatatagctcaagaggcctcaaattcacttgtaaccaaggatgcccttgaactcctgatcctcctgcctccacttccaggtgtcaactttattctttccaattgtatgaatcatgttggtggagagtttaagcattagaatagaaagcaggaaatgtgattgccctaattgtagaaattctatctccccccccccccaaattaaatgaaaacatgaacgctagatgggaatgatgggagaaataatatatttatttcggtgaaattttgcatgtgtgaaagtttgttaactaggatcttcgaaatcctagactttgcttttgtcttactgtgggaaacaaagtctcttgcagacactagcattttaaggtgacaaaggtcagagattgtttcctttggtttaaggagcagccaagcattcttcaattgggggctagggtagggtatggctgttgataacacattttatcatggggtctttaatgataaaatattaaactaaaaataagccagaaattacaggtttatttttcactaaacagacaattgaaatacatggtacaaaaataagtggtaagattattgtaaattgaaaaatggacagaataaatattcaatttaattttccatctatgagaatttcacaataaaatcatagtttactttgtattatagatgcgcttgttgggtctattcatccttatatataaaaaggtaactggaaactcctcaagtcaccaggaattgggtcaatatcttttatttttttgtagctgttggttttttgtcaatataaagggagaaagagttcataaactgttttctatcataactaaatgatacaacaccaatataggatgaaatggtgccaagcactttaattttacacagcaaaagttgttcaaactgtcagcttattctgttagcagaaaacattacatgaatttatttttaatataaacatatttacaga

SEQ ID NO: 19617 - DNA, 2025 bp, Mus musculus
acttaggattctcaggcatacagggggatgggatctaagagagaaaatgttagtggccaaaactgtagagtgaaatgctcacccttagtaagtcgggagaacctctacagagtcctaggagttgccacctatagtggtcagtctccacttcaaccatgtcaagaatgctcaggagctggcctgccatgcttctgaactgcatgcttgtgctaacctctggggatctcaggccacagttctcttccccttggaagactagtcagaggactgggccgggtagagacagccacatggtctgtgcgtacgtaaattaaagcagccattggtgatgaaaagcggggagtctttgtagtttgggagtgaacaggaagttgtgccttgtcaggaagaaaagaattctatggacctatcataggtccatatgttcaaagcatcagttacagctttccaagcaaagtgtttgtatgttggctaccacaaattccacaaagtatcaaaggtgggcttttcaggtttaaaaaaaaaatagctatttagataagcatgtacatgactttaatcctagtacttaaaagtagctctgtgagtttgaggacagtctggcttgtttattagagtccaggctgccagggctttataaagaagaagaagaagaagaaggaaaaaaagattcttcagtaagtatgcataaaatacagtatttttacatgcctgatgctacacagcatgatttaccataatgcttatgggcatgatccatattaagagttttgttgttactggtttgtttttgggtttttgagacaaggtttctctgtgtaacagaaccctggctgtaccgggactccctctgtagactaggctggcctcaaactcaagagagatcctgtgcctccccaagtgttgggattaaagtcatgcaccagctcacattagttttattctgccatctctaagttaaacttatttcttatactgtacatggtacataaagtgctttcaagaggctaaaacaaaacttttctagcaaataatttaagttaaatgtaaaatatcctataaaacctagaattggtcaaaagcacatcttacctctcatgtggatttaaactgccttcccaccaatatgttaaaggagccctcaggtattaaagccatttgtcaagcatgaaagtcaggagactcatagagctagccagctgctccaactgaatgcaaaatggggcactcctcttcttttgctgtataattacaattgattcaactgacagtgagcatggtttcccaacacaatactggcccgaacatgctctatgcttctgctcatcctctttgtaacaagaagatagactttttgtaactaaagggtgtaactctgaccttggctgtgaatgccatttaggaatatcaatacaactgttgttttatcttctggtgtgtgttatgtttgagctaaaatgtctcagccttggatgtcactaccatttgcatctgtaaatgtggccaggctagactcaaatagcctttttagaatttataaatggtcccttaaagttcagagttcacagtaaagtagcatcttgagacagggttgttacaggtctacagtgaagctctagcacaaaacaagataattcaaacagctttgaaacttaaaatgacatcgtggtacaagatgtggccaaatatgagcctgagggaactgtccgaaagagcactggaccttaggggagccgtggccaactgagagagtgcttttcattatgcacgtttctctatggcagtcatttttaaaatatatcaagggacagttttctattatgtgaacatattagagcccccaagagtcttgaaatatttatacttgaaaaatgggttatttcccactctaaaacagcaattatcagcacatacatgaaaccaaatagtgaagcatgctgaaatagtctggtaagccctaatcttgctgccagtggggaaagagcactagaattttagtctgtaaatatgtttatattaaaaata

SEQ ID NO: 19618 - DNA, 2701 bp, Mus musculus
ggaactataactgtttgctcaggacaggaggctgacagtgaagacttccaggctacgcttgatccatctcaggtgttgggcctcagccagcaaccacacacctcaggtctccctctcccgccacagtggaagtccacggtgagcccaggtgctcctcagctttctagcagaagcatctctgcctcctcggtgggcagcagtcttcaggatcaccaagagaaggcaggacctcagagggcctcttttgccaatgtctcctctcccgagttgactgtaccccaggcagcccactctgtggtgggggcagggcctccgctccaggggtcagcacagcctctgacctctggcagtgatgctacaggcctgggtaagagacacctctcctttcaggcagaatactgggcctgtgcgctgccaaattctctgcctccttcccctaaccgccactccgcactctgggacccaaataaagagtatgaagatctgcttgactacacttacccactgaggcctgggcctcagctcccaaagcaacctgaaagtcatgtcctgactgagcctgttctgcaggactcaggtgtagatctggacagtttgtctgtctccccagcaagtactctaaagtcacccactaatgtctcccacaattgctcatcagcagaagtgcctactctgccattttctggagccagagagtcatgtcttaagcgctggcccttgggaatattccagaaacagggtggcacaagcttgtcatcctggaaccagcttgcatcaacccctagagccccaggcactgaagatgcttcttgggagaacagagaggcagccctgaggggcacagcggaggactgcctccctataggtgaggacctccgaatgggctctccccagctgaagacgaaggagaaagagccaccctttcccagacagaagagaggcaggcagcatgttagctgcccggcctgtgtgacgcctggatggccatcagaagaggaggtgggaagtgatgaggagtaccttgctctgcccaccaggctgactcaggtctctagtttggtgtcctactcaggtgccaggccctcctttgtgaacctacacactggggctgctgaggaacacagttcactacaagtctcagacagtgacaagccagcctcccccacattggactccagccacaggaagcatccttctggaacttcctttcaagggcctgtgggccagaacccctgcttcaggcattctatccagccccaggactctagaggcaaaagtagtctgatgagtaaccagaccctcggggtctcttcaaaaccactgaaaactcagcccgcctcaaaagccatgacggacaggcggctgttctccgagctagtagctggagagacacttcccaggacgacagatgagcaggagaaagcttctctagtgcagtgtgtgcaggtaaaaatgttcacggagaatcttctggaaggagtgatgtttccccagcccaccaacagcatgtctcggcaccctcaacatatatgaccccaaattagaggtatcgttctcctttagtgattgcaagaaaatggcagagaaatcaggtaacgcagcagcagtgttccgtgtgctttggtagaggctgatccacagttttactagtttactcactcatcctgcatctgcttttctgcagagaaagtttagtggtcggtaacggcccttgttccttagttccactctcaccttcagggctctgcattctgagcctagttctgatatcacatctggctgaggcacagccagttatggcattcattatcctggcagaggaaaacctggagtcttgggatagaggtggagacaaatgaccatctgaaagaaaactctagaaaatttgtatgccaaaatgctggtaattttagccttcggacaagttaaatagcagctcagtcagatgtgccatgtagacttctcttgttgtactgagccctgaacatgcctgaagtaggcagacttcatcactgagctcagtccagcccaccaattgttcttgtctccacagacattttgctgtcggctggaagagctgatctgctggttgtataatgtcacagatgttgctgacctcagtgctccacccaggaccagccttacaggtctcaagtcttctctgcagctttacagggtaatatgtagtcctggcttgtttatccacggggatgggagttaagtcacttttacaaaataaaatctcaagtaactggagtcttgtagctcagttgactattttatctgataaatcgaattaagatgtccttttcaaattctcagtgttgaacactataaaatgtactaagtgaggtaagaggataattacatacattggagccagaatgctttagaggagtttgcatgggattctggcagatccctcagggctagaatcctgggctttgatttacagacactaatcaagtatgacaattagttagggtgagcaccacagctatgcagtggccaccacaccaggcagtgcagacacagaacgtgccagcctcaccgcaagttcttttggactgtgttggtgtttatggggttgagctgaaactactgggatccaggcacagacaaggtgatgtgagactttgggttttatttctgcctttttgttactacggtctgttatttcacacctgtgaattttagttaa

SEQ ID NO: 19619 - DNA, 1195 bp, Mus musculus
agataggtctaagcctcccctcagaggcccgcttccttctgccagtgtgggcactggagaggttttacactctatgggcagccaagtaagtatggtgggagctgaggtgggggtgtcctttccttgactgttaacctctgtcctggccactgtaaggtgggagctgtgggatccaggtatgggctgttatacaggttctcttggagagctgaaccttcccaaagagtcactgaggacctcttaaggacagtgacaagttcaccaggaacctactgtggatcaggggtctcgttacaagggaacccccccacccccttcctggttctgatttagtgatctgaaagcttctaggggaccctgggaagacttggtagagggctgtgggttcccagaccaaatcctcttggactggtcagaacctgacgctcctttcgtgcgcagctgtctctgctctccatgactggaggacaaggcagcgccctctctagtgagccatgtgggccagggaatcccccatgttctaaggccagtgcaaggctctggatcttttaagcccttgtagtgggagagactgctcctcctggctctggcaaccgattatattcagcctacctcagcgcaggaacagctttgatctgagcattgtggcccttggctctgtctttggagccccgtcctgtgagaagaatagtaccttacggaaggcggtagaaacagtgcattaacatcaggtcagtctggtcctaaggcctcatgttagttaccctgtctccttctgtggtgagttactcactaaagatgaaggtccagagtgaagagggactccttttgccagagtatactgaggcatgaactgaagagggcacacccaccctacccccacggttagtggtgatggagagatctttcacttgccacgacccatagtcaaagaggtggcagaactgtctttgagttctcctctcacaaagtgactaagtaacttaggaaaaggtggttagggcttcattacaggagatttccgaaataggatgagtctcggtactaagcactagcagcgggcaccctgaaatcccctgaacgctctgctcgtcttccttttcttagtataccaagcagtcggtttaaccgtaggatccttagaccaacttcgttttcattgataatcttccctattccccccccccccccagtc

SEQ ID NO: 19620 - DNA, 2229 bp, Mus musculus
gtgctgtgattgggctgggtctgggccagcctgccagtaccagcaacccaccctggtagcctgccccattgatgtgggcatggccctcatacacttttcatctcccaaggaatgctttgcccaatcaccagtttgagagtggcctctcagcactggcatgaatgcctcctgagctagaacactctgccgtttgtcttgatccatgtctccatggagctctggatacaccttgagtctataccccttgagctgccaggcctgagggattccaagttcatggaggcctggggaccaaggttggggggcgatgcagatggattcttcactttcccctgggagcgttgcatctggtgctttctgggccaaccagaagggttgatagttgtctgtcacgttgtctctgcagcagcagacactgaagagcttcccagagtcttagactgagctggaatctgctgggctgccgctgggttaaaggattatgctccacttgtgtgggaggcttctaaggggccagaggtaaaacaggtttagagagaccccctgtgacggttagcacagctaggggctcagtttgagtaaaccataaactctgaggtcaggaacagactggggagcaccctaaagaagatgagacagaattgttcccactctagactgaggctcctgccaacttcccctccatttccatttggacttagccgcagaccataggacctcctcctctgggaagggtgatgtggtcactgcactgtggacttgtattggttggtcagtctattactacagtttgactaggtccttcctaaaatgctgctgagctacaaagtcatatactcccccaataaactcacgcgctggcgcagctctgccccaggcccctgtctggtttccacagtatactactcgcttgtgtgagacctatggttagtcctgggtctgatgtaacttgcctcttgcctacttcactggaatctgataaggccaaggatacgtctgtggaaattatcgttttgctccttggaagtcaagttctaacacccgtaagtgcccagcttatctgagagacagcttttttcgtgaagggtgcctactggcgtgagcaactctcctgaactgttaccctcacacttccgaagctaagctctgaagagttgtgaagacattcaacgcagccttttcttaatgagctacccaacttctaccacattcctgggtacccaactgtgttgttactctgaacccacagtttctgccaataccaccctaacaggagattaagtccctaagtcattggcttcatgctttcgaaaccttgctttctctgctgtgttgtcaccagacccacacatacttgggacagagtccgttttaaaatggggcctgtgcctgagtgaaggggtgggcaaggagcagagcccacagccagggtaaaggacagctctctgaaccagctgtgccactgcactctcctgtggggccaggaactaagcggagagcggtaaaccttattcccagcactgttttttaaaggggaatcaatcacattgtttgattatgagtgagcatttggtattttttcagtttcagtgtatcttttcctctgtatttacatatactttatgtatcaagtgtgtgtgtgtatgtgtgtgcttttagctccaagcaaacctgagtttggataaaggggaactaaactacaaattatgtctatggtatcctgatattcccatttctacagaatcttattatgtaggaactggagctggacagtgaaaccccctggctggcactcaggtctcagcctggacccacagtaacaaatgctgctgtggacagagggagatgtttctgtgtgacatgcgtgggatctccctcttggaggccaaaagagaaggtggccccgcacttccctgagttctggctctcagagaagttgatggagtttcggaacagggaagacaccaccacaactgactgaaatatctcctggctatttttctaacatgttcatgtattgatgttttgtgtatgtgtgacatttgccttaaaacgtagcacagccatcaagcctgagtaacgtgtttttcctggcacctgcctgtctttgagtcctgtcttgtatttgatggagctgttgcgcttttaggggttgaccgagggtgtctgagtacagtcttcctttcccttccagccagcgtgagaccctggggtgagaagggcggttcc

SEQ ID NO: 19621 - DNA, 1193 bp, Mus musculus
cttctccttcttcttcttcttctctcctcctcctcctcctcctcctcctaagaatttgctttatatgtatgagtgttttgcctgaatgtgtgtatgtgtagtatgtatacacctggtgcctgtggggttcagcagaaggcatcagatcttctgaaccggagttacaggtgtttgtaagccaccatgtaggtgctggaatctacaaaagcaataagtactcttaaccaaagagtcatctctccagcctctatattgctgcttttgcagaggacttaggttctattcccagtacatacgtgataactcacaactctagcccagggaatctgacattttccttgggtctccaggggcaccaggcacactggcagtctacatacacacatactcacatataggcataaaagaaacttttgttttgaagggcttttctattcttattttatgtctgtgactctttgtgtgatgtatgtctctgcactacatggatgcagtatcaacagaggccagaggagggttttggaccccttgagataggatttacagacagttatgggttgccttgtggatgctgggaattgaatagggatcctatgaccaagcagccagtgttcttaagtgctgagccatccctcttgccccaaaataaagtaattttttttttaaattaagaatggactctgggaggccgggcagtggtagcgcatgcctttaatcccagcacctaggaggcagaggcaggcggatttctgagttcaaggactggtctacaaagtgagttccaggacagccagagctatacagagaaaccctgtcttagaaaaccaaaaaaaaaaaaaaaaaaaaaaaaaaaaaaaagatggactctgacactgactgctcttccagaagtcctgagttcaaatcccagcaactacatggtggtggttcacaaccatctgtaatgagagcagatgccctctcctggtgtgtctgaagtcagctacagtgtactcatatacctaaattaaataaataattaaaaaaaaaaaaagaggactcaaatggcagctcaaagacaattttattagaatttaacagaaaaacttcagggcaggccaactataaacttcactggctgcccagaggccaggagtagaggcaagaaggagagagccaagcttggaagctggcatagaagtcaagcacttgat
